United States Patent Application Publication US 2011/0183924 A1 - sequence listing, part 74

SEQ ID NO: 265770 - DNA, 618 bp, Homo sapiens
gggggaagagatgccacttcagtgttgaatggaatgattgaactccccccacgttcttttcagtcttccacactgcacactccacagacgaacacttctgggtgaaatatgattttatagccagggggttgcatctagatgtgagtgatgttacagtgaagctccagagatagcttagttctgaagtttttgcagaatttgaaaatgagactattttaaaagaaatgcagttttataactcagatcaatgaaataggctctcagtactgtttttttcccgtgggaactctgctttatttgtcattagggtgtccattgtcagtaaagcagtagccttgctaagtacctggaggtcctcaaaataattttttctttaagtaatgtaaatcttgtttctgtaaagcagtctggtttttttttttttttttagaaagttagcttggccaaccctttccccctagttttggaaagatggagcgtagccctgactacctggatgctcagaggcagttcatgttgagaattaacacactacatgattggctctcaggaggaaggtccttacggtctattagtactttaaagaatatacagtagaggccaggtgcagtggctcac

SEQ ID NO: 265771 - DNA, 1130 bp, Homo sapiens
cagctcaattttctatatcctctgtagtcggaattctcaaccattaagacctgaaatcttactgatgttactgataactaccacaatcctcttcaaaggcccatttaactttattaaaaaaaatttaaagtggtcttaaaatttttcggtaaaattctttgtagggttaaagtaagttaaattatttgtaaggttactaagttacttgtaggttatgtaaccatcccccaatgtagctcaaactcatcagttccagttgattgaaactaggcagtctctgaacagacaaaagaactaattctgatctacctttcacacaaaaaagataaagaaattggttttcaccctgcttaaactaatgaaatagcaccgtttacataaagaaaataaataatacatccaagtcactcttcatattttcattctcattttgaaaacttcactttggggcaataactggagacagcaaaatgtaatcaaataaggaggaaattctcctctcattcttctttaaaatacccaagttgttatgacattgttaactttcacttttagtaagattcacttttataaaacttgatgtagattaatttctataaaacactcttggtcttttcacttcccaactcttccccaacttcaattatacaatcagaaaaagttgcttgttgaaaagttttgaaaggaagaggtaaaacagtagctactcctgtgatgggctggatctgggtttgccagcagtactaaaatgcctgtggaaaggtatagcgcttccattcagcagctgcttcccttctcccctcttggctctccaagaacatggtgcttaactgttctttccatctcgggtccaataattgcaacattttgatagactagtctaattccatgtttgtaaaaccaaataaaacctatctaaaagataatacactaagtgggtaacaatgattatttctaagaggtgcagcaagcaaatggtactgagaagtagtcatttaagatttgttctgtatttttgcatctgttcaacaagcatgtattgcttttgtaatataaaaatattaatatttacttaaagattgtcagagaaaaataaatgaattaaagaaaaaaattcctaagaataaaag

SEQ ID NO: 265772 - DNA, 174 bp, Homo sapiens
ttttttaatttgtctgttttaatagctttaagagaagtaatttttcgaatagggtggaggagagttaggagttaactttgtaagagtggtagagataagtttttgtataaaattttgaaggcagggaataacataatagcttataagtatattaataagagcgaacaaggtgag

SEQ ID NO: 265773 - DNA, 151 bp, Homo sapiens
cctccacacctcttgccctgagccccaccgctgtcctggtctgcacacccctcaacccgactgcacatccccaggcacctcccgctccacctgcccacgccggatcctcccctgcgatcacttcctctgtgcaagggggaattacagagct

SEQ ID NO: 265774 - DNA, 370 bp, Homo sapiens
taaaagcaaggatgttttggagaatgaaggggaggatgggcattggagagtggtcagaaataaacacacctttaggcaagtgttagtgaaatgctgttttctaaggagtcagcaatcaaacctatgtgtcggggtcacttaggtctgtttcaagggatgttcttttttggttcactagatatttactgaacaaaatcattgcctctttctgtaatgaagccacacaggtatctcaacagtagtctgtacttgactaagagtcatggctttgactgatacaatcaacaaaaggccatttatttatttttgagattgagtcttgctctgtcacccaggcaggagtgcagtggcgtgatctcagctaactgca

SEQ ID NO: 265775 - DNA, 351 bp, Homo sapiens
agagaggggaggacatgaagaagggctgtcagatttctgaaaatctacaggcgggaaataggcatacatggctattcggtcacaagcacatgttatccttccagaaaagaaaaggatgactccaaagatggttcagagtctggggtgggaggggttgctaatgcattcaaaggcctggagaatacagactcaaaggataggaccatatcttcctaaattccaaggggccaggttacttcctatggctgagtagccctagtgggcccagaacatgaggctaccacctggttgggcatggagaacagaacatcaggcccaagagggttgttctagaacaaaaaaccaaacacc

SEQ ID NO: 265776 - DNA, 267 bp, Homo sapiens
ataatggtgaaaataggcagagtgcatgaacgcatcagagggagtattgtcatcagagggatttgtcattctcaagagtggtcagggaaggctatccgccaagccattggttgagcagaaacctgaagaaggtgagggaatgtggaggaaagagcattccaggcatgtgcaaaggtcctgaggtagaaatttggctgctatgcttctgggagggcaaggaggcaggtccagccagggaagagtggcaggaggtatatccagaggggt

SEQ ID NO: 265777 - DNA, 516 bp, Homo sapiens
atattattctttatcaaaatttaaaatgattgctctataaataggaaactattaagaggatgaaaaggcaaactatagactctgagaacattttgcaaatagcatacctgacaaagaatttgtatccagaacatataatgaactctcaaaactcagcaataagactacgatttaaaaataattttaaaaatcaatagtaagaagatttaaaaattggcaaaatatttgaacagatacatcaccaaagaagatatatggatgtcaaataagcatatgcaaagatgctgaatagcattagccattaggaaaatgaaaattaacaccacaatggcataactattagaattaatggcactttggaaaattgacaataccaacttatgtcaaaaatacagaccaagaggagccctcacactttgctcttaaggatgccaaatggtgcagtccttctggaaaacgcttttgcagtgtctttgaagctaaccttactgtatgatccaacagttccactcctga

SEQ ID NO: 265778 - DNA, 284 bp, Homo sapiens
tcccggtcaggggtcctccagtgcgtgatttcttggttctctcaggacatcaatgatcatcctttggataggtagcgaagtcacattttgctgttaagtggttgtttttctattctttgcccctttccgcagcagcaggtggggcctcgtctatgcactgcgctcaggtgcagatggtatcgagataattgcttgaattcttgtgcagacttttgtaattctgcagtagagacaaaagtcttggaatccgtgctatcaatgtaagaatgttggaatgctgtttt

SEQ ID NO: 265779 - DNA, 400 bp, Homo sapiens
acatgggactactccagtccctttcccaggccagcatgggtgtgctgtctgctatgctgccagaactccctttgtctcaacttccatccagcccactttcctggaaggccaaactgcagtcctttcagccacatcaagacggatctggctgacaactggcctgctgcttggctgaccaactgctgctgttctgttcaccttgggtgcaagttctctgagctccacttcacccgttccctcagctcttgcccccatttcaccatcctggggaaagtttccatgatgtttcactggtgctgccctctgcttccagggtccagtgaagctggaggcccaagtcccctactaaccagcccgcaggcaagctgcctaacctctctgacagggtttcacctacaaa

SEQ ID NO: 265780 - DNA, 437 bp, Homo sapiens
aacacacacaacagacataaacacaaacacacacacaaagacacacacagacacaaacacacatacacatgcacagacacaacacacacatacacaaacacatacatacacacagacacacacatgcacgcagacacaagacataacacacacagacacacacacatgctgctgcctgctgaacaaaaggcatgcctgctttggggcagaggctatcagtgcatcacaacaagcacattagatgggccacctgggctctggcactggccctggcatctccgggaggagtggcggagcatcccgactcaggtgtttgagagcccctgctggggtgagcagggctgctgggtgaccttgaaggccccttctgaccttgccagtctacctagagctgatgcacccaccagctccccttctgtgcctgtgtccacgtttct

SEQ ID NO: 265781 - DNA, 106 bp, Homo sapiens
aaattcatcacttcaataaaatagttatgttaaaggaagcctaaaactttcctattagaagagttggtttttaagtgaaaagtctactcctttcaattaaaaaaaa

SEQ ID NO: 265782 - DNA, 248 bp, Homo sapiens
gccagaggagaggagaggcgcggggctagagtgggagtgtggccaggggagaggcgcagggctggagagggagtgtggccagaggagagaagcagggctggagagggagtgtggccagaggagagaagcagggctggagagggagtgtggccaggagagaagcagggctggagagggagtgtggccagacgagagaagcagggctggagagggagtgtggccagaggagaagagaggcgtggggctgg

SEQ ID NO: 265783 - DNA, 257 bp, Homo sapiens
catctttgtaattcaaactctactgcagtcaagtttaatgaagtgactcttatttaagtccctattacatgatccatgtaggaaatttctgttaggatttggtactagcattaactgtgtcttctttgagaagcatcacctgtcttttccttttatagaataatactagataacatccttagacatctcccatgtgccaggcactatgcccaacacttcacctacattttctcagggtgttcttacaatgtctcttt

SEQ ID NO: 265784 - DNA, 456 bp, Homo sapiens
cagcttttatggtggtaaatttaaggatttggagtataggaataggccataccctgcaagagagagctatcagaagctgttctgtgttttttccaaaaagcagatgtgttatgtaaaatgaaatagaatctgttgctttgctttagctcacttacctgctcagtttctgctgaggtgcatttcctggcagtcttgcttacaggctcaagcagagtgggggtgtttgatgattggcattacgtaaatgattagagggaaattaaatatgagaatttggcctgaggcgaagaggtatcttcttatcaactatgtccacacaaacccatggacaggattagctggtgtctctgtgatgcatgtctgaacattcctgtcttacggtactcaaattcttaatagagtcatttcaacaataggcattttcaaggacatcggtgtgctttctcatatatcctg

SEQ ID NO: 265785 - DNA, 448 bp, Homo sapiens
cctcgaatccatcctttcttaattgctgctgctttgttatcagtaatgagttggtggttgccaaagccttttgccccaggagtgagaaaaagggtttaaaaaataagcatcccagaaaagatgcaatacttctcaaactttggggtactaaaaaaaccaacacaggagcatgtttcactgcagattcctaggccgtacatccaaaggttctattaggttctataataattcagagggactgacgtgggtgggacccaggaatatgcattttaaataaataaactcaagttattcaagatgtagagggcctgtgggtctgtggatcactcctagagactagtttaaatgtacatccagaagtgaaggactcattttgagattcccttggaatggcagaaacattggtagctgagcagatagaagtatttcagtattccacatgcctcgg

SEQ ID NO: 265786 - DNA, 379 bp, Homo sapiens
gaatatttatgtaagacgtgaatacatgggagattataaggagcctgtttggaaattctatactaaggaaattaaatgagttataaaagcaatgcaggccgggcgcagtggctcacacctgtaatcccagcactttgggaggctgagacaggcggatcaactaaggtcaggagtttgagaccagcctggccaacatggtgaaaccccatctctactaaagatacaaaaattaatcaggcgtggtggtgcgtgcctgtaatccccgctactcgggaggctgaggcaggaaagttgcttaaacctgggaggcagaggttgcagagtgttgagatcacgccattgcactccaccctggacgacaagagtgaaactctgtctc

SEQ ID NO: 265787 - DNA, 290 bp, Homo sapiens
ttgaccattgtttttcttgtgcatagactatcctttcctttttttgtacatcttgtaatttttgttttattaaaactggaattttaaaaataatgcagtgtggcaactctactgcttgatttggctcaaaggtatattatttattttttaatataacaaaccaatatttgggttctctattctatagttttagcattttgaatgcaacaactgtcttattcaccatttaattctcagtactaccgtttctagtacacaatatgcacttaatgaatatgagggattgtatc

SEQ ID NO: 265788 - DNA, 215 bp, Homo sapiens
agaggagattcccacctcctgctcacatcaagcctcctcctcccagaatgagggggaagcaggcagcctcagctcctataggaaaggagtcacacggcttcttcctggatttcctgcttgtgacagctgaacttaagactgccacccccatgtcctctgcctgctgcagggagagggggggaggggcagcgctggggcctcctgtttaaaggttg

SEQ ID NO: 265789 - DNA, 294 bp, Homo sapiens
ccggctaattttttgtatttttagtagagacggggtttcaccgtattagccaggatggtctcgatctcctgacctcgtgatccacccgtcttggcctcccaaagtgctgggattacaggtgtgagccactgcacccggccttattatttgtttaccgaaactctgatttattttgggctttgcacctgttgattagagatgaagtctagtctgaattattttatgcttcagttcatgtttcctacctaagggagtttgggagggagacatgattagggatgtgaaggaagaaac

SEQ ID NO: 265790 - DNA, 399 bp, Homo sapiens
agtgactcagcctcagtgctcagtgatcacataggctgcctctcaatattggttcttgagaggctgcttactggggtcccttttccagggagagtggcaatgctgggagatcacctctgaggcctcatccaactttgagagcccacgagtgtattaaaatgagaagggagctcaagtccaagctctttgtcccaactcccaagacccttacttagcacccagccaaccctcaacatgcccctcgccttgcgctctggtgggcactggagggcacttccgagctctgtaaccctgggcctctatgggcctcagcttcctcttctgtacaatgaggacgataaaagtttccacacttcacagggctgctgtgaggcttggaggaagcgtttggcagatggt

SEQ ID NO: 265791 - DNA, 730 bp, Homo sapiens
cccccagttatattttcttggttgagaaagacctgaaaaatttccagcctttttagtctattatattgttccacccttttcatacttaaccctttttagagcagtagtctttaaaatatggtcaacagacccctgtggatcaccaagacccttttagggggttatatgggtccaaaaggtcaaatgattttgatactactacttaggcttttttgtccttacttgctatattgacgcacgtcttgatgatataaaagcataggtgggtgaaaaccagtagcacctaatcattaattaaggcaaactgtactagtaatcattgtacagttttccattgaacaacataggtctgacctttgtgggtccatgtatacatgaattttcttccatacacagcaagaccaccaactccctaagttttgggagggtcaaaaattatatgcaggtttttgattgtgtgatgggttggtgcctgtaacacctgtgttattcaaaagtcaactgtatttttaatgccacacacccacagttaaaaaaaaaaatcagttttacctaatgtgcacattaaaagcagtaaaaaaaaaaaagaaaagaaaagaaaagaaaaattgattctggtgtggtagctcacacctgtaatcccaacacttttggaagctgaggtggttggattgcttgagcccaggagtttgagaccagcctgggcagcatggtgaaaccctgtctctac

SEQ ID NO: 265792 - DNA, 482 bp, Homo sapiens
tgtcaatttatagtacagttaaaaagtacttaaaagatacaagaggaaatggacagaaacatgctaatcagtcatttgaaattaacactttcatatcttgatacagtggattaaaaattgaacaaatatatatagagcaggaaatgcagagtgaatagtgtttattatgtgtatatttgagtgtgtgtagagagattctacatcagtgtgtgcatcttttcaagtacttacaagatgtacagaaattggccatattagttaaaaatgaaaaataaattttaatgtacggaaactactcagtgcatgttctctactacaaaacattaaataaaaaataataaaatttgcacaaatggccgggtgcagtggctcacacctctaatggcagtgctttgggagactgaggtgggagaattacttgaggccagggttccagagcagcctgggcaacataatgagatctcgtctctacaaaaaggaaa

SEQ ID NO: 265793 - DNA, 454 bp, Homo sapiens
gcctttcccagctgtaagaaacctgtctttcagcatgataaacacatttacttatttgctcagtcctctaatatgcagaaagtagttttagaattgccaaaaccatacaacttggaaaaacaagcatgattacttcaagatgtgtttgtagctccttctgtcctggcattggacgtggagagaaagcacagactgttccaagtttcatttttccccttctctgaaacgcagagagcgttgtttgtttctgtttgtatttcatttgggtcctccctctagccttattcataaatttgtaaatgatctttaacaatctgttatatttatgatgttttactgcgtgctgcctgtgaaaatgtttccttcttctgacacgttccagaacaactaggcttttaaattccaaatattcctgtttcacaataaaccagatgagggcctctgttgtgccaca

SEQ ID NO: 265794 - DNA, 128 bp, Homo sapiens
cgactatcttgattccacttcctcttctcactgctgcaccagctttgtacatggtccccggccaagctgagatacccaaagtctggtccacgttgtttttctccactgcatcatttctcactcaccca

SEQ ID NO: 265795 - DNA, 398 bp, Homo sapiens
actgtttgagcctctggtcgagccccttggctcagtggggggcccagtgacctaccagctgttccattatatgttgtggacacctccacggcccacctgggtgggagggaaggggcttcaggaggtgggaggggtacagggaacacagtccagcctgcttgggcccaataccttgaccttcaaggtaccccttgagggtagcatgaggctaagctcttgttctcctccaggactctgttcctgtgagggcctcggggtcccttgctttcttctgggggccttgctggtcaggatcacagagaagctctttgctgttgatctttctgcctctgtatcttttggcaagccattttatgactcagttgctttgtctgtaaaatgggttgaataacattgtc

SEQ ID NO: 265796 - DNA, 589 bp, Homo sapiens
  misc_feature (589)..(589): n is a, c, g, or t
ctccagcctgggtgacagagcgagactccatctcagacaaacaaacaaaaaaagaatcagagttattaatttgctgccagtaagcacaccacatcaattttcctctcgagagacgcaggtattcatatttagagctcctgatgtgggcctgtcagcactgcctgagacttggcagaaactgtcaataatgtaaaggattcacctatctaagagaactccacgatctcaataaaaatatcagattgcatcaataaaatccatcatctggccaggtgtggaggctcaaacctgtaatcccagcacttgcggaagctgaggcgggcagatcacctgaggtcaggagttcaagaccagcctggccaacatggtgaaaccctgtctctactaaaaatataaaatttagctgggcgtagtggtgcatgcctgtaatcccaactactcaggaggctgaagcaggagaatcgcttgaacccaggaggcgtaggttgcagtgagccaagatcgcgccactacacgccagcctgagcaacagagcgagactccatctcaaaaaaatatagggagtcggattactccttgcccgcgtttn

SEQ ID NO: 265797 - DNA, 439 bp, Homo sapiens
tcgtcttttcaaataccactctgcttttatgcctggaagaatatgtctttaaatcatggattctatagtctgtagtagacataactgtgatcagagataaaattctaggcccatttctgaggtttacttgttagcagaataaacttgggttctgaggaaacatctgagttttgatcatttcttcagggtttgagaagactatggtggcttaatgatcttctgtattccataactagtacacctagttacagaattgacatagatacattcaggtcctggaggaaatttgtggtatctattaaaaaaatgaaaattgccagtcatgtagtagtcacctgtagtccctgctactcaggagtgtgaggtgagaggatcacttgagcccaggagttcaaggccagcctaggcaatatagcagaacatggtctcaaaaaaataa

SEQ ID NO: 265798 - DNA, 476 bp, Homo sapiens
tggataaccaaaaacactgaattcttggagctcatacgttcttctttggtacgtccgagtatacttctagcagttgagctgtatgtgtagtcactaagagtcaggtatgactgtagcaaaacctatttatgccagtttacctgctataattatttccaacgaaataattacaaaaagaatactgtttctatgaaaccaaattttaccactttgaaaagattcaataaagataagctgataaaaaaatttctaaagaagtgaatgtgggcaaaaataatcataaaaattagtgaaaaaatctttaaaaatgaatagaagtctgactgcttcacaggatctttaagttcttaaagacactgaaaatgtaactaaagataatgtgttatgggtatggtttagaccagaaaaattacatgctattcaacaaccaaatttctcactgaaagaaaagagcttggccttaaataaaaaaaaaa

SEQ ID NO: 265799 - DNA, 455 bp, Homo sapiens
tagactggcttagtcttccagcctcatctttttctcgtgcttcctgccctcggacatcggacttcaagttctcttggactttcaaccacagactgaaggctgcacagttggcctccctacttttgaggttttgggatgcagacatccctttgggatgaggcttcctggatcctcagtttgcagatggcctattgtgggacctcaccttgtgatcgtgtgagtcaatactccttaataaactcccctttatatatacatctatcctattagttctgtccttctagagaaccctgactaatacagacatgaaatcaaaatttactagaagaattggccatcaaacaaattgcacttttttgtattgtttcctctatctttggtgcctcggatacgcttgctggacaaacagttttaaagaagaatgctttgatgctgggtttcaaattaggacccct

SEQ ID NO: 265800 - DNA, 499 bp, Homo sapiens
aaattagtcatataaacagcataactatagggatatttaaactgtttaccaaaagaagctgcttttaaagcctgctgaagtacttatttattactaataatgtctaatattattgacacttataatgttgctggcactcttcattgtcttatttaatttccatagcaactctaagagctaggtattatcactcccatttttgaaataaagaaattgaggccaggcgcagtggctcatgcctgtaatcccagcactttgggaggccgaggtgggtggatcacgaggtcgagagatcgagatcaccctgaccaacatggtgaaaccccatctctactaaaaatacaaaaaaagccaggcatggtggcaggcacctgtaatcccagctacttgggaggctgaggcaggagaatcacttgaacccaggaggcggaagttgcagtgagccaagatcgtggcattgcactccagcctgggcaaaaagagtgaaactgtgtctcaa

SEQ ID NO: 265801 - DNA, 328 bp, Homo sapiens
tagggaacatttttgtccattgtcttcatgcacctccataagagtttcctcagaccaaatctgtagagatggtgatgctgtgtcaaaggatataaatatttgaaacttaatagtattaccaaatttgcatattcagtaagatggaaaaaggagaactgtcatctttaaagtaactgctcttctctgtttacttctcttgagagaggataaagagactcagacagtactttcttataaaggaagaagctttgaatttggtgagatatatttagctacaaatgagccagttgttgggggcaagtggagggctggcctctgtgaaaatggt

SEQ ID NO: 265802 - DNA, 522 bp, Homo sapiens
agagcaggaccagtcaaaagtgtagtttgtcaaccagctctttgttttctaagcgctgcacttcagctgacctgtttttcacagcaagactctcattgaaagaagcagtgtgctgatttttccccgtggcacaagctccttaccacatcttggagcagcatttttttgagaccgagttttactctgtcacccaggctggagtgcagtagcgcgatcttggctcactgcaacttccgctagagttcaagcaaatttctcgtgcctcagcttcccgagtagctgggattataggcgtgcgctaccacacctgactatttttttttatttttagtagatacggggtttcactatcttggccaggctggtctccaactcctggcctcaagtgatctgcccgccttagcctcccaaagtcctgggattacaggtgtcagccactacgtctggccttggagcagcaatatgagtactactcttccagaagccagttgggccgcattattgaatacctagttcatagat

SEQ ID NO: 265803 - DNA, 409 bp, Homo sapiens
atcaggctcaaactccgagctcttagcctgcatcccagctgtgcttgacagcacattcgcaagctggctcagaccccactttaggctctgaattccatgctaccaggctctcgcttaccatgcgatgcccttcctcagagacagtggtaagccagagtccaacccaatgaagacaaagtccaaatgggtaaaaacctgaaggattatgctgtcctgtagcagcagtcacacctactacagctgagaactactatagttgagtaactttgggatgtggagtaggcccagggcagcctccagctttgtgtaccttgtttgtagctggttggtgttagctgttttcatggaaaaggtcatcatttagatccacggttgtactggcttctagtttgagctaaataaagcaaga

SEQ ID NO: 265804 - DNA, 287 bp, Homo sapiens
tgttcactgtccccagcacccagaacacagcccggcgtataatacgcctctttcttttctagccactcaacttaaaacactgctgcagaaggagctgctaaacgtcacccccgatttcccttgttggggaggaaacatcattttgcaatgatgcaatgacttattcaaagacctgtttcctatgagatgacaggacaaaaaccacattgccgagaactccatcaccagatttcagtggaactatttcattaatcttgtatgcagcaaaatgttggcaggtacacaag

SEQ ID NO: 265805 - DNA, 211 bp, Homo sapiens
aaaaagcttagaaaaatgatgaaggtgaccgttaacttgctgaaagtttgtacaggaaacatttgtgtttcatccctgcaagtggaaatggagggatatgggcatgagagattggatttttggtgattgttctcaaaacccagtatttaccttaattactgcataccacttgcttggtgcacccatcttcttaactgtccaatcctatgcc

SEQ ID NO: 265806 - DNA, 451 bp, Homo sapiens
atttgtttgaatcaaagtgtttctggctaaggatcatttggctcttccagaaaaccggcttggtcaccatattgttcttttgatattgtcactctgagtctctgctttaccagttactggatcaaggataaacaagtctaatctgcagctgtctttgggactgtttcgtaagtcagattaagtaaaggcaggtttctaataactttaaaacaagttcatttataaggatactgagcctacttatgtttaaaaatctagactaaaatattgtttaaatacagtatttacaaacttatgcagagcctgtcagtcatggtttatgggaactgacatcacattttcttcgtcattcttctgttggttcattcagctgaagtctttgatactactagtcttcttctgccaatgggggcacttaagttgaagaaggcctgacatttatgaactgcca

SEQ ID NO: 265807 - DNA, 357 bp, Homo sapiens
cgggggcctgctgctgccctttgctccctctcccatccccactgccacagccttggcaccctcctgctcccagtcaccacagtgccaccccccaccctgatggaatagcctctgggcacagggctctggattactctagttctgtgctgccaacacgggaaaccagccacacaggatgtgtcccaatggagctgtgctgtgggtgtgaatacatacgacgtcaagggtttggcaggaaaaagaacagaaagtacctggctgttcatttatggattgatcacatgttgacatgataatactttcaatatagtgattagtaaaatattgtaggaaaataaatttcaccagcttcttttt

SEQ ID NO: 265808 - DNA, 503 bp, Homo sapiens
ttttttttttttagacaaggtctcattctgtagtcccaggtactcagaggttgagatgggaggatctcttgagcccagaaaatttaactggagtctgcagtgagtcgtgtttgcgccactccattccagcctaagtgacagagtgagatcatctcaaaaaaataaaaatataataaattttctgagaaccaattttgccttgttgaaatgtttaaatgctgatactgttcttaggataattacctcagaacctgtatcttttaatacatcatcaaacatactaattagattaactacttgccaggtactgaatatattaagttaaacttaagggcctagtttgttttgcagcatgaatgaaatgaattgcctaaaattccttcattaaatgacaagatatttacttaaaagcagggctaatatgattgttgaggtaaattactatatctgttgaaagaggagaattctgaatcttttgcagagcacccttctgtcgtcttctc

SEQ ID NO: 265809 - DNA, 229 bp, Homo sapiens
caaggggtagatgggccccggtggcaggaagggggatttctgagctgcatgtctttgctgagggtgagtttgggcagaggtcatctaaggatggggccagccgaggggcccccaggaacacccagccccacaggccagcagtacacggtagggttggagtggtggtggccgcaggagatgagtgtgaccgggaaccagggccactcccagagttaccatgtgacaggac

SEQ ID NO: 265810 - DNA, 451 bp, Homo sapiens
ccgtctgtggcctgggggttggggactctttttctatagctttgagtattattagtactttttttttgggtggggggaagtaattcagtagtttaaaagggcattttattttaaatttatatttatttcaatatgtataaagttaaatagactgaggcatttgtgttaaattttaaaaatgagaaacatttagagcttttttaactagggagtagcttttatattacccatctgaactgaacttgaaggaatatcctggtggcctaaagctaattccaacacctgtactctgcagatacacttcctccttccttctcagagaccccatccagtggaatatgtcacttaccttttatcttccaactgtctctaaactggcttcttcccaaagcatttaaatatactcaaatccaccccatcttaaaaaaaattatccacttcactgctcccc

SEQ ID NO: 265811 - DNA, 654 bp, Homo sapiens
agtctcttcacaaatacactgttcccaatatgcaaatgtgatcatttgaagagtggaaaaggtggaagtggagtaagtccaattttcccaaagaaacgctggtcactggcgtggcagctccgccctagccaggccaacgtgaaaggagaggggttgcacaaaagtacccgctttcgccatggctggaaagcagggctcacagtttccgctctccctttccaaggcatcaaattccttttaccgtagagtcttcaccctagagggaaggagcagtcagatgaacctgctttgaagcccagccgtctgccatgcccaggtggatccgatgaggtctgagaggcagtccctgcagtgccacagcctgggctgtcgctgcagcaggccacacgggagcaagatgcccaaggggaggccaggctgggtggctgttccaaagtaccccaactcaacacatataaaaccagccccacctgggactgctgtcctcgtggaagtcctcatgaccgcataagctgtccaagccagaaacctggaaattgctctagagctgcactaacgtgatagccactagccacttgtggctatttcgatttaaatgaggtttaaaattcagtcccacagtctcactggtcaccttaaaatgctcgacagcca

SEQ ID NO: 265812 - DNA, 286 bp, Homo sapiens
ctgttgcttgaaacttggcatgtatcctgcctttggttgttcctttaatcctgccaacttctcccttaatagacccttaggtaaagtttttatcagttaatcctttgaatgtgccatctatctgctcagacactgactgaaacccattcttattcctattctgataattagatggtgttttaaggctgagtagctgggatagttttttgctgaaaactgtggcctttttacttatgcaaacttgtgtttaattgagagcaaaacctaaaagatagttaatggtaaa

SEQ ID NO: 265813 - DNA, 2627 bp, Homo sapiens
ttccattggaaactgattgggcagatttgaaaattaagctttcacaatcacaatttttatgagagttcattcagttttggagaagtcgaggaaagaattgggaattgaaattttgatgtggcctgataggatcaggtggggcttttgataggaagtgagtgttttgggttgtttcttgactggattatgatgcggaatacagcgggtagagggccgattaagttttagtcattagtgtagcttttcagtatacacgccttttcattttcagtccctttcagaagaaaagaccacaggcatcagaaatcaatcaacttgctaatttatgccagattccactggagatctgccttcccaagactttactgactggtgaagaacaggaaatgaacaattcccagggaagagtgaccttcgaggatgtcactgtgaacttcacccagggggagtggcagcggctgaatcccgaacagagaaacttgtacagggatgtgatgctggagaattacagcaaccttgtctctgtgggacaaggggaaaccaccaaacccgatgtgatcttgaggttggaacaaggaaaggagccatggttggaggaagaggaagtgctgggaagtggccgtgcagaaaaaaatggggacattggagggcagatttggaagccaaaggatgtgaaagagagtctcgcaagagaagtcccatcaatcaataaggaaacgctgactacgcagaaaggtgtagaatgtgacggatctaagaaaatacttccactgggcatagatgatgtatcttccttgcaacactatgtacaaaataattctcacgatgataatggatacagaaaattagttggcaataatccatccaaatttgtaggacaacaactgaaatgtaatgcctgtagaaagttattcagttcaaagtcacgccttcaaagtcacctgaggaggcatgcctgtcaaaaaccctttgaatgtcatagctgtggaagagcattcggggagaagtggaagcttgataaacatcagaaaactcacgcagaggaaaggccctataaatgtgagaactgtggaaatgcctacaagcagaagtcaaatctctttcaacatcagaaaatgcatactaaagagaaaccctatcagtgtaagacatgtggaaaagccttttcctggaaatcatcctgcattaatcatgagaaaattcataatgccaagaaatcctatcagtgtaatgaatgtgagaaatccttcaggcagaactcaaccctcattcaacataaaaaagttcacactggacaaaaaccctttcaatgtacggactgtggaaaggctttcatttacaagtcagatcttgtgaaacaccagagaatacacacgggagagaaaccctataaatgtagcatatgtgagaaggccttttcccagaaatccaatgtcatcgatcatgagaaaattcacactgggaagagagcttatgagtgtgatctatgtggaaatacctttatccagaagaaaaacctcattcaacataaaaaaatccatactggggaaaagccctatgaatgtaacagatgtggaaaagccttctttcagaagtcaaaccttcatagccatcagaaaactcatagcggagagaggacctatagatgtagtgaatgtggaaaaaccttcatccggaaattaaaccttagtttgcataaaaaaacccatactggacaaaaaccttatggatgttctgaatgcggtaaagccttcgctgacaggtcataccttgttaggcaccagaaaagaattcactccagataggagccccatgcacttaaaaaaacatgggaagatatggttgcctggaattgtcaccccagaattccatgttgaaatggcctctaatttggaggctatttttgaaggtagcgaggacttattatcacagtatcctttgaaaacccattcggcatactcactcagcaaatgtttattaagtataaatatttattagatgccttttgtgtaccaggaactcttaaacactgaagatgtagcaataaaccaaatgtgctaaaaccctgatggagttttattccagtgaataatgaccagtggtatccatatctttaaaaacgtttaaaagactatacttttggccaggcgtggtggctcaaatgcctgtaatcccagtactttgggaggctgaggtgggcgcatcacctgaggtcaggagttcgagaccagcatgaccaacatggtgaaaccctgtctctaccaaaaatacaaaaattagccaggcatagttgtgggcacctgtaatcccagctacccgggaggctgaggcaggagaattgcttgaacctgggaggtagaggttgcagtgagccaatattgcaccattgcactcctgcctgggcaacaagagcaaaatttcatctcaaaaataagataaaataaaataaacaaataagacagcactttatacttttagggatgatttctataattcatgagtggagaggtttctctagaggtgtaggggactggaaaccacatccaggaagtacagctttctctcctgagcatgaaggtatcttggcatttcttcactgcaattgccatttgccttttttgtttttc

SEQ ID NO: 265814 - DNA, 189 bp, Homo sapiens
caaaaggaaactaaacaaaagggcttcaggcaggggatatgcttgtgctctgccttctcactttgacaattatgcaggaaggttgcaatgaccttggcttgccttgcttaggaacaaaagtcataatcttctaccccctactcccacaaaaaggaaaaacgttttcatatctgattccaggagtttggg

SEQ ID NO: 265815 - DNA, 600 bp, Homo sapiens
aggacccccgaggaagaattcagcgtcggagacaagctcttcaggcagcagagcgttcctgctgcctccagctacgactctcccatgccaccctcgatggaagacagggcgcccctgcccccggttcccgcggagaagtttgcctgcttgtcgccagggtactactccccagactatggcctcccgtcgcccaaagtcgacgctttgcactgcccaccggctgccgttgtcactgtcaccccgtctccagagggcgtcttctcaagtttacaagcaaaaccttccccttcccccagagccgagctgctggttccttccctcgaaggggcccttcccccggacctggacacctccgaggaccagcaggcgacggccgccatcatccccccggagcccagctacctggagccgctggacgagggtcccttcagcgccgtcatcaccgaggagcccgttgagtgggcccacccctccgagcaggcgcttgcctctagcctgatcgggggcacctctgaaaaccctgtgagctggcctgtgggctcggacctcctgctgaagtctccacagagattccccgagtccccaaagcgtttctgcccc

SEQ ID NO: 265816 - DNA, 263 bp, Homo sapiens
  misc_feature (148)..(148): n is a, c, g, or t
aagtttacaggcaagatcctactcacagaggctcttgggatcaaggctgacagaagctccatctgaagacttttatactatagaggcagaaaaagagtgatgaatcaagcactggcttctaaagcttccgcccagatgggaagcatanctcctctgctcacatttccctgaccaaagccagtcacatggccatcctcagcttcagagaggttgggaaggcattcccactatgtgtctggatgccagcaactcagaaatatttg

SEQ ID NO: 265817 - DNA, 415 bp, Homo sapiens
cgcccctccagcaaatacataaaccagtaatagtcatttattattattatatactgtatgttattgtgtgtgctatacttttacatgactggcaatgccgcaggtttgtttatatcggcatcaacacaaacaggtgagtatcacattgcactatgatgccttgcctactagacaataggaatttttcagctccattgtaatcttaggagcccaccattgtatatgcggtctgttgttgactaaaagattgttatgcagtacatgaatgtatattaaaacatcacgttatataccttaattatatacaagttttatttgtcaatcatacctcaataaagctgaaaaataaaaagaaatgagttttttcttaaaatcattatcaaaagaaaattaaaagctgtactgagctaaatac

SEQ ID NO: 265818 - DNA, 1166 bp, Homo sapiens
ggcaatgtctgggtcccccttcctcaaggctgggcaagcggccctgcccctgtgagaggtgctgcccctgctactcagccctgccctgcggacgcagtctgctgcgggggtttcttggcaaattagccaacacatcagggtctcgagtatgcaaataatggaagactgacatggaagtagtctatgttgtaaccatccttgcgacagagcccacctgacttgctgtgtccctggatccgcaatacattctaaatgctggagacagtagaggtcacatctcctaactacagtgtaatgacagtcaaaataaaaattcaggaataaattggaacaagaagactcgcttcctgggaacttaaaacagtcatctcatggataaaagagaaaaaccaaatcagcagtgacacaatatttagaaaagaacaaaaaagaaaaagttacatgctagagcttattagatgtagcttggactatactgagaaaataattccacagtttaaaaactgttaaaggaaattaagaaatcacttgaaatgaaagacaaacaaacccaaggaaagcagaagtaaggactacagataacagcagaaataatgaattcaaagatggaaacaagtgaattgataaatgaagcctgagagctgactctagaaaaatcgaatagataatctactaacttgttaaccaagaagaaatgtaagaaaacacaaattcccctcataagactagccttggataaaccagaatttacagagaacaattcttaccattctaagttaaaagagtttgaaaacgtagttgaagaaggtaatttttgaaaagtatgtattattaaaattaattgaagaagtgttaacatattgaaatgcaccaacatctgtagaaacatttgagaaagctgtaaaagaatcaacgcaacgaagtgtagcttgtgtgtgtgtgcatggtgtgtgagagtgtgtgcctatatgagcatgtgtgcatacatgtgcatatttatgggatgtgtgtgcatgctgtgtgtgtgtgcctgtgtgcatgtgtgcacatgcatatgtgtgtgtgatgtgtatcatgcatgatgtgtgtgtacgtggcaagtgtgtgttcctgtctgtgcacgcatgtgcatgtgtgcatggtgtgtgtgtgtgtatgtgtgtgtg

SEQ ID NO: 265819 - DNA, 281 bp, Homo sapiens
tgcactgcctactcagtgcctggaaaggaaaccccagctccagccctacctgccccgagctttcggtgcagaaggtggactctaggtggagatagatgggaatcagagcctggcagcgtggggtcacagcggagcaagcacaggcagccccggttacagaggggaggttccagccccaatctgggggctgaacagagaagcccactgagtgggggaacattggggtgctgggaggggttcacgtcccaggcagaggaaacagcatgtcagcaaaaatgcaa

SEQ ID NO: 265820 - DNA, 454 bp, Homo sapiens
ctgtgaattccaagcttagagctaatccaagttgtcaatgcatattctaaagtatctaagtagtcatagaagattgctgctaagaagtgctaaaggcaattggagggatctggacgaccactacccagcagaaatataatgtgagccacagaagtaaatgcaggcacacctcactctattgtgctttgtgttattgtgctttgcagatactgttttttaacaaagtaaagacttctggcagtcctgctcaagtctattgctgccattttgccaacaccatgtcctcattttgtgcctctatgtcacatttgggtaattctcacaatatttcaaacttttttattattattatatctgttttagtgatccatgatcagtgatatttgatgttactatcataattgttttggggtgctatgaactgtacccatagaatacagtgaacttcatcaat

SEQ ID NO: 265821 - DNA, 153 bp, Homo sapiens
ctggtggcctgggcacatgcagaggacagcacacccccatctcccgggctcacctgccagggcttcacggggtcctgcgcggggcagcctgaggcgttgcactgaagagtgttgtgcagggcctgggccacgctatacacagctgcgtagaca

SEQ ID NO: 265822 - DNA, 395 bp, Homo sapiens
ctttaatctaccaatatttactgagaatttctgagattggctagctgcttcccatttgccatgttcttgccctcctgggcacactgctggcttgcatagcccatgtgccttgaatctaggaagggaccatagagagctctctctccagtgcgttgtgagcagggcgatgggaggcacttgtgggccatggcagttgacaggtgtgctttctacatccactctcttttgtcccttatctgaggctgtgctggagggctctgacttcctgggtattgcaaagacttcggaaagaaggtctcttaagtgactgcacagagcagagcttccacctcccctaattccaatctgaggtttctctgttatctgagtttaaattggagcctaggagtcatttt

SEQ ID NO: 265823 - DNA, 468 bp, Homo sapiens
cacgagggtgattcataaggaaaagaggtttatttggcttgcaattctgcagactgtacaagaagcatggtgtcagcatctgtcgctggtgagaccctcaggaagcttctactcatgttggaaggcagtagggagctggcatggcttggcgagaggcaaggaaggagaggggaaggctcttttccataagcagttctccctatggcaccaagccatttatgagggacccacccccatgacccagtcacctcccaccgagcaccacctccaacattggggatcacattgcaacatgaggtttagaggggacaaatattcaaactgtatcactgggagatggggctaccggaagtcaagccattcccctcccatggcacccttttccacctgaagtaggataacttgcacacggacaagaaccaggtgtctctgctccctgatgcaaagtcagcaccgctcatggtacca

SEQ ID NO: 265824 - DNA, 394 bp, Homo sapiens
ttaaaaattcagagactgtgaccttgttattttgggtttaaatatacattttcctcttaaaaatgatagatatatgtttacaaattgtctttactcttcacttataaaacacacacatacagataggatagtcctgtcagtttaccctattttttgtttcaaatttataggtaatttcaaatttataggtgttggtgagatttatcacttttaagataccatctagccttgatatttgttgtaccttctatatgcaaccaaatggctcctgatctcctgatcttctggagatcaaagaatttttattcgccactctccccacccatcattggttggattgagactctaattacatacaagcataatttccaatgcaagtagaactttgatgctc

SEQ ID NO: 265825 - DNA, 816 bp, Homo sapiens
tttagtagagacggggtttcaccgtgttaggcaggctggtctcgaactcctgaccttgtgatctgcctgcctcggcctcccaaagtgctgggattacaggtgtgatcattaatcttttgctaacaagactttccaactttccactgtgcaaggaggcagcaaggggcttttgaggctgatgtgggtgcaggccacaggcatgagcgctctgctctgggtatgacagaatgaggtaccaccccgtaacagtccccccagagatccactggaacacctggcgtacgtaatccttcacaggcccattgtgtatggtgcagggagggacagtagacagagaggaggctcacgtggaaggcagagagtgaagtcacaggaggcagatctccctgcaccctctaccctggcactagacacggtcttcttggcacacacagcagggaaggtggggcccacatagaaaagaaatagagtcccgctgacctcagcaccaggaaagagaagtctagaaactggcaacacagaagagaatagaaagcgagccagtggccaggcacagtggctcacaactgtaatcccagccctttgggaggtcaaggcgggcggatcacctgaggtcaggagttcaagaccatcctggctaacatggtgagaaacctgtctctgctaaaaatacaaaaattagccgggcatggtggcgggtgcctatagtcccagctactcgggaggcttaggcaggagaatcacttggacccggaggtggaggctgcagtgagcagacattgcaccactgcactacagcctgggccacagagtgag

SEQ ID NO: 265826 - DNA, 396 bp, Homo sapiens
tttcaacagcatttaccaaaaactctcccaaatagagaatcttgagtagataaaattcctttccattagattgagtaaaaactccatctccttgcatcaaaaaaagaaaaataaatcctttccaaggagaaaaaaatatctcccattattcttcaacataaagtactcagaataatttactaaaataacattttttggagaatggatggtaattcatctcctcaatgtagtgtttgtctagtgttggtatgaaaataacttttctttctcttttttgtttctgagatggagtctcactctgttgcccaggctggagtacagttgcatgatcttggctcactgtaacctctgcctcctgggttcaaacaattctcctgcctcagcctcccaaggagc

SEQ ID NO: 265827 - DNA, 256 bp, Homo sapiens
tagaaaattagtactacccagcatgggaggaggtggttgggccaacctccagtggctgtgaggttgtgattttcagacatttttcaaagacgagtgtataaactggggcaccagcttcaataaagatgaaaacaagctctacacagtagctcacacctgtaattccagtgcttcagaggaggccaaggaagaaggatcacttgaggccaggagttcaagactagcctgggcagcatagaaagaccttgtctctaca

SEQ ID NO: 265828 - DNA, 682 bp, Homo sapiens
  misc_feature (682)..(682): n is a, c, g, or t
tgggattacaggtgtgagccaccgtgccccgccagttctttttatgttgttgcaaatgttcctctctccttttattgtactactgaggacattctttcctcatttgcttaattttttcccccataattcttcaagaatcttcgcttttctctgtttgggctaccattacgggagagttcttggttagtaactagggttaattattcattcattctacagatatttgttgagtaccttttaagttcaagataaagttctgaaattgacgaggctgcatgtctcaaagggcatgccatagaaatattaatcctatgagatgtgtcgcaaaaaaaaaaaaaaaaaaaaaaaaagaaacattgtgtggggccggctctgggcccttagaaaaaggttttctataaacccttctctgtggggcgcgcgggggccccaggtgtgtggtacccgtgtaacactgggtgcagtaagggtggtccctaaggaggaacccggcggcagagaaacagggtggcggggagttctctccccaattaaaaaaaagcgcccgggggggacaccgcgaggccgtctctctgaaaacaactcccaaaggggattcccgggagggaccacacagggggtcctaatcacacaggggagttcccaagggaaccgcaaataaattacccggcggggggggagn

SEQ ID NO: 265829 - DNA, 216 bp, Homo sapiens
ggggatggtggtatatctgtagtggtggctacttgggaggctgaggcaggaggattgcttgagcccaggagttggaggctgcagtgagctatgactgtgccactgcactctatcatgaatgacagatggagaccctgactccccacccttaaaaaaggtggatcttgtcctcaaagggacaaagactgtactactccttcctgtcctttccttcct

SEQ ID NO: 265830 - DNA, 294 bp, Homo sapiens
cctccttaggcaacctggtggtcccccgctcccgggaggtcaccatattgatgccgaacttagtgcggacacccgatcggcatagcgcactacagcccagaactcctgacctcaagtgatctgcccacctcagccccacaaagtactgggattacaggcgtgagtcactgcaggcagcctctgactcggttctgaaagtgggaacttacattgttgatctgagactattcttcttttctaatgtgtgcatttggcactgtaagtttccctctcaatccttctgtgtggcacaaa

SEQ ID NO: 265831 - DNA, 370 bp, Homo sapiens
agtctgtaatcagtttgagattatgctctggtgtgttctacagcagacagattgcaattttcactttagttttccagtaaaacggaagatgattgggcaagttaccctgcagtatacttgttagtggctttaaaaacggcattaacttttgttcatttggttgctacgaaactgaaaaaggctctgtgagactctgactttttcataccacattgtattttataagtatgtccccatttccagccccggaccccatgttcctccagagaagagtctgttcaggtattttatatctttatatccctagagcctagtgcaatgtctagatattttttcagaatgaagtaatagaaacacattttttaaagtt

SEQ ID NO: 265832 - DNA, 421 bp, Homo sapiens
ccttggggcatatttggaagacaggcaataaataattcacctttacaaaaactaaattatatagtgcattagaaaaggcagtaatggaaatgaaaaagtaaataagcaaagagaatcagttgagctatcataatcgtagaggtcagagtagacaatatcgaaaaaatgaaatgtgtcacagttggggaatatagccataggaattaatggtagaagagtattattctagacagaaggaacaactacaacaaagactctatgttatgtgtgttcctactgtgtttcagtagcaacaagcaggcaaatgtagcagagcagagtgaatagggaaaaatgttagaaaaggatatcagaagagtaagatcggaccaaataaggatgtcttggaggctatttagggacattgattctttatttggta

SEQ ID NO: 265833 - DNA, 536 bp, Homo sapiens
tgtttgctgtcttgaaagaagtgctctgagagaatacttatttatatttcaaaagctggattttaataacctactaaaacagaggcctgttgggatatggaatttaaaaaataaaaaagcttgaggtcaggaattcaagactagcctagccaaaatggggaaaccacatctctacgaaaaatacaaaaaaagtagctggaacttagggagcctgaggcaggagaatcgcttgagcccaggaggcagaggttgcagtgagctgaaatcatgctactgcactccagcctgggcaacagagcaagactctgtctcaaaaaaaaaaagggaaggagaatcttagaagagaaacagtggagatgtacaagaatgatggagaaatatggaagataatggaaaagtgcggaagggaacagaatttggagggagagccaagaattatgggaaaggacagactcatggggaaaaaatggtggaaaactgggacttacaagagaaaaagaattatgggaaagatagggtattgtgggagagaacag

SEQ ID NO: 265834 - DNA, 464 bp, Homo sapiens
atgcacaagggttccaatttctctatattcttgccaacatctgttagtttctgttttcttcctggtagccatcattatgggtgtggagtggtctcttggctccttcttgacaggggttctctttggaatccgtacctgccagccaggatccctgtctactggctgctccttggtcctgtggagctttgctcctgcactctgccaagctctgaggctggcctctgtttaggctgctgatagacacctgtcttcatgctaaggcctagctgactggctgagccaacctactcctccagggcctgcccaaccctgatgggtgcctgacgcaggcctggaacatcttgctgccttctcgtactcacagcttaggaagcaaaaagcaagccaggtgttcatacttctctgctggggacataacaaatggcatgacaaatactaaagcaataaatgaactgaaaaataaa

SEQ ID NO: 265835 - DNA, 465 bp, Homo sapiens
ctagcagtctctgctcctcctatggaaaacacaaggtccacctgaggccggttcccaggtgccttgaggcaggcactgcccttcctgtgcctcagtttcctctgtgatccctttttttttcttttgggatggtgtgttgctctgtcacccaggccggggtcgcgccattgcactccaggctggatgacagagcgagacttcgtctcaaaaaaaagaaaacaaaactagatgtttttaatcagcagggtctcataaggcatgcgaaattgcttaaggatttaacagatggtatctcaggttgctgttatttttgagaactcttttcgacagaagaaatccctaagaaccaggagatagtctgtgaacctgctttgaggttacaaaggaggtggtgtctgtcagtcacttgcaaagagctgataacttgagcaaacatgttaaataaagtcccattggactcctgtt

SEQ ID NO: 265836 - DNA, 587 bp, Homo sapiens
cttttggggtctttgctttggtccgatcagaagggatcacagaggaaagctggtggtggtggctcatgcctgtaatctcagcactttgggaggccaaggtgggcagatcacgaggtcaggagatcgagaccatcctggctaacacggtgaaacgccgtctctacttaaaatacaaaaaattagccgggcatggtggcacgcacctgtagtcacagttacttgggaggctgaggcaggagaatcacccgaaccagagaggcggaggttgcagtgagccaaaatcgcgccattgcactccaggctggatgacagagcgagacttcgtctcaaaaaaaagaaaacaaaactagatgtttttaatcagcagggtctcataaggcatgcgaaattgcttaaggatttaacagatggtatctcaggttgctgttatttttgagaactcttttcgacagaagaaatccctaagaaccaggagatagtctgtgaacctgctttgaggttacaaaggaggtggtgtctgtcagtcacttgcaaagagctgataacttgagcaaacatgttaaataaagtcccattggactcctgtt

SEQ ID NO: 265837 - DNA, 1221 bp, Homo sapiens
aaaatgaaaaaaatctattttttttggctttagttaaatgggctcccattctccctctctggttctatctagaggagtctcctaaagagcctggagtgcccgtcctctaaactccacctttacagccagagagagtggccagactcaggtgggaccagggagttccaggcccaagttccttccaccaatccatggcaaaggctacccactgggctgggagaacagtcctggagtgagtttagggtttagtatggtgtgattagtgagcaaataactcactcctgcacagtggccccaggaggagatgccactattggaggggagggcagaaagacaaagatggggcaggaaggggccagagagattctaaaaatctagatgttggctaggcatggtggctctcatctgtaatcctagcactttgggatgccaaggtgggcagatcacctgaagtcaggagttcgagaccagcctggccaatatggtgaaaccccatctctactaaaaacacaaaaattagccaggcgtggtggcacatgcctgtaatcccaactactaaggaggctgaggcaggagaatctcttgaacccaggtggtggaggttgaagtgagctgagattgccccactgcactccagactaggtgacagagagagactctatctcaaaaaacacaaaatttagccgggcttcgtggctcatgcctgtaatctcagcactttgggaggccaaggtgggcagatcacgaggtcaggagatcgagaccatcctggctaacacggtgaaacgccgtctctacttaaaatacaaaaaattagccgggcatggtggcacgcacctgtagtcacagttacttgggaggctgaggcaggagaatcacccgaaccagagaggcggaggttgcagtgagccaaaatcgcgccattgcactccaggctggatgacagagcgagacttcgtctcaaaaaaaagaaaacaaaactagatgtttttaatcagcagggtctcataaggcatgcgaaattgcttaaggatttaacagatggtatctcaggttgctgttatttttgagaactcttttcgacagaagaaatccctaagaaccaggagatagtctgtgaacctgctttgaggttacaaaggaggtggtgtctgtcagtcacttgcaaagagctgataacttgagcaaacatgttaaataaagtcccattggactcctgtt

SEQ ID NO: 265838 - DNA, 231 bp, Homo sapiens
cactttgggagtgctgaggcaggcagatagcttgagcccaggagttagagatcagcctggtgaaaccccatccctacaaaaaatacaaaaatattaactggatggtggcgtgtgcctgttgtcccagctactcaggaggattgcttgagtccaggagcagaggttataccgcactgtgatcgtgccacagtaatccagcctgggtaacagagcgagactgggtcaaaaaaa

SEQ ID NO: 265839 - DNA, 346 bp, Homo sapiens
gcttagaatttcatatttaaaattctaaataaattatcattcaaattgttatagtttgggggccaggtgtggtggctcatgcctataatcccagcactttgggagactaaggcgggcagatcacttgagctcaggagtttgagacgagcctggcaaacacggcaaaaccccatctcaaaatacaaaaattagctagatgtggtggtgcatgcccataatcctagctacttgggaggctgaggcacgagaattgcttgaacttgggaggcggaggttgcagtgagccaagatcgtgccattgcactccagcctgggcgacagagtgagactcggtctcatatatata

SEQ ID NO: 265840 - DNA, 456 bp, Homo sapiens
ccttccctttctattcctttcatgacaggttctcactctgtcacccagtggcacaggctggaaggcaatgatgtgatcacaactcactgaagccttgaactcctgaactcaagagatcctcccttcagcctcccgagtagccaggactacagacatggagctgaagaagctggcaacccagaaacatcaggggaaataaaccaaaaagccccaacaaatggctgctttctctagctaaggaccagaaaatgggcaacctatcaaggcgaagaactcttagacaataacctctctattcccaacaatgccatggataaaactgtgacctcccgacacaccaaccgacctcaagagaaaagactgagagaagtgcctagactcacttttcccaggcactagagtcaacaacaaattgttatttttacctttccaagacaattaaaaaaaactcaaaac

SEQ ID NO: 265841 - DNA, 417 bp, Homo sapiens
gggaactgggcaaccctctcctaggactggatttccgcacctttctggactgcaccctaagagggcctgcgtggattgtgcttaaagaacttggccaactctagctgtcatgggtcctttatggggctcccaggagagcgtgtctgttcctccactgctgctctaaaggttgctcagcttggacctcaggtggcaccagcttgtgggctggcctggaggtgggaggcccaaccaggcctctccgcaacccttctgcacaggctttggattctaccacccagtgttcctcccttcccactcaaaacctgatctgcagaccatatctcatcacagcttttctcatgaggatttactgctttcatcttagtccttgggaaagaagttctgcctctgtttagttgggaggaaggcattaag

SEQ ID NO: 265842 - DNA, 2356 bp, Homo sapiens
  misc_feature (1153)..(1153): n is a, c, g, or t
ttagaaggtgagattagcataagcagaggtttgagggaagagtgggagcaaggagtggaggacaggaaacaggaaggagactgggctgctggtggggaggaggcaggacaggccctgtgagggcagggcaaagtgggagtcagcgttggccaaagcgagagagccccaggcagtggagcctttgatgtcaggcctgaaggcagtggggactgtcttagaattttatgctgagatgaaaatgtatgactgaaaaattggtctggtggcaggaggtgatcagagtgggtggccgcaagaggcttcctggggaatgggcttcctcagtatccgggtgcagcaggtgggccagaggcgacccatggcagcccccagtgtcaacgtgagcaagtgcaggactgtggacaagactgtgatgccatgcccggggcagagaagatgatggaaaaggagaagttgccccagatccagtggctcacagaagcactcttcctgaggaagagcttgttcttgaagtttgcacccacagcttctcctaggcgatgggcttggagagctgtggtcagcatcaagagctagcctggcagcagggcaaggatgtggctgcgagatggcatcgtggtacccactctctctcggtgcctcagtgtccttgtggaggatctggcctctatgacttgagtgatggtaaagtgagatgatcccatatggcgtttgacgttgtgctgcacacggggtgggtgcccagtaaatgggagtggttattattttgaagatcctttagggaaaaaatgtccattctttaagaagctaaagcagaaatgaagggaatgagcactcagacatcttccactctgcaaacatttttgttaataacaggaaggaagagaagcagccacattttttctgtggttctcatataacattgtcgtgtacttggtggaaattacagagggagctagactttgaaaagccttaagacttgtcaacccagcttatcagatgaggtctccagtatttttcagaaggtaatcacttgagaggctttgtttcttcttatcaattcacaattaatgtgtttttattaaactggcagattataattttgcattagagttctggggctcttaagtgcataaaattcatttgcctacanctttttttcaactacgtatttcaattcagtgtttattggcatttgctaactacatattcattaccttactggtcaaataaaacaatatatgtgtgtctcactcctaaaggatcttatcagaaaggactgtcaaatgatgatagaagacggtaagtgaatgaggactaacaggagtggtctagacagtgagctctccagaactggaaggaagttagaaccgggcactaaaatcctcagcagaggccttgcaaggtgagataagaagccgggttttgaaaaggtggtctggtgtgggcagtgggaggtcagtgtgaggagagatgaccaacatgagcagagagacccgagtgggtctgagcaggcctccaccaaaggatgggcagacctggccaaagagacattttgagtaagtctgagggggcctgatagccacagtccgtgtgactctatttcactcctacgattctatgaaaataggctggaatgatgttttagggggagagaatgggagccaggggggtgttttattttcaaattaattgcatgtgactgaaaatgaaatttcaaagtatatatgcttaccatccaatttgtcttatacttgctgctgaataaaaagtcctgaaattcagtttaaatattggtctttgttatcccaaaatagcaatcataattatggtaaattagttgaattcacctttcatttattttgtagtaaatatctatttcacttaactttagtagataaagtaaccaactattgttcagctttttaaaaagccttcacaatacaattaaaaaaattatatgtagtaactaataaaagtaaaccatttctttaaaattcacggggtgtacttgcaaaacagttcatgcacacctgggaagatggagagagaactatgaaataagaatgcacagggccgggcgcggtggctcatgcctgtaatcccagcactttgggaggccgaggcgggcagatcacgaggtcaggagatcgagaccatcctggctaacacagtgaaaccccgtctctactaaaaatacaaaaatttagctgagcatggtggtgcgtgcctgtagtcccagctagtggggagtctgagggaggagaatcgcttgaacctgggaggtggaggtcacagtgagccgagatcgtgccacggcactccagcctgggtgacagagtgagactccgtctcc

SEQ ID NO: 265843 - DNA, 374 bp, Homo sapiens
ttcttattttctgggagaatttgcacaagagtagaattttttgtttgtttcattttttaaatgattgttggaactcagttgtaaaaccaactggtctggcattttctttgtggaagattttactaccaataattagtaactactgatttaatttcaagtttttcatttctatttgagccaaccttggtaagttataattttctagatttgtcatttccatctaacttttcaaatgtattttataaagtttttaaaataacatatagatgctgtcagtttaacctctgcagcttctttagctatgttcccctttgcatttctaacatttatttttacctcctcatttaaatacatacacacctcagatgagtttc

SEQ ID NO: 265844 - DNA, 423 bp, Homo sapiens
tcagagaagtatgttgccattcaaaggaaaacaccccactttattgtggtggtgtcccacgttctttgatatctcagctattagaacatcaggtgcaaaagatcaaagatctcacaggcaaaagcaggaagagcatggcctgtggtggtactccccggtaaactccctttatgaacatttctagaaactgccagagccaggcatggtggcatgcctctgtaatcccatctactcaggagctgaggaggggaggagcacttgaggccccaaacttgagaccagcttgggcaacatagtgagacccctatctctgaaaagataaaaaatgaggcaggcaggtggcttacttgagcccaggagtttgagactgcagtaagctatgatcatgccactgcactgcaaactaagacctcatctctgaaa

SEQ ID NO: 265845 - DNA, 425 bp, Homo sapiens
aaacatttgagccatactagctgaagtctatggattgttttttgagtattctgaaacagtaaaagaataagggaggagggagaacacttttagagagagaaaaaacattcaaattaatacaatgataaaaatattttcacttgctaagatttccaatttctttagtaatggaaaggaaatgcccagaccctagaaggattgaaagtaaagtcctactgtgaatttgtatttaatgacattgctgaatttccagattttcttttcacacctacaaaagaaatgctgggatacaaatctcacaactatagttatttcaagtttaagctttggactcagtgtgtatatatacagaaattatttagtagtactagatcattctaaaatttaccttttagccatggaacatcaattgccaaggtctgtta

SEQ ID NO: 265846 - DNA, 411 bp, Homo sapiens
tgaaatatatgtctataatcactgtgatatgctgagggaagaaagattccaaatgctattggagcctggaagaagggcaggtgagccagtgatcagggaagattccagagaaggtgggatttgacctgagactgaaagatgggtatgagtttacctggtggataggggaaggcattttagaaagcatgtgcaaaatagaaacagtatatttgaggactcctaaatagagtatgatggacagggggtaagaagaaagcaggttggatgccaaagaaagagaggtgaagctggcacagtagtgcatgcctgtaatcccagctactcaggaggctgagacaggaaaattgcttgagcccaggagttccagatcagcctgggagacatagcaagaccctgtctcttaaaaaaaaa

SEQ ID NO: 265847 - DNA, 356 bp, Homo sapiens
tttttcttttgatcttgatgtacatttggtattaatttttttcttggtgtatttccatttacacatgaatgacctcagtctgtttttagcaaagcattgctagagctggatgaggatgcagggctcattaacaaaaaatcatcggggggcctaggttataactgctctttcaaagctcacacaaccataacacacattctgttacacaaacacacacacagtcacaggacagcaggttgtgaaacagagagggactctactttgaggaatatggccatgaatatgaacaagtaaaacaaccatgatcttaataaaaaagtggtggggaccaggttaggtacaagctgtgacctgtg

SEQ ID NO: 265848 - DNA, 447 bp, Homo sapiens
gaccaatggaaaactgagaactatatcaatgagagcacggaagcccagagcaaacagaaagagcagaagtcaagtgaggtgaggaccacacagaaacatgaaacccagattttcctatcatttagcatcttccaggaaagtgcccacacaggagaacctgggactcccagaccatagtttgtcttggccatgtaacttcagccgtgacagtgatctcccactttgctcatttagagagtgaaacaggttagtacacaagataaactgtaggccggacatgatggctcatgcctgtaatcctagcactttgggaggctgaggtaggtggatcacttgaggtcaggagtttgagaccagcttggccaacatggtgaaaccctgtctccaaggggaagccaatcttaatgcccaccaattttctttgataatgaagctgtattatttata

SEQ ID NO: 265849 - DNA, 422 bp, Homo sapiens
ttatcagctggggttaatgagaggttgaccaaatcttaaaaggaaaaatggaaatgagatattcacaggggactctgaaaatctctcacttatttctgggaatctagaagtccatgaacatatgcagcactatgttcgtgccccagaaagactggagaagggcctaacctctcttttaaggaaatctctggccatcacagctggccattaagctgagtggcaacacacaacaaaaaatgaagactttacagtattagtctgggaaagttactgaacaaacagcaataagagcaaaaaccacaaacccaggcaatgggagaaatctgggaagatttctggagttgacgtatagttaaaaatgtccagttttcaataaaaaaaattatgacatgcaaagaaacagtatggctcatacgtcgggg

SEQ ID NO: 265850 - DNA, 554 bp, Homo sapiens
aagactgctcttgaaacttttgtctgatgtcttcaatttttctacttctttgtagagctgcttaaaatgttgatttctccttttaggactgggttatcttgtgtcccagcacttagagtatagtgagaataatggacaacctagttcggtccttgacctacatctgttagacaggtttcactgtgatgttgacatgttatgcatgtctagaactgttataaattaaatagcatttttataattatgcataattcaaatgataaattcctcattacagtcatgacctcattcaattggtaaagatttttgtgtctgctgtggaccatgcaccatgctaggcagtggggatatagaaataaaagattcatttctggtcctcaaagagcctaggttctagggaagatgaaaacacagaattaagatactttgggtgggatgcggtggctcatgcctgtaagcccagcactttgggaggctgaagcaggagtatcacttgaactcagaagttggagactagcctgggcaacataacaagacctcgtgtctactaaaaa

SEQ ID NO: 265851 - DNA, 140 bp, Homo sapiens
tttttttttttgctgttaattgtcagtcctcttcagttagagcacaaacaagatgaattttttctttctaatttgatgtggatggtctggcacttcaggctttatcttcaacatcatctcatcccttctgtcgtcttctc

SEQ ID NO: 265852 - DNA, 436 bp, Homo sapiens
aaatgagacttttcttctgtgacatctatattttcttatttttatagtgcatgtatatttctcctggaagcagggaaatggtatctttaagtagcttttaaaagtatttttaagaaaggtgttttttaaaagatatttatggggttcgaaagaaaaaaatattagggctgggcatgatggctcatgcctgtaattccagctacttgggaggccgaggctggtggatcacctgaggtcaggagtatgggaccagcctggccaacatggtgaaaccccatctctactaaaagtacaggcgtggtggcacgcctgtagtcccagctacttgggtggctgaagcatgagaatcacttgaacccaggaggtggaggttgcagtgagctgagattgcaccactgcactccagtctgggcaacagagtgagaatctgtctcaa

SEQ ID NO: 265853 - DNA, 606 bp, Homo sapiens
tatagtagttaccatgctgtcctgccttggcgatttctgcccagagggttttgagaatgcagtatatttgcatcagctgtatagcatttccatcaaaacagttgtgccctgcctgctgtcaattgtggcggcaccattttatattttgttttatagagttgcagaagcagcctttgccccatccacactttgttcaattacaaagctgatctcactcctcaccccaaaagactgttactactcctggagaggtttgtgaaggtcgacctgatccctccaggatggagaacggacagaacagaccttaagctggggaccagggtttcaaagtggagcctcccaatcagggccagattgacttcagattgtaagcacagggcatgttgatgtttggatgaggctcccagaagagacagagaaagagagaaaaggatatgatttattgtgaggattcatcccacatcagaaattctctaaccaacccctaatgccagacttcaggcttggcattagagtaacactccctgctgtaacagataaaccctgaatattgtttatttcctgctcatgtcaaaggctctgcaggttttcctggccctgcagact

SEQ ID NO: 265854 - DNA, 861 bp, Homo sapiens
tatagtagttaccatgctgtcctgccttggcgatttctgcccagagggttttgagaatgcagtatatttgcatcagctgtatagcatttccatcaaaacagttgtgccctgcctgctgtcaattgtggcggcaccattttatattttgttttatagagttgcagaagcagcctttgccccatccacactttgttcaattacaaagctgatctcactcctccctcctccatgtcctgcaggagcctctctaatcagacagcagctgggaaaagacaaagggaggtcacaccgggaggttcttatggaccaagcctgcaagtggagcatgttacctctgctgagatccactggccatatatcctggtcacatggtcacacctaactgcaagggaggctgggaaatgtagtctctattctcaggagaaaaaggactttggatttaggggaactcctgggagtctctggcccacactttatcttttgcatattccctgcctccttcagagagcagtttcccagctgaactctttcaattaaaagaaaaaaagtgacataagtatagtggttggaaatggatcaaacaggctgtactcttttgggattttgttgtttatggtaggagtgtgtgaggtttctgtccatagagaccaagcccgaggtcatctcttaccaaacatctttcttctaagcatcttctgtcttctctaaatgattattttgtctccttcctccttcttcctttttattgataaaacatgaggcagtaacatgatttttcttgtgcagattaaatctagattcctcaaggccagtcttctataacactacaattctgtctgtgaataaaacactaacaataaa

SEQ ID NO: 265855 - DNA, 487 bp, Homo sapiens
tctccaccccgttgggcacttgaacttgtgccgtcggattgtttctccccaagctttctgtgaattccaagaatgcaactgataactatttaaaaactacccttaacttgaagaaagaatactttaaagtcttagcaaaggaaatgttctagatgggttttaagtcgaggactttcaagggtgggagtaacacgaaaatcactacaccagggaacacaaatactgttgagaatgtatcacacacaccaactacacacttgaagcaggtaggttgtacgcttaggttgggctcatcctattttaagtgtactgttggtggaacttaacctgagtctaggatgaatattttaattttacgtttttaatttaaatacacattccaaaggttatacagaaagcatataaagcccaccttatatcattttaacaaaaacagcaaaagagataatatgtaaatgacagcctcataaaatggtctttaagtact

SEQ ID NO: 265856 - DNA, 238 bp, Homo sapiens
gccagaggttataatattagtgctatttattagttagtgtttatctgaatgccagcaaagaacattgtatgtgaaggtgttttttgcccttctcccatgatgtcgaatctacaaaattaatgttaatcccataatcatagctttcctggtaattcattttggatacttttgtctaaactttcctgaagctttatttttttacagtgttattgaggtattattgaagtatacagtaaat

SEQ ID NO: 265857 - DNA, 356 bp, Homo sapiens
tatgttttctcctaggagttttatagattcaggtcttacatttaaatcattaatccagccaggcacagtggctcatgcctgtaatcccagcactttggcaggccaaggtggttggatcacttgagtttaggagtttgagaccagcctagccaatatggtgaaactctatctctactaaaaatacaaaaaaataaaataaaataaaatagccggacacagtggcggctgcctgtgatcctagctactcaggaggctgaggcacgagaattgcttgaatctgggaggtggagcttgcagtgagccgagatcacgccactgcactctagactgggtgacagtgagactatatctccccc

SEQ ID NO: 265858 - DNA, 331 bp, Homo sapiens
tgcagctattaacatttagcacacagagtagagtcactttaattggcaactcatctgctgactctcacttttttcttcaaagtgattctagcctctggcctcactaaactccttgctattgccatatccatgctgtgcaacttgcctgcatgcccagggtgctccctcttccagtcctgtctctctcttttgtctgcctggtcttccagccaagactcagatcaagtgtatcctcttgtggtgttccacctcccactccagcccattgggtcctccttcctcttcccatatattcctccatcatttgtttagtaaatacttatctatctat

SEQ ID NO: 265859 - DNA, 621 bp, Homo sapiens
ttgcaaggatggaatgagatgtattgacagcagtaaactataaaatacatagtttatataataaactatgaaataaatacaaaccttaagttgaggttttgcattatttttggttaaatataaagaccagggtaatcatagaactgccaagcagaaagaaatgtagaatgtagcagtggtgtggagacccgtggctgacaggtggtggtcttcatataggctgagggacaggctagatgcatgtcaagtggcagctcaggttggaagacaggagttggggatgtgagagtccaggccagggtgaagagaagtggctgggaaggcagccaggctcagctcttaggaggcagagagctgcaagcagagggtgggaccaggtctcttttttcaacccagtcttgagggatgggggcaaagtcaacctagacttgatttagagctagttctgttcacttgatcatctttattgggccttcaggctcctagaagactaccgtgatagactgactagtggtctgtaaatggtttttattaaaaaaatcacataccctttttgataaaacatgtatttgtttatacactttaaatatattgtgtaattatataatacattcacaaata

SEQ ID NO: 265860 - DNA, 157 bp, Homo sapiens
aatatatgtaaagcagtggtgcaatccatcacatagtaaggggctcaaaaaatggaaatattgtcttctttcacttctcaatttttattgtcaccattattatcagcaatcatttgtgtttcattttctcatctataaaatgcagatgcagtcataa

SEQ ID NO: 265861 - DNA, 442 bp, Homo sapiens
tacaaatgaggaaaaagtcttgaagggattaagtaaattgccaaggcctctttatttgtaagtggctaaaatgaatatggcttctcacatttgtgccactcttctgaaatacaggaaacacagacatcaacagtatttatctttgtatgcttactaaggaaaatactgtgtggtacaaccactgaaaaggctataatagcttttttgttattgcactttaacagagagctctttcttaaaattacagatttttaggaccaaattcagttcagtcgtctggcctactatgtgccaggtacagtattgaatcctggggatatgaaggtgagacagaccatggtccctggtccctgattatagtctgagttgggagtagaggtggagggaaaggaaagaaattgccctgtgaacaaattccatgccatatgactaaggtaaattt

SEQ ID NO: 265862 - DNA, 507 bp, Homo sapiens
gtgccaacagctcatctatctcagtctttggcaggctttcttctccgcctttgcctccacaaactgccactgcttaacggtcactcacaaagggctcccctctctgaaaattagtccttctggacttttcttgcaactaccattcttcagtagtttcataaatgagtaagagttttataacatctgaggggtgggggtttttttatgttaccataggagcaaatgtgttccacatcctttcacacgctacacagaaaattgtatgttgtgtttaaatcatagccaaattgcaaagaaaattatggtttctttattttgttcataactgatctaatctttctcataattatctccttctaggttgaaaggattataaaatgtaattatgtttaaaattccatgtgatctaaaattccatcattctatcatgagcccaggagctcctgctacataaaacatatgctaatcaataaatgtgatacatcacatcaacagaataaaaaacaa

SEQ ID NO: 265863 - DNA, 386 bp, Homo sapiens
gtagaacactcacctgcagtaacagctgttcatctgttgggacccttatcttaactcaccactttcagaagagcagacaaactcaatttggtacttacggagtttcgctcttattgcccagactagagtgcgatggtgcgatctcggctcactacaacctccgcctcccaggttcaagtgattctcctgcctcagcctcctgaatatctgggattacaggtgcccgctaccatgcccgggttgaaaggattataaaatgtaattatgtttaaaattccatgtgatctaaaattccatcattctatcatgagcccaggagctcctgctacataaaacatatgctaatcaataaatgtgatacatcacatcaacagaataaaaaacaa

SEQ ID NO: 265864 - DNA, 535 bp, Homo sapiens
ctggtgttaatacaatcaattattgaactgcagttatcaccccaaaaagggtggctcacaaccctgccatcagttgtaaccataaggtgattcccttacccatgccagtcctaggtttacatgggtctacagaaatcccaaacatcgtctacaaggtggctacagtagtcacagagcttagggaaaacatcagcatttgaaactgcaagatttaacatagccattggtgataaaaggacatagaaggcccgtatacctctgatactagggacaaatacaagtttctgaatattaggaagcagcacttagaaatattcataaacactttgggatgcccaggcgggtggctcacgaggtcaagagattgagaccatcctggccaacatggtgaaatcctatctctactaaaaatacaaaaattagctgggtctggtggcatgtgcctgtagtcccagctactccagaggctgagacaggagaatcacttgaacccaggaggcggaggctgcagtgagccaagatcgcaccactgcac

SEQ ID NO: 265865 - DNA, 279 bp, Homo sapiens
ccacctcccacagacactgcccacctcccacagacactgtccacctcccacagacactgcccacctcccacagacactgtccacctcccacagacactgtccacctcccacagacactgcccacctcccacagacactgtccacctcccacagacactgcccacctcccacagacactgtccacctcccacagacactgtccacctcccacagacactgcccacctcccacagacactgcccacctcccacagacactgcccacctcccacagacactg

SEQ ID NO: 265866 - DNA, 496 bp, Homo sapiens
ttgacgtcttacacgcaacatttctacttaaaatagagcagccattctgcctatttcacaaagggcagggctttgaagccacccacggcatgagctaacttgctcctgtattaagtgaccttataccaagtcacttttaaaaagttgctcggatcagagcagccacagtgcagtgccctcgagttccccttgcctgcagcttctgtgcctcagatggtaagtggcagaaagacaagtggctctgggcaagtaacagaccctctgagccttgtttcccaacacacccaccctttccttatctgtagaatggaaactatgatgcctctcttgcggggtcagtatgagtactaacttagtgcctggaactggggccatcaacaaatgtttctcaaatgaatgaataaatgttcttggtaatgttttgggcaccttgtcagtgctttgaaaagccagctggtactcttaccctgggaaaatgtccaaggccatgagatgg

SEQ ID NO: 265867 - DNA, 262 bp, Homo sapiens
tttgggatcctgtttgaagggaattctaaaagttctgctctccaaacttcaaataaggggtcagagacatgggtcaagacttcaggaaaagccccagaaataccctgcactcaaaagcagtttcagagtttcacattttcctgagaatgaaacaaattatcctccaaattctgctgcttgttttgaattatgtttacgctggttatgttaccagtgagtttttatctccacatacttgaattaaaccgtgtagttcttcttt

SEQ ID NO: 265868 - DNA, 359 bp, Homo sapiens
ctttcctgtgtccacaactgtagtaatactctaaccgtcctcagttctgctctccaaacttcaaataaggggtcagagacatgggtcaagacttcaggaaaagccccagaaataccctgcactcaaaagcagtttcagagtttcacattttcctgagaatgaaacaaattatcctccaaattctgctgcttgttttgaattatgtttacgctggttatgttaccagtgagtttttatctccacatacttgaattaaaccgtgtagttcttctttacatctgacacctacaatctcttcactgggtctgtacttcacagctattttaccactttctgaaataaagttagcaaggatcaat

SEQ ID NO: 265869 - DNA, 652 bp, Homo sapiens
aaccgctgcagggtttctggactaaagggagctctgtcgatctttctgggaatgttctgggtgcatggggttgggtcagcctgtttcggttccccacagatgaagagaacttgccagagcctaggcgaccctctgtgatcctgccctgcccatcttgcagttactgcgtgtttttctcctgccccttcatgctccagcctcaatggcctgttcccaacatgccatgctcacagcctttgcacttgctgttccttctgcctagaaggcttttccctcaactcttcacaagtctgactccttatcatttaggtcccagctcaactgagaccctagagaggcctttcctgaagtccccaccctcaactctccatcactgcagaaagttctattgggtaccactgctcttgaccacagacatgcattacactttcctacttctgtcctttgctcatgttatttgctttgcctggaatgctttacctcaccttaacagaaatccaacccctgtagaatttggcaatatgctaaaataaaagtcttaaaattagttcagcaatgtaacttgtcagaatgtatccttaaggaaataacttgttgatatatgcaaagatttagctacaaggatgttcagtgcaacactgtttataatagc

SEQ ID NO: 265870 - DNA, 416 bp, Homo sapiens
ccatataaaaacaagcagtgtgtcatagtttgccaatccctgttttaaataattcaatggttctttaaagctgatgaatccagcagagccctaattatggaaaagcattgtggaagagagaaatcaagagccagccaatctgtcagctagttagccccgagcacagctatattaattactcccttgcctaacacaattcatgcaactcctttgagcttaaccttttcatctataaaaatggagtaatgatagatctccaacccatacctactttatcctggtgaagggagtttagtaataattaaataataattaaattactgaatttttatccctgtgctagatatttgagtcatttaagttctaatctttttattcccactttatagaggaagaaatggaagttcagggagcca

SEQ ID NO: 265871 - DNA, 404 bp, Homo sapiens
ctcaggcaatctgcccgcctcggcctcccaaagtgctgggattacagacgtgagccattgcgcctggcccccttttctttatttcgaaagttaaacttcccagggtcataagattccagtctcatgactggaagaagctctaattagctgctcttcttcccagtccctgccacagcctcattccgccacctcacacttctacttcctcaccttgacaagatacctgtgctcctgacatactgcaggctaggcattcaggaaaggtcagaatgaaagtgcatcccaaaacatgttttattccacctgggatgtccaagaaaggctctggacatttaacaaacttgttagtttacaaatgctacgtttattatcagaggccaaccaaggcctcagactaaggaaca

SEQ ID NO: 265872 - DNA, 695 bp, Homo sapiens
aaacaactaaaactgacttaaataacgttgtaggaatgctgaaaaggtgaatgatttacaacaaccaatcaaatgtccaattaagaaaaaatgacatttagaatgatagaaaattctgtggagtttttactacctactcccactgcacaagatccaccctggcccagtgtgggagaaatagctgtccagcttccgatttcctccttcaaactggagggagcaaagaagactttatttgcactgttgaaatctttctagggaatgcctgaaagatgagtctctatttttcctccctctgaactcatttggggaaaagctgcatatcttgggtctcaggctgggaaaagtcatgcaaagtagcttttgaaaacttcaggaggtgtacagacccacagatgcctggggcaagatttttttgtggagggatatgatagcatatctacagacccaatataaaccaggagtgggactctttggaaaattaagatatttaatttatgccatatattggtgtacatttttatttttttgagatagggtcttgctctgtcacccagaacagagtacagtggcctaatcatgtctcactgcatcctcaaactcttgggctcaagcaatctttctgcctcagcctcccaatgagctgggactataggcatacactatcacacctggctaactttttaatttttttg

SEQ ID NO: 265873 - DNA, 336 bp, Homo sapiens
tcaaaaaaaaaaaaaaaaaaaaaaaaaaaaagaaatatatataaaaacaaatatgcggggcttctcctaggctttatttttagcaatagaattgccaaagacatttcaggccatggaagtaagcttgtggttttacttattctaactttgtttttaggatatcgtagtattttttgatgggaatatcttttttttttttttttggagacagggtatctccctgtgtcacccaggctgaggcaggaggattacttgaactcagaagttcaaggttacagtgagccaagatcacaccactgcactgcagcctcgacgacagagcgagactccgtctca

SEQ ID NO: 265874 - DNA, 461 bp, Homo sapiens
tactaagaaagtcaccatctaatgtcctgatcatccatctggcacattcagaagatttttctgttttacaggttgttttgcttcattccctcctccagcaggtattccctgcagcagggctgacctgagtacctagatgtcagttccctgatctcgccacacatacattaaactcaaggttcggcagggcacggtggctcacgcctgtaatcccagcactttcagaggccaaggcgggaggatcacctgaggtcaggagttcgagaccagcctggccaacatggtgaaaccccgtctctactaaaaatacaaaaattagccgggtgtggtggcacatgcctgtagtcccagctattcaggaggctgaggcaagagaatcgctcctgggaggcgcaggctgcagtgagccaaggtcatgccactgcactccagcctgagcgacagagtaagactctgtctca

SEQ ID NO: 265875 - DNA, 381 bp, Homo sapiens
tttttatgttagagactgactttggcttttagctccatgacattgtcattgtataaagcaagcaccataaaagggaaggtgaacatgtgaaacatgaagtctgaattgcatattgccacacgttttctgagagccaggaaaaataatctgtattgcaggcctccccatggtggcccactgaacactgtgctactgccgcgcatttcaagtctccttgacttagagctcacttagctctaaggaagtcaaagggaaaaaggaaccttattacttttaaaatacttgatagtgggatggctttttcccaatcctcaacagttttttcttatttctcaaggtgaagagacctagtttgttgtatttattggcctttgtgagtga

SEQ ID NO: 265876 - DNA, 326 bp, Homo sapiens
tctttttttgagatgaagtcttgctctgtcacctaggatggagtgcagaggcaccatctcagctcactgcaacctctatatcccaggttcaagcaattcttgtgcttcagcctcccaagtagctgggattacagatgcacaccaccacgcctggctaatttttgtatttttagtagagatggggtttcaccatgttggccgggctgtcaagtaatccgcccgccttggcctcccaaagtgctgggattataggcatgagccaccccacctggctgaaaacattgttattaactactgtcacccacgttgtacaacagatctcttga

SEQ ID NO: 265877 - DNA, 206 bp, Homo sapiens
aaaagccacacacctccctcacaatttgtgcacaaggaaattccccgtggggctcaagatctttaccctagagcagttgttgggttttcaccctggcaatgtcagtggacagcttatcttcacaggtgcagacaaaggacagaactcaaagtcatccctctgctcccccgaaacaaacgcatatctgactgcttcctctgccctgt

SEQ ID NO: 265878 - DNA, 902 bp, Homo sapiens
  misc_feature (32)..(32): n is a, c, g, or t
  misc_feature (40)..(40): n is a, c, g, or t
  misc_feature (67)..(67): n is a, c, g, or t
  misc_feature (90)..(91): n is a, c, g, or t
tgctgcaagggatcataggggcaaacacagcnatctaggnctagtgtagagatgagcgctagccttncaagcatgaagtcggggacaatnntagcctttaactcataaagagagggtagggcttttctttttccatatgtcaattgtggtgttcccagaatgtatagcagttataaaaataggtgaaagaattgttagcttgtaaatactgagagattggtgatttatataaggtaatctgttagtcttaaaatagttaaaagaaaaaggagaattatgaagaacttggttccacaagtaagatagtcctcatactgcatcagtagtgacttaaacttttttaaaacttttattttttgtggggggatctgttgaatttgggaagcctccagttttaataaaatttttttattatggtggaaacatgtctgtaaaacttaggactatagaaatgcaaagaataaagaactgagggagttacacacatttgtagtcagaaattaagttcaaaaaataatttaggtcatttgcattttttagtatgcaaaataaatggaaaaattaaagtgcaataaaaatataatttgggaaatgaatgcagtaaaattgaaaacattgaaatattatcatttaataaaataaacttcaaaaaatgtatgaaaatataagtatctttacttatataggattaaatatatttctgataatctgtcctctataatgaattggtttaattatgtttttctgtttttagaaatgggcatctttttatttctggaaacaactttttaatgagattttatcaaacattagactatgactaattataatattcaaagccaataccaaaacgatggataaataaatgaataaaacaaggcacattaatagaaaaaaatgaa

SEQ ID NO: 265879 - DNA, 412 bp, Homo sapiens
aaaaaaaacaaatttagccaggtgtgatggtgcatacctgtagtcccagccactccagaggttgagatgggaggattggcatgagcccaggagtttaaggttgcagtgagctatggctgtgccattatactccagcctgggtgacacagtgagacattctctctaaaataaaaaataaagcagattgaagaaagcgggcttctagtagaaacagagacaggaaaaaaggcagaaagtaacttccagatcaagaactgagctggcctctgggcatggctgtctcttctactgcttttttgttcaaccacctcatgtgttagcccacatggaaaatgcttctgctttgtaatctgcactttttatggggcttgttcagatggtgctggtataaaggctgaaacccacattgctg

SEQ ID NO: 265880 - DNA, 377 bp, Homo sapiens
gaaacctcgtctctactaaaaacacaaaattagccaggcgtggtggcgcatgcctatagtcccagctactcaggaggcagaggcaagacaatcgcttgaacccgggaggcagaggttgcggtgagctgagattgtgccattgcactccagcctgggcaacaagagtgaaactccatctcaaaaaaaaaaaaaaaaaaaaattgcagcctggcagtatagtgagacctcatctctacacaaattttaaaattggctaggagtggtggcgtggcatgtacctgtggtcccaactacttaagaggctgagttgggaagatcactggagctggggaggttgaggctgcagtgagccatgattgtgcccctgtactctaggc

SEQ ID NO: 265881 - DNA, 154 bp, Homo sapiens
gtctcccaaggcctctttccagcctcattgcaactgcctctgctgtatgacctttcaccctgacaaggggaaagctgagggccagggcgtctcctcactcctcttctgagcagcaaatgcagcccaggggtgaaggcacggactccagaaccat

SEQ ID NO: 265882 - DNA, 454 bp, Homo sapiens
tcaactatgaagcactacctgaatgtgaggagctgtggctctcctaggactacaggtacccctacagctggaagtgaggtcattggagcagccacctgatctgcagctgggactgaatgctgaacctctgcctgattacagaggactggatcaaaagggatgctccagtgactagcaaagaggggtggagccttacattagaagaacggacttgtttccatcccagagccagtgggctagcgtggcatggtggagaaagcacaagctttgcagtcccagttactgggtttaaatctcggctgtgctgtttacaaactgcatgatcaagggcaggtcacctggcctctttgagcgccagttcttcctcggtagaaaggggcagatgctcattttataatgtgactgtgttgggaactctcatagaacctaaataaatagcagtcatggagttctg

SEQ ID NO: 265883 - DNA, 190 bp, Homo sapiens
gccctctgggagcctgacgtctaaaggagagaaggtatttgtgagaacaacactactagaaagcatatgactgcatgagggtgggggcttgagaaatatacgcctgatcttctggaaggctcgctgcaggacatcccgctgagaagttgggaaaatactggtctgtagaagccatactgagctagtgatg

SEQ ID NO: 265884 - DNA, 255 bp, Homo sapiens
tgggaacctcgataggaactttctctataaaagccatatcctctctttgttctctggaactgcacttttgttttacactgaagtctgcacctccctggtttgcaaactgtacacaggaatagcctctttcctccaaattcctttacaaagaatttttcttcacaatatgatgcgagaggtagaagacatgcttacagctgtggattcatatcctgaaatcaccacgattacaataaaacgaaaaatcaaacaaag

SEQ ID NO: 265885 - DNA, 426 bp, Homo sapiens
tttccttcttttattaaaaaacctggatattaaaattatggaagcttctcaccattaatgggttttaaattcaaccttaacaacatgacattctttagaataatgcaaccagtgtcagcagctgaattgttagtggacagtgcccaaatataacaagcagcacatcctgctagattcccacaaaatttgctgaggaagaaaacgttatcatggaggacagaatttgaggcaagaaaaagcaagaaatgagacatcttctgaagatcaaggacattaggtgggaacatattagagatatcaaaaagggagagaacagagagggttgcttagaattaaaaataggcctgtacaattttctctgacgcaaaaaagattatgggcaagaagaccaggtaactaatctagagcctggcagccatctacacc

SEQ ID NO: 265886 - DNA, 207 bp, Homo sapiens
catttgtaaaaggttctattccctgagagccaatgcttttattatacaatctctaatgtcagtgcctgcagtctctgccttcttcaagcccatgaggccctggagatgagtgagaacccctacagggagggggagccttagagagagaggcacagccttagagggagaggcaccatcaagtgttattagggcctgccaaggcttctg

SEQ ID NO: 265887 - DNA, 359 bp, Homo sapiens
ctcacacacactgagaatcctcggcagggagatcacagaaagtctccctttgttcacattctgggaacgcgttacagtgaacacggatgcaaatttatttctgagatcaacgcctgcctcagggaacagttgttcccgtgctattttttacccccgtgggctgcgagttctggaacgttccaaacgacagtgacaacggtgacggtggtgggggcagggagggtggcgtccttccgtccctaagcgcacgcgggccgggcgctgctgaccacatcaccgtagtgaatgacttctttctcacggcggctggcgtcctattggctattaaatataatcattacaataattattaaatataa

SEQ ID NO: 265888 - DNA, 510 bp, Homo sapiens
ggggagctgaggaagagctcagatgtgggggagctgaggaagagctcagatgtgggggagctgaggaagagctcagatgtgggggaggtgaggaagacctcagatatggaggagctgaggatggaactctgacctctgctgtttgttctaaatttcttcctaaggagcctggaggaagtcacaccctcaggccagagctaacgttcttttctgctgatccaaaatgtttcgacaaagcttcacctccttaaccgatcacagatcagaaaatctttgaatttacctataacctgtgggttcctgctttaagatgtccttttaggtaaaaccaatgtgtcacctccgtgtcctgatgcttgactctgcctgaagcctctgcctctctgcctttatggatccttactgtaagccataggagaggtcaggtcttaggcttgagtgacccgattctcctggcctggtgccctgaaagacacacctcactttctctcgctgcaatcccgatgtcaa

SEQ ID NO: 265889 - DNA, 291 bp, Homo sapiens
ggggagctgaggaagagctcagatgtgggggagctgaggaagagctcagatgtgggggagctgaggaagagctcagatgtgggggaggtgaggaagacctcagatatggaggagctgaggatggaactctgacctctgctgtttgttctaaatttcttcctaaggagcctggaggcgtgacacattccgagccatccacggaagtgctgcagacctcgtacacgaaaatgtcatcccgaggcatgatgtggtttaaaccttcatccatttggaaaattttgtggaatcggt

SEQ ID NO: 265890 - DNA, 424 bp, Homo sapiens
ctgtgtccctaacattacctggcagaggcctcaacacaaacatggaagacagctaggtatacttcaattctacctcctctgataaaacttatcccaggcgtccggctcccacctgagattgcaggaatcttcaagccttaacatatctactgggcctcaagatgcagcaggccctcagagagccatcgcaaccatcacaacactcctggagagccccagggaacgtacatatcttcattccacctacgttcttatgaagtagcttgtcttctccttcatttaaaaaatgaagaaactctccactctcactgcttcatttgactaccctttaaaaaaaaaaggagaaactgagacctataaattttatcaaaaccctgagccttgaaaaaatatatatataagaaataaacaaatagaaaacaag

SEQ ID NO: 265891 - DNA, 293 bp, Homo sapiens
ggctgcagtgagttatgatttcaccactgcactccaacctggctgcaagaccctgtctcaaaaaacaaaaatggagctcagagaaaagagatttccagttaaggtgagtaagtttaaacagtagtcatgcgggctctgggcctgaatctggtcttcgaatatgactaatggcctagccctggggtaagcggacggcagctgcaagagcacagggagggggcgaggtggggcagagaggggtcctactgatggccgcaggggaaggtgcacgtgaggagtgagcagaaatacag

SEQ ID NO: 265892 - DNA, 515 bp, Homo sapiens
gtgtttcaggtgaagcgcagagccctgcggcacatgccagcatagtttgtcctgaggctgactgtgcccgagtggcctgcctgtggcaggttgctgagtctccttcccctgtcattacagcgccatgcttcttctagcgatgacttctctgacttctcagatgactcggatttcagccccagtgagaaaggtcaccgcaagtacagagagtacagccccccatatgcgccggtgagtgactggcatgcactgctgagctctggggccgggaggagttcaactgcttgtgtttcttgagcacttgctgtgttctgggcattttttgtgagtttcagtcctgggccatcaggtattaatttaatccccattttatgagtgaggaaactgaaacttagacaatttcaacaaggcagcccagacaaccaagtgagaccccacaaaaaataaaaaaattaaccaggcatgcctgtagttccagctactcaggaggcagaggtgagaagatcccttgagcc

SEQ ID NO: 265893 - DNA, 696 bp, Homo sapiens
tgcgtttcccccccctcgcggcgctcgcccgctctccctcgctctcgctctgtcttttttgggcgccatgctgaggggaagggaagatggagagttggaagaaggtgaattggaagatgatggggcagaggagacccaggatacctccggagggcctgagagaagccggaaagaaaagggggagaagcatcacagtgattcggatgaggagaagtcccacaggagactgaagcggaaacggaagaaagagcgggagaaagagaaaaggaggtcgaagaagaggaggaaatccaagcacaaacgccatgcttcttctagcgatgacttctctgacttctcagatgactcggatttcagccccagtgagaaaggtcaccgcaagtacagagagtacagccccccatatgcgccggtgagtgactggcatgcactgctgagctctggggccgggaggagttcaactgcttgtgtttcttgagcacttgctgtgttctgggcattttttgtgagtttcagtcctgggccatcaggtattaatttaatccccattttatgagtgaggaaactgaaacttagacaatttcaacaaggcagcccagacaaccaagtgagaccccacaaaaaataaaaaaattaaccaggcatgcctgtagttccagctactcaggaggcagaggtgagaagatcccttgagcc

SEQ ID NO: 265894 - DNA, 397 bp, Homo sapiens
agcctgggggattcccctgcggtagacctgggatggtgggcggcgcgcggccgggtaggtccctgcagcctccgaggcccacgtgaggtcggggtcggggcggctgtacagtgcccagcacaggccactggcctcccttgtgggtctttgcacaggtccgcttactctcggaaatcttgggttccccagggccggggaagggtcttctgcctggtctggggcccctcccccgacactgtggatgtctaggtgtcccgggtggggtcaaggagtgaccccacgggttcccccatctttgtccctatccagctcacaccttcgcctgtcttttgcatgtgttttttccacaaccttttgttcaccgggtttttaacaacagaaataaacctaaccccca

SEQ ID NO: 265895 - DNA, 406 bp, Homo sapiens
agacggcgaccgcggggtgctgcaggcttcggcgcggcgcattatcgggctgtgccgaaccccccgggccgccctgggatcgcgggcccacgtgaggtcggggtcggggcggctgtacagtgcccagcacaggccactggcctcccttgtgggtctttgcacaggtccgcttactctcggaaatcttgggttccccagggccggggaagggtcttctgcctggtctggggcccctcccccgacactgtggatgtctaggtgtcccgggtggggtcaaggagtgaccccacgggttcccccatctttgtccctatccagctcacaccttcgcctgtcttttgcatgtgttttttccacaaccttttgttcaccgggtttttaacaacagaaataaacctaaccccca

SEQ ID NO: 265896 - DNA, 230 bp, Homo sapiens
gggacagaggtggcttctggatgcctgtgtgtcccagcctttgacttgggtgagcctgtgtgaatgctcagagcttcctggctattaaagtgtggattttaaagcaactgctcaaagcagttcaggaaatgagtacgcgcggctgctatggtttgggtgtttgtccaggtgtcaggctgttctcgcattgctgtaaagaaatacctgagactgggtcatttataaagaag

SEQ ID NO: 265897 - DNA, 297 bp, Homo sapiens
gctgcccagtagcaacaaaacttctgaaaagagttgtctcatttgtgctcctccattctccctgaatcccaatcctgtcagatgcagctcccgctgctccactgaaatgctcctggcagggccaccggtagcctccacattggcaaatgctgccgtcagttcttaatctactgcaaactccgcctcctgggttcaagcgattctcctgcctcagcctcctgagtagctggattacaggtgtgagccactgcacccggcaaagtcataacactctgtcctctttcaattatttcctcc

SEQ ID NO: 265898 - DNA, 177 bp, Homo sapiens
tttttttgcataaatataagagcacagactctggcgccagaatgcctcatttaaaatccctgctacatcatttattggccatggtatgttgggaaaattacttagcattcagcatctagcttcctcacttgaaaatgggaataaaacagcacctattgcataggtttgttgcgagga

SEQ ID NO: 265899 - DNA, 641 bp, Homo sapiens
ggctgagcacaggatttggtgcaaagctgacacttggcagtggtttgttgaatgactgagtggagtaacaccctcaactcagtgtcctgggagcccccactcatgccagatcacacaagggatccaaagagagcccctcacagcacttgtcatgtggtcctggacagataacagtttccttaagagccagtggttctgagatggagaagcccggggtgctgtgggagccgagtgggcaggtggggcttcctgggggaggtaaggagagcagaggacgctgggcagagggagcagtgtgtaccaggaaatgcggtgcagtgagtgggggcacctgattaaagagcttgatctcaaacctcttggttggtggggagagctatgccgggggtgggggggcagagatttaagaagaaggaatcgggttggaatcatgtttctggaagaatctgcaattggaaacgtgtctcctggcagccgtgtggatgctgttggatggggagaggggctaggggaccagggtcgtgggtccaggtgagagatggcttgagaccagcagcagaatgtgggggggagggttgtttttagttcatttcttcattttgcaaagcaatgcactaaaaagccaaacagcatgtaaaagc

SEQ ID NO: 265900 - DNA, 489 bp, Homo sapiens
aaataaaatttctatatgggcatggagctcagggtgagactgagtgactgagccatgacaaaaagctcaggcttgattcagtagataccggggagctgctgcactcttgaggaaggagtgatcgttgaaatccaggttttagaaacatttgctgaaagaggccctaacaagccctcacagcatggatgggagggccctgctgccagctgctgcattttcctgttgtaaaggggaaagtgtaggcttagatcttggctcagagaggaggaccagcctatgaacactgaaaggatgaaactcaagaactggacctgaggttaagatgcgggggatgaagaaggaaggatttatttattctgtttgtttacaaagagtcactttcacctgagacactctttaatccattcctacatgcagattaaacagggattttctctgattagcaatactttgcattccaccctttctgaaagacaaatgaaaaaaaaa

SEQ ID NO: 265901 - DNA, 282 bp, Homo sapiens
ctacaattggtccttgtatttgtgtttgggaagactagctctaccaagcgtaggactgtgttgtcccttcccaaatggaatgtcagagtgtgtgtgattgatgcagacacctctcaagccactccctgctctggaaaagagactgtcatgctaatgaacaagtgtaaatattccaggggaacacagttcagtctgaaatgaccacatgcaatttggcctatgctctgttttaatgcaatacaattattcttggatatgttgcaaacatagctccttccttcc

SEQ ID NO: 265902 - DNA, 389 bp, Homo sapiens
cttggagaagcagggcctggtatctggaagtcagctgggtggcctggcaacccattctgctgttcacgtggctctcgtccagtatctcctgagctctagctcccacttcctcaacttcatctctgtatgcagtcacttcttcgtgccacttctgaaatgacaaagtatcgaagggaaagattcaatcttagccattcgaataagccaaatgtatatcttcttataggaaatggtttcagtgtaggtttagaagatgtttattttgagatttaattttgaaaatgccatatgttatcttcataaatattatattacaacaatgtgatacaaactgtacacttgagttggatagttttctgtatctattacacttcaattcaaaaattaaa

SEQ ID NO: 265903 - DNA, 211 bp, Homo sapiens
tggaagaggggaacaatacttgttttatttaacgaccagaactttttgacaacaccccccttccccgcaggatatgagaatgcctggtccactgcagtccatccccagggacctcgaagcaaaatttggctggagggggtgcgggggggattctaatgtaaacagtgaccctgaagccctggagccagttcccccttctttcccctgtctc

SEQ ID NO: 265904 - DNA, 166 bp, Homo sapiens
gaatgacatgctcagatctaaggccgtgcaatagtaccctgtgaaggataccattaggtatcctttaatcagataaatgcagaatgtggcacttcaataagaaaactggactcttcagtcgatgtcaacaaaaaaggaaagagagagagagagagagaaaaaaaaa

SEQ ID NO: 265905 - DNA, 295 bp, Homo sapiens
ggctgggtaatttatgaagaaaagaggtttaattgactcacagttccacaggcttaacaggaagcatgactgggaggcctcaggaaacttacaatcatggcagaaggcggaagggaagcaaggaccttcttcacatagtggcaggagagagggagagagtgaagggggaagtgccacacacttttacaccatcagatttcctgagaactcactcactatcatgagaacagcaagcgggaaatcttcccccatgatccagtcacctcctaccttggcatactgcgttaaaaaatca

SEQ ID NO: 265906 - DNA, 1444 bp, Homo sapiens
  misc_feature (1147)..(1147): n is a, c, g, or t
tgcctccccaccattcaccaggctccactgcactggctcattcctgcctcagttgtgcttcttttccctggaaagttctttctgtagatctttaaagggtgatttccttctcaacattcaggtgtcagctcgtttcactttcctgaccatgcccatccactcagagatcactcaaaatcccattaccctattttatttctccatcatatgtatcactatctgaaactatcttgttgttgatgcaggctattttcttgaccccttcatgggactcccaacaggggtaccccatttactcagcctgccctgctcaacctcttgcaggagggagcacacgagtgaacgagtgcaggaaccagctggctgctttagtgctgtgaggagtaaactccatgcaggccctgcagcagcaaccagtttttccagatttgctcaaagcaatcccagtgagcatccacgtcaatgtcattctcttctctgccatccttattgtgttaaccatggtggggacagccttcttcatgtacaatgcttttggaaaaccttttgaaactctgcatggtcccctagggctgtaccttttgagcttcatttcaggctcctgtggctgtcttgtcatgatattgtttgcctctgaagtgaaaatccatcacctctcagaaaaaattgcaaattataaagaagggacttatgtctacaaaacgcaaagtgaaaaatataccacctcattctggctgactaaaggccacagctgagcctggaactgacccttccttcatcctcaacctgctgtcctccagaaagcaccaaggaaaaagcagagaatgacagcaaacagatcactaggcctctgaccacaggtgctgagtactcagcagccctcatataataggtttgaaagtactccttaaaataaaacactgtttccctttggaactatttacaaggatgaaacaaccgtatacctgagaaataacttgctctggtgtcaattcgctattcgccagcagacatcagaacacaccgagtttccagatgctggtttttccccttaaatcaggaaatacacctggacaatttctagaagactacaattcagtctagccacaaaggggattttttttttttggtaacaggctagagcccngttctgtaagtctttagctgaaatggtccagtacaaaagcactggaaatgagtgggctaggaggacaaggaccgtctcctgcgtgaggagttggttggaggtccccaaggccaggtaccccctgcactcttattggattcctctctgtcttcttggagttttgaaaaactccttcgaacaccaggcttttttctttagaaaacaagtctccaatcgttctctgttccgtagaaagagaaagaaaacctggagcagctgctgaaaaatctaatgaggaactaagaggcaaacccacca

SEQ ID NO: 265907 - DNA, 1530 bp, Homo sapiens
  misc_feature (1233)..(1233): n is a, c, g, or t
tgcctccccaccattcaccaggctccactgcactggctcattcctgcctcagttgtgcttcttttccctggaaagttctttctgtagatctttaaagggtgatttccttctcaacattcaggtgtcagctcgtttcactttcctgaccatgcccatccactcagagatcactcaaaatcccattaccctattttatttctccatcatatgtatcactatctgaaactatcttgttgttgatgcaggctattttcttgaccccttcatgggactcccaacaggggtaccccatttactcagcctgccctgctcaacctcttgcaggagggagcacacgagtgaacgagtgcaggaaccagctggctgctttagtgctgtgaggagtaaactccatgcaggccctgcagcagcaaccaggttataagctctgtgagacaacaggaatcttgtccatcttgttttatggctctacttccaacacctagaataatgcctggcacatatttttccagatttgctcaaagcaatcccagtgagcatccacgtcaatgtcattctcttctctgccatccttattgtgttaaccatggtggggacagccttcttcatgtacaatgcttttggaaaaccttttgaaactctgcatggtcccctagggctgtaccttttgagcttcatttcaggctcctgtggctgtcttgtcatgatattgtttgcctctgaagtgaaaatccatcacctctcagaaaaaattgcaaattataaagaagggacttatgtctacaaaacgcaaagtgaaaaatataccacctcattctggctgactaaaggccacagctgagcctggaactgacccttccttcatcctcaacctgctgtcctccagaaagcaccaaggaaaaagcagagaatgacagcaaacagatcactaggcctctgaccacaggtgctgagtactcagcagccctcatataataggtttgaaagtactccttaaaataaaacactgtttccctttggaactatttacaaggatgaaacaaccgtatacctgagaaataacttgctctggtgtcaattcgctattcgccagcagacatcagaacacaccgagtttccagatgctggtttttccccttaaatcaggaaatacacctggacaatttctagaagactacaattcagtctagccacaaaggggattttttttttttggtaacaggctagagcccngttctgtaagtctttagctgaaatggtccagtacaaaagcactggaaatgagtgggctaggaggacaaggaccgtctcctgcgtgaggagttggttggaggtccccaaggccaggtaccccctgcactcttattggattcctctctgtcttcttggagttttgaaaaactccttcgaacaccaggcttttttctttagaaaacaagtctccaatcgttctctgttccgtagaaagagaaagaaaacctggagcagctgctgaaaaatctaatgaggaactaagaggcaaacccacca

SEQ ID NO: 265908 - DNA, 198 bp, Homo sapiens
ctttacacactgagatgtgggtgtatgactgtcatcacccaccataccaagggcagctagaagaccaaaggcattgcttactttacctgggtgatttttcatagttgtttgttggtgttgtgcattcagcgggcactcagcagtccttgttgagtgactaacggctgagagcctcagaaatacaagcctcaagtcaca

SEQ ID NO: 265909 - DNA, 519 bp, Homo sapiens
cagagaatagcatccattcatccaccctccaccacctgtcactctcactaaagaccagaagaagtctgcctccaggtgaggtttctcagtgatggactgatagaaagagtgctggagttactctaagctcagcagaccaggctaatgctttaatagaccatgtagacaaagggcagtgaaagaactagggcagaaatgattttttacttggagaatcagactagattgtagcccacacagatgcagcctcctgaatgattggaggagtttcagtattcccagccccgccctaggctgaaatccaaaccgggaaggcaaggcaaggtgtgagcacataggtgaaggaatttccctcaagcagaggcccaagctcagaaggggtcctgtgaggcacataattcctagggtcttggctgaggcaagtctgccaaccctgaaaagccaggggatttcctgcatgttagagaatggctgaggccctggagtattttaaccactccgggaaaagtagatggagca

SEQ ID NO: 265910 - DNA, 811 bp, Homo sapiens
gagacaggtgtttgcattgtgtcaaaggaaatgctcacataggtgggtctcttccttgtccactaaaggatccccctcactggtcagggattgctgaccccacaaccatcagcagggtgaccaggtctgctggtgcctggtgactggctgggagaagctaggcaccaggccgtgtggcgagcccgttggtagggccagtggtttcaggggagctgtgctaggagttgggccaagggcagcacccttccacatgccaacgagggctgaaaaaagggccttcctccacagcccaaagagctggtgccatgggaggacatggcctataaccaggtgtaatatggggcagccgctaacaaggaaccaaatcgtagagactgggaaaagcatgatgggccggatgaaaaagcaaaacaccaaactgaatttgtgttatgtggacaaaggctagacttcaatgtggaacaaaggaaagtttaatttcccgagatgtcaggaccctgggagagcttttttcctctcctttggttacccaggaggcagcacggagcactggagagggagccctggagccaggatgcctggccgccgcccccggcccctctctgcagagctaggaggcagcacccaggccatgagggacaaatgtggagcaagggatggagctggaacttgctattatgggacgttaaagctggcaggacctgaggtagcatctaacccagtggttcttaccttggctacagcactaaaggctcctagagaatctgtttcaccatattgatgcttgaatcttaaattcagctgattagtt

SEQ ID NO: 265911 - DNA, 388 bp, Homo sapiens
agatgacatgattattctatttaggaaattccaaggaatctacaaaacaagtactgctagaactaataaataaattcagtatgattaacaggatgaaagaacaacatgcttaaagcaattgcatttctgtattcctacgatgaacatgtggaaatagaaatttaaaacgtaaaacatttacaatcactccaaagtaaatgaaatacttaggtataaacctaacaaaaaaatgtacagaatctgtctgtgaaaaccacaaaatgccataagagaaatcaaagatctgaataaatggggagacatactgtattcatgtatcagaagagtcagtatagtaaatatgtcagttctccccaaatttatctatagatttaatgtaattcctatc

SEQ ID NO: 265912 - DNA, 485 bp, Homo sapiens
ccaaaagcacatttcattgtactcagtattttccctagttctggtctgtgcttgccatattgttgggttcagtatcactgtcaactgagagacaagggcacatgagcaggactgaaagtatttgttctgttccacctctgtacctggcagaaatgttagaactgccaaaggcctggcatgactgaagcctacgaaactaactgtgtgctgttgaggggcaggaaggaattaacaataggaagagattttatttcccttctgaaattttttgtttttccttgaaccttgacatttctgaatgtttcaaatatgataatttcatgagtacatcaagctgctcataatacattttcaacttttatattctgaaaataacctattacttttataagagcacttaagatgtaaatagtaaatttttttgctgttttctcctcttgctcagctttttatcccatcctttcttccttctcctcctcaaaaaa

SEQ ID NO: 265913 - DNA, 325 bp, Homo sapiens
gattcaatttttgattgtatcaatgtacatgacgactatacaacatccctaccataagattgttgaatccctcctaattcggtgttaactgggacaggttatttatcctattaacccatattcgatgatggcaattgataatacaatttttaaatatatttagttatttgccttaatagagtcctatacctatctggatccattttgatgtgcttgttgaaggcttatttgtctgagtactcaattaacagaaaaaagattcaatttataaacattagtagaaggaatgggttacgaaaaggatatgaaataaattgtggtgacg

SEQ ID NO: 265914 - DNA, 488 bp, Homo sapiens
cacgagggttggagcggcagcggttaaatttgttacattggattctcaaacttcctgagtcctttgtccgaagtggatgtgtattggaattcctgctgtttctgaatagttcagtctcatgtgaaaattactcatcagatagcatttctgcaaaatacttttaagtcttgtcttttcacaggatgccacctgactctaggctttcatgctatagcttttggtgtctgaaaattctttggtgttttaagcaagcagaattagggatcctaagtgtggacgcgactgccattttgtagaggtcacgaggacacagaggtgccattagccctgcatgattgatgaggtagaatttttaatgctggtgtgccttaaatcacagctaaagatagagaagaatcattagctaaggctgatttgaatgatttactgtaggattaatggatcagatttttaaaaagttacttcataaatgtgttaaatatttagtt

SEQ ID NO: 265915 - DNA, 644 bp, Homo sapiens
tgaaaatgccaaagtcatcctttgtcttgcagtcaatattattttggagatgaacagagatttaaatttaaacaggacttaaaactacagcctaatagagaaagagtttatactagaagacatttctttaagaccaatattttttagttcttttcttttttacagttaatatagcccaaccctggcaagataaagagaataaatttaccttccaagtccttgggacttaaaacaacagctcaatagagaagaagtctatactagaagacatttctttaagaccaagatgttttagttttttttttttaagttaatataacccaaccctggcaaaacaaaaagcctgagtttaccttccaagtctttctggtaaactccagcataagaaattatacatctgactcttttaaacttaacttttttgtctttttctaaactaacaatagcttcaaggaaaggtgtccaaaattgactcaaaaggaaaagaaagacccattaccaattgagatgtcattggaaaagtgggctatgagaggttcttactggctccttgaagggttatattctattttggctcctttatttattatttatttaagataagagaaattgcttttcaaaattacaaaattaacttttgctct

SEQ ID NO: 265916 - DNA, 597 bp, Homo sapiens
caatgctcatggattttttttaaatttatggcagagataaaatttcagctttttttagctttaaatttacctatttagagttaccagtggtagaatgtttgtgtattatgtgcatactcattttagagtcacttacaaattaatgatatagcctatcatttataaacagtgattgaacatgtaaacctcagtctgcattaccctttgtgtctttaaagaacagatctgcattttttcgggatcctcaaatgaataagtcttggttattttattttaatggcaaatctgttctactactggaatgtttttaggacagttcagagaaatgaagtccaactcagatttggattcttgacgaataaatttgactgctgtaatctttgtttttttaaatccaccttatatttgtattgggaaaacatcaggctgtttatataaatctttctatataaattgtgtatgtcagtcataatgacatatttcttatggaaatttttatatttaatgaatgataattctcttgtgtgaagtttctatttttaatcaaatttaagatcatttctgattctatttcgtaacatagagcagttattaggg

SEQ ID NO: 265917 - DNA, 228 bp, Homo sapiens
gtctacatttcatctgaaagaggattctggtcagcagtcagagaggaaataaggtcctcagcccagtatcctgagaagaactgaaattctgccaacaaccataatgtgaatgaatttaaaagcaaattgttccccaatttctacttcaaaggaaactgcaatgccctgagagaccttgagtcagaggcacccagctaagctgggccagtattcctgatccaccaacac

SEQ ID NO: 265918 - DNA, 471 bp, Homo sapiens
agacgggcactcacagacagaggtttatgtatttttattttttaaaatctgatttggtgttccatgaggaaaagggaaaatctagggaacgggagtacagagagaataatccgggtcctagctcgccacatgaacgcccagagaacgctggaaaaacctgagcgggtgccggggcagcacccggctcgggtcagccactgccccacaccgggcccaccaagccccgcccctcgcggccaccgggccttccttgctcttcttatcatctccatctttatgatgaggcttgttaacaagaccagagagctggccaagcacctctatctcagccgcgcccgctcagccgagcagcggtcggtggggggactgggaggcgctaattaattgattcctttggactgtaaaatatggcggcgtctacacggaacccatggactcataaacaatatatctgttgggcgtgaaaaaaat

SEQ ID NO: 265919 - DNA, 489 bp, Homo sapiens
gatgtagtgaattctctgtctccaagcaagactacatgcagacagatagtgattatatgtttttaaaacattgttcttcacctagtaaggcaaggcaggtagacagcaaactcaatgtggttcatggttcgttacttcccatcttcatttctcagataaaaatctgcgacaaatttgccataataagacactagtttggtaaactggcaagtgccttgcagcatttcttgtgaggagcatatgctaatggatgcttgtatttgaaaggatgactcacagttaatcattataagaaataggcttaccacttcataaactctaggaaagactgttttctaaacatttaaattgctcagccattttatgcattaaaacccaattataacttagtatgttggagaatttcaaaagctattccctgcaggatctgtgcctaagactacattttatcattccgtagttcacactctgtctaatacaggcaaaaaa

SEQ ID NO: 265920 - DNA, 359 bp, Homo sapiens
ctatttagtgtgtgaacatgtatgtgtgtgtgtttgggaacttctgtgagccatcttccccaggccctttaaggaaggacatttgcaaagcagaatgaatggggctcacatatagtcgaaggtaaatctgagagacagaatttaaatgacatttgctcctggatttagctgtgcctgaaattacttaaaagagaatttggacttttcacttaagagagcagatcaaataccttttaaggcttacactagcttgacttagatctcttttgctagcacccaacaaatcttgactaatagattgggaaatctgatgcatattaaaggaatattctatagacttcagcatttacaggatagta

SEQ ID NO: 265921 - DNA, 761 bp, Homo sapiens
atttttttttaactgaaaatggacgacagaactaggtttctatactggaaatttctttatggactcctataaagggttaaaaaggagaaagtataatattttttaggaatgaagagtcaatttctgacttctgtttccagccaacatggagtaataaggattggatttacccttctatctaaagcaatcaaaaaggaaaaaagaacaaaatatatgaaacaacagcttataagaaactagatatcaggcagtaaacaacagtgatctctaagaaacaagaaacaaagatcactccagcttactgctttgtgagaatttttaggctattgtgcagagtgggtcagtgcagtcagagcctggcagaattctggatttagcagcacagaaagaaaattctggagatctgcagttgtctcccttgagtattcagcagagtactgattagcatatgcatgtgaggacactacctcgggcagggaaagaaccatctcatccgacgggattagaagaatactcagaagggtcttgcctcaatagttatctcaagcctacacactgctctagtttcaacgaacaaatattaaaagcaagatgtgaaaggattaaattttttccaagtaacttaaatgtgttcattaaaacctatccaaaagcaacacagatgttagagttatcagataaggactcttcagcagttattattattgtgttccatatgtacaaaaagtttaaagtttagtagagacatggaagatggtaaa

SEQ ID NO: 265922 - DNA, 612 bp, Homo sapiens
acactttctctttcataaaatagttcctcattcttccaggtagccttcaaattcttccaggcttcttattgcatatgaataactacatgatactgaattgtaacacattaataaatattgcttatttttttagataatgaaagtagataccatgttcattattgttactagcttggtttttagtgcataattgttcaataaatacttgttgaatgaatgcaggtgaaatgattctaaagcaaggattggcccaattcacatgaagctttcagtcaggccgtaacactcactgacacatcactgtccttccctaagttaatttttctgttatctgtgctctcatgagagtaaataggtcacctactctctcttattattaactattatcatgtctatcttactcactagaatgaaagctagtctagtgtatcagcttggtcttacttattttttatgctgagaggagaccttaaatagcagtaagtatttgttgaacaaaatacatcattttagtgttacatggtggacaaaaaaatgagagaagaaaaaaataaatattaaaagtttgaagggataaatggcaaaggtgaagttttacacaactaattagac

SEQ ID NO: 265923 - DNA, 472 bp, Homo sapiens
ccaaatccatagtttagtttacactagggttcactcttggcattggcattgtacattctttgcctttggacaaatgcgtaagcaaggagagagagatgaacaggcaaaacacagaggatttttagggcactaaaactactctattttaatggtagatatacatcattacacatttgacctgtgttcagttctgttcacttgtagtatctctagtttagcaattcctgacatgtagtaagataaactaattacccatctgaccttagtctggccctgaaaactagtgtaccattcttcctggcttcttgaattcaagataaacacttgcagtactgtttttgcagtagacattgtgtcctagccccaaacaaatcttagcagtgaggactgtttctacttagaaaattacaccacccaactccagcagattactatatcatcaaagattctaagatttgtgtcttctgcaagt

SEQ ID NO: 265924 - DNA, 454 bp, Homo sapiens
tatggccggggtgaaacggtgagacaaaaaggttgatttacattgtttacaaatcaccacatcaataactagaaatgcctggggctcttgtctgctgggcgtggtgtgagcaggactgaccgcctcaagaactgacggcaacatgtaaacactcgaaaagcaatgacactatgaagatcaatgtgagaaatgtgttccatgctaggataaagtttggataataaagctttgcattcaggaaggaattactgttggttccagtgttctgagacacttcctaaagatagaagatgggttttaaataatagcagaggtttggaaaatcatagaggttgagagaagggaatttccagcgaggaattgcatggacacaggcatgcagatagaagccaagaaatatatttaggggactttacccagttgtattggagtaatcataagaagaaagcagagt

SEQ ID NO: 265925 - DNA, 203 bp, Homo sapiens
atattagtatgagaaggaacgacataaagatatgaataacagaacacaaccattgggtgccattttggaggctggctaccactgtatgatgcatctgtaaaatttctttttagcccctctggcatgccctgacttgtctctggatattgctacatattgttctttcttgccacaaaaaacttctcccttctgtttctcttctc

SEQ ID NO: 265926 - DNA, 449 bp, Homo sapiens
tagttgatttgcatttttgcctggttcaatcaagaaattatcgcgtgacatcaggcaagttgccaaatttctttggactatacctataaaataaaatttgaaaatattagctagatctaacccatttgtctccggatgtctgcaaagtggttggaaatcacaagcctaacctgatctgcagaggtgttacctttggcaaacttatggtttttgtgtttgttttgaaatctaaggccaagcgcggtggctcatgccggtaatctcaacactttgggaggctgaggcgggtggatcacttgaggtcaggagttcgagaccagcctggccaacatggcaaaaccccgtctctactaaaaatacagaaattagcccggtgtagtggcatacgtctgtaatcccagctatttgggaggctgaggcaggagaatcgcctgaacctgggaggctga

SEQ ID NO: 265927 - DNA, 387 bp, Homo sapiens
tttttttttctgacatggagtcttgctcttgtcacccaggctggagtgcaatgacgtgatcttggctcgctgcaacctccaccgcccgggttcaagcgattctcctgcctcagcctcctgagtagctgggattacaggcgcctgtcaccacgcccagctaatttttgtatttttgtagagacatggtttcgccatgttggccaggctggtctctaactcctgacctcgtgatccacctgcctcagcctcccaaagtgctgggattacaggcgtgagccactgtgcccagactattcatcttatttcttaataaacatttaaaaatttacacccttctgggaggagtcttttgactctctgctctaaccttcaccatgttcttgttaa

SEQ ID NO: 265928 - DNA, 628 bp, Homo sapiens
gatagagtctggcacatttccttattgtttgttctttaacttaatataaatgtacagtactagattaacttcttgtagttaaaaatgaaaaccaaatataccagtaaaaatggtgttattatttaaaatattaacatttcaacaccggaagagatgtgaaggcaattatttgaatccttaccttttgcagatagcagaatggaagcatagaggctatacctgactgttcaaagtaactgtagggttgttcaagggcagccaagtgagaatccagtccttctaattatttcaggggtgttctttctagtccactaggcttttcttatcttcagcacattaattgataatctgacttaagtgagaaaatagaagcaatcggaatcaaacacccacaagcacctagtacatctacccaattaccagcatctgtaatgggatgttttctgccttcactcctgttatgatggatggactctccatgccacaccaaggtcaactccttcacttgtgcataagatcctgttccctccagcctaatcaaggatattatttcagcttttctgccctcttcacactgtggaagatcattcccattagcagacaaacatgctgttatttttctcattta

SEQ ID NO: 265929 - DNA, 406 bp, Homo sapiens
tctgcactagtcttgcctgtcctgatcttcctggggtgcgcgcactccttcagcgtgtcctggttttaaaagactaacccatccggatgggcctgaactcaagaagcaactattctaagctagactgagccttggcgtctccgcagcctgggaagctcggatagagctctttgaagaaggcggctgcaagccagtctccgaaccccaggggacttttgggcaagggagccggtggaagcagaaggaagaagatgcgctgagagtcctcacaactgcgtctccggaggcagaacgaagtggggacttcagacaatcaagcgtcatccttgctccccctccccacacggaaccctgcgattatggcaagagaaaactggtttgagcttgagaaaatttcaaaaaaaaa

SEQ ID NO: 265930 - DNA, 822 bp, Homo sapiens
ttttttttttttaagagaaggggttctgccatgttgcccaggctagtttcgaactcacaggctcaagcaatccacctgggattacaggcatgcgccaccgtacccggctgaattttttcaagcaattgtctgagtgtttgtaatttggttcctccattttgtcagggaggttgcaggaacaggaggcatcctgcataagcaggtgcatttctgcttcttttggggtcccagcaagacaagtgttgggctccaaaaggggctttcggctcctgctgtgtgttcacaaacatgtgttgtgtttctggctctccctctcaatttgcaagtaaaggatgcaatggtggtgtcctccagacccaaagccacaacccatcgcaagtcaagaacactttccagaagataaacatgagtgggttcatgtctctctccttcaaagccaggacaaaatccccacttctttgctgccgcgagtcaatttgtgatttattttgtctgcacctgtttgatgccaggtcgacatttcctaaggcaagcccctgtatttgttgtggatttaagtggaggcggccagcacacaccttggatgtaatttaaaaccatttcctgaggaaagatgtgtgatatgctttcctttgtttagcaaatgtttatggttttaactttaaatctcaccgcaaatcacttacacttgaaaacagggctggtctgaaagtaattaccctccctgagtgccaagacctccagaagttgttttcattcccgaatggcaatcactgtactcatgcgctccacgcatcttaaataaactcagttcaaagcaca

SEQ ID NO: 265931 - DNA, 695 bp, Homo sapiens
ctttattcaacactcctttggctaaggtgtaggaataaggagtgctgtgagtttcattgcatcctcaaaaggtggtttaagtcctaatccctgtggcctgtgaatgtgaccttctttggtgatagcgtctttgcagacgatcaagttaagatcattagaatgggcccttctccaatacgatggtgtctttataaaatgggcagatttggacacagacaagcacatgaggagagcaccatatgaagatgaagccggggatgctgtgatgcttccacacatcaaagaccgtcagcacaaccccggaagctaggagaatgcctggagtagattcttcctcacaccttcatgagaaaccagtcctgtcgatgagagagaatatatttctgctgttctaagccaccagtttttggtaactttgtcatggcagccttgggaaactaaaacaagggtcaagtggaggcagcactgcccttggagggttgaggcccagctcactccattgctgcaaatcctgtctaaatcatctccctttgctaagtgctcccaaacacccagcttgtcagaaaccaaaaataagccatcctaggaggagtacagtaacattcaaggcctcaggatatttccacatacgccatgttcagcaccatatcaaaacaaccaggcgtagaataaaacaaaacggaaactacagcagc

SEQ ID NO: 265932 - DNA, 457 bp, Homo sapiens
aaaagattagagagcccagaaattgacatgcaattttttggcaaagattcaaaggcaatctgatgtagagagaatagtcattttaatacacagtgctggaaccatgtgaatgagagacttgacccactccttattatttatacaaatactaatcttaaaggggtattagaataaaataaaaacgtaacactaaaatagttcttcaagaaaacataagttttgtgacgttgggctaggcaaaagatttccctgtagatggcagggaaagaacttataccacgaatgaattagataagttggacttcagcaaaattgaaaacttctactacttgaatggcaaaaagtaaatgaaaaaataagctacatactgagataaaatattttctaccaataacaaggaggaaaattaaacaagactaaaaatgacacagaagatagaattagtggatgaggacat

SEQ ID NO: 265933 - DNA, 95 bp, Homo sapiens
tatagcatttcagtgctttatcacatcatgcccacatatgcaaacatatgtacatgaatgaactaatagtaaacaatttctcttcatcctttata

SEQ ID NO: 265934 - DNA, 369 bp, Homo sapiens
ttttcacagaacatcaaacgacaaataagtataagcaacacacatccaaaaaaaagtatttaaaaagtgctttctgcatttcatctggccccgccccatcagctctcactctcatgcatatatagacccttcacaattatatctaattcatagaaacataagtactttcaacctatatgggcctcccctatcccaatgacgttttccttgaatttctctttgtgaaaccatactttcagtccctttcttaagatttataaccccgattatatttctaaggcagattcatatgacccaatactccacttagattctgtctattttcctcttgttatttttcagaaggccatagactgcaggatcgaaatt

SEQ ID NO: 265935 - DNA, 1091 bp, Homo sapiens
  misc_feature (4)..(4): n is a, c, g, or t
  misc_feature (13)..(13): n is a, c, g, or t
  misc_feature (17)..(17): n is a, c, g, or t
  misc_feature (44)..(44): n is a, c, g, or t
ggtnagggggggngggngtttattgcatgcctagaacggccgtngggtgtatgagccctcccgggtgggagagacagggtttcctcatgttgcctaggctggtctcaaactcctgggctccagcgacccacccaccttggcctcccaaagggttgggattacaggcatgagccatgatttgtattccccttatattaataacttttttaaatttaataaatactacctcccaatcacattaaataagagagcttctttgtacatcaaaatagacagaatctatgtggattatgagagatttttacaataactgataatgtttttggaatacttattatatgctaggcaccgtcctaaacatattatctcacttaaacctcatttaaaaaccccatgaattagacactataccccaattttacagaggagtgaggcttagagagtggagctcagactcacactcaggtctagatcccaagctcataatcttagctattcactacctttattttctttatcttttctgtattttaaagttttcttcaatacacattataagcacagtcggttaacgtataaggtttgttaacttagttcaactgttgatgactcttcaaggccttctggaaataccatctccactctggtacacagctggtactcaatgaattatatagtattatataaatgtcaaagaatgtttttatattgcttgatgaaagatatattacacatctaattttctcattgccctgataaagcaagaaaagcagcatgttaggagcacgtattctagagccaggctgcctgagttcaagtcctagctccaccacagacaagatgtgtgaacctaagcaagttgcttattgtccctgtgcttcagttccctcatctgcactacagatatagtaacagtaactaattccactgggttgttgtagggattaaatgaattaaaatcttaaaagcagtactgaaatcagtgcctagaacacagaaaattacatttaactaaagtaaaaccagtatctcgtgggagaaaaaaagaaacaaaggaaactcaaccagtaaattcaaaccaaaacttctgt

SEQ ID NO: 265936 - DNA, 1146 bp, Homo sapiens
  misc_feature (4)..(4): n is a, c, g, or t
  misc_feature (13)..(13): n is a, c, g, or t
  misc_feature (17)..(17): n is a, c, g, or t
  misc_feature (44)..(44): n is a, c, g, or t
ggtnagggggggngggngtttattgcatgcctagaacggccgtngggtgtatgagccctcccgggtgggagagacagggtttcctcatgttgcctaggctggtctcaaactcctgggctccagcgacccacccaccttggcctcccaaagggttgggattacaggcatgagccatggtgcctggcctctatgttttcttaaacaaaataaacatttaaggtagaatgtatcatttgtattccccttatattaataacttttttaaatttaataaatactacctcccaatcacattaaataagagagcttctttgtacatcaaaatagacagaatctatgtggattatgagagatttttacaataactgataatgtttttggaatacttattatatgctaggcaccgtcctaaacatattatctcacttaaacctcatttaaaaaccccatgaattagacactataccccaattttacagaggagtgaggcttagagagtggagctcagactcacactcaggtctagatcccaagctcataatcttagctattcactacctttattttctttatcttttctgtattttaaagttttcttcaatacacattataagcacagtcggttaacgtataaggtttgttaacttagttcaactgttgatgactcttcaaggccttctggaaataccatctccactctggtacacagctggtactcaatgaattatatagtattatataaatgtcaaagaatgtttttatattgcttgatgaaagatatattacacatctaattttctcattgccctgataaagcaagaaaagcagcatgttaggagcacgtattctagagccaggctgcctgagttcaagtcctagctccaccacagacaagatgtgtgaacctaagcaagttgcttattgtccctgtgcttcagttccctcatctgcactacagatatagtaacagtaactaattccactgggttgttgtagggattaaatgaattaaaatcttaaaagcagtactgaaatcagtgcctagaacacagaaaattacatttaactaaagtaaaaccagtatctcgtgggagaaaaaaagaaacaaaggaaactcaaccagtaaattcaaaccaaaacttctgt

SEQ ID NO: 265937 - DNA, 435 bp, Homo sapiens
catattttgggttgtcattttctgaaccccaataaaactttagaatcagcttatcaatatctccaaaatagtgtactaagattttctttgagattcaattgaatcacttgagagagtttggaagaattgtcatcttaagaatattgaatcttggctaggcgtggtagctcacacctgtaatctcaacacttcgggaggctgaggcgggcagatcacggggtcaggagttcgagtccagcctgaccaacatggtgaaaccctgtctctactaaaaaaatacaaattatctgggcatggtggtggctgcgtgtaatcccagctactcaggaggctgaggcaggagaatcgcttgaacctgggaagtggaggttgcagtgaaccgaggtcacgccattgcataccagcctaggtgacagagtgaacctctgtctcaag

SEQ ID NO: 265938 - DNA, 458 bp, Homo sapiens
acagacaggaaaacacatttaaattagtttgccctttaaagattatttcctacttgtctcttatcaatgtgagtacataaaagagaccttattacaattaaaaacaatgatggtttagcagcagatttagataccttacattttctctttaagagagagaatgtaaggcctggcacggtggctcacacctgtaatccagcactttgggaggctgaggagggtagatcacctgaggtcaggagttcgagaccagcctggccaacatggtgaaaccccgtctctactcagaatacaaaaattagctgggcgtggtggtgcatgcctgtaatcccagctacttgggaggctgaggtaggagaactgcttgaacccaggaggcagaggttgcagtgagccaagatggtgccattgcactccagcccgagcaacaagagcaaaactcttatctcaaaaaaaaa

SEQ ID NO: 265939 - DNA, 408 bp, Homo sapiens
gaatttttgaaattgaaagatcaaatcataaagaaatgagtcttaaataggttctagccattttgacaaatgttgtggaaagtatttggggaaaaatagtattcctgatagaaatttttgagttgcacgtgaagacgatagattttttaaagtcaataataataataatagttactacttagagagcccttactatgtgtcaggtagctggtcatatctcctttataagaatattatgagactgtctatgaaaatagtgaaatctctgaaagtattgtcattaggcataaaactacaaaatgatattctttgaaagcattgtttttaacaattgaacattcttgttatttttatgtagctttaatatgcctgtctgttggacatttaagctctatgcaattacaaaat

SEQ ID NO: 265940 - DNA, 378 bp, Homo sapiens
ttcatcaatacttgcttataattatgtttaatagtaatgatcttaacttcctacatgaagtaaattaagtactctgatcattgataaaagatgtaattgccttaatgactactcacattttaaaacactgatgctgtcattttctatgactgtgataatttgttaagtgtttgaaaggattaagttaaaagaacatcagttctgtgactaggagataaatcaatatcaaatgtcaaggggagggtacgtgaatgctgaaaataagctccccagatggttctgaaaggccctcggtttcacttgagaatcatatgaaaatacttaagaaggcttcaccaaatttaaaactgaaacttaagtttataatcaagcaaaaaa

SEQ ID NO: 265941 - DNA, 365 bp, Homo sapiens
ctactaagcccttgatgtaggcttaggggattcatcttcacatgaccccttggaaccaggtgctattacagagaagaaaagtgaggtacagagagatgacacaacttgcttgacatcacagagctgcagcgctcaagctgagttggtccagctccagagccatttagctattaccctctgctgtctcctaagtggggtgtcatccctgccccatcgagctcctgtgaaaatcagtagcatatgagcatctgccagtgagcatcaaacagtggtaactaccagcattagtccttgctccagaagaaaagcaagctccagccctggctccgcaacttgcaagctgtgtaagctggggccacttacct

SEQ ID NO: 265942 - DNA, 798 bp, Homo sapiens
cgggttgtcccaactactctctgtgtctcagtgtcctcatctggaaaactataaggcgtaacttaatgacctctaacatccttttcagcttggcagttcattatgtctcagtttaggccccttctcagcccctaaagcaatgcagttctctctgaaattaataataagcaacatattggttgataatttaggcctcagtgtaaatacattaatatgtatttcttttctaaaatgatcttttatattcaatgttattaccctatatttctcttaaactgagaacagacactttaagcgtcagtgattttagtatttaaaactgaaaatcatattgagaatgaattgtgaagaaaatagttttttttaaaaaaacagtgtaattgcatcaccgtttgtatgtgtttactaagtaaggttcaggttattttgtatcctgtgcttgctgtacctttcaggaagttaattttgcagttgttgttcttgtatataatttaaaatcctattttgaatttatgctttttaaaaaactcagatgtgtgtactacatgtgtaatttatattatctataactttagtaattatctgttaatatttattgaacattttctggatgcattacacagaactaatgcattctctggtagtgaactgcatttaaattagaaattctccttatggaagaggaagtttaaaaatcaattctctgattatgatgaggttttctttagactagatataaacctagatccttggcatgtacattctgttctgcctctctggctatgttcttctcttgtc

SEQ ID NO: 265943 - DNA, 340 bp, Homo sapiens
atttctctgcccaggagctccctctgctgcaggaactcaacgatagggaggaagagtccagaaaagtagggctgtcagcacctctgtgagcagccgacgatccacagcggatggagtttggtggtaaaggtactcacttcctgtctctctggtgatgattttgagcatgttctacaaagtctttcagatggtcccagtaggttggagcccagctgccctcagtggtaacctgcccattaacgtatcctgtgttggtttcctttcctcccctacctcacctccccactcccctttctatgattcctagagtcacctcccaaataaactttcacatttacat

SEQ ID NO: 265944 - DNA, 383 bp, Homo sapiens
attaaacaccaagtatatgtcaggtcctatgctgggtgttgaggacagaagatgagtgaggagctcataatgttgtacaggagaaagacatataagtaaataataatgaaagggattgccactttttaagtgcagactacgtgctaatggtttcacatatattatttcaccaaatctttaaaacaatcctagagtcatgtttatttttatcctcattttacaagcgaggaaacaaaatcatggacgatggaccatatgccatggtagaactaaagttcagacgcgagcacagagaagacccaggtttttgggaggccctctttaaaaaagaatgcactttgtactcatcagacggctactatgaaacaaaaagaaaaccaacc

SEQ ID NO: 265945 - DNA, 695 bp, Homo sapiens
gcacagccctggagagggtactgcgtggagtgggcccaagccccatccccacctcagcagggaaaagggaccttcttggctgtagaccctgggctcactcccatttcctgtcctgtcagctggattgagttgtcagggctaggagaagggcggagagtgaggcatcctggaaggccaccaaggaacaagtcccttctagccctttccttctgccagatgggccatggggcccagagcgtgggggtacaggagagggtcagctccttgcctcagggtgatcaaagagaatggatccaaactcagattcccaataaaagcagatgggagcaagggagaggctaggaaggacttccaggcctgttttaaatcatatgtcaaggtacatctgagggcatcattgccgggaggcttttggtggaggtggggttcgtgtcagggtgacacagtgaaaggtgtcttgggaaccaggataaggtaactgtgactggcgaggggatgggtagaggacaccagagtcaggatacagagctattctctgctctgatgtctctaatgctgaataccccctgcccttgcccaagagacatctccccatacccagccttcacccatgtcggggggcagtacacacacattcattgtccattttgcacttaaaagttcagaatcattgataatagcaacatatatttaat

SEQ ID NO: 265946 - DNA, 450 bp, Homo sapiens
ggagaaagtgtttgcaaaagattcatccagcaagggactaatatccagaatatgcaaggaagccaacagtaagaaaaacaaccccattaaaaagtgggcaaaggacatgaatagacgtttctcaaaagaagacatacaaatggccaaaaggtatgtgaaaaaatgtgcaacatcactaatcgtcaaggaaatgtaagtgaaaaccacagtgaggtgtcttaccccagtcagaatggctattgttaaaaagacaaaaaaatatactactggtgagagtgtgaagaaaaggcaactgttacagactgttggtgggaatgttacaataattaggacaggcactatgaaaaacagtttggaaatttctcagaaaaccgaaaacagaactaccatatgatccggcagttccactgctgggtatctatctaaaggaaaagaaatcagtatatcaaa

SEQ ID NO: 265947 - DNA, 454 bp, Homo sapiens
ccatgattgctccagtggtcctcaaactgctccagggaccagcagcatcagcaccacctggggactagttagaaaaggcaagttcttgggccccatcccaggcccactgaatgaagactcctgcaggtaagcacagcagtgtggttcggcaaacctgccctgcgactctgagaactactggccaacactgccctgccattttgaagacaatgaatgagcttcactgtcttgggctggggttcaaacaactcccaagagcagggagaagcaaaaacgctgtgggaaccatgcaaaagactactggctgctgctgctctgctctgcaaatgcagggtcgtacagctaggtgatgagttcagtgagcttttggaggcaagcctggaaaacgaacattcacatatgtatgctgtttctaggaaaaaatgtatttttgataataaaaacctttcaccac

SEQ ID NO: 265948 - DNA, 495 bp, Homo sapiens
ccatgattgctccagtggtcctcaaactgctccagggaccagcagcatcagcaccacctggggactagttagaaaaggcaagttcttgggccccatcccaggcccactgaatgaagactcctgcaggtaagcacagcagtgtggttcggcaaacctgccctgcgactctgagaactactggccaacactgccctgccattttgaagacaatgaatgagcttcactgtcttgggctggggttcaaacaactcccaagagcagggagaagcaaaaacgctgtgggaaccatgcaaaagactactggctgctgctgctctgctctgcaaatgcagggtcgtacagctaggtgatgagttcagtgagcttttggaggcaagcctggaaaacgaacattcacatatgtatgctgtttctaggaaaaaatgtatttttgataataaaaacctttcaccacacaacctatttctaacttcaggaatacaggttttgccttaa

SEQ ID NO: 265949 - DNA, 526 bp, Homo sapiens
cagtaagttactctaaccaaggaggaaagggctagacttaggactaggtacctaagttcatttatggagtcaggagggctgggagggtgtagcctctgccaaccctgcctctgcttcctgtagcttccactgctctttagtccaatttttggagctggagtaatgatatgatcaccaccccagccaattttctgatgtactggccagtcttcccataagacctggggtctctcagagggaatatttactaaataagggaaaactaaagtggcatactagtaaaggataggaggtacaaaagctactcccaaaccccaccataaattagtatcacctggggagtttcttttaaaatgtaacagatttctggtcttgacccagacctactgaaaatacttgcagagttgggactcattaggctggtaaacagcaccccagcattgtagatattagccccagtttagattagttggctagctcctttatattctctttttttccctcttggggagagaagtccagttca

SEQ ID NO: 265950 - DNA, 591 bp, Homo sapiens
ggattaacctaaatctaattcttcctgagtagcttctgaaactctttttaaaatctcaaagctttatttacttagggcttcctgtcctcagtgggaatgctattaggccacgcctttgcaattggcctgaggatgacactaatgtttactattaaggtgtactgtataaacatcctcttcctagcctggactctcgcattttatatttttaccagaagaaaggtgagttaaattttagaggcattgttttccaaccacctactaaagattctgttgagtatcagtcaggctttatccttagccagacagctactagaaagctgaccatcaaaagctaattacagtgttgaaggggatatggtctgaagcaaatattgccaaggtgaactttgtacaaatgttatttgaaggagtaaatggcactgataactgcttcacatattttagaagcagttataataaacttaattataataaactataaagttataactttagtgaagtgtgtaaatgaaaagtatgggggggaatctaatgagaaacctaatatcttaatgacaatcagagtatttcacccaaaattagaaagtt

SEQ ID NO: 265951 - DNA, 266 bp, Homo sapiens
ggtcagagtcaatcaaaaaacaagacccaacaatatattgtctacaaaaaacccactttaaatataaagacaaatcagttaaaaataaatggatggagaaaaatatatcatgttaccactaatcaaaagagcataaatagctatgctcatttcagacagagcacacttcaaagtaagaaaagttatcagggataaagaagggcaatgataaagaggccaattctccaggaagatacaataatctttaatgtatatgtaacagagtg

SEQ ID NO: 265952 - DNA, 131 bp, Homo sapiens
tttttttttaaacaacaacaacaacaacaacaacaacaaaaacttctccaagtcatggagacacacattgtaactcttcggaaactgacttgtaatgttctgaagccaataaaggcccgttgtcttgattc

SEQ ID NO: 265953 - DNA, 869 bp, Homo sapiens
tttgaataaaagagatgaggtcttgctatgttgaccaggctggtctcaaactcctgggctcaagcaagccatccgcctcagcctcccaaagtgcagaactacaggcatgagtcaccgtgcccagtcctgggtgactccattttaaaatgttcactatgataagggagaagggaaatgcctgcattgtagggctttgtgattttatctatatccttaattgaagccttgggtaaagtgttcactgagtatgttaaggatgaaaagtgtttaagtattatcagaactccacaggcaaaaagtgttcaaaatcatgtttttattaatttttgtccacatgcatccccaccctgctcacctggcatcacccagatttccctgcccctggcttgggttgggtgtgcccagaggaagatgggagtgcagaagccttcgctgaccaggttaacccttttgtgtgctgcagagaacttattaccatctttccacttaccagattgtatggtgattactcatcaatctctcccacaacattctcaaacagaggatgcagtcttggcccagagatttttttgaagtttaatttaaaaattggggtgggcaatagagtgagaccctgtctctacaaaaaatttaaaaaattagctggcctccagcttgagcccaggatgtcgaggctgcagtgagccatgatcacgccactgcactccagcctggcaacactgtgaaaccctgtctcttagagaaaaaaaaacagttgggtggttgggagtatacatttgtcaaaaccgtacacataaaatgtatgcactgtattactgcatgtaagttctaccacaataaagttgattttttaaaagtcatgatatata

SEQ ID NO: 265954 - DNA, 505 bp, Homo sapiens
caccgctcaggctcccttggtctagcgccctccagtgttgccggccagcactgctgcagaggccgcgggtcgctcggacgggaatggatggaaatgtggctgaggccactgttgacccggaagtgttttgcctttgtttgttaaccagctatgaaactaaacattctcacactgccagcaaaatgaccattttttcatttaatttgcagagaacagcattattagtggcaaacatcttgaagcaaacaaaatgtggtcaagttgagctaacatcacattattttcctgaagaatgctgtgtgaactcacggagtccgtctgcactaatcagtccagtgaacggcttccttccttctggcagagttccttctccagcacttcctccaaatcccacccagcattaatgacatctgtctataaacattagttttagtctcaaatattttttccctcaaaactcagaagcttagtgagaaaataaaaatcacaatgagcaacgtgtcca

SEQ ID NO: 265955 - DNA, 695 bp, Homo sapiens
tgattgttaattgctagcatgaaccgcgtgggcttctcagggtctagagtggagagaaatcggtaagaattggtggcacgcctgtcagaactccccagaccaagctaagcaaaaattaaccaatcagtagagcagccttcggagtaagggctaaaatgatgtcctcagggcctggttttgctttccttccatgtcagtttgcttctttgggtctggctgcattcccagacaggccatgctctcgtggtagcaaggtgacatgacacagggtcaggtccagcaggaaagaatgctgtcctgtgtccccgcttcctccagaagccacactcacccatcccacctggcttggtcctcatgtctatcccagaatccattaatggggccaggggactatgacacaccacttggcttagactgaggagctctgtgggcagccccacctgaagctctgggactaagcctgcgagagagatggattccccaagggaaatggggccattgcttgagtaaaaaggaaatagttgctgaagaggaaaaccacgtgcttactccacatagggcagactcctggaagaggggggcagggtagggaggtggatatgcaggttgccctggcagggtctggaaatgggggctgcaggcttggagggaggcctcagtgtggcttggaacgtggtgtatggtggtctgccgcg

SEQ ID NO: 265956 - DNA, 202 bp, Homo sapiens
tgattgttaattgctagcatgaaccgcgtgggcttctcagggtctagagtggagagaaatcggtaagaattggtggcacgcctgtcagaactccccagaccaagctaagcaaaaattaaccaatcagtagagcagccttcggagtaagggctaaaatgatgtacccagatccggggatacgatcctgctagagtcgccccgc

SEQ ID NO: 265957 - DNA, 2170 bp, Homo sapiens
gtccaccttgattctgcccgtagcaggtgaacctggtgtggtgcgcgcactgcgggtcctgattggctgtgcacgccacggtgaaaaacttgagcgtctactccgagtcctgcaagctcctagtgtctcctctgggtggacgcctaggcgcacggccgttacttctctttcacctgtggattcgtcagtttctcgttcgtttcaggaggcgatcccgcgccctgggtgcggtgaggccgctgggacagcggaggtgcctcccgacgcgaagcagcgagctgaggcggcggccagcggggaagatgagcggcagcagcgccaggtccagccacctgtctcagcccgtcgtgaagagcgtgcttgtgtaccgcaacggggaccccttctacgcggggcgccgcgtcgtcatccatgagaagaaggtgtccagcttcgaagtcttcctgaaggaggtgaccggcggcgttcaggcaccctttggggccgtcaggaacatctacaccccgcggactggccaccgaatccggaagctagaccagatccagagcgggggcaattacgtggctggaggccaggaagccttcaagaaactcaattacttggacataggagaaatcaagaaaagaccaatggaagttgttaatacagaggtaaaaccagtaatccatagcaggatcaacgtgtcagctcgctttagaaaaccgcttcaggagccgtgcactatcttcttgattgcaaatggagacctcataaacccagcttctcgcctccttatccccagaaaaaccttgaatcagtgggatcatgtactacaaatggtcacagaaaaaatcactctgaggagcggggctgttcacaggctttatactttagaaggaaaacttgttgagagtggagcagagttggagaatgggcagttttatgtggctgttggcagagataagtttaagaaactgccttacggtgagttactttttgacaagtcaacgatgagaaggccttttggtcagaaagcttcttcactacctcctattgtaggatccagaaagtctaaagggagtggaaatgatcgccactctaagtcaacagttggatccagtgacaactcatctcctcagcccctgaagaggaaagggaaaaaagaagacgtgaattcagaaaaactgacgaaattgaaacaaaatgtaaaattaaagaattcacaagaaaccattccaaatagtgatgaaggcattttcaaagctggagcagagaggtctgaaacacggggggcagcagaagtccaagaagatgaagatactcaggttgaggttccagtcgatcagaggccagcagaaatagtagacgaggaagaagatggagagaaggcaaacaaggatgcagaacagaaagaagacttttcaggaatgaatggtgaccttgaagaggaaggaggtagggaggctacagatgcccctgagcaagtcgaggagattctggatcacagtgagcagcaggcacgccctgctcgtgtaaatggaggcaccgatgaggagaatggtgaggagctgcagcaggttaataatgagcttcaactggtcctagacaaggaaagaaagtctcaaggagctggcagtggacaagatgaggctgatgtagaccctcaaagaccaccaaggccagaagtaaaaattaccagtccagaagaaaatgaaaacaaccaacaaaacaaggactatgctgccgtggcttagaagatttttaaaaagagagtatatggatcgcaagaaaaatgaagggttatcatacttgaaagataagcacatagttattgctgaatataatgtgacactatggtcgaatactacctacgaattataacattagaagcctagtggaaagaccagataactttaaatggctactaaaggataattacttacttttattgcatgtgttttaaaagtcatatagaaatattaaataagacggacagaggagaatttgcactggaagacaattgccacttgtaaaggatgaaaaataggatcactcttattgtacgctttattataagtttagaaggcagtttattctaaataatttttctctaggaaggcgtagaattttaaagaactggtaataggaaagcatgtactattttcttaaagcaataaactcttgaatgaac

SEQ ID NO: 265958 - DNA, 1936 bp, Homo sapiens
  misc_feature (1)..(2): n is a, c, g, or t
nngaccactgaatgttttctcaatgaaaatgtggaacaactgggggtggtgtggtggtcggaggagggggtgcacaaaaatactatcaactaaaaagggaatccaaatgtctattaaaaataagcatttgattgtaattccagcattcagccacacgatgtcacaattggattttgattttcactgtgtgtttgtctcaatagatgaaggcattttcaaagctggagcagagaggtctgaaacacggggggcagcagaagtccaagaagatgaagatactcaggttgaggttccagtcgatcagaggccagcagaaatagtagacgaggaagaagatggagagaaggcaaacaaggatgcagaacagaaagaagacttttcaggaatgaatggtgaccttgaagaggaaggaggtagggaggctacagatgcccctgagcaagtcgaggagattctggatcacagtgagcagcaggcacgccctgctcgtgtaaatggaggcaccgatgaggagaatggtgaggagctgcagcaggttaataatgagcttcaactggtcctagacaaggaaagaaagtctcaaggagctggcagtggacaagatgaggctgatgtagaccctcaaagaccaccaaggccagaagtaaaaattaccagtccagaagaaaatgaaaacaaccaacaaaacaaggactatgctgccgtggcttagaagatttttaaaaagagagtatatggatcgcaagaaaaatgaagggttatcatacttgaaagataagcacatagttattgctgaatataatgtgacactatggtcgaatactacctacgaattataacattagaagcctagtggaaagaccagataactttaaatggctactaaaggataattacttacttttattgcatgtgttttaaaagtcatatagaaatattaaataagacggacagaggagaatttgcactggaagacaattgccacttgtaaaggatgaaaaataggatcactcttattgtacgctttattataagtttagaaggcagtttattctaaataatttttctctaggaaggcgtagaattttaaagaactggtaataggaaagcatgtactattttcttaaagcaataaactcttgaatgaacagattgcgatttactttcagacataatttggagatggcagtagatcaaaatgtgtccatgacttgttaacatgcctttctttcttcctccttagccaaaatccacctttgaactacaaagacagagcaaggcgttcattttggtgggaggaagcattggttcagagtgttagtgactagtatcgccatgccgtcacttaaatgctttcaggcttgcatgcttgtggctccaatggcgcacactcaggaaggaattgtaaaggagcacccagttatattataaagcctggatgtatggtttgcagataatggaaatcctgtggattttcactgatccagtctatctttaccaatagtatctctctcttctcccttatgttattagagaacctgatattggctattccaaagattaaattattttcaaatagttttcaacaaaaataaaagtgtattaggaagaaaaaagtagactatatgaagagtttgtgactgctcaatttaacttgttttttgccttatttctattaagactgttttactatgtttttgccctagggatatcagcaaatatttatttttcctagcatgatatagttagaatttcaagcagatttctttgtaattagaaggcatctgatagaaattgtaaaactttagaagttattataatgaaaccaattcctgaatcacaacttcatggactgactaaattgatttatagttgccttgtgaggtatgtatggggaaaacataaaaacataattaaaacataatttcgtcctttt

SEQ ID NO: 265959 - DNA, 6847 bp, Homo sapiens
  misc_feature (3418)..(3418): n is a, c, g, or t
  misc_feature (3471)..(3471): n is a, c, g, or t
  misc_feature (6561)..(6561): n is a, c, g, or t
gtccaccttgattctgcccgtagcaggtgaacctggtgtggtgcgcgcactgcgggtcctgattggctgtgcacgccacggtgaaaaacttgagcgtctactccgagtcctgcaagctcctagtgtctcctctgggtggacgcctaggcgcacggccgttacttctctttcacctgtggattcgtcagtttctcgttcgtttcaggaggcgatcccgcgccctgggtgcggtgaggccgctgggacagcggaggtgcctcccgacgcgaagcagcgagctgaggcggcggccagcggggaagatgagcggcagcagcgccaggtccagccacctgtctcagcccgtcgtgaagagcgtgcttgtgtaccgcaacggggaccccttctacgcggggcgccgcgtcgtcatccatgagaagaaggtgtccagcttcgaagtcttcctgaaggaggtgaccggcggcgttcaggcaccctttggggccgtcaggaacatctacaccccgcggactggccaccgaatccggaagctagaccagatccagagcgggggcaattacgtggctggaggccaggaagccttcaagaaactcaattacttggacataggagaaatcaagaaaagaccaatggaagttgttaatacagaggtaaaaccagtaatccatagcaggatcaacgtgtcagctcgctttagaaaaccgcttcaggagccgtgcactatcttcttgattgcaaatggagacctcataaacccagcttctcgcctccttatccccagaaaaaccttgaatcagtgggatcatgtactacaaatggtcacagaaaaaatcactctgaggagcggggctgttcacaggctttatactttagaaggaaaacttgttgagagtggagcagagttggagaatgggcagttttatgtggctgttggcagagataagtttaagaaactgccttacggtgagttactttttgacaagtcaacgatgagaaggccttttggtcagaaagcttcttcactacctcctattgtaggatccagaaagtctaaagggagtggaaatgatcgccactctaagtcaacagttggatccagtgacaactcatctcctcagcccctgaagaggaaagggaaaaaagaagacgtgaattcagaaaaactgacgaaattgaaacaaaatgtaaaattaaagaattcacaagaaaccattccaaatagtgatgaaggcattttcaaagctggagcagagaggtctgaaacacggggggcagcagaagtccaagaagatgaagatactcaggttgaggttccagtcgatcagaggccagcagaaatagtagacgaggaagaagatggagagaaggcaaacaaggatgcagaacagaaagaagacttttcaggaatgaatggtgaccttgaagaggaaggaggtagggaggctacagatgcccctgagcaagtcgaggagattctggatcacagtgagcagcaggcacgccctgctcgtgtaaatggaggcaccgatgaggagaatggtgaggagctgcagcaggttaataatgagcttcaactggtcctagacaaggaaagaaagtctcaaggagctggcagtggacaagatgaggctgatgtagaccctcaaagaccaccaaggccagaagtaaaaattaccagtccagaagaaaatgaaaacaaccaacaaaacaaggactatgctgccgtggcttagaagatttttaaaaagagagtatatggatcgcaagaaaaatgaagggttatcatacttgaaagataagcacatagttattgctgaatataatgtgacactatggtcgaatactacctacgaattataacattagaagcctagtggaaagaccagataactttaaatggctactaaaggataattacttacttttattgcatgtgttttaaaagtcatatagaaatattaaataagacggacagaggagaatttgcactggaagacaattgccacttgtaaaggatgaaaaataggatcactcttattgtacgctttattataagtttagaaggcagtttattctaaataatttttctctaggaaggcgtagaattttaaagaactggtaataggaaagcatgtactattttcttaaagcaataaactcttgaatgaacagattgcgatttactttcagacataatttggagatggcagtagatcaaaatgtgtccatgacttgttaacatgcctttctttcttcctccttagccaaaatccacctttgaactacaaagacagagcaaggcgttcattttggtgggaggaagcattggttcagagtgttagtgactagtatcgccatgccgtcacttaaatgctttcaggcttgcatgcttgtggctccaatggcgcacactcaggaaggaattgtaaaggagcacccagttatattataaagcctggatgtatggtttgcagataatggaaatcctgtggattttcactgatccagtctatctttaccaatagtatctctctcttctcccttatgttattagagaacctgatattggctattccaaagattaaattattttcaaatagttttcaacaaaaataaaagtgtattaggaagaaaaaagtagactatatgaagagtttgtgactgctcaatttaacttgttttttgccttatttctattaagactgttttactatgtttttgccctagggatatcagcaaatatttatttttcctagcatgatatagttagaatttcaagcagatttctttgtaattagaaggcatctgatagaaattgtaaaactttagaagttattataatgaaaccaattcctgaatcacaacttcatggactgactaaattgatttatagttgccttgtgaggtatgtatggggaaaacataaaaacataattaaaacataatttcgtcctttttatgaattcttaagagatgttcttccataaatatagaaataatatatttttcttaaaggatatatttttaattatgtggaagttgtaagcttgaaattttaacttctagtgcttttctaaaattcacaattacaagtttaaaacattttttctcttccaggtttcatttggaataaagagttggcagttatataaagcacttaataatactatagaaaatagatgtgttttttcttaatatgattttggtattttccacagatcagaagtgtaaacagagagataatgtaacagtatttggaagagataatgacacaaggatatagtgatctgggagcatgaattagaaacagggtactatgtttctggtgtaaaatctaaattgtgctttctactagcgttactttttcaaatgggatgatataaagcactgtgggctataagcaacaatcttgggttgntaggcaaatagaccaattgatctttattattattattattattattattattnttttttgagatgaagtcttgctcttgtcgcccaggctgggtgcagtggcatgatcttggcttactgcaacctctgcctcctgggttcaagcacctgagcctcccgagtagctgggattacaggcatctgccaccacacctggctaatttttgtattttttgtagagacagatgtttcaccatgttggccaggctggtctcaaactcctgacctcaggtgatccgcccgcctttgcatcccaaaatgctgggattacaggtgtgagccacagcacccggtcccagttggtcttttaatattaaatttgtgcactattactgggtctggagttaatgatttcaaatagtttctaaaaataactgattaaatgtaagaaattataactaattatcaaggtgattctcttttgtttcttcaatggagagtttctctttctcttttcctcctctaataaaaatatttctttttttcctgtccttttattcattatattatgaaacttaggttttaggaaacaccttaagcgtcattttaatgaagcacaacattgatattttacatgaataataacgtttggtattttaaatatacttcaagggggtaataagccacaataactgtaccaaaaaaacttaaaaatggggacatattcatcccttgtgtgtgcatattttaccacttgttgacaagatacaattgtgacctactttgaggggatgaataacgacttatcactttaagacactttgcaaacatgttactaaaaaaaggtgcctagccaaggaaaaaaccattcacttggaattaaaattgtggatgtcacttcagagatgactttaacataaatgctgaaagttcattcacctcacaaatgtggcagttttctctgtggagaatggtggtctccgtggcagactggctctccaaattaaatgaaactcattgacagacctgggaccttttatgtgagtggacagacaagatcttggtttggcttcatgtactgttttctagagagagtgctacgaaaaacttatgatgcttttatgtgataaccaatataatgctttaatatgttaattctttgtgatgctatatacatagtttttatagttttatgaaaccactttgttaaacttatctggattttaagacacttgtaaacaaatggtttgttagtaaaattggggcattaagagttttacagagcaaataaagaagattttgacaaaagtcattttgaggctaagggtgttttacctgggttaacttctgttaaaatagctattgagtgcccattgacttataaaatacgatactatgaccataaaataactttttacttcttattcttctctatgaccttaggatgactttatttttttaagacatttttcctatatgtttttgggggaatgttaggttgccacactcataggaaaagtgtgatgctatcatgcctcctgttttattgtaaaggtgtgaattcttgctatgtggtgtgtgaagacagaactatcccatacatacgtggttcagagtgagatatctctaggctcacagttgtgaacccatattaatatggtattattcctgccaactcttccaatttatagctcataaactaacatcctaaacattgtcattgaatgacctaccttatacacaaaggataaagttcattcacctagaaaaaaatctgtgcatttaaattagtggccgcaagacaacaggaagctttctttcattttttgttcaacaaaccttgcaaaagcaaagtttaaaaagtagattaattcatcaacagaaagcatcacatggaaactgtggccaatctgaagagaaatatagcatgtagacatagatatgtatcaaatacttatacagatgcactcacacactttaaaacattaaaaaggcctcctgaggcacagcgttattaataaaacaaggctcttttgggtgaagttgagagaagcaatgagttaaaacgtgagaggaaatgctaagaaatgatatatattatggtgctttaaatcttgatttcctaagactttaagagatttaaaattcttctccaaataagaaaccagcatgtcaatgaaaaatgtattctagggaggtgttgaaacaaatccggtttttaaaatgtgatatatcacataaaccaaaacagaaaccaagacatatcttgttttcctgaagtaactacagagcatggttcttttccatcaaccttaagcacgatacatttcaggtgtagattcttttataccaatacagattctgttattactgtttgtgaccatgtgtgtgcatgtgtgatttacatagatgtgtcaggactctttttcataccagttagccggggtatcacaaatagaatgaaagactgacttattggtccattagtttatataatgttcaggttcagtgcggaagcattttggcattcttcaggaatgaaaccatttttaaaaggttagtctgttactctaagatgatgaacacatacagttctttgtcattaaatatcatttttgtaaataccacaagatttttcctctttaaaacatatcgggacatttagatgggactgatttttgttctccctacatgaaatttgtatatttcctcccatgaagtttgagtgacatgaatggggaatacaagagtgttcccttatgttgataaggaaaaagatactgttttttgaagaggcataacatcctgtaggagatggggagttaggacagtttttaaaaatgcctggattaccataaggcatttataaaatgaggaggtgtaaccagtggagctctgttgacttaacgccaacaacgacttcagctttactctaagaatgggaccagatgaattctctgtagtttcatcagcttgaacgatatagtttgtttcatttattgtcacgaatgcaatgacatatggaaagagggaatgattgtagtcattcttaggagaattttcgagaaagcctgttttgtcttttgcttcagtgttttttcttgtgccttaaatctttaatgggtacaatgataatgggtgattgttgatgtaagtaaagattanattgaaggccagcacggtggttcacacctgtaatcccagcacgttgggaggctgaggcgggtggatcacgaggtcaggagatcgagaccatcctggctaacatggtgaaaccccgtctctactacaaatacaaaaaattagccaggcgtggtggcgggtgcctgtagtcccagctactcaagaggctgaggcaggagaatggcgtgaagccaggaggcggagcttgctgtgagccgagatcgcgccactgcactccagcctgggcgacagagcgagactccgtctc

SEQ ID NO: 265960 - DNA, 3701 bp, Homo sapiens
  misc_feature (1)..(2): n is a, c, g, or t
  misc_feature (2397)..(2397): n is a, c, g, or t
  misc_feature (2450)..(2450): n is a, c, g, or t
nngaccactgaatgttttctcaatgaaaatgtggaacaactgggggtggtgtggtggtcggaggagggggtgcacaaaaatactatcaactaaaaagggaatccaaatgtctattaaaaataagcatttgattgtaattccagcattcagccacacgatgtcacaattggattttgattttcactgtgtgtttgtctcaatagatgaaggcattttcaaagctggagcagagaggtctgaaacacggggggcagcagaagtccaagaagatgaagatactcaggttgaggttccagtcgatcagaggccagcagaaatagtagacgaggaagaagatggagagaaggcaaacaaggatgcagaacagaaagaagacttttcaggaatgaatggtgaccttgaagaggaaggaggtagggaggctacagatgcccctgagcaagtcgaggagattctggatcacagtgagcagcaggcacgccctgctcgtgtaaatggaggcaccgatgaggagaatggtgaggagctgcagcaggttaataatgagcttcaactggtcctagacaaggaaagaaagtctcaaggagctggcagtggacaagatgaggctgatgtagaccctcaaagaccaccaaggccagaagtaaaaattaccagtccagaagaaaatgaaaacaaccaacaaaacaaggactatgctgccgtggcttagaagatttttaaaaagagagtatatggatcgcaagaaaaatgaagggttatcatacttgaaagataagcacatagttattgctgaatataatgtgacactatggtcgaatactacctacgaattataacattagaagcctagtggaaagaccagataactttaaatggctactaaaggataattacttacttttattgcatgtgttttaaaagtcatatagaaatattaaataagacggacagaggagaatttgcactggaagacaattgccacttgtaaaggatgaaaaataggatcactcttattgtacgctttattataagtttagaaggcagtttattctaaataatttttctctaggaaggcgtagaattttaaagaactggtaataggaaagcatgtactattttcttaaagcaataaactcttgaatgaacagattgcgatttactttcagacataatttggagatggcagtagatcaaaatgtgtccatgacttgttaacatgcctttctttcttcctccttagccaaaatccacctttgaactacaaagacagagcaaggcgttcattttggtgggaggaagcattggttcagagtgttagtgactagtatcgccatgccgtcacttaaatgctttcaggcttgcatgcttgtggctccaatggcgcacactcaggaaggaattgtaaaggagcacccagttatattataaagcctggatgtatggtttgcagataatggaaatcctgtggattttcactgatccagtctatctttaccaatagtatctctctcttctcccttatgttattagagaacctgatattggctattccaaagattaaattattttcaaatagttttcaacaaaaataaaagtgtattaggaagaaaaaagtagactatatgaagagtttgtgactgctcaatttaacttgttttttgccttatttctattaagactgttttactatgtttttgccctagggatatcagcaaatatttatttttcctagcatgatatagttagaatttcaagcagatttctttgtaattagaaggcatctgatagaaattgtaaaactttagaagttattataatgaaaccaattcctgaatcacaacttcatggactgactaaattgatttatagttgccttgtgaggtatgtatggggaaaacataaaaacataattaaaacataatttcgtcctttttatgaattcttaagagatgttcttccataaatatagaaataatatatttttcttaaaggatatatttttaattatgtggaagttgtaagcttgaaattttaacttctagtgcttttctaaaattcacaattacaagtttaaaacattttttctcttccaggtttcatttggaataaagagttggcagttatataaagcacttaataatactatagaaaatagatgtgttttttcttaatatgattttggtattttccacagatcagaagtgtaaacagagagataatgtaacagtatttggaagagataatgacacaaggatatagtgatctgggagcatgaattagaaacagggtactatgtttctggtgtaaaatctaaattgtgctttctactagcgttactttttcaaatgggatgatataaagcactgtgggctataagcaacaatcttgggttgntaggcaaatagaccaattgatctttattattattattattattattattattnttttttgagatgaagtcttgctcttgtcgcccaggctgggtgcagtggcatgatcttggcttactgcaacctctgcctcctgggttcaagcacctgagcctcccgagtagctgggattacaggcatctgccaccacacctggctaatttttgtattttttgtagagacagatgtttcaccatgttggccaggctggtctcaaactcctgacctcaggtgatccgcccgcctttgcatcccaaaatgctgggattacaggtgtgagccacagcacccggtcccagttggtcttttaatattaaatttgtgcactattactgggtctggagttaatgatttcaaatagtttctaaaaataactgattaaatgtaagaaattataactaattatcaaggtgattctcttttgtttcttcaatggagagtttctctttctcttttcctcctctaataaaaatatttctttttttcctgtccttttattcattatattatgaaacttaggttttaggaaacaccttaagcgtcattttaatgaagcacaacattgatattttacatgaataataacgtttggtattttaaatatacttcaagggggtaataagccacaataactgtaccaaaaaaacttaaaaatggggacatattcatcccttgtgtgtgcatattttaccacttgttgacaagatacaattgtgacctactttgaggggatgaataacgacttatcactttaagacactttgcaaacatgttactaaaaaaaggtgcctagccaaggaaaaaaccattcacttggaattaaaattgtggatgtcacttcagagatgactttaacataaatgctgaaagttcattcacctcacaaatgtggcagttttctctgtggagaatggtggtctccgtggcagactggctctccaaattaaatgaaactcattgacagacctgggaccttttatgtgagtggacagacaagatcttggtttggcttcatgtactgttttctagagagagtgctacgaaaaacttatgatgcttttatgtgataaccaatataatgctttaatatgttaattctttgtgatgctatatacatagtttttatagttttatgaaaccactttgttaaacttatctggattttaagacacttgtaaacaaatggtttgttagtaaaattggggcattaagagttttacagagcaaataaagaagattttgacaacgagaaacaaaacacaacac

SEQ ID NO: 265961 - DNA, 2116 bp, Homo sapiens
gtccaccttgattctgcccgtagcaggtgaacctggtgtggtgcgcgcactgcgggtcctgattggctgtgcacgccacggtgaaaaacttgagcgtctactccgagtcctgcaagctcctagtgtctcctctgggtggacgcctaggcgcacggccgttacttctctttcacctgtggattcgtcagtttctcgttcgtttcaggaggcgatcccgcgccctgggtgcggtgaggccgctgggacagcggaggtgcctcccgacgcgaagcagcgagctgaggcggcggccagcggggaagatgagcggcagcagcgccaggtccagccacctgtctcagcccgtcgtgaagagcgtgcttgtgtaccgcaacggggaccccttctacgcggggcgccgcgtcgtcatccatgagaagaaggtgtccagcttcgaagtcttcctgaaggaggtgaccggcggcgttcaggcaccctttggggccgtcaggaacatctacaccccgcggactggccaccgaatccggaagctagaccagatccagagcgggggcaattacgtggctggaggccaggaagccttcaagaaactcaattacttggacataggagaaatcaagaaaagaccaatggaagttgttaatacagaggtaaaaccagtaatccatagcaggatcaacgtgtcagctcgctttagaaaaccgcttcaggagccgtgcactatcttcttgattgcaaatggagacctcataaacccagcttctcgcctccttatccccagaaaaaccttgaatcagtgggatcatgtactacaaatggtcacagaaaaaatcactctgaggagcggggctgttcacaggctttatactttagaaggaaaacttgttgagagtggagcagagttggagaatgggcagttttatgtggctgttggcagagataagtttaagaaactgccttacggtgagttactttttgacaagtcaacgatgagaaggccttttggtcagaaagcttcttcactacctcctattgtaggatccagaaagtctaaagggagtggaaatgatcgccactctaagtcaacagttggatccagtgacaactcatctcctcagcccctgaagaggaaagggaaaaaagaagacgtgaattcagaaaaactgacgaaattgaaacaaaatgtaaaattaaagaattcacaagaaaccattccaaatagtgatgaaggcattttcaaagctggagcagagaggtctgaaacacggggggcagcagaagtccaagaagatgaagatactcaggttgaggttccagtcgatcagaggccagcagaaatagtagacgaggaagaagatggagagaaggcaaacaaggatgcagaacagaaagaagacttttcaggaatgaatggtgaccttgaagaggaaggaggtagggaggctacagatgcccctgagcaagtcgaggagattctggatcacagtgagcagcaggcacgccctgctcgtgtaaatggaggcaccgatgaggagaatggtgaggagctgcagcaggttaataatgagcttcaactggtcctagacaaggaaagaaagtctcaaggagctggcagtggacaagatgaggctgatgtagaccctcaaagaccaccaaggccagaagtaaaaattaccagtccagaagaaaatgaaaacaaccaacaaaacaaggactatgctgccgtggcttagaagatttttaaaaagagagtatatggatcgcaagaaaaatgaagggttatcatacttgaaagataagcacatagttattgctgaatataatgtgacactatggtcgaatactacctacgaattataacattagaagcctattgcatgtgttttaaaagtcatatagaaatattaaataagacggacagaggagaatttgcactggaagacaattgccacttgtaaaggatgaaaaataggatcactcttattgtacgctttattataagtttagaaggcagtttattctaaataatttttctctaggaaggcgtagaattttaaagaactggtaataggaaagcatgtactattttcttaaagcaataaactcttgaatgaac

SEQ ID NO: 265962 - DNA, 352 bp, Homo sapiens
agcagaagtccaagaagatgaagatactcaggttgaggttccagtcgatcaggtaatctccatgccttaaaaaatatgtgtaagacaattatagtgttttttttccaagttttgtgttatctcctacaaattgttcctatacctgtatgaattaaaccctctaaggtactatgtggctgatcaaccttaaaaacataacaaaacaccattctttctcctagtattcctgtgaagaatagccatttagaccaagtctttttaaataacagcaaatggtatttccttaataaagagcattgaagagcaagatgggatgggattaggtatgagataaagtgataaagtttgatat

SEQ ID NO: 265963 - DNA, 419 bp, Homo sapiens
ataaatgagaagatttttttctctttcccatgtaagtccagtacaggtgatccagacctgatatggcgctccacagggtgaggaatcctggcccctcaaatgtgttactctgctatgtattgcctccatttccaaggtcattattgattcaaaaatggttgcttcaaactcagtaattacattcacaatccagccagcaacaaggaagaaagagcaaaaacaaggcgtactccttatccttgacattgcacgtgccactttgcccacagctcagaagaacataaaagaagacctgaacaaaggagagatatagtatatttattgatagaatttcttagcattgtaaaattgtcacttgtctccaacataatctagtaaactcacattccaataaaataaaattaaggtcaattctaaaa

SEQ ID NO: 265964 - DNA, 481 bp, Homo sapiens
cacgaggccaatttgagcatttctatcgctacagaaagttctattggacagcgacagcacttgtgtagaccagttctcaactgaggccagttttgccctccagggaacatttggcatttttgattgtcacagctgtagctgcagtactactagcatctaatagttagaggccagggatgctcctaaacattccacgatgtgcaggtcagctccctacaggaaggaatgatgtgatccaagatccaaaacgtcagtagtggcaaggctgaaaaaccctggtctagatagaagctgttgccagccatggctggaatgtgaggtttgttctctctctctccctctctctctctctccttttgttataagagacgagcatgtataccaaaggtgctaaagaccaattataccaaattgaggttttctctatgacttcctaaggactgaaattgcaaagggaataattttcccactacatttttca

SEQ ID NO: 265965 - DNA, 659 bp, Homo sapiens
aagctttaaatatatatatttatatctcaagactgctctgagatactcttgtccccagtagttttactgccaacaaataccaataatgacaaacggtgattaaaagggcagatagatgtaaatgaaggcagaggaggaggatgaaatgaacatctgcttttttcagctctctgacagaaattcttaaaggaccaaaaataacactcttgtttcaacttatgttaggtgtaggaaaattttctttttttctctttccagtctgagtatgcttcattgatttgtatattgaatactaaattgttttagaaaaaaaaatcattggctgataagacacttaaatgagaaaagctagtctgtcacaggcatgtaggtgtgccatatctatttaaatagaggtttaaattattgatgagacttaatgaggaactggtgtatattgtaaccaaaattgtagattccactgtgaacaatctgtgcatggatcgattcacatatttgagtctaccatttcaggtacatgaatgtacaggagctactgggaatataaaaactggaaaataaacattatcatctattaccactccctcctccttggtccattttagtaaagaattcagtaaagtgataggtaggctatcttgaatgagaagaaaataaaa

SEQ ID NO: 265966 - DNA, 959 bp, Homo sapiens
gaacaacttcagggccaccatcctcttctgggcagcggcagcatgggctaaatcaggcaagccttcgggagagatggacgaagttggagttcaaaaatgcaagaatgccttgaaactacctgtcctggaagtcctacctggagggggctgggacaatctgcggaatgtggacatgggacgagttatggaattgacttactccaactgcaggacaacagaggatggacagtatatcatccctgatgaaatcttcaccattccccagaaacagagcaacctggagatgaactcagaaatcctggaatcctgggcaaattaccagagtagcacctcctactccatcaacacagaactctctcttttttccaaagtcaatggcaagttttccactgagttccagaggatgaagaccctccaagtgaaggaccaagctataactacccgagttcaggtaagaaacctcgtctacacagtcaaaatcaacccaactttagagctaagctcaggttttaggaaggaactccttgacatctctgaccgtctagagaacaaccagacgaggatggccacctacctggcagaactcctggtgctcaactatggcacccacgtcaccaccagtgtcgacgctggggctgctcttattcaggaggaccacctcagggcctccttcctccaagacagccagagcagtcgtagtgccgtgaccgcctctgctggacttgcctttcaaaacaccgtgaacttcaaatttgaggaaaactatacctcgcagaatgtcctcaccaagagctacctctcaaaccgaaccaactccagggtgcagagcattggaggggttcctttttacccaggcatcaccctccaggcctggcagcagggtatcaccaaccacctggtggccatcgaccgctctggcctgccgctgcatttcttcatcaaccccaacatgctacctg

SEQ ID NO: 265967 - DNA, 342 bp, Homo sapiens
aaagcagggaagaagagaatgggaagagaaatggcagggcagagagaaaggacagcagtggaatagccaccccctgtctcttaaaaaggtacactacccagaagatgcactcccagtgaggaaaccccagcagctggacactgtaagctgtggtgttgttggctgtgcttgaagcagttgttgggggcagggagtgtgtgagaagaggctgtcccttggtaccatagttatagaagaatgagaaagaggaaggaggaaggaagaggaaggaggaagaagaggaaggaggaaggaggaggaaggagaaggagaaggaagaaggagaagaagaaaagaaggaaa

SEQ ID NO: 265968 - DNA, 431 bp, Homo sapiens
accagagttgaaatccagatgactcttatttgctttttgattacgggccagttattttgcttcagcaagccttgatgtgttagtaaatgaaataattaaagcatatgaacaaaagctgcttttaaatacagactacatttttattttgtatgaatgttggcgcagatgaaattaccagcttttccatttaagcagactaaaggaaagaagtgatcttagaaaggtaatggatattttacacagttttgaaaaatccacattcatcaaatgtggattttaggaatctccaaaagattcacccatttgaagtatctgggccaagcacgatggctcacacctgtaatcccagtgttaggggaagccaagacaggaggatcgctttaggtcaggagttccaaaccagcaagacctctgtctctccaaaaaaaaaa

SEQ ID NO: 265969 - DNA, 288 bp, Homo sapiens
gctcctggtggtgatgtgtgtgtgtgaggcctcattctgctgccatcattttgcagccacagaggaagccaggccaaaaaggaaccagcacagagaagcccaggaaagcccaggaaagggcagagaaatagctcacagtgcacataaagctaccgcctgtgtcagtttttggctcacaaagcgcctctggttaagccagtttgagctggggtttctgtgcttgcatccacgtgcatgcatactcttcttgcctaaagcctgctcaactctgcagggcagcctctggct

SEQ ID NO: 265970 - DNA, 568 bp, Homo sapiens
cagaagaggcaagacacagtcaccaatgatatctcgccaaagaaaccacgcccacaccaatgccaacacaaaactgtgtttactgaaagccgaaaacagtattaaaaaaagtgtgtaagtaaagtgttatggtagggttcttcagatgtaatattttactggtactatttatttataaataggaattctaattaagtaataacatgaaatgaaacccagcataggagctggccaagagcttttaattttattgatactcaaaaccaagtttgtgtttttttgtttttttttgtttttttcctctttcgaatgtgctttgctttttttgattaaaaagaatttttttttccttttttataaacagaccctaataaagagaacagggtaagatgtgaggctgagtgtgtttaagtacgtgagagagtgtgagtgtgtttgtaagtgagtgtccctatgcgattatgtctctttacgttgctaaggggggagggtgaggattaagtactcgtgccttatatttgtgtgccaattaatgcctaataaataccatgtgcttaaacaagtaaaa

SEQ ID NO: 265971 - DNA, 646 bp, Homo sapiens
ctacttgggaggctgaggcaggagaatcacttgaatctgggaggcagaggttgcagtgagccaagatcgagatcacaccactgcactccaacctggcgacagagcaagactccgtctcaaaaaaaaaatctaactctttgggcataataatgattatatccatttctaatattaggccgttctcacattggtataaagaaatacatgagactgggtaatttataaagataagaggtttaattggctcacagttctgcaggctgtacaggaagcatagcaacttctgcttctggggagtcctcaggaaacttacagtcatggcggaagtggaagtaggaacatcttacatggcacaaactggagggagagagagataggggaggggctacaaactttttaaaacaatcatatctcatgagaactctaccacaagaacagcaccaaagagatagtgctaagctattcttgaaggatccaccttcatgatccagtcccttctcactaggcctcacttccaacactggggattacagttgaacataagatttgggtggggacacagatccaaaccatatcacttagtatgtacagatatgtaggagccttcacatacggtgtttcttcttccattcgtcacttgacttaa

SEQ ID NO: 265972 - DNA, 460 bp, Homo sapiens
gtgtaatttgcttagttaacggcataaaaggccagaatccatatgatcatctccatatatgataaatatcagaagcaatggattaggagaaataaagcttcaataaagttgaagaaaatgaatattgttttcatctgatatcagtaaccatatatatagtattatgggatgaaagggatacctttcacaattgcatcacaatctataaaaatgtaaaagtaaaattaacaaaaaacgtctatgagataaacgatagaaatttactgaagtatctggaaagtgatattgataaacagagatacatttcactcctggctaggagctcagtattataaattctcttcaaattaatgtaacattcctgtgcaatttcaatgaaattttaatagaatttctttttacaactttaaagtttgtttctaaagttcatacaggagaataagtaagcaaaaatatcaaa

SEQ ID NO: 265973 - DNA, 331 bp, Homo sapiens
tctctgccaacttaatatttgaacagagatttaaaggaaaaaatattacagaagtgggaatcctcaaaatactttctaaaactagctttgggctgggcaccatagctcatgcctataatcccagcactttgggaggccaaagaaggaggatcgcttgaggccaggagttggagaccagcctggggaacacagtgagactttatctccttaaaaaaattagctgggcatggtggtatgagcctgtagtcccagttacttgggaggctgaggcaggaggatcgcctgaggccagaagtttaccagcctggggaacatagtgagactctatatc

SEQ ID NO: 265974 - DNA, 523 bp, Homo sapiens
catgtccatcaacatactaacagtgatcatctttgatgaattatgggtaatatttcatcttttaaagtttatattttctgaagtttctacagtgaacatgtattgttttatactaagaaaaaagtaattattttaataacatccttcttttgtaattattgcctaaaatagtcattctgttacatataagtacctaggcagaaagtgttatttctacccccgccaagaacaccaaaaaaatgttgtttaaaaactcttatatccagaaacttgaagataatctatactgatccactaaataactgctatctgaaatcactattactttgttctccactgaactgctaagggtgtggtggtggttggaaaagtcaccattgggccttgtgactttctagtgaggtgctgggccccaaaccctctctccaacccaaagctactctacaacagtacagctgccatggaaagcctcttctcttgtcattgaacgactctttttttttcttttttgaaatggagtctc

SEQ ID NO: 265975 - DNA, 1019 bp, Homo sapiens
tggctactccatagacagagcagccccgaggactgctggttgcccatttttatggttatttcttaatgatatgctaaacatcgggtggattattcacgcctcccctttttagaccatatagggtaacttcctgacgttgccatggcatttgtaactgtcatggccctggtgagagtgtagcagcgaggacgaccagaggtcactctcatcgctatcttggttttggtgggttttgggcggcttctttattgcaagctgttttatcggcaaggtttttatgacctgtatcttgtaccgacctcctatctcatcctgtgactaagaatgccttaacttactgggaatgtagcccaaccggtcttagccttagtttagagagtccctattcaagatggaattgctctggttcaaacacacctgacactaccccccaggccgaggacggggtccccaggggcaggcgagcctccacagatccggggccattcatctctgcagcggccgcagccagccgccagggtgccctgctcccaggtgtagccaaaatggccctgagtctgtttccaccaggcccgggagcgagaagaggcgcaagacgctgattgggccaggcaccggcacacgcaagtagcggtatggaggaggcaagaatctggttgggcaagacaaggaactaaccgggcaggcgagacgctgattggatgaggcaggttgcttatttgccaaagcgtgactcttacccggcaacgtgtgtcgccgcttgatcgcagcggtgcggtgattgggtaggtcagttctggcgggccgcgcgcgcgggctttggggacgtgtcgtttccggcctccagcgtgaagccgactgtgggctctggaatagtcggcggttgtgtgtcctggtgctcgaagcttagccgggcgacgcttcgggagagaggcagaaccagcctcccagagctgtgggctcggctggatcgcgactccgccattaacccctccgccaacgtccccgcttgtcgtcct

SEQ ID NO: 265976 - DNA, 588 bp, Homo sapiens
cctgcctgggattccccacctcgccctgacaccccagctaggagacgagaaagaccttcagggaactggcctggccaagggcctctcaccggactctgttcatctttgcaatcatcacaacctccgggagagacagatgctgacgatttgtaacaacaactctcatttgtggagccagcccttttccagcccgtttagttcttgcaattaacgagatacgatatcattagaccccatttacagacaaggaaactgaggctcagggagactaactaccctggccaaggtcacatgcctagtaaaagtggcagagccacactggagcccaagtctggccaccccagagcctgagctcccttcccctccctggtcctggctctaacttgggtcctgtcccctgagagtcccatagtaatatccctcgaggctgggcaaccccagcctgcaccctgaagagtcacttcctccggatgtcccttcctccatggtccccatgatctctgggcagggtctttgctgtcctctcccttccttcacccagactcctgcttccaagttcatggccagagctgccctactgttctgccc

SEQ ID NO: 265977 - DNA, 514 bp, Homo sapiens
  misc_feature (46)..(46): n is a, c, g, or t
  misc_feature (70)..(70): n is a, c, g, or t
ccctgccgccgcccccccgcccgtacgtgcccccgccccccccccnggttatgggcaactgtctcctttntttttcagcatgaaaacagactaatacaaactcccttctaatgattggaataccacagatgtgatatgatgtcacttctgagattagcctatgaaaggactgtgtcttctatctcttggattgctcactctggagaagccagccatcatgctgaaggtccatgtgacaagggacagaggcctgacaaaatccatgtgagtgagcctgcaagagggtcctctgcaagataatccttcagatgacaccacagacgtagttgacaactggactgcaatctaataaaacaccttgagacagaggcactcagctaaacctaaccctgattcctgacacatggaagctgcaaaacatgaactacggagtccccatccaaggcactgaatgagaacatctggaacactcaataaatatttcatcaacaaataaatgagggctttaatttac

SEQ ID NO: 265978 - DNA, 378 bp, Homo sapiens
gtgcatgattccacataaatttagggaattagagatcagacaaagttataagacagctgttgacgtcccactcaccagttaggaggattgagaagaagctgctttccaggaaatcccagtcgacttccagatagatctctttggtcaaaaatgtgtcacagctccaactctttttttgtaagatggtgaacacaggcaggggccacatctgacttacctctagctccaggtactaaagagccactggggagagctcagtcatgtaatccaatactatctaaacatgaactacggagtccccatccaaggcactgaatgagaacatctggaacactcaataaatatttcatcaacaaataaatgagggctttaatttac

SEQ ID NO: 265979 - DNA, 194 bp, Homo sapiens
ttccttaaaaacatatacaaaacatggtcacttctcactgctaacaccctgatctaagccacaaccacctctcacctggattactgcaatagcatcttaactggtctccccacttctacctctaccctactatagccaacctcaacacagtagccagagtaatccctttatttaaaaagtcagattatgtcact

SEQ ID NO: 265980 - DNA, 365 bp, Homo sapiens
cactgaaagctgtctgatagaactgtgtactgtcccaaatattgtcagtactggtgcctctagctcagtggttgccaaaatacaatgtgattagaatcacctatagggcttgttaaaacacagaatgttcagctccatgctcagcatttctggttcattaagtcttgaattggatgctgagaagattcatttcaaacgagttttcaagtggtgctcataatgatggtttgggagccacgcgttgagaaccaccatctagaataaattataaattgacattctatatcagcaatagaacaggaattacatgttttgatttcatacaaaactgtagtcgtttaaataaattgtaatgtcatggaagt

SEQ ID NO: 265981 - DNA, 474 bp, Homo sapiens
agtcatatcacagggtaacaaagccctcagttcctagaatgtaaccaaattattgaggccattttcagaatcacttcttctcctgctcttcctgttcggacttccttcccagcccaccagcaacacacaaggagtggaagagaaaacaaactgagaaggacgttttctctttgctgccaaacttttggaccatgtttcataggtgggaagggaagagaacatgctgagaggcaagatctgcatcaatgaaaggacgcttcggtggatgctcagacaacccagtcttaccttccagctgccttacacccagtgaaacaagaggccaccctgtccccagccgcacctgcactccctgggcagactggagccttggagtcatgctgtgatgtgtgtgtgtgggtgtgcgtgcatgtgtactttgggcggtttcctttttttcttttctaccttttaaatggaaatactgcattaaaa

SEQ ID NO: 265982 - DNA, 427 bp, Homo sapiens
gagagcccccagatcctgccttctattgctccggggctcagatggccctttcaagcccgaggcggggtccgggccctcttgctttatgagattctggtcctgctgtgctggggacagatctggagcagactcccccaggccccgcaccaacccggccactgctgagggcctgccctggcccactcttctcactgccctacaccagagcctcctcgccctcccatccttgctgccctgtccctgctccaggtttgacacctggtcctcaccacatctccctgacctccagggatggccaggaccctccacttctccagaccccctcccgccttcctctgccgcggaggccccctcctcattcttgccgcctcctggggcatttttccttccccgatgggattacagatcctgaggaggattacaggag

SEQ ID NO: 265983 - DNA, 672 bp, Homo sapiens
cacagctgatagcttagatatgttaacttagatacattaagataacttagatacaataacgaagacacattactggaacttagaacagtgttcttctacctgcgtccctacctcactccttctggttgcagagcaaaaaaacaaaaacaaaaaaaagcaaaacccaacaatctttgagacaatgcaataattaaacagggaatatacagttgaatgtaggtttataaagatagaaggaatgttaaaattctcagcaaatttaacaattcagttccagagaacttgccatgacctatgatacatgaatacaagaattaaaaatggtgtcaccaagagctttggctctatatgaaaaatattgaagcaaaaaaaaaaaaaggagatctaaaatctggaagcttctcccatccagcctgcagcttggggttgtctttgtgccgacagctgcccagtaagtcagaagatacctgaaggcttggatctccctgttgccatgttgtttactcaggaaaagccccagccaagagtcacatcttttaagaactgtgaaaaaaagcaagtaatctgtcttacctatttaatggtgagaaacactgaaaagattgataggaatgcccctcttctgctgaatccaactctgcaaactggttggagagctgaaagggaagtgtg

SEQ ID NO: 265984 - DNA, 405 bp, Homo sapiens
gagcactcacagttatagatccctgacactttgcaggccagaagaagctgaatttttagttatttgatcctttccccagttagggttccagcttcctcctcctttccctttttcagatactaagaacccaccatgagcaccacactgacaggccggcatagacaagtaaaactctgccctcaaggatctaggcccagtgaggaagccgagacctttctaaatagttgtaacatatagaaaatgagaacagctgaaggaagtgcaggaggaacgccacatgagggcatttgcgggtgagggagggtccaaggaactttgtggagcaggtgtcatctgagcagaaccttaaaagataaatggtatttaagcatgtatcaatttgccaaataaaattgttaacacaaa

SEQ ID NO: 265985 - DNA, 424 bp, Homo sapiens
aacgacatctgcatattcagggactgggtatttattttagtctttgcagtctggcttagtttgtgcttgtcctttttgggaggcccttccaggaatttaagcaaactggcttttgtgttccctgaggctgtgatcactgcagctgttgaacactagagaataatctacatccaggcttgctgcaggtcttacaagggcttcaaggttgacatggctttctggcccacatggacctgggaaggggtcaagttgcgtactaaggctgtgggaatgcttgccagggacccaggtccagaaggctgtcctggtggcccagatgggcatgtttcccagcaaatcttttgacaggtgagatgagtctctagttgcaatgagaggggctggagttgagactggccctcttgggatatattgtggaatggag

SEQ ID NO: 265986 - DNA, 401 bp, Homo sapiens
aggtttttaccgaaacacacagtggaaaatagagaatatactttacgccatgacttagtgtacacatacatgtatttcacacaactgacataggttacagggaataactttcacccttcgtaaaagcggtgcacttggatttttcttttcagttttatttcattaaataaaaaagtggccgggcacggtggctcacgcctgtaatcctagcactttcggaggctgaggcgggcaaatcacgaggtcaggagttcaagaccagcctgaccaacatggtgaaaccccatctctactaaaaacacaaaaaattagctgggcatggtggcgggtgcctgtaatcccagctacttgggaggctgaggcagaagaatcacttaaacccgagaggtggaagttgcaga

SEQ ID NO: 265987 - DNA, 851 bp, Homo sapiens
ccagaggcaacactgatgaccaaacatttattttgtctcatgtcactgccagggtggtgtggttacctgccccatgctcattttgttctttggtgggatccctgtggccaagggacttggaaccaaaagacttaaaactaattaaacattggaggccagatgaagatggaggttcacaggcacgcattaacccttaaaaaccttttgagcaacataaccaaaaagcagtgttacaaaagtgacttgtctatgagttctgtgtgttgagccatgagctgtttggtaatctgtatgcccatctttaatttggagggtctgaactaattttatctgttgaaactggcccttacaatctcatgtgcccaccccttctgtgatagtccatgggcctactgggagggtgcttgatactgtattgctttagcagtagtgccttggcaatggaaagcagattggcctagggggattgaatagttttcaaattctagagatactaggtagagagaaaggtaatcttcaatgttttacccaatttctgtaagctgtaaatagtttaaaagaaaaaaggttttattgactctgaaaagcaaaacatgaagaattagcaatgtttatttgattttgaggacatttgtcaaagatgttcaaaggctcaaagcttttaatcaaaatggaattacaggtcattgtaatagttattcattaaaccaagagtaataatcaaaagactttaaatgcaatatggaaagtcacatggatgtaaaaaccttaacccttttaaagcttagttttcctaagtaataaaaaatctaataaagaaaacatgggaattatcttgataaaatgtaaaa

SEQ ID NO: 265988 - DNA, 521 bp, Homo sapiens
ctggaggcgtttttggttgtcacaattctgtgtatgtgtgtgggtgggcggggggcaggggattatgttggcatctagtgagtagataacagagatgctgctaaacctacaatgctcagatggcccctaacaaagaagtatgttgtccaaaatgtcaatggtgcagagggtgagaagccctggtctatacagagctcagcagtccagagcaattgcaacctctgggagttgccaagagctcctctgcccagcaacaggcttggcctctctcctgtggctgccacaagagttaaagccactgtctggaatgccctttggcagtggccaagtgtcccctgcagaactgactgcgggacatgcggtgcatcagccggagctgatgtgttttgtaatttatagtcacagggcgcctgtcttcatttagcagtaggcctgctggcagcttccctgccagggaggaagcaagttccacagaggcccacagcccccgccagctgccggcccgtggtatttggggacgg

SEQ ID NO: 265989 - DNA, 469 bp, Homo sapiens
ctgtggttgtgaccagttggagagacattaggagatgagatactatgttcactcctcacagctgtaccagggacctgagatattccgtcactattctatgagattttggagatcccaccagtggttttccggtgccagggtatgagaagatagtctccatgtccaaactcacaatttcagaacaaatttcatcaagataaaggcctgggctggtgaatggttcctgctttcactattccagatgtccagctctgtaccttgctgctctccttaaagcctgcctccctctagatggtctggcttgatgatatccaacctgacgtggcctgaagagacagacagtggctcttgctagctaattattgtcagatggatcggcagccgaccaacgcttctgaaactattgtttttggcaaatgttcctcaacattttcctggtatataaataatgatcccttgcagaaagtca

SEQ ID NO: 265990 - DNA, 361 bp, Homo sapiens
tgccactgcactccagcctggcaacagagtgagactccatctcaaaacaaaacaaaacaaaaacaacaacaaaaaactcagctctaccacttgctagctgtgtgatcctaaccaagtcagcctacttcttggagcttcattttcctcatatgtcaaatggagaaaaagatcttaatctcataaagttgatgtgaagattaaattacataacaaaaatatagttccaggaacatcaataaacattagttatcctcctctataaaaatgtttctctagggagcaaaggagttacagagcagaggtagacaagcatttcttagctggtaaagggtaaagtcagaaacataaaccaggtatgatg

SEQ ID NO: 265991 - DNA, 322 bp, Homo sapiens
gtttttttttaaattacattcagtgtttaaacctggacagaaaactgctgaagtctacaaactttggcattcaagagtagaaaacagccacaaaaatactgaaaatattaagcaatagttgatactacatccttagaatgggaaatttaactatttaaaatataattatgttgttcacttcaggattttcagaaaaacattgttccctctctctcttcccttcagtagttaagttgggaaagttagcaagccaattttatgccttctttcctagaacagacaacacatcaccaaactgctacaagttgggctcaaaataaaa

SEQ ID NO: 265992 - DNA, 401 bp, Homo sapiens
ccaagttgtagaaaggaatccagctacccttatcagggagagatgtggagaaggaacaaaaggcccctcccagaaggcactgcctaacccataccctctgctttgccctctcgaataaaaaaagacgtcacccctgaatgccaagatgcacggcactccagacatctgcagtacttaacagggcattaaacagctcgcactgcagaaacagacgctgcacgtggttctgaggctctgaatatggacggaacgtagaaaatctgtttctaaacctcttccagtgagttcttcttggttgactaaggctgcaatttctgttttcagacacaaaatactcttgccccctcatttccttcttttcttctaaaccaggaaagaatacaaccttgctgtttcccaag

SEQ ID NO: 265993 - DNA, 492 bp, Homo sapiens
cgcaggcatagcgctaggccccggcgccttcacaacaaagggacgctggcgggcggggcctgagaggcgcgcggtggaggggccgggcgcgaggccgcggagacagctcggagctcggcactggggagtggcacagcgctggcggatccaggtgggcttcacggggcgcccgcgggaccggaaatgacgcgcagaaccctgcatcgggctcctcgctgccccgcgggcgccgctcctcagtgccccagagccacggagccggggaaacgcgccgcggcccacaacgcccccgcggctgcccgttggttccgcccgggccgttctactccaggcagacgggaggagaaacacggcgcgctcagcgtcccctcccccgttggttctgctcgggcccttccactgcaggccgacgggggtggaaacacgcagtttttttttttttttttaaggtctagggtaacacggggcttttaagtgcctctccgctgccgc

SEQ ID NO: 265994 - DNA, 450 bp, Homo sapiens
actaaatggtcctaggttggaggaagaaaacttactgtaaaggacagtattggggaaaactggcaaatttggaatatgtactgactgttagatgatactcttatatcaatgttaagtgtcctaagtctgataatacattatggaaatgaagagaatgaccttgttcttaagcggggtgaatgatcatggtctttacaacttattctcaaatgattcacaaaagagagataaagcaaaagtggccagttttaaagggcatatgggtgtttattgaattattcctgcaacttttctataggtttgaaattttttcaaaataaaacttttttgcccaggcatggtggctcacggctataatttcagtgctttgggaggctgaggtggaagtatcgcttgaggccaggaattggagaccagcctgggcaacatagagagatcccatctctacaa

SEQ ID NO: 265995 - DNA, 587 bp, Homo sapiens
aggatgttcttgctcaaaacttaagtggtggacagaaaagaaagctaacctttgggattgccattttaggagatcctcagattttcctgttggatgaaccaactgctggattggatcccttttcaagacaccaagtatggaaccttctgaaagaacgcaaaacagaccgcgtgatcctcttcagtacccagttcatggatgaggccgacatcctggcggacaggaaagtatttctctcccaagggaagctaaagtgcgcgggctcttctttgtttctaaagaagaaatgggggattggatatcacttaagcttgcagttaaatgaaatatgtgttgaggaaaacataacatcacttgttaaacagcacatccctgatgccaaattatcagccaaaagcgaaggaaaacttatttatacattacccttagaaagaacaaataaatttccagaactttacaaggatcttgatagctatcctgacctaggaattgagaattatggtgtttccatgacaactttgaatgaagtattcctgaagctagaaggaaaatctacaattaatgaatcgggtaaataaaatgcatga

SEQ ID NO: 265996 - DNA, 618 bp, Homo sapiens
aggatgttcttgctcaaaacttaagtggtggacagaaaagaaagctaacctttgggattgccattttaggagatcctcagattttcctgttggatgaaccaactgctggattggatcccttttcaagacaccaagtatggaaccttctgaaagaacgcaaaacagaccgcgtgatcctcttcagtacccagttcatggatgaggccgacatcctggcggacaggaaagtatttctctcccaagggaagctaaagtgcgcgggctcttctttgtttctaaagaagaaatgggggattggatatcacttaaggtaaggtcacttaagaaggctgggagtagatctagtgtaaggcttgattggttttgtttttgagacggagtctcgatcatctcggctcactgcaagctccgcctcctgggttcactccattctcctgcctcagcctcccgagtagctgggactacatgggcccgccaccacgcccagctaagtttttttgtgtttttggtagagtcggggtttcaccgtgttggccaggatggtctcgatctcctgacctcgtgatccgcccgcctcggcctcccaaagtgctgggattataggcgtgagccaccgcg

SEQ ID NO: 265997 - DNA, 490 bp, Homo sapiens
ggaagattcctgtattagttatctactgttatgtaacaaattactctaaaactagcagcttaaaaaacaacaaatatttattgtctcaatgtttttgaaagtcaaaaatatggaagaagtttagctggcaagttctggatcagggtctttcataaggttagatttgagatgtcatctggggctgcagtcatctgaaggctggactggggctgaaaaatctacctcctgcatagctcaaccccatggctgttggcaggaggccacaggtcctcactgactattggcactaatcataaaaaagttggagtggctatattaatgttaggctaaatatattataagataaaaagtatattttgagatgaagaagaatatttcataataaaaaaaatgccatttgccagtaagatataacaattataaatgtgtacatgcctcataacaaattcaaaatacataaagcaaacgtgaaagaactaaagggagaaat

SEQ ID NO: 265998 - DNA, 257 bp, Homo sapiens
atgttccattgtaattctctgcctgtaatctcccgctccaagtgcccttgggtctacagttctccggcagttttcatgtgccatggcacctgccactgctttcagtggggtccaacctgctatccaactatgccaccgttcccatctaagctgagtcagatgagataaaaatcagttcctcaggcagcctccagacaagacagaacagtgcaaacaagtcccagtcttttccctctgaaaggggaattgtgtgactt

SEQ ID NO: 265999 - DNA, 1060 bp, Homo sapiens
attttaagcccaatgctaagatctgattcatcaagtacttaggacatgggcatcaaaggaaacacaaagtatctggtagaacaaatggcatccagtgtaggagcaaaacaaggaattagaaactaaacaggtgccagcatcacttcaaatattacttaggtagaacatggcatttgaaaaaggtcagaagcttgatctggggaaggaagaaataaaagtgaagcaacatacagaaccctgagaaacattcagcagttgagacgagcagcctttccatttgtcttagattacttatcttgcccagaatagacaaggagactaatgaagtcacagagtgtggaagctgccccattgtctggggctttatgaagtcatcagtcaaaagtataaaaagaagagtgatgccagaagtttggatgagatctctgaatatcctaagccaagtgcaggccataggagaaagcagtgaaaaagaaacactgtgacaagcaaggaagaaacttcagaccaagttgacaggcagcccttcagtttactgactgccgcttcttacctgccaacgccaagcacaaagctgcctgcagagccagcctctatctgtggtccttgtgccaattatcactgccccactcatgccgcaggatataaagcagagtgacagggtcacaggactgccagaggaatacagcttctagaggctacccacattcctgggctaatggccccttcctacatcttcaaagccagcagtggtgggctgagtctttctcctggtatcatctcttcattctctatctccctctcccaattttaaggacctctgtgattatattgggcacctggatattgcaggatacgctctctattttaaggctatgctccgtaaagagagtgcctcctctagaatcacaagacctaagcatgaatcttcctttgaaggataaaatggaaggaaaaaaactggatgaggaaaagaagagtggggaatagaaagagagagagagagaaagatggataaatttttaaagttactataataaaaatcttctacaacgaaaaa

SEQ ID NO: 266000 - DNA, 1124 bp, Homo sapiens
attttaagcccaatgctaagatctgattcatcaagtacttaggacatgggcatcaaaggaaacacaaagtatctggtagaacaaatggcatccagtgtaggagcaaaacaaggaattagaaactaaacaggtgccagcatcacttcaaatattacttaggtagaacatggcatttgaaaaaggtcagaagcttgatctggggaaggaagaaataaaagtgaagcaacatacagaaccctgagaaacattcagcagttgagacgagcagcctttccatttgtcttagattacttatcttgcccagaatagacaaggagactaatgaagtcacagagtgtggaagctgccccattgtctggggctttatgaagtcatcagtcaaaagtataaaaagaagagtgatgccagaagtttggatgagatctctgaatatcctaagccaagtgcaggccataggagaaagcagtgaaaaagaaacactgtgacaagcaaggaagaaacttcagaccaagttgacaggcagcccttcagtttactgactgccgcttcttacctgccaacgccaagcacaaagctgcctgcagagccagcctctatctgtggtccttgtgccaattatcactgccccactcatgccgcaggatataaagcagagtgacagggtcacaggactgccagaggaatacaggtaggggcctgcagagtatgcggattactgccaagtgatcaactatacaaaggaagtcccatgttacgacactaactcatatttttctactattagcattagtccctggtatataaaatttccatatattggctgaactgaagtgggatccctgtaggtaactctggttatatttaacaaaaataagatgtagaacctgtttgaggggcaaatgaaggaaaacatcctcgtgggaagtccaactggactaagaaccctggactctagcactgttttcaccttgcccttgggggttcttggtattatcactaccgtgactctactgcctgttggagaggggtggtcctcttccactttgtcactctgatccaagcatgaaagatttcttcctctattctccatagaacaaaataaaatttacttatgtccaacttag

SEQ ID NO: 266001 - DNA, 448 bp, Homo sapiens
cataaaggaacccaacacattgaacatgatgaacattagagaaaatacagctgaattgtctcatggattcatgaccttcccagccctgagtattgtgaaaagtcttcattttcctgttgtccttttatcccctccttagcctctacctccttgggcagggaaaaataagaaatgttacagagaacagaataagcaatgataggatataagacaaggcctgggattcatgcattggcctaagtgtctacattttccaagtgagaggactaagtcatcaatgagttgggtctcttttcttcccctttcctggataatgatgtgtttttgtctgggaagaaatttttcttttcttttttggctgagactcctaaaaaccaaaaggcaataggaatctgtgtgacaggagccaaagagttatgagtaccaggaccctagactgcactgtggc

SEQ ID NO: 266002 - DNA, 253 bp, Homo sapiens
gtgttcatgaaaacttgaaggttgtgtggagcagaaggaagagggggtctgatatgcatgttctccatggcactccttatctaggatttctctagggcaaatgctcattttacctcccacatccccagtggtaactcagcctttaatacttcatggcaagataggattgatgttggaatccagctaaattggatacaaatggtacaatgcagcttggttatgaatgaataaaggactgcaacaggaagcaaaa

SEQ ID NO: 266003 - DNA, 422 bp, Homo sapiens
gatcaaacctagtgtcacttatgggacggcctgatgtttctgtgcttcctaagatgataccaagaacacagcagtatctcaccaagaaattgttgactggaatctaaccaagcatctagacctccagctgacaggaaatggagagggggtagaggcacaagttaacatttagaaacaatcaggtgagcagaatatctgtgatattccgtaactgccagggctcttcagtaagtgtcatttcaaaaaaggaaggagtaggcattctggggttaaaagacatttaagagacaacccaatacaatgtatgaataattttttttgcatcctagttcaacaaaaatgactataacaattcttgtaacaattggaaatttgaaaatgaaacgaatataggtaatatagaattgttttcttcagtacga

SEQ ID NO: 266004 - DNA, 302 bp, Homo sapiens
cataatgtcagtgacgtggcagacacaggaaggctgcagcacacctaactttgttggtcacttttgtctatctgctactctcaaggctccatttgtctctgttgtgtaactctgagcaagctagtcttctttctaagaaagtggaagctgatcagcagaaggtggccatggacaaaatgggaagcaggaccgctggagaaataggcccagttgcttatttcaggaaatcctctagtcttgttcactcgaaattgtgcaaggacaaagctgggtccattgaaacagaaagcataagaaaacaa

SEQ ID NO: 266005 - DNA, 469 bp, Homo sapiens
ctggagtccttagtagtctagtcaacattctagaattctctagccagtgacaagttcctatatcagctgactccaaagcagatatctcttaagggggctgagctgcctgctactcccgatagacaagacctttttattttacaaaataccttgatgttccttgatgaaaagaaaaagaactttggaaatgcaaaatcacctctgtctgtcacgtagctgacacgaggtgcggctcctggggaggggcccactggggagcgggacatgcgttgcaaagacacacttgtcagaaacaaaccaggaaacaaaattcagggaaatacagggggcggggcctgagcattgcttccaggagcctcgttgtcttgttcacagcattccatcgttttaaaaatagctattcttcatttgatgataactttatcttcttgaagctcaaaataaaattaaccttttctggagggaagaa

SEQ ID NO: 266006 - DNA, 585 bp, Homo sapiens
tggagggaactgttaagttttgttgaagtgacggagacaaaaacctaaatggagtgggagagaaattggagacagaaagaacccttcagaggtctgttgtaaaaggatgcaaagaaacagggaactagaagggattgtggggtccaaaggagaaataccagcacgtttgtatgttgtcaataatgtttcagtagaaaggtaaaaattgagacaagagagaagaaagtgtagctggctagtccaacatcctagaatagccaagaagggatgggacatagtgcaaaactaggctgcccaaagcagagttctcacagtggcttgcaaaattcagcaggcatcagagtcacctggagggcttgctgaagcacagatggttggaccccatctccagagtttctgacacaaaaggtctgcagtggaactccaagaatttgcgtttctagcaagttcccggatgattctattgctgctggtccagaaacctcattttgagaaccactgctctgtatcaaaaggagggaagacagaaaagatgagtatatacattagtacaaatgctgaacacctgggttatcaaaaaaaaaa

SEQ ID NO: 266007 - DNA, 420 bp, Homo sapiens
aagtcttccccacagggcacaactattatgaggttcgcctcctccccccggttaaacattaagcactaagatttccccaagcagcttgacagaacatcgttttccttgagcatcttccctgtgactaccttgcacaacggcatgtggcagaagtgatgtccagggtctcccgaggctgggtcggaggcatccttacagctcccatctgggtctaccggaatcgtcttggaggtttgcgccgccatggaagaaggctgactacgcaggctgccgtgtcgtgaggaagcccgaggctttgtggagagaaatgcatggaaacggtttcagtccccagcggagaccctaggcatcagggagcagaacatcaaaactgcggacttgggatacaaatgaatgatcactgttgttgcaaagccaaaa

SEQ ID NO: 266008 - DNA, 537 bp, Homo sapiens
agtttttcatttatgcttgaaaaatacagcaatttggaaagtgagggaggggaagtcacccataatcttattaccattatataattattagtattaaagacagatgacgttaattaagcatctactatattcttttaataatcctgtgatgtatatattcccactttacatgtgaggaaacacatccacttaataatggagtagccaagtttgaacctaggtatatcttgagaaggtctagagaggagacctttctgttctaccttcctgttcttcttacatatatatccttttacctagttgttacacaatttgtaagtttcatctcctagttttaaaacttagcattataaaaacatttttctccccccccttatttcaagtggtgtcgtattgctctcattgtctattcataccaccatataaaggctctttgtcttggctgctggacattggtacaatgatgttgaccaaaatggatgctgccctttactgagtgactaagatgaaaaaaatcaggcttaatcagaactaata

SEQ ID NO: 266009 - DNA, 467 bp, Homo sapiens
gctatgattttctccactattcccatggcattttcttcctcctacccattcatcattcagagaagagttactgagcacctattattactggaaactgtcctggccataggcagatggaaatgactaagagatggcccctttctgtgggggaatccaggttcgtaaatggagagatgagtccacagctggctcttccacggccttactatgtgatttgcacattttcaatcagcaaacatctctattctttctatttgccagtaatatttcagaatgccttcaattaatgaagacacatttgtggaattggatgtaaatcactcgaaagtatataattaatggcaagctgcctcggtgatggttcctagaagagagcggcttcccagctgaccactggtggcagttggcctcttgaagctagtatgtgaattaatttgtgtcaataaatttatcgacatgaaatggta

SEQ ID NO: 266010 - DNA, 472 bp, Homo sapiens
gagattctgaatgtcaaggactgtaatttttgttttcctttcattgaaaagtacaacaatataaaatgcacatctgcttttctatatgtattgccatatttcaaaattcagatttaaagtcaataaggtgatggcactttaatataaaggaaataaaatgttgttgttcctattaatggtcctcactggagaagttctatagttctccttggatgatttaaggaagttagactgagaataccacaaaagagcagaaacatgtttccttaaaaggtatagtcttagactggttgcgttcttcatcatggtacaaataaaagataatttctacctatactttagtcattctacaattaacttttggcaatgaaatcccagttatatttacttttttaaaatgtcatttttttgcaatatgactgttcatgaaggaaaaaaatgtaaattaaattaaaaaaatattttgactgtc

SEQ ID NO: 266011 - DNA, 401 bp, Homo sapiens
gccaaagcattatccattagccagactgcctgagaaaggcaaaagactcccgacatctggaaatcttgcaggctttcaaggctgcctatctgcttataaaacaaggatgtgtccgttatagctttaagtctgcactctatgtctagctcctaaaactagagtctgccaggttccacgctgatgatgctcatcttcctgggtacagaacaaagacaagataaggtcaaccattcttctgccacccgccatcctacaagccttctccctgtaaggaaatatgtaaattctaaacctcctgaaaacctgtttggataacgtcagacacagacatgtctgtgacttgtgtttttccccaacacaccctcaagctctggcttaataaaacttgatcaattgagaaa

SEQ ID NO: 266012 - DNA, 423 bp, Homo sapiens
gtaacagtggaaagtcattatctctggctttggtgttaacatagggagggatagcaaattgcctcactctactagtgaatgaatagaagagaaatccttgatggtttatcaagagaggtattatgggaacacaaaggaaaaaaataaattcttacaaaataccaacagcagccttgcaatccccgtcaaaatgtacccaaccaacttaagggggaaaaaaaaattcaaactatgtcctagccataaattgaagaaagaagtccagaaatgttaaaaatgtttataatcatcaaaattagtattttttgccttgaaggatgtctctttaaaaggctattcttaccaggttttgtgttgtaatattaaaagtggcttacaaaagagtgaatgtcaattgcaaaattaaatttatctctgggtatg

SEQ ID NO: 266013 - DNA, 494 bp, Homo sapiens
gggtgtggtggtgcatgcctgtggtcccagcaacttgggaggctgaggtggggagaccgcttgagcccaggagttggaggctgcagcgagctatgattgcgccactgcactctagcctggacgacagagtgagacgctgtctctgaaatacaaacaaaagccctttcttctcctacagctgcaagaggaaaaaaagaaaaaagcaagccaaggtgcggccggggttcagcagagtgcgcagatcagcagggagggactgacgtgaccagcctgggattgccacagcgctcgctccaacagatcagcatgcccagagcgtgcttcacagatgtccccgagggccctgagcccctttcagggtatatgtgaggtcaacaccatgttcacaacagccctaagatgtgatctgctttttccactggggtgacctttgctggtgacgcgcgagcgacgcagaaactgctggatcagcggatcgagtcacagctccggca

SEQ ID NO: 266014 - DNA, 558 bp, Homo sapiens
ttcactggagcatttcaggtaacagattttcagattaggcatttaaacaaattgaaccaatgaattattcttttcctctgttaattattgatttttataagtaaatcaataatgtatgtatatatttgcagttctataatgtccatttgatcttaccatatagattccaattcattttactatgttgtccacttttcctttttacatataataaatcacctacaaatttagtggcttaaaacaaacatatgattcccaagattctacaggtgatttggggatgggctgagttggctggggttggatggtctatgatggcctcatgctcatgtttggcagttggtaggctatctggtctgcagggagggctgggctgagctgagggctctgctgctcaagaaagtaaactaggctttttgagatagtctcatggagttccaaagagcaacaagaatgggagggtcattgctgtagcactttgtaaacaatctatcataattcacaacagctcttcttttccaatatgtcaataaagagttgacatttaaaaaaaaaaaa

SEQ ID NO: 266015 - DNA, 285 bp, Homo sapiens
agaagaagaagaaaaagaaagaaaggccctgacaaaaggaccagagcacagagtcctgaaaacctcaagggagcagcaaacaattgccttcccctatcattactttatatcctggtattttccatctccaaaatgttagcattccatcaaagcatttttttttaaactaaggaacctatgtcaatgggtagacagtgaagataaaattattgaaatattacctcactattctagtattcaattcagcagacatttaatctatttcatcattcagtatccaaactc

SEQ ID NO: 266016 - DNA, 345 bp, Homo sapiens
taggtatttcctggtctcggacctatgggcccaaagggggtaattgggtaagcagcaaatggaataggaggaggcagggttagggtaaggttaatgaactagaatgccaatttaaaatatgcccaattgtaactaactccccatattcttttaaatgttgttctaatctatatgctctttttcttcatttatgtaaatggatcagtcaatgattcctaggctcagctgttttaatggataattctattttaggagaaagacagaaataggcagagaagcagtgttttccaaattacatctcagagaatactcattcttcaagatgttaacatgtcatgcaggaaa

SEQ ID NO: 266017 - DNA, 190 bp, Homo sapiens
gccaataaatagtatccgtactttccattttctgaaaatgaagctgaactatatatctcacatagaaaggtagtttttttaattcatcaggatttgaatatggttaacagataaatatttccttacttctattttccaaataagcttagaatccctttcagagaatatcacagaatagtttgcagacaag

SEQ ID NO: 266018 - DNA, 355 bp, Homo sapiens
ggaacatgtctaaggaataggggtgaaccagagaagacctagcttactgaaattacaatgtggtcccaatccagctaaacccctggttggattgaggtaatcaatctctcaccctatctacagaagaaaagagaaactcatggtggagtaagatgccatctggagcctctatgattcatttatatatatcctacagaatacagtcaaaattgctagatatgcaaaaacacaggaaaaggtgatttaaaaatcaaaacagaaaatagaagtagacacatcatgttggatttagcagacaatgatttgaaactaaccatgattgatatgtcaaaaatgtatgaaagttgataaaaaa

SEQ ID NO: 266019 - DNA, 502 bp, Homo sapiens
tgataaacccattagatcacgtgagacttattcactatcatgagattgcacgggaaagactggccccatgattcaattacctccccctgggtccctcccacaacacttgggaattctgggagatacaattcaaattgagatttgcgtggggacacagccaaaccatatcaagtgcattacaaatattaattgatttcaccctcagaacggacttataggtagatactattattatatccattttgacagatgaggaaactgaggcacagaggaattaaggcatttgtccaaggatgataaacagtggaggcgggattcatactcacagaactggcttgactctgagctctgctgctttgaagaactaggttggaaaaccaccaagggtttagtccactctgcccccaaatcctgagtctgctgaaccagcaccaccgccttcggtgttggttcaggaagttgcccttgtctggtagggagggtgagcctctgaaataagggt

SEQ ID NO: 266020 - DNA, 474 bp, Homo sapiens
cagacccagtacccccaggagaggggacagaagcagagccctcctccaattaaatgtaggctaactctaaaaggttttatatagctgtgcaaaagttgtatgatctcactaggtgcagatttataagaccctttctttttgtgtggggtgttattagaagaattcttgggctgggcatggtggctcataggccaggcacactggctaatgcctgtaatcccagcaccttgggaaactgaggcaagattgcttgagccccggagtttgagagcagcctgcgcaactggcgaaaccccatctctacaaaaatacaaaaaatagccgggtgtagtggcatatgcctatagtcccagttatttggcaggctgaggcagaaggatcacctgagcccaggaggtcgaggctgctgtgagctatgatcgcatcactaccctccagcctggatgaccgaatgagatcctgtttcaagaaaga

SEQ ID NO: 266021 - DNA, 398 bp, Homo sapiens
cctaacccagcttgaagatttttgcagaggatggtccataaaatgccaaatcaagctacatggaccatctcaggtttatttgaggactaagtagcttgcattccactcctgggcgctgccccactctccactgcacccatagatttaccatggtagatttaacttcccggttgaggaaaacaccaatttcagagtagccccagaagccctgcctcctctccctcccaagtccctgtggccttgcagggagctgcctgtttggtttaatctggggagctggcacctctcccattccctactgtcaggcctgcactgttcagcattcttgtttttgcatctgtcattatcttttgtatgcaaagaggtttaatgtgcaataaatgtaaatggccagtata

SEQ ID NO: 266022 - DNA, 397 bp, Homo sapiens
tcctgaggcctctccagccctgtggaaataaatgattattattcttcaagaagaaatccactaacagcatccttttcagaatgaagatctgaaaaggaagagattatctcctctttaatgctgtatcccaaagcctagaagaaccagagacttactagctaatcaataaatattgctgagtaaataaatgacagacatttgcatgcaggcctcaaggagcagctgaagtgatagaggtagaatgaggcaataaattattagcaaagagagcggagtatttacaggcagcgatatactaatgaacctaaaaatttggagaatatttggaaaaataaaagagcttgcatccctggaatgcaacgaaaagaaaagtgctcaaaaagtgataatatacaca

SEQ ID NO: 266023 - DNA, 549 bp, Homo sapiens
cacaagatacaatgtgtttgttttgcagaaattgtctctatcacctgtgggcttttgctacccatagagctacttgtacctaattcaaccaataaaaataatgctagaaactgaagccaacaaagctgtcaaaatttgtcttgggttcttgggttagacaacttgttgagattttataatacatttccttttttctcctctttttctaggttctttcctgctggatgcgaaacactcaattatcacttcctcatgtgtgtagtctccctcactgagtcagctctcactggggccttcccatgacttgtttgttgtctttatctgtctgaagcctcatcttcctttgacatttatcttcatctggaaattctataatcttccttttcctcttgtcttgatcttacataaaatcaacattgtccattgaaagttatgtttaagaagcattgttaacaaaactatcatgaagtcccttgtaccttgttaaaaaccactgtattcataactttgttgtttttttcaaatatatttttctctggattgaaaaaa

SEQ ID NO: 266024 - DNA, 461 bp, Homo sapiens
cctcctgaggccacctccttaccccgaccccctgccattgggccacctcctcaagccctccagggtatcccgctccgttcatcagtgacctccctgagcccagcccgatgacgtcttccctcatgcctccctgcccttgacctgttgcctggacccacatggctggccaaggcctccctggaatctgcaatctcccgcacggtctcctctgacgtcttggacactgacagtcctctgcttcctgtggtggctgctcttctcctccccagcgtaggcagctctcaaggggtcctctctcatctcctattacaccctgtccccagatgctcactcctgggcttccaaccaccgtggtccaggctctccctgcagacttgcacttctctccctgcaccctggcttcaaccaccttggttgattctttttttttttttggagatggagtcttgctttgttgccta

SEQ ID NO: 266025 - DNA, 418 bp, Homo sapiens
tcagagcagaaaaggatattagacagtctataaggtctgtggaagtgagcaagatcctagctcccagtggtccaagggtcatatgactccactgttgaggtgtagaaaataggtaaggatggagggcattgactcagtctggccatattcctgacaacctagacattgtccaaagaatgtacccaccaacagcattctcacccttagcatggccaccaatgcatgaaacacaaataaaaagggatatttaggcatagtaacgtttaatgtggaaagttgaagactgcctgtgaatcgacatttctataaactttcctccctttggattccttgctcatgctatatccacagtgcctggcatatacacaagctcaataaatatttgttaaaaagaatatgaataaatacgcttacaagt

SEQ ID NO: 266026 - DNA, 516 bp, Homo sapiens
agtgacaccaagcatcacgtcctcctgaccaaggccttggccttacaccctgggagcgtcccccagctctggcggccaccacctctgcctgtgccaggcacctggagtggtcacagtgctgtcactgaaggactgagcacgccggaacaccttcccgggcggctccccctttctggaagggacactcctggctgaaggtgtccatgaccaggccctgtgctcatggtaccaaggaggccacggagacagaggagggcccacctcagcccccgccgggtgtgcacctgtcggggaggtggggcgagctgaggacctgctcagctccttcctgaggacacccccgaggaccctcgtgcatctctcatcgtcagggcgctttcccgacagcctccatggccggcagctcctttctcagccaagctggaagcatgcagggcggaaccttctggtaccctgtgccccctgcggtcagcgctctgaagtccttgtcgggtgggactggacggcggcggccgc

SEQ ID NO: 266027 - DNA, 637 bp, Homo sapiens
tttttttgagatggagtctagctctgtctcccaggctggagtgcagtggggcaatctcagctcactgcaacctctgcctcccgggttcaagcaattctcctgcctcagcctcccgaggagctgggattacaggcacgtgccactgcgcccggctgatgtatgactcttttatccagtaatcaaaacacatacgtacatacacacacataccagcccaaaagaggtgttaaaacatacatattacacgtactttttggaggggtggggtggggtgggatggggtgggggttatctatctatctcaaaattaccttttggtgccttgtcaagctgtggagttttgaccacacacacaaattgagccaatgaacaatttcaatgatcctgaaagttcttaagtcttatgaataattatcaagagttctgagaagttatctgtaaatcagcctatgacaccatttcttgagagttatgattaaagaaacagcaattatgcttgaagcgaacatacatcaactagttagagcaaggtcagcctgtacaagctgacataaattatgagaatgatgctctatctctagaattggaatattctgtggcttctttgtaaaactatagatctggtgggtcatgggaa

SEQ ID NO: 266028 - DNA, 282 bp, Homo sapiens
aacttcacttcttttcatttgaatacttactacagtcagatatatttgcgggtgtgtctctgaatagctttgtgtctttttttcttttaagattatattataagcgttttatgtcatctaatgtttgaaagcattattatttttttgcggcacagtcttgctatgttgcccaagctgatctcgaactcctgggctcaagtgatcctcctgcttcagcctccccggtggctgagagtacaggcacgtggaaagcatgattttttttttttcttcctgagacag

SEQ ID NO: 266029 - DNA, 586 bp, Homo sapiens
gagtcagaggctcaccctgttgcccagttggaatgcagtggtgtgatctcggctcactgcaacctccacctcccaggttcaagtgattctcctgcctcagcctcccaagtagctgggattacaggcgcgtgccaccaggcccggctaatttttgtatttttagtagagacggggttttgtcatgttggccagactggtctcgaactcctgacctcaggtgatccgcccacttcggcctcccagagtgctggaattacaggtgtgagccaccgcgctcggcctgatctgccttttcctagtcttcgttgaaacaagagtatagagcagtgtgatttaatagtttatgccatcattgcataataaaatgaattttcaaatctatatgtactgaaatggaaggctttgaatatatgttgtaattgttgctttagagtaatacctcaggatacattctgcatacattttaattaagtggtgtcttttacatctttattacatataggtgtcataggttttaagatctttagcagttctagtgttggggtagcctctgtttgtggagtagcctaggatcctgctagagtcg

SEQ ID NO: 266030 - DNA, 674 bp, Homo sapiens
acatttcacctgccctgggtatctttcttttttttgagacagaatctccctgtgccatccaggctggagtgcagtgatgtgatcatagctcactatagctttggccttctgagatcaagcaatcctcccatctcaacctcccaagtagctaggactacacatgcatgtcacccatgcccagatcatttttgtagagtcagagtttcaccgtggtggccaggttggccatgttggccagatggggtcttcttttgttgcccaggctggccacaaattcctgggctcaagttatcctcccacctcgtccttgtagagatgagatttagttatgtcgtccaggctgatctcaaactcctgggctaaatcgattgactcacctcagcctctcaagtatgttatgaaggttatatgttaggaagggtcccaggaggtagacccacacagatgggatttgggcataggtttggtttcccagggggcagtgctgagctctttgccagtgggaaatgggatgctggtgatttccagtaggtgacctcacagtgactcaagctaccacttactgttgattgtgacgaaatgccagctgaggcacatgccttgggagctaagtggttgctgcccttgaccactgtgaagactggtgtgggaagggtcgttttggatgcacttga

SEQ ID NO: 266031 - DNA, 237 bp, Homo sapiens
aaacaaaacaaacaaaaaacaatactggaaaatacaaacaagcccaaggagtgattggtagatgtttagagtctaccatttctcgacttcaggaaatgtctgtgtgtatctcagtcttctgctattgtaggcacacatcatacttcaactgtatgaagattattctattcctgctctataaatatgttattggattggatgagcaagatatacacttacacatttgaagccgtaagt

SEQ ID NO: 266032 - DNA, 681 bp, Homo sapiens
ggtgtacaaaaagactaagtcgaaaaatctcagctgtgcacagtggctcatgcttgtaatcccatctctttgggtggccaagggaggaagactgcctgaggccagcagttcaagaccagtataggcaacatagcaagagcccatctctaaaacaaaacaaaacaaaacaaaacaaaattagccaggtgtcgtggctggcacctgtgttccaacaacttgagagactgaggtggcaggaggattgcttgagcctaggagttaggggctgcagtgagctgtgatcgtgacaccgcactccagtctgggcaacacagcaagaccttgtgtcaaaaaattttttttaattaaatataaaagagtttcatgacattcagagaccatccaaagaacctgtgggttccggccaggcacagtggctcacgcctgtaatcccagcgctttgggaggccatagcaggtggatcgcttgaggtcaggagtttaagagcagcctggccaacatggtgaaaccccatctcttctaaaaatacaaaaaattagtcaggcatggtggtgggtgcctgtaatcccagccactcaggaggcggggacagcagaatggcttaaacttgggaggcggaggttgcagtgagccaaggtcacaccattgcactccagcctgggcaatcaagagcaaaactac

SEQ ID NO: 266033 - DNA, 445 bp, Homo sapiens
tatgggcattctacctttcactaaatttttctgtgaacataaaactgctctaaacataaagtctgtttttttaaaggagcaaaatatcaagtaaactggagatttaaataaaaagaaaacctggtctctcctaatagaatgcaaatactgtgaggttaagagctgcaacactatttttctctagtatctctcactcttttaggcacatattttgcactcagtaagattttctgaaatgaagggaattttgtgtatgaccttaggcaagtcatttctcccctccctttttttttctggagatggagtctcgctctgtgccactgcactgcagcctgggcaacagagcaagactccatcaaaagaaagaaagagaaagagagagagggagggagggaggaagggaaagaaagaaagagagagagagaaagaaggaaagaaagaaaga

SEQ ID NO: 266034 - DNA, 147 bp, Homo sapiens
tacagaggcaaaggtttattgaaagaagcaaagtacaactgagagatcaagtgccccgctcaacctttggctcggggcttttatacactggcttggttctggggtttcttctcctccttgattcctcccttcggtgggctgctgcgc

SEQ ID NO: 266035 - DNA, 409 bp, Homo sapiens
ttatttacactcaaaatattttctatttttggctacacttttcaaaaactctctacatcataaataattcacctttttggaattttggctatttctagttgagttgtaagtagttctaatttttctaccttacattttagtaatctttatatgtttactttcacaatacaacatgtgctcagatagttacaactcagatagtagtgtggcctctatgcaaggatgactctcaacattccatgaaacattccatgtttttaatgtcttcccagctgggtcataagccttttgagtgtgtggcccgcaaattagtaggttcttttgttttttgttttgtaatcaccgaaatgcctatatatagtagtgtttggtaaatacatattgaataaatgtgatgctatgtaagttt

SEQ ID NO: 266036 - DNA, 774 bp, Homo sapiens
gacaaacgaaccaatgccttgcctttattattatggctctttctatgaggctggattttgctagtatcttttcttctctgaatttctcattctgggtacctcatattgcaaaagagcctgtggcctctgagctgacttggtccagtaggaaaacagggaaaacagttcgtatttcagaattgactgtcacagccttgagacctgaaatgtagcccccatccatgagtcagtgaaatatctgtatttcttaattttctttccttaaaaccacactctccctgactaccttgcaagtgaacggtgaggctcaaatgaggtcatagatatggaacgtttttggaaaaaaaaagaaaagcttctatgcaaatgtagggtgtgatgatgacgattattaatatgccttgggcttggttaagggaggaaccgaaggaacaagcaaagctcctgctcctggaggcagccaggggctgcagctctctgttagcacggggtggatgcattctcagacgatcaatgtccatgaggctgcacatctatccctgccacaccagcggtgtagactcactgtgttttcattccagaagggttcccttcttctatccccacaccctcctcagagatcttctcttcctcccactccaactccccctaaacccagatttgcttcagcctgtctgcttctatttccttcatgcttgaatgtcagtgaacacacagcctccttctgcttaaactctgtagcccacttctttgctcaaggcatattatttttct

SEQ ID NO: 266037 - DNA, 348 bp, Homo sapiens
gcaaaaccccgtctctactaaaaatacaaatattagccgggtgcggtggcacatgcctgtagtctcagctactcgggaggctgaggcagaagaatggcttgagcccaggaggcaggggttgcagagagctaagatcgcaccactgcactccaacctgggcaacggagtgagccccgtctccaaaaaaaaatagcatcctgatttgtcatcgtgttttgttttagcctgcccttactctctttaattccgccatgaatctgcaagacatagccggggtgcagctaaaatttcgcctttgctaataacttagtttatgaatgttacaaatataactggtttgtaagagag

SEQ ID NO: 266038 - DNA, 400 bp, Homo sapiens
gatgcacgtcccgaaacttacattaagaaaagctctttcaattaacaaaatcgaattcagagcaaacgggtgaactggactgagtgtgcctctattgttgggtaaagcttagtaatactgcccacagtatcatttgccagagatttcttgagaggttgcacagaaaggtcttgttgttgaactgaagaaaaatgttgggaatggctctgtgatcctgcctgttgtcaggttggtttcaccagcaaggggcccaccgtacctctcctgtggagacactgcttagtttcaatgtgcttttcattctcttggctgcctgagcaaatggccatcactgtttccattgtgagctcttccccttccggagctgagcccaagtacagggaacatgtgctggagacca

SEQ ID NO: 266039 - DNA, 311 bp, Homo sapiens
cagcctgggcaacaaagcgaaaccccatcttaaaaaaaaataatttagttaaacgcattattctgttttccttttttttgagacaaggtctctctctgccacccaggttggaatgcagtggtgtgaccatggctcactgcagccttgacctcctgggctcaattaatcttcctacttaagctcccagctactccggaggctgagacaggagaattgcttgaaccctggaggcagagcttgcagtgagctgagatcgcgccattgcactccagcctgggcgacgcagcaagactatctcaaaacaaaacaaa

SEQ ID NO: 266040 - DNA, 361 bp, Homo sapiens
tactactgtagagagaatggccagaaatgatttctctggaaagatggcatttgagcagagacttgaatgaagtaagagagtgaaccatggacattgggtaagagacttacaggctgttaagagagcaagtacaaagatctaggggtggaggtgtgcccaggggagcagcaaagggctgcggagctggaatagactgagtaatagaaaatgaggagggcggggtgtggtggctcatgcctgtagtcccagctactcgggaggctgaggcaggagaatcatttggacccaggaggcagaggttgcagtgagcagagatcgcgccactgcactccagactggtgacagagagagactccgtctc

SEQ ID NO: 266041 - DNA, 343 bp, Homo sapiens
gaaatgtaaggtttgttttgccttcgtcacagatgtaaattttgttttaaaaatatatttgaggccaggcgcgttggctcacgcctgtaatcccagcattttgggaagccgaggtgggtggaacacgaggttaggagttcaagaccagcctggccaagatggtgaaactccgtctctactaaaaatacaaaaaaattagccgggcgtggtggctggcgcctgtaatcccagccacttgggaggctgagacagagaattgcttgaaccggagaggcggaggttgcagtgagccgagatcacgccactgcactccagcctgggcgacagagcgagactcgtctca

SEQ ID NO: 266042 - DNA, 477 bp, Homo sapiens
gggaaactgcccccatgattcagttacctccacctcgcctctcccttgacttgtgggaattacaaggattatacttcaagatgagatttggctggggacacaaagcctgagcatatcactatcgctctcagtcttgtccgactggcctcgtgtaggagaaggctctcacctatctgtctgaccagagattttaagaagatggagcctccatcagcctgggcctggaatgagaagcagaaccccctggctgctaatgtagtccaggaaagagaaatgaacagaatccctctgataacccacattaaacattgcagcttgagcaagaaataaacatgatttgtggccaggcacagtggctcacatctgtaatcccagcattttgagaggatcacttcagtgcaagttcaagaccaacctgggccatcaaactccaaatggtcgtgcaaccggagcctcggaagatggcgccttctgccg

SEQ ID NO: 266043 - DNA, 467 bp, Homo sapiens
gttttcgtgacggcatttgtcttgtgtggtatggggtgggggctttgggaggggtgtgtaggaaaggacaccatactttaaaaattaaaatgaatacatttttaaagtgaccctttactatttcaaaagcaaattcaaagataggaggagtttctactcttcaggtttgaatggagtccgccatcaccttgagttcttccatgcaatgtggtagtcctttagaagttacaaataaaaacacctcccctccccagagttaacattggccaagagcccctgcttccattatttttaaagcatgtgtgagtcatttaaaagcagtgctttccatgcttatcttggtggttgaggtggaataatcagggtttcagcccttacttagatactaactgtgctggaacttgagcaaggaatttgaggtttctgtttcagttctctcaacagatgtgattaagaggaaggacaaa

SEQ ID NO: 266044 - DNA, 475 bp, Homo sapiens
ttgttgttgttgttgttttaaatatggagtctcgctgtattgcccaggctggagtgcagtggcgcgatcttggttcactgcaacctccacctcttgggttcaagcgattctcctgcctcagcctcctgagtagctgggattacaggtgtgcgccgctacgcctggctaatttttgtatttttagtagagacagggtttcaccatgttggtcaggctggtctcaaacttctgaccttgtgatctgcctgccttggcctcctaaagtgctgggattacaggcatgagccaccgtgcctggctgtagttgtttataatagcaacataattgtctatcaagtgggagtatgacataagtttatcctggacaatttccatattgctggacatttgaattgtttctggttggtcactcgtttagatactgcaacgaatatcttatatgaagcttttcctgcgttttggaataaacagtaaa

SEQ ID NO: 266045 - DNA, 1092 bp, Homo sapiens
acagtttaaagggcacttctgtttgtggagtaaagcctgccacattgtcaaaatatgtaactggaggattacagtatgcttacctctgattttatttctacagtgctgctataagtaacaatgagtaaatctactaaattatgtggtaagacttcttgtccaagaagcaatatattctgcaatctccttgacaaaattgttaaaagaccctccctacagtttttgggtcagtggggatatcactgttacgaaccaaggatttacagatcactggcaaaaattctgaggtatgtggacttggatggttttgacgcactactcacagattacattgcatttgtggaaaaatcaggataccgttttgaagtaagttttaacctcgacttcactgaaatatgtgtgaatacaattctgtactgggtttttgccagaaaaggtaatcctgactttgtggaattgcttctcaagaagacaaaagactatgttcaagacagaagttgtaacctggcactgatatggagaactttcacaccagtatactgtccaagcccattaagtggcatcacacctctcttttatgtagctcagacaagacagtctaatatcttcaaaatactactgcaatatggaatcttagaaagagaaaaaaaccctatcaacattgtcttaacaatagtactctacccttcgagagtaagagtaatggttgatcgtgaattggctgacatccatgaagatgccaaaacatgtttggtactatgttccagagtgctttctgtcatttcagtcaaggaaataaagacacagctgagtttaggaagacatccaattatttcaaattggtttgattacattccttcaacaagatacaaagatccatgtgaactattacatctttgcagactaaccatcaggaatcaactattaaccaacaatatgctcccagatggaatattttcacttctaattcctgctcgtctacaaaactatctgaatttagaaatctaacatacgtcagtgtcctaagttccttaacaatgcttaccaatgtatggcttagaagttaataaaaattcacttcatgtaagtttt

SEQ ID NO: 266046 - DNA, 1030 bp, Homo sapiens
acagtttaaagggcacttctgtttgtggagtaaagcctgccacattgtcaaaatatgtaactggaggattacagtatgcttacctctgattttatttctacagtgctgctataagtaacaatgagtaaatctactaaattatgtggtaagacttcttgtccaagaagcaatatattctgcaatctccttgacaaaattgttaaaagaccctccctacagtttttgggtcagtggggatatcactgttacgaaccaaggatttacagatcactggcaaaaattctgaggtatgtggacttggatggttttgacgcactactcacagattacattgcatttgtggaaaaatcaggataccgttttgaagtaagttttaacctcgacttcactgaaatatgtgtgaatacaattctgtactgggtttttgccagaaaaggtaatcctgactttgtggaattgcttctcaagaagacaaaagactatgttcaagacagaagttgtaacctggcactgatatggagctcagacaagacagtctaatatcttcaaaatactactgcaatatggaatcttagaaagagaaaaaaaccctatcaacattgtcttaacaatagtactctacccttcgagagtaagagtaatggttgatcgtgaattggctgacatccatgaagatgccaaaacatgtttggtactatgttccagagtgctttctgtcatttcagtcaaggaaataaagacacagctgagtttaggaagacatccaattatttcaaattggtttgattacattccttcaacaagatacaaagatccatgtgaactattacatctttgcagactaaccatcaggaatcaactattaaccaacaatatgctcccagatggaatattttcacttctaattcctgctcgtctacaaaactatctgaatttagaaatctaacatacgtcagtgtcctaagttccttaacaatgcttaccaatgtatggcttagaagttaataaaaattcacttcatgtaagtttt

SEQ ID NO: 266047 - DNA, 470 bp, Homo sapiens
aaagagcagggatcctgagagcagccaagcgatcctgagagcagccaagcgggatgctgttgagatgggcccggagtagccacaaccctggaacagggctaggcagagtcctaaggcccagtgctgcttgagattcttaataacgcttttggttttttcttgggttgtaggaaaattccttttgaaaattctagcctgtctcagctctgctgagggaagatggaaacagtattttttgttttgttctgttttccccacatctcactcaggagaagaaaagtagtgcattccctggaggctcccagggtggcaccgataagagcatgtgcagaggttccctcgccccagctggagtgcagtggtgtgatcatagctcactgcagcctcagcctcctggagtcaagtgatcctcccatctaagctttttgagtagctgggactgtaggtatgcaccaccatgcccagctaat

SEQ ID NO: 266048 - DNA, 286 bp, Homo sapiens
gaagaattcatatagagactctctaccaggagggttcctttagacccctagtctgtcattttgtttgctgtctctcaatgccattgctttgtgatagttatgaaatttcatttaaaattaaggtctcagatgtgtgaaattattggaagttcccatactgtccatcaaaagcttttcatctggccttaggcttgatcctatataaaatttatattctgtcagctatattgtatctttcaaactgtaatcaacacatctacattcacacgtttaacaaaaatagaaa

SEQ ID NO: 266049 - DNA, 677 bp, Homo sapiens
ctgaccccagtttgtgcttttctctttatactgaagcatgcagtgaagactggaccagatccacagggaactgattctgtgttccaagatggggggctggccctggtgttgagtttgcaggtgaaggagctccaattataggaggaaacaaaaggctaggagcagcaagagcccaacacattttcaagggagaaatttagggacaggggacacaagcacaagagatgactataactagggatcccattaatgtctcagaaataaggggaaaatcccagctactggaattgaggctctggcaggcagactaagtgactgagtaaaacgcttgcatcccttccctgtctcaccactggactgcacagctgccttggctgtgagtacagcagggctaaagaatgtgggagtagggcggattatgagaacagttcaaaggtggtccatccacgtttatagagtagagaaagaaatagaatccaacaaaagaaagtggaagaaataatcattgaggtagaaaaaatggaaatagcgtagaaggcaaaacaaaattttcataggaaagggatggtgaaaccaaggtctggcatagaatatgagtggaatacacttggatacatccacgcgtgcatgaatgaataaatggctgaatgaattggccaagcacaggggaagggcca

SEQ ID NO: 266050 - DNA, 481 bp, Homo sapiens
ggtatttatcccagacaacaaagccattttattttggttctccttaagctctacctatcggcagagaggatgcattttgagctattttccattatgcaataataatgataaatccaaacatataaatagaattgtaaataatgataaatccaaacatataaataaacagtcccagggactgttctaagcactatataaataaatttacttctttccccaaaaccttgagatataattattcccattttacagataaggaaactgaggctcaaagagatttagtgaattccctgaggtccaacagttgataaatgtttctgaatgctccttcggggagggctgaagattctagctaacacagtgactgggtagtcaagtctgtctcattttagaagtccattttgctgtagatctaaaactattaatatgttgtctaattggttttatcactaattaaagcaatattgttattttccaaata

SEQ ID NO: 266051 - DNA, 467 bp, Homo sapiens
cactgcaagaccctgtccctaaaaaaaggaaaaacaaatagaagacaaatttcaatttctgagtttatacaaagaaagccttaattcagatcataaatatcccattgttatttttagttcattgtttcctagaacaaaggatggacatttaggatcctcacattgatttatgtcatatatatgtattgcattgaatatatatatacgcatgtagatatatacaattgttatatataattaaaagtcagaatcttaggtgataactgtcagacctctgagcccaagctaagccatcgcatcccctgtgacttgcacgtatacatccagatggcctgaagtaactgaagatccacaaaagaagtaaaaatagccttaactgatgacattccaccattgtgatttgttcctgccccaccctaactgatcaatgtactttgtaatctcccccacccttaagaaggttcttt

SEQ ID NO: 266052 - DNA, 192 bp, Homo sapiens
atgatggttacacaataatgtgaatgtacttaataccaatttaagtacatttaaaaacaattaaaatgataaattttaccacaaaaattacatatatggcttgtattatatttctgttggattgtactggtctagaaacacaacgtgttttatagttaattgtgattagtggtcataattcacaaatacttt

SEQ ID NO: 266053 - DNA, 446 bp, Homo sapiens
ggtgctgtatgtggctacaggcacttaacattgtcacctggaggcttccccagcacattgtgagatccaagcctcaggaaccagaacagcagaactcctgtcacccacagaagccggcgccggggactgcagtgcagataggcaggcgttcttcacagcagtggctactgcgcactccactcacgcagcagcggtccccagatgcctgccgttcacctgaggctgctctgagtgctttggatatggcaggagacacacaagtctggccctcacagagtctgtttgcaaagttaaaagttaaataagtaaaatagatgccaggcagggtggtgcatgcctgtaatccagggcatttgggaggctggggcaggaggatcacttgagcccaggagttcaagtctaacctgagcaacatagcaagaccctgtctctacaaaaaaaactaa

SEQ ID NO: 266054 - DNA, 650 bp, Homo sapiens
ggagaggttaaatataataacttgctagtggtcaatcagtaggcagtagaggagccagcatataaacccaagctgcccagctgcagaaccacattcttgtcccatatgctatgcctctcaaaaaaggaggccctctccttgggacacaaaggtaataaaaatgcctgccctgagctgtgtctctgtctaggtacacagttcatgagtgaaggagctcctggagtcatgaataatggaagtccagattggtcaagtaacttgtcccagccccagcccatgcatctggtatgtggttggacaggtttctaactcattacgtaacatcaagaacattttaaactgctttgagacatttgtgaattaagatctcaataaatagtcctccctggcaccagctccatccacattaaatgagacttgaaaatttctttgaatggatattagtttagaaggagctaagttattagttggcctcacattcctcagttgggccctgggcccagcatgccacttctcctggttattatggttcacatctgaggtaacccatcgggaaactggatgggacaacaaactaaaaatgttttagtttggacctgtccaaaaccaagagaataaaaacaaaatggatagtcaagatgattcagagc

SEQ ID NO: 266055 - DNA, 421 bp, Homo sapiens
tggtaggacacatctaccccacaaagggcaggctgtgccttctggtgatcactaagggagtcagtcttctaacacttcattctctttaatcctataaagttagacatattcctaaatggttcttagttttttttttcaaaacacatgacaactgtgtaccacaatatcattgattttaacatcttatatcagagtcagggtgtaaagcccgccacaaatgtattaaaggaaaaaataatgtaaaacctgcgattggtaatataatttcccacaaaatgattagaatttatttctgtctggttacatgtttgttttcatttatttaacaattatgtgttaagccccctcttcctcatcttttctatattatacctaacctactaaaaatataatacagatatttttgagtacttatcttgtg

SEQ ID NO: 266056 - DNA, 943 bp, Homo sapiens
ccctgtcatgcccgtgtcctggggctgccccagcaaaacaccacagaccagggcttacacaaggtgcgtgtatttcctcatggtcctagaggctggagtcggaggtcacagtgtcagcagggttggctccctcgaggtccctccttggcttgtggccgccaccacctccccgcatcctcatgtggtcgtccttctgtgtgggtccccatctcgtcttcttacagggaccccagtcatgccggatcagggcccgcccaacaacctcacttgaccgtagtgacctccttagacatcctgtctctaagtagtcacatcctggccaggcgtggtggtccacgcctgtaatcccagcactttgggaggccgaggtgggtagatcacctgaggtcaggagctcaagaccagcctggccaacatggtgccatcttgttgcaagcatctgtcctagcacacagtcagcaatcgctcctcagaaaggctctgtcctatgaagtcactgagaaccctgagaagtgcatgcagacctgtccctccaaggggaccctggtcacgtgttcgccaactgatcattccagaaccttactgtgtgtgttttgggttcaagacaccttactgctgtacagcgctgacgggttcacgttgaacacatggctggtggctctgtcacccacacctgagcacagcttgcacacacagggtgtccccatgaggcacatcatggcctcctggtgctgaaggagacgagacagtgctctgcacaacgcttggggccttttaaacacaaaatcaccaagagcagaaagatgcaaacaccgtgcccccactagactgagaaaaggacgcttgctcataaaatgagccgaagtgagaagacagagtgcggcccttctgaggaccgtctgctcaggggcgccgcagtgctggcctctggggtttttgtgga

SEQ ID NO: 266057 - DNA, 455 bp, Homo sapiens
gatttattaagcagaagcaatgtgcccgttaatattgcatgtgaaagacttaaatacataaccaagtgtctatactttaagatcttacattctgaagttggaagattacagtttgttcgaaagataaagttgtgtatattaatgtaataaaaagtactaaattttaaggtgttgaaaaatacaaaaataataatatttagtaaaatattattttgtgtttaaagtagctatatccggctgggtgccctgcctcacgcctgtaaccccagcactttgggaggctaaggcgggtggatcacctgaggtcaggagatcgagaccagcctgggcaacatggcaaaaccctgcctctgctagaaatacacaaaaaaattagctgggcatggtggcatgtgcctgtaatcccagctacttgggaggctgaggcacaagaatcctttgagcccaggaggtgg

SEQ ID NO: 266058 - DNA, 430 bp, Homo sapiens
aacagccttgcacaggccagttcaccacccctgctgctggtatgaaggcctgcaaaaatgtgtcagcccagcccccactgctacctcaccacagccgatgcacatgcaccccaccacactgccgctgctgctggcacttgtgaacaagcttgaatcctgctgccactgtcttaaagaaccactctggctggcaccactcatcagagtgctgtggtcagtggtacgggagcacctaggccccaccaatgcagcacgttcctaagctcacaagggtccagaaaacaaagctggggaccaacatgaaaccacacagcacacattcctggagggctgagctgagccttggccccctaaaaatgtctggaaatgtagcataaatccatcttatgcaaaaatcaaacccccaagggcatcaaagaaaataaaagcc

SEQ ID NO: 266059 - DNA, 407 bp, Homo sapiens
ggagcaagcccctcacaccctggagcaatgagcacaactagtgcctggatattgatttccaattactattctctgctaaaaggaactggagctctatgaagaaatgtctgattttaaggaacatttttgtgtcagaaaataaagtattcaaagaatagggacatgtcaaaaggaaacagcagctagcttaaggacatgctagcttaggacaagcttaaggacaagctagcttaggacaaatcaggtataatttgagcatcaaggccaagtgcagtggctcatgcctgtaatcccagccctttgggaggccaaggtgggaggattgcttgagaccaaaaattcgagaccagcctgggtaacataacaagaccctgtctctacccaaaaaaaaaaataataataataat

SEQ ID NO: 266060 - DNA, 172 bp, Homo sapiens
agctacttagagctgtagtcctttaaagctggttctcttctttgggtgtttgtgggttctgcagtacccccaacaggcactgagaccctctcgcttgcagttgcctggacatgggtgaatgtctgccctggcagcctgtctatataggcgccttcacaggggagtatcacac

SEQ ID NO: 266061 - DNA, 235 bp, Homo sapiens
cccgtgtaagcgactactggagttgagagctgcagggggcaagggtggaggaagaagaggattcctggtgggcaaacccaggaggaaagggaacccaggaggaggatccctggaggagcgagagtaagagtaggaccccagagcaggcaggaggtgggcagggccccctgggccaaggacaggggtctgatctttgtcctaagagcagtgcaaaccattaaaggggtttgagcca

SEQ ID NO: 266062 - DNA, 384 bp, Homo sapiens
cacgaggccagccctggtatttccaggacaaaggctcacccaagtcttccccatgcaggcccttgccctcactgcccggttacacggcagcctcctgtgcacagaagcagggagctcagcccttccacaggcagaaggcactgaaagaaatcggcctccagcaccctgatgcacgtccgcctgtgtctctcactgcccgcacctgcagggaggctcggcactccctgtaaagacgagggatccaggcagcaacatcatgggagaatgcagggctcccagacagcccagccctctcgcaggcctctcctgggaagagacctgcagccaccactgaacagccacggagcccgctggatagtaactgagtcagtgaccgacctggag

SEQ ID NO: 266063 - DNA, 343 bp, Homo sapiens
ggcctagggcttaggatggcctaggttaaaggtttagctgcagagaacagaacacttccaggtacggtggctcacacctaataatccaagcagtttgagaggccgaggtgggcagatcacttgagcccaggagttcaagaccagcctgggcaacatagcaaaaccctgtctccactaaaaatacaaaagtgagctgggtgtggtggtgcactcctgtagtcccagctactcgagaggctgaggtggcagtaccacctgagcctggggaagtcaaggctgcaacaagccatgattgtgccactgctctctagcctgggtgacagagtgagaccatgtctgagaa

SEQ ID NO: 266064 - DNA, 437 bp, Homo sapiens
gtgggcttgtgtcagagctaaagaacactgaaattaggaaacccccagtcttataaggagctactaaaaacctacctaacctttgacctggaggaaaatgttgtttttattgtcttggtcaggagaggaatctaccctctgtccttccagaatgtttgcagcacaaaagacattgagaacagaagctgtcacaagacgtatagaaacaccatgaaggattgtctctcaacactgccaatctgataagggaagaacagtatttgaatatacgctgtccagtacctcctgtgaataccaaaatccatgaatgctcaggtcctttatgtaaaatgtggtaatatttgcatataacctatgcacatactccagtatactttaaataatctctagattacttataatacctaatacaatataaatgctatgcaaatgattga

SEQ ID NO: 266065 - DNA, 518 bp, Homo sapiens
ttatttttttcaatagtgatattctttaacaacaatgtatgtttaaagacattcttaataatataaaaaatatcaaaaacctaggtaaaaagatgtgcaaactatttattataggaaaactgtggctagctactgaaacaaactaaaaaagacctaatagagatatggactaggtgtatggattagaaaacattctaaagagacaaattctccccaatctacagatgatgtgatatcaattaatatccaaatgagtgtgtctctatgtgtgagaaacttaacatgctgattcaaaaatttatgtggaaatacaaaagacaggccaacaacagtggaaatgattttaaagaaaaaaatgagaagactttactatatatcagtacttactacaaatatacagtaattaagatggtatagtatgccattggcttaattatagacaaagagaccaataaaacaggacacagcccataaactgacctacccatataagataatttagaacaaaggtggttttg

SEQ ID NO: 266066 - DNA, 503 bp, Homo sapiens
ttttgaggtgaagttttgctcctttttgcccaggctggagtgcaatggtgcgatctctcggctcactgcatgccagcatgggcgacagagtgagacctccatatcaaaaaataaaataaaataaaataaagttgcatttagtctccagttttgcttcctagacaaaagataaaatcacccaagctcccagaaaattaagaaacaaaccatttgaggatgaacacctaagacacacgtcattgaaggcaccaaatgcttgatcttgcatcatgacctaaaagtctcttctactggattatacattttttgagggtacagactgtgatgcatgtactttagcatcccctatggcactcagctaatgcctggcacaaagcagttattcaataaatatctgttgaattactcactgcctttaattgaaaaatggcattcatcagtcatggttactatttagaaataaacttgaaagtctgtgggcatactctggctctggaggctgc

SEQ ID NO: 266067 - DNA, 419 bp, Homo sapiens
aaaaaaagaatatacagtaaatactaggttttattaatgataccaggatttaaaggaagactgatatagagagaaggttcatttgtggtgtgtgtctttgtgagagatggagtagagggacaaggatcctttcacatctcatcccagatcatggtcaaaatctgtcctcaaattgtcaagaagtaacaatcatagctatgatttgaattcctgttacctgctaggcactttacttacgttttcttatttaatccttacaacaacctccttgaagtttataaatgatactgtcctccctttagagatgagcctccaagaagttacattacttgcccaggattataggtagtaagtattaaagccaggttataaactaaggactttataaccttgaaactacttatttatctgcttactac

SEQ ID NO: 266068 - DNA, 759 bp, Homo sapiens
aattatatggttcccacccccaacagagtataagttagtgaggtccacagatcattacagagtaaaacaatcaatatgtagttccatgtttggtggatactttgaagcaaacaaacagggtgcagtgatagaaaagacagaagaaagacctgcgcaggtaaggttaggtggtcaccgaagcttctctgaaaatgtgacatctctgaggaaggtggaacattaatcatctctagcagtgcataggccctctctatggcattgtcaactaagcactaataatagtcaggggacaacatgcagcgatagccaagagcatggatcttggagccaaagagatcaggttttaatctcagctctgcagcgctagccatgcgctagcttcatgcaggcttccttcattttaattctcagtgacctcatccaaacgtgaggattatcataaaaccaacctcatgaggctggtgtgaggatcaagtgctgccacttagagcaatgcctggcagtcgtttacttaataggcatttgtgtctacagaagatatttcgaaagagctgttatgaaaacaaggccacttgtatctgaagtatagaaaaacattgaaaaatacttgggaactgagaaaagcctgttttaggttgaaaaatagaaaaaaagtcaaaagaaaaatgccactattaccaccaataacaccaacaataataccaccaccaccaccaacaataatgccagcaacaataccaccaccatcacatcaccacc

SEQ ID NO: 266069 - DNA, 225 bp, Homo sapiens
tttttttttttcctttttattgaaacaaggtctctctctgttacccaggctgtagtgcagcagtagaaacatagctcctatctccctgccaaataacggcccaggtctggaacagttatttggttggttggcaaagagaacattgcaatccatgcttcagggaggaaggttgtgaaggcaacaatgaaaatgaatcgtctgctgggagggaggagggtgtaggga

SEQ ID NO: 266070 - DNA, 376 bp, Homo sapiens
ttctcagagaggagctggagccccagaccctgggagcctcacagatattcccaacacaggacctggttttccatttcccaaaatgatgcttcctccaaagatggccagtgactctctgtgccaagcatctgagaaactctccaggtcctagggctgccaggcagtcagctgtgcacatgttggagcccaaatcccatcaatagtgaggccctgggtaaaacacatccccacttttaattatgaggagatgcctggcctcagcattgagaacaccaacttccctcaagtgaaaacttatttaatctcttagaaatgatggagcacaccagcctgaacaacatggtgaaaccctgtctgtaataaaaacacaaaaatt

SEQ ID NO: 266071 - DNA, 375 bp, Homo sapiens
taggagtacataaatgagaggtgcaaaaagtggggtgcttggtgcaactggatttcttgtggacagcggccaggggtgggatgtgcgcattgcgtgggcacaggaatctcaatagctggccccagagcagaagcagagaaggtgtgaaggcctggactcttctgagcttgaggtcaggggatctacttgcacattagagttatttaaatgaggaaaatgcatgccctttttgaatcgatgttgtcaagcctttcttttcctaggagaatctttcgattcccagcatggggaaagcatgttttcaggtattaaaatgagtaaggttgtaacagttaccatgaatccacatgttgtgccccattctaaatcaagtat

SEQ ID NO: 266072 - DNA, 635 bp, Homo sapiens
ttagaaattttaagatattagacggttagacttgtctaatctcacatttatgagcagttttttacatttatctttgttttggagcttatgaagacttctaggccattggcagctgcatcatctcaggttttcttgtttagtggattaagaattcataatttgtttggtttttggtttcttgtagagtagtaggttgtcctctattactttctattcctcctaccacacagttgttaatcttttgttggtcatgctgctcttgatgacatagtcacattctagggtttggaaaattgactgttacctagtttttttgaaaatgtcacctgtgggcgtgggttctgttatgttggttttggtgctggctttttgttgttcgtttttgcccttctggttggagaaaattgagaagattttacaaatgtagtgcctccataatcacatcattgaaagtcacctttgtgtatttttattgtctgttatagagcatgttagttttgttggcatattctaagtcagagtatttataaatattagtgagactgtgcttcttcaaatgcagtttgggatagctcagatctgtaatggagttccacacagagtaggcttgggggtgtgtgggtgtgtgtgattta

SEQ ID NO: 266073 - DNA, 386 bp, Homo sapiens
ttagaaattttaagatattagacggttagacttgtctaatctcacatttatgagcagttttttacatttatctttgttttggagcttatgaagacttctaggccattggcagctgcatcatctcaggttttcttgtttagtggattaagaattcataatttgtttggtttttggtttcttgtagagtagtaggttgtcctctattactttctattcctcctaccacacagttgttaatcttttgttggtcatgctgctcttgatgacatagtcacattctagggtttggaaaattgactgttacctagtttttttgaaaatgtcatcgtattgaattcaacacaccacaatactatgtaacatttttaatgtggcaggggatcgtg

SEQ ID NO: 266074 - DNA, 486 bp, Homo sapiens
tggatcagtctcatcataatgttttaattatttgagctctgtaacattttaatgcctaataaaacaagtaatccctttctctttgtttattcatccagatgagatttaaaatcattttgatgatttctctaagattatgttgagtttctaaaacttggtttgtgttaaatctgttcattgatttggagactgacagatataaaagatgtaaaacttttttacatgttcatagccttctatgaagagtgtggaagaatcacaacaatgaagagaagatatgtttcttggggagcatgttcaatctaattcaagtagatacatggagtcgtgaagataaattctgatcacaccgcattctggtcatcattacctagttgaagaggtttattggagaagaactatcagtgttttaaagcagtggtcttcaaacgggggcacacaaagactttccaaggggggtacataaatataaatagttttaaggta

SEQ ID NO: 266075 - DNA, 378 bp, Homo sapiens
aattaatggtgaatgtggtatgagcctaatctatgcagtgggagatgctgtggacactccaccagtttgatcacaaagaattacaggcatgagccaccgtgcctggccctgcattcttaacaaatctgctatatgataaatttagatttcaattttgtgatcaaaactctttttttgctataaaatgaaactattgccctcttagcttcaaatatggtaatgtaggaggttggcatatatttggataaaattatgtaaacttaaaaaaaaacactttccacaataggatgttttaatattggttcagtttcagccataattaatgatttattttatgtcttttgttttagttcaaattagttcatcattaaaaaaaaa

SEQ ID NO: 266076 - DNA, 495 bp, Homo sapiens
aatggtgccatgtacagtttgtgtgtatacgttttgatgggttttaactttttatagtttttatatgttttatggtagtaaatgacaaaatgtgcatatattttatgcattcttgacatacctaactttttcttaattttttcagtatctctaggctatactgttcatctgtgcgttttttcaaattgtcacagatctccaaataattttctaataaattcattgaaaaaaatccacatatgagtgaacccatgcagttcaagcctgtattgttcaagggtcagctgtacatggaaaagatagttgagcaccatagatacgtgtgtttaataccctgcactgaagccacctacttgttccttttctgagcctcagtgttggcttcgtcttagcatatggttcctaataagtttgagtatctgaatactcagcctacagcagattagcagcaacagctctaagtatgttgttgggggccagggagaaaagaggatg

SEQ ID NO: 266077 - DNA, 407 bp, Homo sapiens
tgggtcaaggggaaacggactataaagtgggtcaagggagagtttatcgataggagattgaacaacccgcaaggacccagggaaaaagtgctgccctgatgttataagctgcttggcttggagaaaatggtggctgacactaagaagaaatgtcagaactgatgtgacagagggtggaggcaagaacaggaaagctcagagtgaggagactgctggagcaggtatgctaggtacccccaaatccactggatgcctctgctctgcgagagaggctggggacattcattccagcaatgaattgaaggaaggtgctagaagggcacccacatccctgcaggccaggactgagggtagaagatgtcatgacagaactgggccccaggtatcaaggaggatgacaaggtcct

SEQ ID NO: 266078 - DNA, 333 bp, Homo sapiens
ccaccctatgttaggggaccactgaaggggctttaagctggagagtgactccgccagatttgcatcctggaaagatagctctgacttagtttgcagaatgaactggcagagacaagattgtatgcagaaagagttttaggaagttgatgaagtagccttggtgagaaatgcagcggacctgaaccaagacagtgtcagaggccatcactcactttacattacattacattactttacattacagtgtaaaggccatcactcacttgtcttctgactgggctggcaggattcaagcagccggggctcctgtatcccttttctcgctgactctct

SEQ ID NO: 266079 - DNA, 173 bp, Homo sapiens
tcaaagatactgcaaattcagttccagaccaacccaatgaggcaaatatggcaataaaatgcatcacacaatttttttgtctcccagtgcatataaaagtggtttacactatactgtagtctagtaagtatgcaacagcattatatctaaattaagtacatacataccttaat

SEQ ID NO: 266080 - DNA, 569 bp, Homo sapiens
gtccatccaaaaagaaatacatgtgccttttgactaattaagtgattcttttaggaatatatcctactactatactcacatatgtgggaaataatataggtacaaggatattcattgcaatcctctgcataatagcaagagattagaagcattccaaatgctcaacagaggactagttaagtaaattaggctccaattatatagtaaaatactatatttagccagaatgaggctgctattttatgcactgacatggaaaatctccaggatcacatacacacacacagttgaacaaagcaaggtaagatcaatagatgtaaaaaaatactgctatttgtgtagaaaagattttttttcacagatggatataataaaactggctttttgcttaaaaacacagaatatccctggatttacacccaaaaaagcagtgaacatggttgcttctggggaaaaaaaaatagatggctagacagacgaaggagaaagcaatctgtgtggcatcccatgtatgtccattggccattcaaaaaaatattttaaacagtaaaaataagtcagtgttcttt

SEQ ID NO: 266081 - DNA, 980 bp, Homo sapiens
gaaggacggttttttatctgagtcaaaaggagaggaaatcggtaatgatacaaagagatttttgaggagaagcaaaattgaggtcctattactttagctcttagagcaggggttggcaaaccgtggcttgtgggccaaatctggcctgctcctatttttgtacagctcacaagctaaaaatggtttttatacttttcagttgctgggaaattaaaagaatgttttaaaaattgaaataatctgtgatgtgaaaattatatagaattcaaatttcattaataaagttgtattggagcacagccacacttatttccatacatattgttatggctgcttttccactgtaacagtggaattgaatagtttgcacagagactatatgtgaaattccgatggcttcacttttgctctgcccactacaaatttcagtaacttagttataacttgatagcatgatgagtaatatatacattgttatactacagtgggttttttttgaaattatgaattcatatatgacacacaagaaaaaagtgtactttgagtgtcatattttcaaggcacagtatagtatgaattatttcgttattgaattagatagtaaaaaaaactgtatttattatacaatgacactatagctatgttaaatggctatactacatatcagcattaccagattgagcactcatcacagaaaatcaacagtcaaaaaaattagaaaatttaaaatggaattctcatcacagcagaatttccgcatcaaaataaaaataaaataaaatgaggctgcaaccaaaataagttcctgagaggttcatatgttacccaagcaaggaaacctgtttactcatggtcattgcaacagccaaaaaaaatatgtccagagaaagtaaacttgtttaagattattagcttctcagtgagaacagttccttgaagagttgatggcattttgaacaacatggccaacttaaaataag

SEQ ID NO: 266082 - DNA, 429 bp, Homo sapiens
ttatgtatggtggaaggtatgaattattttatctttttccaaatggctaaccagttgttccagaaatagttattaaaaccttcatatttttcccagtgatttgagatgccatgtttatcatatgctaaattttctgatatactggtgtatttttggactttctgttgttttctactggtctgtctatccatacacctgtgctacaccaggctttctggtatgttctaatgtctcctagggctagccctccattgcagattttctttctcagggttttcttggctattcttgcatgtttatttttccacatgaactttaggatcaacttatctaattccataaaaatgtatgtagataattttattggtattgtgttaaatcaattttgggaaaagtgaaattttcatgatgttaaaatgtctttactaa

SEQ ID NO: 266083 - DNA, 479 bp, Homo sapiens
ggaggaggagggggaaccaggaaggcaggaaactggagcacttgagtacagcgttcctagctggagacgaaaggctggggatctggttcaatctaatagaaagttgcaataattgctatatcggtagccaactcttaagctagtggctgtggaattcttcccctgatgtaggatttaatagtctggcaattagatgcattgatttctcttaactgttcatttggatgtgtaaacgaaaggaacctaccactgaggctgatggtgcagacatgctccccggctctttgaaaaaggctgatttaggtggtggtggtgggagtatatgctttttcaaggcagtgttaggaccagttccctcttctttcaaaatttctgtccattctgtagtgaagtgaacggcacctgttcaaattctgtttaaaaataaaacaacggtatcccattatagctgaaaagtaaaaacatccttttctgccgca

SEQ ID NO: 266084 - DNA, 398 bp, Homo sapiens
gtcacctatgcatttttgatcatatccaagaaatcactgcccagaccaatgccatggaacttttccccatatttttattctggtaatattacagtttcatgtcatacatttaagtcttaattcattttatttttgtatatggtgtggacaagagtccagtttcatttttctgtatgtagatatccacttttcccaacaccacttattgaagagactgtcctcattccattgtgtgttcctggcacctttgtaaaaaatcaattaactataaatatatggggttatttctggggcctctattctgttccattggtctatatgtctgtttttatgctagtaccatgctgttttgatgaaaactgctttataatgtgttttgaaatcagggtaatgctgct

SEQ ID NO: 266085 - DNA, 342 bp, Homo sapiens
gtcgcccaggctggagtgcaatgccgcgatctcggctcactgcaatgccgcccgggttcaagcctcagctcctgcctcatttttagtagagacggggtttcaccatgttggtcaggctggtctctacctcccgacctcagatgatccacccgcctcggcctcccaaagtgctggggttacaggcgtgagccaccgcgcccggcctgtaatcatattttcaaaggtgcctttgactcttaaaaagtcaattgtttggggcaacccactcgggtccccttccaccctgtgtaagctttgttctttcgctcttcacaataaatcttgctgctgctcaaaaaaaaa

SEQ ID NO: 266086 - DNA, 348 bp, Homo sapiens
tctagttatggtgaaaataaaacaaggggaagatacatagcataatacaaatgctgaagatcactgttatgtacatgtcatgtatcttattcagtttaactctctttgaacaactttcccagacccacaccttggtagctgatgaaactgctttttgaaatgcaatagtggaagcagagaaaaaacagtgaagatgcctaaattgccgtttttcaaccctgagactaaggatcatttaacattgagtgcttaccacatatttttaaaagaggttcttttctctctatgatccagaagaatgtcctttaaaataatttctaattaaaagacatttttgttgctattaat

SEQ ID NO: 266087 - DNA, 404 bp, Homo sapiens
ctcatatctctgcaaaatatgatatttgcaaattaaaccacttggagataacatttttcacctctcagattggcaaagatcaaaaagtttgataacacggtgttgatgaggatatgaggaaacagccacttaaggggaattgagcaataacttatcaaaactctgacccaaatatcctatttctaggaatagatgatatatatagagagagagagaaagagagagagagaaatgcaaagttactgcagcagtgtaataacaaaaggttggaacttatttcaatgtccttcatcagggcactggctaaataaattactgtgtataaaatggtatgaaccataaaactagtccttttatactcttaaggaatgattttcaaaatatattttgtgtagaaccatatg

SEQ ID NO: 266088 - DNA, 727 bp, Homo sapiens
  misc_feature (720)..(720): n is a, c, g, or t
cgtgccggcctgagtcgtcatagccgacgtcgcttgttgatcctgcgactgtcgcgctctaaccgtcatcagttgtgacgcggaatccaccacgactttggctggttgcctgcctactagggaccgtgcgccgggattcgaccgcctggcttggaaaacaatggaccctactgatgatgtgttgttgccatggtaatcctgctcagtacgagaggaaccgcaggttcagacaacactaaaggacgagcctgatctcttatactagtatccttaatcatttttattgccacaactaacctcctcggactcctgcctcactcatttacaccaaccacccaactatctataaacctagccatggccatccccttatgagcgggcgcagtgattataggctttcgctctaagattaaaaatgccctagcccacttcttaccacaaggcacacctacaccccttatccccatactagttattatcgaaaccatcagcctactcattcaaccaatagccctggccgtacgcctaaccgctaacattactgcaggccacctactcatgcacctaattggaagcgccaccctagcaatatcaaccattaaccttccctctacacttatcatcttcacaattctaattctactgactatcctagaaatcgctgtcgccttaatccaagcctacgttttcacacttctagtgagcctctacctgcacgancacacac

SEQ ID NO: 266089 - DNA, 925 bp, Homo sapiens
actgtgtgctatgtacggtctatacaattcttcctgcaggttatcacagttcattagacttcaaaatgcgtaatcatctgtacgttggcacttgttaggctcttgtcagcattgctaactggcatgtcttattgcagcccagttccagccagtgttagccaacttgtacaaccagaagtccagcaataggtggggagtttgactggggcggtacacctgtcaaacggtaacgcaggtgtcctaaggcgagctcagggaggacagaaacctcccgtggagcagaagggcaaaagctcgcttgatcttgattttcagtacgaatacagaccgtgaaagcggggcctcacgatccttctgaccttttgggttttaagcaggaggtgtcagaaaagttaccacagggataactggcttgtggcggccaagcgttcatagcgacgtcgctttttgatccttcgatgtcggctcttcctatcattgtgaagcagaattcaccaagcgttggattgttcacccactaatagggaacgtgagctgggtttagaccgtcgtgagacaggttagttttaccctactgatgatgtgttgttgccatggtaatcctgctcagtacgagaggaaccgcaggttcagacatttggtgtatgtgcttggctgaggagccaatggggcgaagctaccatctgtgggattatgactgacctcagatttctgacattcgattcccaagaggggaaagcagtgttctggcactccagcacccatgtcctggggtcagcagctgtactattccttaggtgctgttctctgcagaggtccaagtacagtatatgctgttaccatgattcttcctgggaaagggagacatccgggctagagctgcctgtttgacgattccagaactacagcggatcctctagatacc

SEQ ID NO: 266090 - DNA, 1143 bp, Homo sapiens
tccagtatacctagccaacatggtgaaaccccatctctactaaacataccaaattaataggtgtggtggcatgtgcctgcaatcccagctactcgggaggctgaggcaggagaatcgcttgaacctgggagacaagaggttgcagtgagccaagatcgtgccattgcactccagcctgggtgacagagtgagactccgtcaaaaaaaaaaatagtaataataataataatatttttctcaataaactcccccaattttaagcaccacttcataaaagtggggggaagggattaacattacagctaaggggaagacttcaataccttaattttcctctttaaggaaaatctctaacaaatatcccataaaattttacctattatttaagaagctacttttataaaaggtaagaagacaatggttacatggtggtatcatataccaccaacgcaggtgtcctaaggcgagctcagggaggacagaaacctcccgtggagcagaagggcaaaagctcgcttgatcttgattttcagtacgaatacagaccgtgaaagcggggcctcacgatccttctgaccttttgggttttaagcaggaggtgtcagaaaagttaccacagggataactggcttgtggcggccaagcgttcatagcgacgtcgctttttgatccttcgatgtcggctcttcctatcattgtgaagcagaattcaccaagcgttggattgttcacccactaatagggaacgtgagctgggtttagaccgtcgtgagacaggttagttttaccctactgatgatgtgttgttgccatggtaatcctgctcagtacgagaggaaccgcaggttcagacatttggtgtatgtgcttggctgaggagccaatggggcgaagctaccatctgtgggattatgactgacctcagatttctgacattcgattcccaagaggggaaagcagtgttctggcactccagcacccatgtcctggggtcagcagctgtactattccttaggtgctgttctctgcagaggtccaagtacagtatatgctgttaccatgattcttcctgggaaagggagacatccgggctagagctgcctgtttgacgattccagaactacagcggatcctctagatacc

SEQ ID NO: 266091 - DNA, 786 bp, Homo sapiens
actgtgtgctatgtacggtctatacaattcttcctgcaggttatcacagttcattagacttcaaaatgcgtaatcatctgtacgttggcacttgttaggctcttgtcagcattgctaactggcatgtcttattgcagcccagttccagccagtgttagccaacttgtacaaccagaagtccagcaataggtggggagtttgactggggcggtacacctgtcaaacggtaacgcaggtgtcctaaggcgagctcagggaggacagaaacctcccgtggagcagaagggcaaaagctcgcttgatcttgattttcagtacgaatacagaccgtgaaagcggggcctcacgatccttctgaccttttgggttttaagcaggaggtgtcagaaaagttaccacagggataactggcttgtggcggccaagcgttcatagcgacgtcgctttttgatccttcgatgtcggctcttcctatcattgtgaagcagaattcaccaagcgttggattgttcacccactaatagggaacgtgagctgggtttagaccgtcgtgagacaggttagttttaccctactgatgatgtgttgttgccatggtaatcctgctcagtacgagaggaaccgcaggttcagacatttggtgtatgtgcttggctgaggagccaatggggcgaagctaccatctgtgggattatgactgaacgcctctaagtcagaatcccgcccaggccaactcgaggctgccgcgcgctgccgtatcgttccgcctgggcgtcgacgcggccg

SEQ ID NO: 266092 - DNA, 942 bp, Homo sapiens
tccagtatacctagccaacatggtgaaaccccatctctactaaacataccaaattaataggtgtggtggcatgtgcctgcaatcccagctactcgggaggctgaggcaggagaatcgcttgaacctgggagacaagaggttgcagtgagccaagatcgtgccattgcactccagcctgggtgacagagtgagactccgtcaaaaaaaaaaatagtaataataataataatatttttctcaataaactcccccaattttaagcaccacttcataaaagtggggggaagggattaacattacagctaaggggaagacttcaataccttaattttcctctttaaggaaaatctctaacaaatatcccataaaattttacctattatttaagaagctacttttataaaaggtaagaagacaatggttacatggtggtatcatataccaccaacgcaggtgtcctaaggcgagctcagggaggacagaaacctcccgtggagcagaagggcaaaagctcgcttgatcttgattttcagtacgaatacagaccgtgaaagcggggcctcacgatccttctgaccttttgggttttaagcaggaggtgtcagaaaagttaccacagggataactggcttgtggcggccaagcgttcatagcgacgtcgctttttgatccttcgatgtcggctcttcctatcattgtgaagcagaattcaccaagcgttggattgttcacccactaatagggaacgtgagctgggtttagaccgtcgtgagacaggttagttttaccctactgatgatgtgttgttgccatggtaatcctgctcagtacggcacccaaatagctgttgtctcgcagacacgacgactcacagccacgcagtttatccggtaagcgaatgaatagagtctagggagaaacgatctgggatgctctagagtc

SEQ ID NO: 266093 - DNA, 324 bp, Homo sapiens
ttctaatcattcgtgaagcgaggaatcaccaagacgtcgagatggttcacctacatactagggagcgtgcgccggtgattaaaccgtcttgattggaaaacccttgggcctactgatgatgtgttgttgccatggtaatcctgctcagtacgagaggaaccgcaggttcagacatttggtgtatgtgcttggctgaggagccaatggggcgaagctaccatctgtgggattatgactgaacgcctctaagtcagaatcccgcccaggccaactcgaggctgccgcgcgctgccgtatcgttccgcctgggcgtcgacgcggccg

SEQ ID NO: 266094 - DNA, 1474 bp, Homo sapiens
  misc_feature (199)..(199): n is a, c, g, or t
  misc_feature (264)..(264): n is a, c, g, or t
  misc_feature (1468)..(1468): n is a, c, g, or t
attaaatatgtgcaccaaaaactccccggcagtctgtctgcctggaacagcatttcagcccctcaccttggggctcttagttctttggagcctccatctgctgaggaccctgacgttccttgccagggtctgctggatctcacccccagggggtcctgccagtctggtgtttatcagagaaactgcccatacatcaacnggaggtgagaagggatgcttatggggactattatacagctttagtagtggaaaattagaggtttnaagctgtcatgctctgtctctgtgccatacagacctttctatataccctatacaacagattgaaacaatgaattgcattgtacttatttacaatagatcctaagttattgatgattaacctgtttttctaagtaaagtctagcccagctctattgcagcacctggtacctcttagaggctcaataaatacctcctgagtgagcgctctgtgttccatgccagatgcaaggtttagggacagcttaatgaggaaggactttctaatctggaggaaattggggagtcccttggcaagggtgtagcagaggcagtaagatgttagacagtcaggagacctgggatgtcatcctcaattcatttgctagctagatgcacttggaaatgcactcccttctctgattctcaagtttttttagtttgccaaatattaaagtaactcccatctgatggctctcttggatggtataagaataatagatgaggaagctactattcacctttcatgcaggagagaggttccattcatcatgtggagattggagttaagatcttacaatgcctaacaatcctggaattatcaaattctagttgctgtgcatcaaattgaatacattttagatagccataccatcatcataattgcttggagtgaatagataaaaattgaaaaaaatcttggtatattttctcatagaaatctgcccagggatcaaatgttaagcagggatttattagtggacacaatgtagtcagcaaagaggcagtagtattttgagaagcttcctggaggaagaggaactggaactaggtgttgaagggatgttcaggtttaaacgatggagtagaagtgaagaagttaatgaatatagcacttctgacatgtgccaggtgcttaatgtcatttaatcctcacaacatgaaagaggcaaagataactatcttctttttaatgtaagtactgacagtgtgccaggcaacagataagtcaatatgatacctgagatagctgccagggtaacacagagctcactctgaggacctagggacagctccaagagctgagacatgaacaaaaagtaggaattagatcagaaatgaagaaagagaaggaaagtaatgatcgagaaaagggtgccccaagccacgagggtaacatgagctatggcagtcggttgtgaaaccacaggaagtgtatgggggaacnaaaaaa

SEQ ID NO: 266095 - DNA, 242 bp, Homo sapiens
ttattattatactttaagttttagggtacatgtgcacaatgtgtaggttagttacatatgtatacatgtgccatgctggtgtgctgcacccattaactcgtcatttggcagtaggtatatctcctaaagctatcccttccccctccccccaccccacaacagtccccagagtgtgatgtgttattaaactattattaaacatgcagtttttaccattatactgggcactgtacagtgttacc

SEQ ID NO: 266096 - DNA, 585 bp, Homo sapiens
atcctctagagcggccgcctactactactaaattcgcggccgcgtcgaccacaaatttgtgagggggctgcccatcacagacccattaatccatgacactgggtaggcccacctaggattggactttcccaggactaaccagacaaaaagaatcgagcctttttgtctggactaaccagacaaaaagaatgacaaaagcccgctatggatgggacttaagacaaactctcctgaggtcttggcatattcagaacaaagagtaggctgcttaatatgttacatgtctcggagttcccagtcttttcaggctggccaccagacatgaccgaaaaatcatgtcccctagagggtggaaaccaagagcaggtattcctgtttggtcacaaagcaagctctcaaggatgtaaaataagatgagagggacgctttataacaaatgacacagaaagacagagacagctgaaaagctatttgtgggaggaaaaggatcagacaatatgaatattcatgttgaaaatacaccagaatttctacacccaagtcaagtcataccaataattttctcccattaatcaaaattttgga

SEQ ID NO: 266097 - DNA, 924 bp, Homo sapiens
aatcacagtgttctgactctaagtcccatattttccactatattagtttgtctctttgctttttacactctattgtatgcaaagtgatatcaaagaaaaagttgctgggtagaaagtattggctggctggtggcctcttacaatgcaaagaatatttagtatgtatttaaaatccaataattgatggtataaaatatttatctactatatactatgttaggcaattcaaataactcagaaatgattatgaaactgtctctggtttaatttagtagggaaatagatgggaacacaagtcactaaaaagcatttcttggacttctctcacatcctaaacgtgcttctacaatactctatatttaccacattctgtatacagaggagaatacagtatctgtaatataatgggctctcaatgaatatttgtcaaatttaaaaatgatgacagttaaacaaggattaaaatagtggggtggatgctgtgataagcattggatgccatgataaggatgcatgttgaaggtagcgtcaggaaatcttctggaagaaatgacttctaaattgatgaagcgttagctggatgaaaagcaagagtgttggtgttggaaggcagcgtacagaatgcataaagttttggagatgtgagacatggcaagtttgaagaacaaaaatttagtatggctaaagtttagagtgtcaagtgatgaatgagaaggtaggcagggtcaaggttagagccttattcaaaggaccctataagctgaatgtaaggagttttaacatttttcttctatgggaagtcattgaggaatattaagaaggttgttgccataatcaagcttacatttaagaatattgttctgcattgtgaaaattacattgaggaggaacaagactggatgtggggaaaagttggaaagccat

SEQ ID NO: 266098 - DNA, 620 bp, Homo sapiens
tcattgcccctatcttgaagacatcgagttgtctatgaaccttctgctttctccaggccgaaatattctttccttgttcacttccatttctttaagcgtgtgcttaaggcctgtgtttttggttctcgccgcctggtcattctttcacttcctacaattctggcttctttccccaatgacttctactctctattatgcttcttcccagcccactgaattaatcaccatgttctatctgtccttctgtactagtgtcttcaacatcctccctttcccactcatcacagacattaactttgaacaagctctccagtttgtgttattactgcagcctcttggtttctaatgtaccttgcaaaacacttcaaaattaatcttgctaaaatgagtttcatcacttgattcttctcttcaaaaatctttaaggactgtccatacttgtgagacacaaggcccaacccttcagtctgtgaagtcagtcaaccagcaattgtcctgtgtgcccagaagaatctctggaaaatggttgcaacttcctaccattcttgtttctaacctattcccaacaaaaccccctctcccagcaggaagtccccaccccaaaagctattgaggttaaa

SEQ ID NO: 266099 - DNA, 245 bp, Homo sapiens
acggcattgggaagcagaggtcctgtcctccctctgagcacagtcccggctcagcgtctgccccggagaggctgcaaggcaagaggagcagcggcgttaatctgctgagggctgagagaaacgtgagcgttaccctgggctggccccttggctgctctcccttactacggagctggaaggtggcccctgacttctttgcaaaggtatgaagcagacaaattaaaaaatcaacataatggaggaaa

SEQ ID NO: 266100 - DNA, 1058 bp, Homo sapiens
gcggccgcggatcctcgcgcgtgcagatcatccagacctccaccaacacctcccacaggcggatcttggagtagaggcctcgtttctgccacacatcacgcctgcccctcaccgccctctcctcaaactcctcccctccacgcccttcctgatcccctctcattcacttttcttaatgggtctcagcaattttgccaataaattcgactctaatgggggaagcagggtggataagtccaaacagcagatctctctttggagggcactggcttgcagtcagattcacagctaggcacattctcactcagaccccgctctgctggccctgctgctgttcctgctcccacctttttggaagatcggtagcccagggtgagcacaaacattccagttagaggcagaggctgcgtgagttggcaaggtagggagaagtcattgttatcattcctctgcctccaagtagaatgcccttatgccccagttcaagccactgcagctaagtattaatccccagtgctaaaagataccaggcatctagtttagcaatggagggaaacagaaacagcctgtagagagcatcgacaaggcgcataatggagagttggtatctcaaccccaagctccctttgctgtacctgggctgctctgtgaacaagaatccacgcccccctgccctgctggggaccacataatgatccctttgggggaagttgctgattgcagggcaagctagcttggtaaggaaaacctctgcaccagcggcctattcctgcctcttggtccatagcctcatacactcatgttgatggatagtatagatttgctgcccacaccagatatctgtaaggcatcactgtcctgattctgaacctctgtttcaggaagcattctcccctgtgtaaacaactcaaggtggaagtatttcagagggcatagggtcatgaatccttacccaaaggaagcctgttttagcagtggatgcaggagttgatgaacagacaagcaagttctgcttctgtcctgtttcctcctgacagctccattcttttgaagcctga

SEQ ID NO: 266101 - DNA, 537 bp, Homo sapiens
atctcatgatgtgtcttatcttaaaaacaaaaagttgtatcattctagtaataggcaaagaaacgaagactgtttgagtagtaatgagtagccagagtgcccagagtttcatatctaaatatctttttttatagaaataggtaatttcaggacaagtaatgtataacccttaaaatctcttataaaagaagacaaaacactacctaacactattaggatatattatatagactcaggagacaatatgaagaagttcttattggccaaatttgagattattttagcatcagtgagaatcttaacagtgatggattaaatatgtttaaaactttgaatttaaatggatactaaaataaaatccccttttgccttctttgaaggagagttcgggaaaaaaatcattatattgaaagtagagataaataattgagcatttttcctgtcttttctataaggtctgtttttcaagttacatgaatagttgataagatgatgttttccattaaatatattctagggaataagtgaatgtcacct

SEQ ID NO: 266102 - DNA, 410 bp, Homo sapiens
ttttttgatacggagtctcaccctgttgcccaggttggagtgcagtggcacgatcttggctcactgcaatctccgcctcccgggttcaagcgattctcctgccttagcctcccaagtagctgggattacaggtgcctgccaccacacccagctaatttttttgtatttttaataaagacggggtttcaccatgttggccaggctggtttcaaactcctgacctcaagtgatccgctcgcctcaggcccccaaaatcctaggattacaggcatgagccaccatgcctggcctcatatattgccttttatgaaatttattcccatgcatcttacttattgtgcagtaaaggattaaccttgcctaaaaagagatttggcctttgccctcaactcctaggaggtaacctcttg

SEQ ID NO: 266103 - DNA, 438 bp, Homo sapiens
ggctgtgagtgtctattaacacgtgcacttttgcttcacaaatggaggaaaaacctgttaatggtagagcctttggataattcaggcaaggattagactgaagatgaccttgactttggagataatgaaatttaattatgcaaatacaattggaacactgaaagcacataagtaaaattggttttgagcacccaactcactctttatgtggtgaccactggcgggattgtgatttaagctaggtaggctgtgggctattcacataaagagtatcagtgagactgtagttcttttcaaagatcttgttgatttctctgttcatgtattgcaaatgactgaagacttgttccatgttttctctctcctctagaagtgatttttaagatcttttaatgcctagggcatgttcattcattcaataaacagtttttgaggctt

SEQ ID NO: 266104 - DNA, 470 bp, Homo sapiens
cctgtatctacaaaaaaaaaatacaaaaatgagttcttgtgatggtgtgcccatgtagttagctacttgggaggctgaggtgggaggactgcttgagctcaggaggttgaggctgtggtgagcggagatcatgccactgtactccaacctgggtgacagagtgagaccctatctcaaaaaaaaaaagaaaagaaaagaaaaaaaaagaaaatgcttcttgactgtcaccaccccccagttccacaccgctcctcagtccctgactcccagcccctggcagccagcaatctgcattctgtctctaaaaatctccccattctgaacatttcctataaatgggattgtacactatatggccttttgtgtctggcttcttctactcagcataatgttttcaaggttcatccatgttgtagcatgtgtcggtattttgtttctttttatgagactgaataatattccattgtatg

SEQ ID NO: 266105 - DNA, 191 bp, Homo sapiens
gcaggtggaaatttaaaaaactaacaaatgggtgaggtggctcatacccgtactccaagctatgtgggagactgaggtgggaggatcacttgagctcaggggtccaaggctgcagtgagctacgatcgccacaggactccagcctggatgacagtgcgagaccccaattccaaaaaaaaaatagtaatggt

SEQ ID NO: 266106 - DNA, 296 bp, Homo sapiens
agaacactgagtctcagacacatgaagtaacttattgaaagtcctaatcagctcctatgcaccagtgcaggcaggtgaatccacagccctcgctattaaccatggggcagtactccctccacaagaggcattcggtttgcgaggagagcttagaggtttggaaagaagactcatacctccggcctggaggatcagggaggacttagccctctgagctggacttctggggacaggttggattttagcaggtgagtgtaataggcacaggagaggccctctaggctgaggggactgag

SEQ ID NO: 266107 - DNA, 338 bp, Homo sapiens
atgtggaggtagtagcacagagtctcggtccagggccctgttccccagggagctgggcgtcctcagagccttcccaaatgcccacaccgggggcacccgggtttccccaaacactccaggacagagcgggggctttgatcacagggagggggctgcagagctgctgtgtctcctggctcctctgccccatgctccccactcagggctccagcagtgggctcagaggacagtgtggcattagcatcccctgcccgtccaggttgtcactctccttggccccttgctgctccccagtggaaaaaaaagggggaaataaagaatcgtaaaaaatacatata

SEQ ID NO: 266108 - DNA, 634 bp, Homo sapiens
tgaagtcaaaagaacaatgaaataacaaactaagaactttgacaaagagatagaaagtataaaatagtaccaaatagacatcaaagatgtgaaaaatactgtaactgaactaaaaaaattcaatggaggtattcaacagcagattcaatgaagcagaagaaaggatcgatgaaatcaaagacaggtcactgaaaaaaatccaatctgagcaaaaagaaaaaagaatgaaaaggatagtttaaagatagtttatgagacctgtgggacaccatcaagtggacaacaaatgcattattgatatgtcagaaaaagaagaaataaaatatattcaaagaaattatgtcagaaaacttcccaagccttatgtcagaaaacttcccaagcctggggaaggagatagaaagccaaatccaggaagcccaaagaacaccaaataagatgaacccgaaaagatccacaccaaagcaagttataatcaaattctaagttagagagagttgaaaacagcaagggaaaagtgaattgtcatatgtaagggaaccaccctaaggccagcagtggatttcacagcagaaaccttacagatcagaagagagtaggatgatacattcaaaaccctgaaaggaaaaaaaaa

SEQ ID NO: 266109 - DNA, 428 bp, Homo sapiens
atttccggactagtcttgtcaacacattctttatctgtaggcttgaaatccttctcattttgccaggtggggctggatttagggagaccttgccaatgtattttgaaatattttctgcttgatattcaaatcaagatgttctcaactgcctgaaggatgggcaaggccacaaatttttatttatgcctcctctgacactgggatttacaaggctacctcttggttgaactgtgtgtctagtgaggaactgggagggagctgcagagccgaaggatcctgtgaccagcaatgagctttttctataccaggaaatgcaagggaagaagatatggtgattgaattgagtgtggcctgagcccagaacatctcttagaagcacttttaaaaaaaaatctgttaacaaataaatatttattgagtagcttatt

SEQ ID NO: 266110 - DNA, 586 bp, Homo sapiens
agaagggttgtgggcctgagagaggctgtgtctggggacagaaggtagcagagtgggaataaagatgtggccccagccaaggactttacccaagactcattgctttcacatctgggtatgtggaggagaagaaaacgcaacaaaatgtttccatttggctgaacgagagttttctccagacccacctcctatctaaagtgtcctgtcgccacacttgggccaatggcacttgtggtttgtgtgttatcacttctccactcggtgtggtcaaggagctttgcagccctgacttgtagcacagaaagatttattcaggccgcatccacaaagggacaggcagactcctaaagaatcaggctttgtaggcaaatgcagccctgcctgatttccagagacctttgtcccatgggataggtaagatgagcagaaaatctgaaaccagtggcttgaaaactgtttaccacagaatttcctgtatgggtcccatacgtgtacaacacacttattttgaaaattttttcttccttgctcttaccttgctgaaatcattgtttttacaataaagaaaaaaatcaaaaagtgttta

SEQ ID NO: 266111 - DNA, 1661 bp, Homo sapiens
  misc_feature (1298)..(1298): n is a, c, g, or t
  misc_feature (1366)..(1366): n is a, c, g, or t
  misc_feature (1383)..(1383): n is a, c, g, or t
  misc_feature (1393)..(1393): n is a, c, g, or t
  misc_feature (1395)..(1395): n is a, c, g, or t
  misc_feature (1442)..(1442): n is a, c, g, or t
  misc_feature (1472)..(1472): n is a, c, g, or t
  misc_feature (1478)..(1478): n is a, c, g, or t
  misc_feature (1492)..(1492): n is a, c, g, or t
  misc_feature (1510)..(1510): n is a, c, g, or t
  misc_feature (1520)..(1520): n is a, c, g, or t
  misc_feature (1529)..(1529): n is a, c, g, or t
ggggcgcggcctcctgtctgcaccggcagcaccatgtcgctcactgtcgtcagcatggcgtgcgttgggttcttcttgctgcagggggcctggccactcatgggtggtcaggacaaacccttcctgtctgcccggcccagcactgtggtgcctcaaggaggacacgtggctcttcagtgtcactatcgtcgtgggtttaacaatttcatgctgtacaaagaagacagaagccacgttcccatcttccacggcagaatattccaggagagcttcatcatgggccctgtgaccccagcacatgcagggacctacagatgtcggggttcacgcccacactccctcactgggtggtcggcacccagcaaccccctggtgatcatggtcacaggaaaccacagaaaaccttccctcctggcccacccagggaccctgctgaaatcaggagagacagtcatcctgcaatgttggtcagatgtcatgtttgagcacttctttctgcacagagaggggatctctgaggacccctcacgcctcgttggacagatccatgatggggtctccaaggccaacttctccatcggtcccttgatgcctgtccttgcaggaacctacagatgttatggttctgttcctcactccccctatcagttgtcagctcccagtgaccccctggacatcgtgatcacaggtctatatgagaaaccttctctctcagcccagccgggccccacggttcaggcaggagagaacgtgaccttgtcctgtagctcctggagctcctatgacatctaccatctgtccagggaaggggaggcccatgaacgtaggctccgtgcagtgcccaaggtcaacagaacattccaggcagactttcctctgggccctgccacccacggagggacctacagatgcttcggctctttccgtgccctgccctgcgtgtggtcaaactcaagtgacccactgcttgtttctgtcacaggaaacccttcaagtagttggccttcacccacagaaccaagctccaaatctggtatctgcagacacctgcatgttctgattgggacctcagtggtcatcttcctcttcatcctcctcctcttctttctcctttatcgctggtgctccaacaaaaagaatgctgctgtaatggaccaagagcctgcgggggacagaacagtgaataggcaggactctgatgaacaagaccctcaggaggtgacgtacgcacagttggatcactgcgttttcatacagagaaaaatcagtcgcccttctcagaggcccaagacaccccnaacagataccagcgtgtacacggaacttccaaatgctgagcccagatccaaagttgtctcctgcccangagcaccacagtcaggncttgaggggntnttctagggagacaacagccctgtctcaaaaccaggttgccagctccnatgaaccagcagctggaatctgaaggcgtnagtctncatcttagggcatngctcttcctcacaccacnaatctgaacntgcctctcncttgcttacaaatgtctaaggtccccactgcctgctggagagaaaacacactcctttgcttagcccacaattctccatttcacttgacccctgcccacctctccaacctaactggcttacttcctagtctac

SEQ ID NO: 266112 - DNA, 483 bp, Homo sapiens
acaatgttaaaatttttgctttcaacagttaaacgtatttcaaaagcaatgttatcatttctgttgctcttccttcattccttatgttccagatttccttctaatgttattttccttctgtctgaagaacttccttaagcagttttagagctgatctgctagcaactaatgctcttagttttcctttatttgaaaatgtcttggctgggtgcaatagctcacgcctgtaatcacagcactttgggaggccgaagcgggtggatcacgaggtcaggagttcaagaccagcctggccaagatggtgaaactctgtctctaccaaaactacaaaaaaattagccaggcgcagtggtaggcgtctgtaatcccagctacttgggaggctgaggcaggagaaaggcttgaaccaggacagtagaggttgcagtgagccaagatcacaccactgcactccagcctgggagacagagcaaaactccatct

SEQ ID NO: 266113 - DNA, 139 bp, Homo sapiens
gggaggggagcaaccaacattagtgtaaaccccagaatctgagcctgagaacagaagctctgatgtccgagagcaaacgatgacgtcccaactctagaacagagagcaaattcacttttcctctgcctttttgttctag

SEQ ID NO: 266114 - DNA, 613 bp, Homo sapiens
ttgggtcctgataaacccattatatgttgaaatattgtaagttgaaagtgccaatattttcagtgtaggattggtttatctggatgtattacttttgtaccgttataaagttgaaaaatcagaagacaaaccatcataagttggagacgatctgtattatttttgctttgtacagtgaataattgcttagatttactcacatagttaccattttgttacttttcattccctcctggatttccatgtttctatctgaaatattctcccttattctcgaggaatcccctttcgtatttcttgtagtgctggcttcctggtgaagaattctcagaatctttgcctgcagatattttttatttcgcctctacttttgaagaagcttttcactaagaattctaggttggcagtcactttctttttgtattttaaagatattattccattgtctgacttttattgattcttttgagaagtcagtcattagttttattgctgatatagtgaataataatacatcttttagtctcaggctgttctgttttttatattttattcccctgcctttggtttgaaacagttgtactatgatgaagttaggacttttttaaaattt

SEQ ID NO: 266115 - DNA, 261 bp, Homo sapiens
gagatggggtctcactttattgccgaggttggtctgtatctcctgtgctcaagcaacctttcccactgtggcctcccaaagtgctaagattacaggcgtgagccaccatgcccagcctgcatgaactttttatatattagaatattcacacattgttatctgttgcagagagaatctaacaatgtaatttggttttactttcatgaaataagtcaagattttccttttatgattaaaaagttaaatgtcaaccaggcgtgg

SEQ ID NO: 266116 - DNA, 294 bp, Homo sapiens
ggcccatgcaagcctcatttcaattcgtggtggtaaaatgagtcatctcatagaaaaagaagctgcctggcagttgcccctggggtgctcttgggcactttctctggtatctcgcccctgccccccaccctcatctaacctgcagcaatccctgcctaggaagtggtccaaatgacagtcattccacttgagaagtcaagtacaaaggaaccctaagtacttatatatacagtggggttttataaacatttactgagcagataaatcatctcttttaacagcacccaagatgca

SEQ ID NO: 266117 - DNA, 531 bp, Homo sapiens
gttttgttttgttttgttttgagacagggtctcactctgtcgcccaggctggactgcagtggcatgatcacagctcactgcagcctcgacttcccaggctcaagccatcctcccacctcagcctccccagtagctgggactatgggcatgtgccatcacacatttttgttgttgttttgagacagggtctcaaaaaaacaaaaacaaaacccaggcgagggcacggaacctttgtggatagcacggaggtgaacctactgtcacacacagaacggacagcccacaccccaacaccagtcattcctcactgctgccctgggaccaggacggaacgacggctacctggaggcagagagaggggcaatgccccacgcagctcccatggccagcagagctcgcaccttccacctcataacccaggcgtgtgcctactggtaagcaccccaggtgaccccagaccgcagagcatgcactcaggactcaagctggagctgttaccataaagggcttcccatcctccactgcggggca

SEQ ID NO: 266118 - DNA, 410 bp, Homo sapiens
gcggaggttgcagtgagccaagatggtgccattgcactccagcctgggcgagagagcgaaactacgtctcaaaaaaacaaaaacaaaacccaggcgagggcacggaacctttgtggatagcacggaggtgaacctactgtcacacacagaacggacagcccacaccccaacaccagtcattcctcactgctgccctgggaccaggacggaacgacggctacctggaggcagagagaggggcaatgccccacgcagctcccatggccagcagagctcgcaccttccacctcataacccaggcgtgtgcctactggtaagcaccccaggtgaccccagaccgcagagcatgcactcaggactcaagctggagctgttaccataaagggcttcccatcctccactgcggggca

SEQ ID NO: 266119 - DNA, 330 bp, Homo sapiens
ttaacagcctggccctacagaccgctgagtgaccaggactgccctgagccaccagttatcaccagtaacaggggatgacacacctacctcctggggctgttgtgagaattaagaaacactaagtaaggaaagcacactctcaggtatgcggcaggtagtaaagaaaggtagctgcccttccttgatctttctgtccatagcacctgtgcccactgaacgcccctgcatttatctgtggtatctatgccattgtacaaagcttcaataaaataatgataaaatacaattcttaaaaatcataaacaagagaaaccaaaaaaaaacagaaac

SEQ ID NO: 266120 - DNA, 404 bp, Homo sapiens
ccgcctgcctcggcctcccaaagtgctgggattagaggcatgagctgccgtgcctggtctgggaatggtcaaatgggcaacttcactccatcgtgcctgtgtcgaaaactccactgtcctggatgagagaaacggactcatggagcagtgaggaattcagtgggcctggctccagcaggacggtggctgtgggattcacctggctctgcagagcgctcctctgtttattttttataatctgcttttctgcaattctgggtcagagagagtgcagggttcacaaggaggtaggggtgtgtccagcagggagttgctgagctggacggaggtcgaagcgagaacggtctcctcttgctttttcagtttcgattgtaggggtcgctggcatgccctgtgggtttttt

SEQ ID NO: 266121 - DNA, 646 bp, Homo sapiens
attccgtgccaggtgccacgttcagctctctgcccacgtaagctcacttaaggcccccaacgaccccgtaaagcaggtgacgatatcttaactctgagtccataaacactttttatttccttaagaaaacatgctttacggtatcaataaacacggcgacttttcgcccttgacagtcaaactcccccttctccgcccatgaaccggccagagccaatcaaaagccccagacacacagaaccaggcagctgccaatgcaaaagctctccacccgccccagggcctggggattcccagaacaaacaccactgacactgacatgggccagaacccaggaagctccctccttctggcctccctgcagctagccacaaacttagcacctgtccgccctgggcatgaggtgctctgtccacagatactgagcaagcacccactacctgccaggcagcaggttctgggccacaagaggccataaccatgaggacgctccaatctgacagtctcttgttaaatgagataaaactccattcttcagtcccatcaggaatgctccatttcaagagctcaatagcagctaggcaaggcagctcacgcctgtaatcccagcactttgggaggctgaggcaggaggatctcttgatcc

SEQ ID NO: 266122 - DNA, 798 bp, Homo sapiens
gcaccggcaggctgcgaatggttttcttccatagaaacatttcaacaactgcctggccgtcatctaatggttgtctgacatttctcgtggtgaacgtccgagaagattcagtgtttggcagaagaaacctctgtcagacgtgaacgtgtgacagaagggccatccaggaagattgcacactgggcagaaagaagacttaagaacattgcatggacagcagaaggagtgcttcgggagattgcctggtgggcgccaggaacacctgagatgatgtcatggcaaacagtggaaatgagaggacacatattgcttgtctctgaacttctcagctgcctgcagatcttcctgtttttcagctgcagttagggtttgtctgaggagaagcataacatccctccaggccaaatgctccacaaataaatgtgttgaatgaatgaacaaatgaataagcgaagtgaatggaacatcaaactgcataaaaatatatttattcataaatgagaggtgatgattgccaacatatcataatcagactctgaccttggttacttatgagtttgacaacgaagaggaaagaggatcagaagaatttcagagtgagcagtgcgacatagaaaatgaatgtgaacatattctctgagatgtgaacatattctctgaggaaagtcatgtccttaaaggcagctatttattgtgatgcaagacttcaaaatacagttaataatcataaaagtcaactagctattatgaactctgcgtagttgcccataatctatccctgtaatgtatttttatatg

SEQ ID NO: 266123 - DNA, 782 bp, Homo sapiens
acacatgacactttctacagggtgctgtctatgctttgacagtaacaggacttttgggcagggattttccaattcattgtctaactcccactacaattgtccttcaccatgcacccggcaggcacttgaagtgctggttgagcactaaaatcttggaatgctacatagccattccaacgtaaataatcattgtttaaaacattttgaaagttcttttggaactgactttttagaatttttaaatatctcagtgataagtcttcactcttcaagttagatcgtattttattttagaaacatcaaaagccatacaaaaccaagcctgtatatttgtgcattctgtcttcttccccctcaatgctaaggaaggtttctttttcctaggccaaatgctccacaaataaatgtgttgaatgaatgaacaaatgaataagcgaagtgaatggaacatcaaactgcataaaaatatatttattcataaatgagaggtgatgattgccaacatatcataatcagactctgaccttggttacttatgagtttgacaacgaagaggaaagaggatcagaagaatttcagagtgagcagtgcgacatagaaaatgaatgtgaacatattctctgagatgtgaacatattctctgaggaaagtcatgtccttaaaggcagctatttattgtgatgcaagacttcaaaatacagttaataatcataaaagtcaactagctattatgaactctgcgtagttgcccataatctatccctgtaatgtatttttatatg

SEQ ID NO: 266124 - DNA, 415 bp, Homo sapiens
acaggcatatttttataccactattagaaaataaattttggcgatggtttctgaattgcctcatcagactaaaagaaagcaagagtgcttacaggccttcccattgagatcatcattcaccctatatgtttttgagtaccaagtgccctctctctagaagcttatgccctttaaataatatattcatataaatatagcatatcattattggataatgaattatattaatatgtagtgctaatttaatctttataacaacatagccaggtcaatatcataatactcattttgcagtcagagaatttaaagtctaaagaggctgcaactttctcaagatctgagtgctcccagcgatttgtgatgtcaacatcacacccacgtacttttgtggttggctctatgatagcatggtgac

SEQ ID NO: 266125 - DNA, 755 bp, Homo sapiens
ggggcggggccgaaggggccgggaccgccgccccagctcgaggacccgttagaccggcaaaccgcagtccctgccccgcgggcttcctttactttttgggagtggggggcggtttccctgctttttccaccacagcccctcctcccgccgcaatgtggctgatgctcataaaaagttgtattaaagagctgactgcagccgagaatcgatcaacaaaagcgaccagcctctctgggtctatccacggccttctcaacagatgacttcaagttgatttcgtgctttatttcttaagaatagtgactaacctaagggatctgattcaatttattaggaacacagtgccaccttccaaaattacttacctaagaggactgagcctgctgtccctggagcagttagctaaaacagtgcctcagtacggagcgtacctgtgttaacttctagagtgctgtttccggcagctgctgaaatccacgctgaggttatcaagctcatcctacaaaataaagcaagttcttcgcaatttaaagcaaaaatctgggcttatttttagggttttgggggatgtgaaagttgtcttagataagattccaggaaagctaagaactaacgatgcaattacagtcacctttcaacaactttggggattgggttgaggaaggtgtgaaattgggaaatataataaaaggtattatattagtgactttctagagtagcccttggcagtcctgtctttaaagagtaataactgg

SEQ ID NO: 266126 - DNA, 330 bp, Homo sapiens
gcgaggggcggggccgaaggggccgggaccgccgccccagctcgaggacccgttagaccggcaaaccgcagtccctgccccgcgggcttcctttactttttgggagtggggggcggtttccctgctttttccaccacagcccctcctcccgccgcaatgtggctgatgctcataaaaagttgtattaaagagctgactgcagccgagaatcgatcaacaaaagcgaccagcctctctgggtaaaatagctgtgcgtttttcagggcactggaattgatctatacggatcagaaagaccgacagcccgctctcagcagcctcttggatacg

SEQ ID NO: 266127 - DNA, 438 bp, Homo sapiens
agatggagtggtaaactctttctgggacattaggaaagacttcttttaggaggtgacctaatgccattagcataaaatccaaactcttcccaagcctaccaggccctgtgtgatctatcgctgcctatttcactctagcttcatcttatgcctctcttgtccacgcttactgagtgctagtcacatgaaacttctttaagtttcaggaaaactctatatttagatctgtccaatatgatagtcattagctgcatgtggctgttgaacatttgaaatataactagtgcaaattgagttatgctatgcatgtgaaatatataccagattttggtaacttagcacaaaaaagaatgtaaaacattccattaataaggcttttatatcatatggtgataatattttggatatattcagtaaaatgaaatatatcattaaaat

SEQ ID NO: 266128 - DNA, 842 bp, Homo sapiens
agcatgcgcctgtttgctcggtgctgttctctcgataaatcacaacaaagcttccagagggagaggaaggatggacggcaccactgcccctgtcactaaatctggagctgccaagttagttaagagaaatttccttgaggcgctaaagtccaatgacttcggaaaattgaaggctattttgatccaaaggcaaatagatgtggacactgtttttgaagtcgaagatgagaatatggttttggcatcttataaacaaggttactggttgcctagctataaattgaagtcttcctgggccacaggcctccatctctctgtcttgtttggccatgtggaatgtcttctggtgctactggaccacaatgctacaatcaactgtagacccaatgggaaaacccctcttcacgtggcttgtgaaatggccaatgtggattgtgttaagatcctctgtgatcgtggggcaaagctcaattgctactccttaagtggacacacagctttgcacttttgtacaactccaagttccattctctgtgccaagcaattggtttggagaggtaagcctttctgggtggccaacattgttgtctgcttgtacactcatggtttcaagactttgtgacccctacctaccccagatgatgtagtaagcataaagatgcaattatgcctagtacagaaggccctaaaaaatacatagttctgttgattcaggtaattcaatgatgatcacattaaaatcttattatctaatagcaggaagttcattcatttactcatttacttaacaaatatttatttagctcctattatgcatcaggtaatgcactaagtcaatgaaa

SEQ ID NO: 266129 - DNA, 1917 bp, Homo sapiens
agcatgcgcctgtttgctcggtgctgttctctcgataaatcacaacaaagcttccagagggagaggaaggatggacggcaccactgcccctgtcactaaatctggagctgccaagttagttaagagaaatttccttgaggcgctaaagtccaatgacttcggaaaattgaaggctattttgatccaaaggcaaatagatgtggacactgtttttgaagtcgaagatgagaatatggttttggcatcttataaacaaggttactggttgcctagctataaattgaagtcttcctgggccacaggcctccatctctctgtcttgtttggccatgtggaatgtcttctggtgctactggaccacaatgctacaatcaactgtagacccaatgggaaaacccctcttcacgtggcttgtgaaatggccaatgtggattgtgttaagatcctctgtgatcgtggggcaaagctcaattgctactccttaagtggacacacagctttgcacttttgtacaactccaagttccattctctgtgccaagcaattggtttggagaggggcgaatgtgaacatgaagaccaacaaccaagatgaggagacgcccttgcacacggctgcccacttcggcctttcggagctggtggccttctacgtggaacacggggccatagtggacagcgtgaatgcccacatggagacccccctggccatcgccgcctactgggccctccgctttaaggagcaggagtacagcacggagcaccacctggtctgccgcatgctgcttgactacaaagccgaagtcaatgcccgagatgacgactttaaatctcccctccacaaggcagcctggaactgtgaccacgtgctcatgcacatgatgctggaagctggcgccgaagccaatctcatggatatcaacggctgtgctgccatccagtacgtgctgaaggtcacctccgtgcgccctgctgcccagcctgagatctgctaccagctcctgttgaaccatggggctgcccgaatataccctccacagttccataaggtgaggctctgcccagtggtcagcaggttgaggaagattcaaatggcagccttgtctgaaatctccaagtaactcaagcttgcttgaggcttgagtcctgggctaactacctctgatcctctttgaccttccattacatacctaatcctagctgtctcctcatctcatcctagtctaggtttgcttgaaattgggtgtgagagctagaatgagaaaaagagtagcaaataatttgttttgccttgtgtgaacaccagtgcactggtggcttcctgagggactgaggtaagtctgccagaaaggtgaatagtgttagacaggcatacatttgccatcttttaaacagaatgactgatctaaagatgactcagcctgctttgaaattagcttgtagccatgaaagggccacccgattttccagtttaatgaaagctaacgtttattaagtactaaaattatatttattatgtataataaataagcacactgttataagcaaaaaaaaaaaaaaaaaaaaaaaaaaaaaaaaaaaaaaaaaaaaaaaaaaaacaaaaaaaaagaaaaaaaaacaaaaaaaacaaaaaaagaaacgaaaaaagaaagaagacgcaaaacaaacaaacaaagaaccaaacacagaacgaagaacaaatacagcaagaacagaatgcaaggaagaggagcggcccagagagaaaagtaagccgaaggcgagagaagacgaagaccccccgcacacgcagcccgactgccagagaaacgaggagagagacacagtagaaaaagagaaacacaaacggagggagggcacagcgaaaacaggaggcaggaggaagcacgggaggtaagagaaaagacagatgcgaaga

SEQ ID NO: 266130 - DNA, 1351 bp, Homo sapiens
agcatgcgcctgtttgctcggtgctgttctctcgataaatcacaacaaagcttccagagggagaggaaggatggacggcaccactgcccctgtcactaaatctggagctgccaagttagttaagagaaatttccttgaggcgctaaagtccaatgacttcggaaaattgaaggctattttgatccaaaggcaaatagatgtggacactgtttttgaagtcgaagatgagaatatggttttggcatcttataaacaaggttactggttgcctagctataaattgaagtcttcctgggccacaggcctccatctctctgtcttgtttggccatgtggaatgtcttctggtgctactggaccacaatgctacaatcaactgtagacccaatgggaaaacccctcttcacgtggcttgtgaaatggccaatgtggattgtgttaagatcctctgtgatcgtggggcaaagctcaattgctactccttaagtggacacacagctttgcacttttgtacaactccaagttccattctctgtgccaagcaattggtttggagaggggcgaatgtgaacatgaagaccaacaaccaagatgaggagacgcccttgcacacggctgcccacttcggcctttcggagctggtggccttctacgtggaacacggggccatagtggacagcgtgaatgcccacatggagacccccctggccatcgccgcctactgggccctccgctttaaggagcaggagtacagcacggagcaccacctggtctgccgcatgctgcttgactacaaagccgaagtcaatgcccgagatgacgactttaaatctcccctccacaaggcagcctggaactgtgaccacgtgctcatgcacatgatgctggaagctggcgccgaagccaatctcatggatatcaacggctgtgctgccatccagtacgtgctgaaggtcacctccgtgcgccctgctgcccagcctgagatctgctaccagctcctgttgaaccatggggctgcccgaatataccctccacagttccataaggtgatacaggcctgccattcttgtcctaaagcaattgaagttgtagtcaatgcctatgaacacatcagatggaacacaaagtggagaagagctatccccgatgatgacttggagaaatactgggatttttaccactctctctttactgtgtgctgtaactctccaaggactctcatgcacttatcgagatgtgccattagaagaacattacacaacagatgccatagagcaattcctttgctttccctcccattgtcattgaaaaagtacttgcttttagagccagagggaattatttattaa

SEQ ID NO: 266131 - DNA, 1863 bp, Homo sapiens
agcatgcgcctgtttgctcggtgctgttctctcgataaatcacaacaaagcttccagagggagaggaaggatggacggcaccactgcccctgtcactaaatctggagctgccaagttagttaagagaaatttccttgaggcgctaaagtccaatgacttcggaaaattgaaggctattttgatccaaaggcaaatagatgtggacactgtttttgaagtcgaagatgagaatatggttttggcatcttataaacaaggttactggttgcctagctataaattgaagtcttcctgggccacaggcctccatctctctgtcttgtttggccatgtggaatgtcttctggtgctactggaccacaatgctacaatcaactgtagacccaatgggctctgtgatcgtggggcaaagctcaattgctactccttaagtggacacacagctttgcacttttgtacaactccaagttccattctctgtgccaagcaattggtttggagaggggcgaatgtgaacatgaagaccaacaaccaagatgaggagacgcccttgcacacggctgcccacttcggcctttcggagctggtggccttctacgtggaacacggggccatagtggacagcgtgaatgcccacatggagacccccctggccatcgccgcctactgggccctccgctttaaggagcaggagtacagcacggagcaccacctggtctgccgcatgctgcttgactacaaagccgaagtcaatgcccgagatgacgactttaaatctcccctccacaaggcagcctggaactgtgaccacgtgctcatgcacatgatgctggaagctggcgccgaagccaatctcatggatatcaacggctgtgctgccatccagtacgtgctgaaggtcacctccgtgcgccctgctgcccagcctgagatctgctaccagctcctgttgaaccatggggctgcccgaatataccctccacagttccataaggtgaggctctgcccagtggtcagcaggttgaggaagattcaaatggcagccttgtctgaaatctccaagtaactcaagcttgcttgaggcttgagtcctgggctaactacctctgatcctctttgaccttccattacatacctaatcctagctgtctcctcatctcatcctagtctaggtttgcttgaaattgggtgtgagagctagaatgagaaaaagagtagcaaataatttgttttgccttgtgtgaacaccagtgcactggtggcttcctgagggactgaggtaagtctgccagaaaggtgaatagtgttagacaggcatacatttgccatcttttaaacagaatgactgatctaaagatgactcagcctgctttgaaattagcttgtagccatgaaagggccacccgattttccagtttaatgaaagctaacgtttattaagtactaaaattatatttattatgtataataaataagcacactgttataagcaaaaaaaaaaaaaaaaaaaaaaaaaaaaaaaaaaaaaaaaaaaaaaaaaaaacaaaaaaaaagaaaaaaaaacaaaaaaaacaaaaaaagaaacgaaaaaagaaagaagacgcaaaacaaacaaacaaagaaccaaacacagaacgaagaacaaatacagcaagaacagaatgcaaggaagaggagcggcccagagagaaaagtaagccgaaggcgagagaagacgaagaccccccgcacacgcagcccgactgccagagaaacgaggagagagacacagtagaaaaagagaaacacaaacggagggagggcacagcgaaaacaggaggcaggaggaagcacgggaggtaagagaaaagacagatgcgaaga

SEQ ID NO: 266132 - DNA, 641 bp, Homo sapiens
tctctgcaggaagtatacacagacagctcacaaaaacaggaaagtcactcaggaacctggtttaaaactcctggtctgaactcatgaaattgccctgaagtcatagagagtagataccacaaattagaagtcaaatgaagagcatagtttttttcatacttcaactggtacaattctgtactttcaatcctgtgaaggcagatctagagagacttattaatagaactttttacaccaatcccttcattttggggataaagatacggagaacaaagttagataacatctagtgtttttgcctgctcaaatccatttccccttctggtaacaacccatcccatggaattctgggggctggactctttcccgactcaaggtctttttagtgtagagaggggtgatctcacctccagcttcaggggtgggcatgtatcaggcacggacaaacagggtcacattaacgcactcactgacaggtatgcgggagatctgaattgatttagtacagaaggaaaactaaacccaagaccacacagttaatgccaaagctaggactatagcctgagtctcccacctctaagaccagtgatcttttcatgctaccatgccacaaaacatacataagttaaaaaaaagttctt

SEQ ID NO: 266133 - DNA, 423 bp, Homo sapiens
aaatgctacatttctgggaacataaaagcatttgccaccattgacaatttattttacccaaaggaaagtagccacaatataatcatacattccttttggaaaaaaaaaaagactaagatgtttcagagatcaaaagctcaaaagaccaggatatccattgtcatactttataaaatttctgggtagtaaatgactaacttttctgttaatgaaaagtttacctgaactaaaactttactccaaagtacagcacaattaataaaacactgagagaattttagaagtcattttaaaaggtccatcttagaagatacaggtggaaatcaattaatacttttttggtactggcaatatagttttcttggcataatatatttcatcagaaattgccaaggtttttaagtatgctagtatctaattaaa

SEQ ID NO: 266134 - DNA, 417 bp, Homo sapiens
caggactatgttggcaaaataaattactttaatagcataataaaaaacaaccttgttaatttatacgtgcataacctttttgttgagagcataattgatgagtcttgttgctatcttctaacaggccattctgatgggaagggttggtaggattgggtaagcaagaatttgaaatcatcatccaccagctgaacttttttatttagtgattaatttatttaattctaaatgtagtgtttgcctccactgactccttcataaataatttgtttaaactaattagagtaataaattagatttaaaaaggtaaatgtattcaacatcaatgtataaatcagtgaagaaatgtggataaaatagatttggaattaatttaagaaaccattagcaaaagaaataagatcaagatggataaat

SEQ ID NO: 266135 - DNA, 446 bp, Homo sapiens
ccaggtggaccctgagccaggccgcatccagtggggagccctgcatgggcagcaggtgaagccccttggagatgcccagggatccaaaggcgacatcattgatggcaaggctgcccttcttggtctctgggtttgccaccactctggcttggagacaggtgctgcagccttcccaatgctgggctcactctggactcgtcatgaagtgctttctgccagggcaccctggttggaagtttagaagccctaaaggacagctacaattgtggcagctgtgagagagcagctgttgttgatccacacacgggccagaaggtttattccgagaggttctggaaatctgctgggagggatgactcccttgtgtggggaacacactcagatagttgcatattcactcatctacaccacaccatgaataaaacttagattccagattttaaaca

SEQ ID NO: 266136 - DNA, 463 bp, Homo sapiens
tgctttattctacctcggggctggtgttggaatccaggatgccagaccctaaagtccagctctctttccaacctactgaataatccgagagaaatcatgttctctctctgggcctcagtttgcccatgtataaaatgagatgaaggattggctgggatgctctccagagtctcttcctgcctggagttctgacgtagccatgtactcctgctcagcatcgctaaatggctttgtggtaggaccattgagtgctgcctccattagggccagctatgtaatgctggggtggctgtcactgggccctaagagccaggattggtcttactggagaaatccacatccacctaaacttaagacccaggggtgtccaatcttttggcttccccaggccacactggaagaagaattgtcttggaccgcatataaaatacactaattatagccgatgaggttaaaaaaaaaa

SEQ ID NO: 266137 - DNA, 538 bp, Homo sapiens
aagaaaggacggcagccaagccagtgcctcctgtgctccggctctggggccctggacacacctggggattcagttttgcatggaccagcattctccaagcgctctgatcagtcttacaggagaagtaggctgtgtggtctgggagccttgagaaggttccgctgtaatctgtcagacttttggacaggatttttctgccttacgtggctgatgtacgtctgcaggagggtagcacacggcaccctctcggcctgctgtgccacaaaacctttgcttttacaggtctcacggagccagtgggctgcccaatgccccagtgcagagtggagacgaggtcttcccctccttcccagcttgcctgggcggcgacgcgtctcagagacctctgccagggtcaatcctggcccatgctactagctcggggtgtgaagtcacagttgatgctgaacacctggctgggccagacttgtgcccaagaaaccttataccaccaactggttttcaaaagaaaaaaattaaaagtaattcaaaactttga

SEQ ID NO: 266138 - DNA, 338 bp, Homo sapiens
tgttaacagcagtgggaacgtgttactgttagaatatcactgaaggcatctgtttcatctctgaaactcccctactttatcttctacctctgcatcaccattactgccacccctctagactacgcaagcatgatcctttcccagggtaccataatcagcttctaaaagtcttcatggcatggcgatctcaggggaactgatgctagggaggatgggagaccagctcagtgacaattgctgttgtccctgggtggtagcaggggaagtggtgagaggtggttagattctcagtctgttttgaaggttgccaactggattggctgatggaatagatgaag

SEQ ID NO: 266139 - DNA, 572 bp, Homo sapiens
gagattatgttttatccattttagtattctcagcacagggcctagaatcttgcaggcacttagtcattaaggaatgaatactagggatgagattagctgttcttgggaatgcctctggctgagtacccagccaacattatgatcttcacaatctgtgtggcttgctaatgagacatggtcatttcttatatttcatcggagtacagccaccctaaagcttatcaatgaaaaataatctgaaatgagcatcgttagctatataaggtcaaggtctgggtctctcatgtctgctactgttcttgcatatggtgggcacttaataaattggatacattttgctgaatgaatgaaagtttgaaatgaagaaaccatcataaaacaaatataagtgtgatgatttttaggaaatctagaaaacaaattgttcccagtatcattcccatcctaccttagaggaaaaaggctaatactagaccacctagtattgcagccttcttaactcctttgtttagcgaggtctgagttcttgtcccatgaccaagaagaaggcaagcagacaccagagagtaagt

SEQ ID NO: 266140 - DNA, 510 bp, Homo sapiens
caatgtacattttttccctaaatatttaactgcttgacaatttgttcacttgacaatttaaccactgcacagtttgttcagataagctttcctttcccctgctcatttatttaagatgtctgtcttatcctacactgattaacaatctcttattcacaattctaaaacccaaaaggttccggcaaccaatttttttcccctagatttaacatcagaactcattctgtggcaaacctgacctgaaatgacacgaggctacttaacagtctttatctcatttatagtaatgttgattagtctgctgttccagactcaactggggggcatatggtgcatacatttgagttattttttagaaatccaaaatattctgatttatgaaccccagctaaccccaaaggtgtgtatgatcaaagattttggacttgtattaaatgtacacacatatatacacactatatggtatgtgtatcgtctattctgtgccactgattaaatcattataacttt

SEQ ID NO: 266141 - DNA, 409 bp, Homo sapiens
gcattatgaagcttatcaaggttatgtataatttatctggcttgagtaagtccctttattttgtgcacaatcaaaacatgattagggagaaaaattaggaaatgttttaaacattttagcaaataatttctaaatttagaaatgtagtgaattttacatttctagacaaatatcatcaaattactaagcctttgtaaatcagcctatgtttagaaagagagtaaaaatgttagatgaattcaacacttaattttttccccagagtttcatcttaaagagtattaattgtaacgatgctgatggtgttattaacagagtacttatgaatatggaaaaatgtcagacttccaaataatctgagatatgctatttttacaagtcacactaaataaacaatctagacaaaatt

SEQ ID NO: 266142 - DNA, 2278 bp, Homo sapiens
  misc_feature (1322)..(1322): n is a, c, g, or t
  misc_feature (1900)..(1900): n is a, c, g, or t
tctttatgctttcggatttctaaatgagagagtcatccagaaactcgaggggtggagagcatttgtcagtgactgtcctttggtccccaaggggctcctcagtgggtttctcctgagggtctgtgactactctcctgtcacagaagctgctcctctctggcactgtcttgtccttctccactgacctctgggattgactatccttctcagcaggggtgactgtgacactcctggctgttccttctcagtcttggctggtccttcactcctagctggtccttctccacaactgggacactctgctatgcttggttttgaactagtgacagcctctcccttccttttcggcattgatttccctggatgccctggttagcctccaggtagatcattgtggagccctgatgtcgaagtctatccgtcttccttttctggaccttgttgggttcctcagtcgtatcattctgactctcagcttcagttgcaaattaagagttcatggaattacgagaactatctttggaatcagccttaaagctgcaggcttccttttctagagaagctatttcttctagaaagggattggtaggatgtggaggggttccccctgacgaaaggaatccctgagtgctctgaatcaggcagcctttggtggcggccccgcccacacctgtgcccgaggaatgccggggaggaatgtaagagttaaagaaaggaaagaaacaggaaaagcggctcaacagtcaaagacaggtttgttttggacaataaacctgagagggccttctggccgagttaggtcagagtcactctctcttacaggctaagagtatttaagggttcagggcagaagaggttatcacaggcttggaatgtttctgtatctcttcgccttgcttatctgggagggggaggttttgtgtctgttcccatacaactccctgcagctgcagggataccccccccacctcctagtctgcttttagcttgtctatcttagcgcatttaaagggaaaggaatgtgcttattagggcctacttttttactggggcccatttttgggggcccatttacactcccaaaacatgagtgtgaagttcggtggttacccaagagacttgggtgcccagctgtgcccagctgtcttatctgtgttttactgtctactctttctggctgctttttgttagaagtgatttccttgaaacgtaagaagttagaaagggagctggaactgaaaatgggggtgtttgtccaagatgacggtgctcctgctctgtcattccagaccctatagttataaaaggaccaggggcgacgngttctttctggttacttcctgctgggtgggagaggtagagagtcccttggtctcggattgactgcgggagcaatgccgtctgtagatgttttggatagttgtctgtgaaatagccatgctcctgtcagttaagaatctttgaaaaaggttaattaggcagggtaaaaacattagtcctaggcttattattaggagagggcccaggaatgggatgacccatggtatgctttttgttcccaaaccaataattcatttggttgttttggtattcgcttagcattttagccctttgtttgagatttttagcagcctctcttacgagacctgattggttgagatagaagcaacatttctttcccaatgagaggcagaggcacatgtttggaaagacccatgtgttattttttattagtaactgttattcctgctgtaaggatagtaattaagcaaaatgctacggtaattgagattgtctgtctgatatcctaccctcagggtgctgcagtacatagtcctactgcaaatagtccagtaaagcagttcccgcaagggtggcatggtaaataatttccataaanaagctttaatatttggcttaaaaggagaggtagaaatgacaaaaagtacttggtgaggtaagagtgagactgagtcagatgagtaattgtcactcagttagttattttttatgattttcaacttaagatttcttatttctttacattgatatttaggacgttcctctgggctgttgggattgcttcctcagcttttcaggctttgacttgagtgtgatgtatgcaggggttgattcctgtaacagatgtaatttaaactgtcgaaaaccataaaaattgaaaaacatcagtcaagactagaatttaacaggtgtgctatagtttttgaaacctaattttctctctccagtttaccatttttattaaaagacaaatcat

SEQ ID NO: 266143 - DNA, 388 bp, Homo sapiens
gcacaaatgtgtaaatttgtcaaaactcgttgagatatacatttaaaatgggacatttttattacataaaattgattaaaatcaatgcatttttccccatataaaaggaaaaagataaaagagtttgcctcctgcatgtgaattgctaccacctccgtggaggataactgacaatatctactaaaattgcaaatgcgcattcctggtgccctgccaattccacattgtctgtaatggaaaaggattagaaataacctaaatgtctgccaatagggaaccacttaaataaattatgaggaattcatactctcaaaatatatgcagttacacaaatgagtgaagaagcttttgtgaaagttgtcagaatcataatcgagtcacttgagtt

SEQ ID NO: 266144 - DNA, 459 bp, Homo sapiens
taaatatcctaagacccactaaggaagtttgtggcaatatttgctcaaagacagtatatataataaatactttagactggttaagagaatggctctgaatgtctacctagctatcacatttagaaacgccccttgccttccttccaggactttcttccttaatcaggattgacttaactgttaactcctagaactgtcgttgattgcttggtgaagtaacaattagtatagacattcagcaactggcctcccatactgtgattcactgacccagactttgacatcttgggctcagccataccctggagcctccaaatcctctgctggatcctttaagtccagacatctgacaggggaagaaaaagtacaagtttccaaggagttattataggtcaagcctggaagcagtgaggtcacttccacctgcttcccattggccagaattcagtcacatgatca

SEQ ID NO: 266145 - DNA, 453 bp, Homo sapiens
tgcagtagctttcacagagggagggaatagaagacagatggaaggaactggccttcctgctaccaaaaactggctcttaaataatttgtacttaccagcctttgctaccaactcttgaatttcttcctgagcgctttgctaagctaccaccactacaatgtgtacagggcatcaggcatagggtagatagaggaggtggagaaaagagtggggtttggcacaaaatgctcaagagtctgtttaggctcttactcacgggaaatgaactaggagacccagaaaacaggaggaggttaagggtggaagtggtggagggtgatagcacacatctgcctatacccacataccggaattacaggtagttgaattagtacctttaagattgtatgtcatgaatgataaaatactgaacaaagaacatgactacatatatagtaaaacctaagaaaatac

SEQ ID NO: 266146 - DNA, 493 bp, Homo sapiens
gatgaacaggaattcagcagagggtcgagggatgagaaatcttaaaaatttaatttgtatttttggtgtggagaaatggaaacggtctagaatgtagggcagttgtctgaaaaggtctagagggaccaaatagctgggagaagtttgccccaaatggttaaggtgggtgccaaggtgccaccttctctgacctcacagttccccagctcagctctgatccccagggaccaatgaggtgccaaagggtaagggctctttggaaggaattaacgaggctgggagaaaaatagagaaatgatgggggccccttacaagagaacttacgagtataagaagaaggcagtggggactcaaaactgatcaagtcatttggtttatatgcaagtgccctcagggccactgaggcacctggcagaaatgcccatgcccagtgctttttttttttcctgcatgacagagtgagactccaactcaaaaaaaaaaacaaacaaac

SEQ ID NO: 266147 - DNA, 369 bp, Homo sapiens
tgctaggtgaggaaacagaataaagtcttccaatgaggaaacagaataaagtcttccaatctttcaatccttgctactgaaagactagaatttgatcattagatcagtgtttggtgggtttcaaaattagtgacctgggaagtcccagactggcaaccagcacttcctcactccatgaaagtgtggctgtccctttcagctagttcgttccttcagttcagcctttttgagtgcctcacctagcagcgacacaaagcagaacagttacctgaagaaattttaaatattcaaagctgcattgactatgtagaccccttgttttatttttcaagtttgaaaatatgtgttcaacagaattctctatttaaa

SEQ ID NO: 266148 - DNA, 484 bp, Homo sapiens
  misc_feature (113)..(113): n is a, c, g, or t
  misc_feature (148)..(148): n is a, c, g, or t
  misc_feature (177)..(177): n is a, c, g, or t
  misc_feature (209)..(209): n is a, c, g, or t
ttaggaggtgtcaataaggagaatcttttcacagcctgaactatgatgttgcagccaagaagagaaagaaggacatgctgaatagcaaaaccaaaactcagtatttccaccangaaaaatggatctatgttcacaaaggaagtactanagagcgccatggatattgcaccctggggnaagctttcaacagactggacttctcaactgcnattctggattccagaagatttaactacgtggtccggctgttggagctgatagcaaagtcacagctcacatccctgagtggcatcgcccaaaagaacttcatgaatattttggaaaaagtggtactgaaagtccttgaagaccagcaaaacattagactaataagggaactactccagaccctctacacatccttatgtacactggtccaaagagtcggcaagtctgtgctggtcgggaacattaacatgtgggtgtatcggatggagacgattct

SEQ ID NO: 266149 - DNA, 367 bp, Homo sapiens
gagctgcacagcctgcaattacctttattcaattaatacaaaaacagaaaaggggggaggttggaggccgaaagaatgagggtcgtgaccaactcagtataccactggaggctatatgagcaaacagcaaactgttctcatgaatgcaggatgctggcaagctgacaactgcatctgccaccagaaggaatgctgagggcagtcataccccacgtgcagtgttccttgtggttatctataggaacatctggaggctgttgtataaagaaagcaattatgtgagcctgtgataaatcaagcagctgaccaaccattacctcttcctccctgttgattctacctaataaatacaaagggctgtagaagc

SEQ ID NO: 266150 - DNA, 428 bp, Homo sapiens
atgcacaactcctggctccacctctgagaagatgaagttgatgcacttgttcctgtttctcccacaaattaaactaaaaccctggaccttacatgtaaaacaagcagcagatgattctaaaacaagaaaagaaggcagattggctatgaaccctgggacctaagaaatgatatgatgctgagttccctagatgttcatttggtctcatatatccaagactttcagttaaagaagctagcaggctgagcgcagtggctcacacttgtaatcccagtactttgggaggccaaggcaggtggatcacctgaggtcaggagttcgagatcagcctggccaacatggtgaaactccatctctactaaaaatataaaaattagctgtaatcccagctactcaggagtctgaggcaggagaacccacttgaaccc

SEQ ID NO: 266151 - DNA, 346 bp, Homo sapiens
tggagctgggcggcacaggccgacactgaagcctggaaactaccaatcccagaatgcatgacttgagcgccggtcccaggctgcggggtctgccgggcaatgtggtttgccagacgttagcgtccgggaaggaagagtttttcgccaataggctttcggcattaggttctcccgccgagcacccttcttggaatcggctggtcttcctagaaactacagtctatgactgtccttgcccgtggcttacagtggaggaatttaagggcttcctgagatatctgtagtacgtaattatagctaacaaccgcagtaacaacaataaataccattcgtggaaaaaaaaaaa

SEQ ID NO: 266152 - DNA, 539 bp, Homo sapiens
actcctttccagaggagctgactctgagaaggggattgcagacacagagaatgggtaaatgttcagaattgttggcttacagtgtgtatgaattagaatggtaggtggggaggtaaaggtagcagagataagctatagggttaatatttatcttgtaaacaaggagaaactgtagagtgaatgatctaatcacattttcattttaatactgtcattctgaaaacatcctatgcgatggaatggagaaggaagtgatgactcagagtgtgaagagtgaagagttcttagtatttgttattggttaattctcttttgatttcaggggtcaaaaatctaatgtaacttgggctaacaaaaaagaagttaacaaaagaatttattggttcagaaaattgaaaatttccatgtcagatctagctaacctcaggactggcctttgcagtccatctgtggtatctgtgttgtgttacagagttgggttcattgcaggttatgactcctgagttcacacatacctaaatgtttttcttaaaaaaaaa

SEQ ID NO: 266153 - DNA, 493 bp, Homo sapiens
cagaagtgccacataaatcaggcctgacctgcacttacaccctgatacagctaaactctgagctgtaaatgtcttttgtttctgaactgcaaatgccccaagcaaatgaaggtgggggcagggttgggggcggggggagggaaactaatctgaagataaaatacacgcactggatctagcctgcagaatttataatacagaactgtcaagtttatggaaactgtggtcatacaatatattctgatgcatattacagagcactaaatgcaagaaacatctgggcagccagcagctgtgaattttaattgatgctattcaggagaaggagaagggaatacaccactttgccttgtttcttatatccttatatcctgtagcttgcacgtgttctttgttacacacgtgttctgtatattcagaatgatcgaaaggatcagacagcacatctctggtgggaaatatgttgccttaataaaatagagatatctgaaaa

SEQ ID NO: 266154 - DNA, 414 bp, Homo sapiens
aaattatttaatatacgttatgattatacaatcaacatatttttgtgaacaatttggaaaatataaataacccttccccaattatattttgcaattaatagcaaacctaagaaaccactgtctacagatttaagtatttctctattattttaatataaaaataacaaagcaggtattttaaaacttttataagatactttcccaaatactcataatacaaaaagattatactgaagtatttaatatcatggaataatgtttgaagtatatatttctttatatatacattatataataatatataataattccaaaatgttaaacatacttcagcataatctttttaagtgatacataatatcctactatataacattagaatatattgaactaatccattacatgtggcttact

SEQ ID NO: 266155 - DNA, 528 bp, Homo sapiens
agagaggctctgatcttaattatttcataaattctaaactgagatgcttaattagagcttaaatttatggagactctgatacatgagaggtgtccacccaggtttcgtttttcatgaaggagcaaaaagtatatgcagtcacagcgggctctctggagagtctacagtgacatgggcatcaccttttcttagctggtgtaggaggcaggggagggcttgtaggcacatctctgtgttggtgtgcagaagctgactgagatccaaacatgtactaaggttgtcagatggatagaagagatgaagagatgctagtattgactaaatgaacaaacagactgaaaacaggttaaattcaaagattaataattgattttggagagcacagtcgataaatttcaagtatgaccaaagagctgctataaattgactttcctagcctaaaatattcggtaatttttcttaatggatttgttaagaagatgtttgaataacaactattttttagcttctttattggcaaataaaacc

SEQ ID NO: 266156 - DNA, 664 bp, Homo sapiens
caagatcctctctacctctgaataatgattttatgttcttacttatcttccttcaggtgaaagtaagtctctttccagctatccaaacatataacagagtggaatttttcctcactccttctgccccaggcaagatgttgatcagccccaacacaaacctgttttctgctttaaacatatcctatacctagggcaaaatttaaattatctaaaacacatttaaaaacaccccatccatacccactttgttctttcaaacaagtaaattcacccagcagggaaaagctgttgctggcagtccatgcctacagaatctcagccttgccctagcaacgaggctaattataactccggctacctggtaaccgcactagatttccctgcattggctggcagttctaaagccatctcagctctgcctgccacctcccatcctgagaagctgtcagagaagctgagaaactatgagtctcttttaagcaactatctaagctgtggtgagaacacccatgtatcatagagcttcctttctctgcgcccagagaaaggctgcccagaatcacaggacttcagaactgggagggatgtgtgcgtcaatcctggtccagcccactcatttaaacacaaagaaccagaagcccagaaaaagtgacttgccttagcc

SEQ ID NO: 266157 - DNA, 395 bp, Homo sapiens
  misc_feature (269)..(269): n is a, c, g, or t
  misc_feature (271)..(271): n is a, c, g, or t
ctctcctgccctgagctccagcacctgtatgaggcctggcacatgggacatgtacatccgcagcagactgaatgaatctgagtgagtgaatgagggagtgagtgcatgaatgagtgactgaatgaatgagtgagagagtgagtgagtaaatgagagagtgaatgagggaatgaatgaatgagggaaggaatgaggaatgagtgtgtgaatgagtgagtgaatgagtgaatggatgggagagtgagtgaacgcatgagtgactgaggctntnctgccctgatgctctcctcctaccagagtgaagcccacagagtccctccaccttcaaaccaggccctctctccagttttatcccctgcctaatgctgcgagaagcacagtctttttggccctct

SEQ ID NO: 266158 - DNA, 979 bp, Homo sapiens
  misc_feature (593)..(593): n is a, c, g, or t
  misc_feature (654)..(654): n is a, c, g, or t
  misc_feature (681)..(681): n is a, c, g, or t
  misc_feature (733)..(733): n is a, c, g, or t
  misc_feature (843)..(843): n is a, c, g, or t
  misc_feature (846)..(846): n is a, c, g, or t
  misc_feature (856)..(857): n is a, c, g, or t
  misc_feature (862)..(864): n is a, c, g, or t
  misc_feature (871)..(871): n is a, c, g, or t
  misc_feature (876)..(876): n is a, c, g, or t
  misc_feature (903)..(904): n is a, c, g, or t
  misc_feature (912)..(912): n is a, c, g, or t
tttttagaaaagctctttgtcttaaattccttggatttttttcatgttgagactatctctttttcttatatttgaacaacatcttgactgggtatcattttcttgggccacattttgtctctgaaatttgtggcatgtttcatgtttttctggcattgaaccttgcctcagagaggtctgagataagtccaattcccaactctgcttcaccccttttaggcaacttgctttattgtctggttggttgtgttcaaggaattctttctttaactttaatgtttagtgacttaactgggatagagatcagtagctaccatgctgtgtcagttttttttttttcttggaacatggtgtgttatttccatctgtaactaatttccttatttattaaagagaaatttgaaagattatttctttgaataattttctcattttcctgttttattcataaagtcctttacttcagggacattagttaactttataacagatgccatgttcttcatacctattgtcttcctcgtgccgaattcggcacgaggatatagtaccgcaagggaaagatgaaaaattataaccaagcataatatagnaaggactaacccctatacctttgcataatgaattaactagaaataactttgcaaggagagncaaagctaagacccccgaaaccagacnagctacctaagaacagctaaaagagcacacccgtctatgtagcaaaatagtnggaagatttataggtagaggcgacaaacctaccgagcctggtgatagctggttgtccaagatagaatcttagttcaactttaaatttgccacagaaccctctaaatcccntgnaaatttactnntagtnnnaagaggnacagntctttggacactaggaaaaaccttgtnnagagagtnatttaacacccatagtaagtcttaaagcagtcactcaattaatgttttcaagctcaacacccctctt

SEQ ID NO: 266159 - DNA, 270 bp, Homo sapiens
ttttttttctagtagcagtgattaagttacagggatccatctatacttctttgccagtacccccgtggccactggcaaagtttgatggactgctggctggcactgtggccatagaagagatgaggctaggctgggtgtggtgcttcacacctataatcccagcacattgtgaggccgaggcaagaggattgcttgagcccaagagttcaagaccagcctggatgacacaatgagaccctatctgtcgacgcggccgcgaatttagtagta

SEQ ID NO: 266160 - DNA, 379 bp, Homo sapiens
ttttatatcatagtaatatggtttatgtcttcataggacagagtgacttgctcagtgaaacagactgtatacaattagctcagaaacaaatactgaggtttttatctgtttgctgtatcccttgagaaagattaaagagggaaggcagggtgcagtggctcacgcctgtaatgccagcactttgggaggccaaggcagttggattgcttgcgcccaggagttcgagaccagcctgggcagcatggcgaaaccctgtctctactaaaaatacaaggaagttagccgggcgtggtggcgcatgcctgtaatcccagctacttgggaggctgaggcaggagaattgcttgaacccaggaggcggaggttgcggtgagccgag

SEQ ID NO: 266161 - DNA, 224 bp, Homo sapiens
atgtagcctttccttcttgcttaggggatacagggttctctgtatctcaagtggagagcaatggagtagaagcatgagaagctggtgctgtgctgcctgatagaacccttgaccttaatgtttcatcccatcttcaactttgccctactctcaatagtaatttcatgtgcccacactgtgacattctcagacattctcatccatttccttacttggtcagtggc

SEQ ID NO: 266162 - DNA, 1033 bp, Homo sapiens
gtgagataggagactttttctaaccaatggaaggtggcaaaggtgtgtgagtcacatccttgagtatgttttgttagaatgtcacgtttgtgattttattacgtcactttatataaggctctgtctccctaggattttttgcttgctggcttgatgaattaagccaggtggaaaggttttctttaagtgggcagcctcaagccaacagccagcaaggaataaaagccctatattccacaacctaagaaaataaattcttccaacaacctgagtaaggttggaagctgattcttctccagactcccagatgagaacacaggcaggctgactcttgagtccagccttgtggaacccagagaagagggcccagaagtatagagaagttttctgtaaaatggaaatgagtatcatgaagttttaaatgaacagtgtaaaacagaagacatcagcattcattaggtcccagacctctttgagaatctgatgaaattctggacaacctctcctcccacaaacaagatgtactagaatacctacacataaaatgttgcattcaattttggaatgtgaagagatcatttgaagccgatccagaggcctctaaggtgacttgactggtgcagtattggtggctgctgggtcagatgagctccctgctattccaagaaacaatacatgtttgcagccactaagatttgaggacttttgttattactgcctatcctgacagactcaggtgctacaactatttaagggctgaccggatctcactctggcacctagactggagggtactggcatgaactcctgggctcagatgtcctcccacctccaccttctgagtagccggaattacaggaatgaaccatcatgctcagatttcaagctccctgaagatgaaggctgaatcctacacctcgcttgtatcctccatggctcattgaacaagtgctagctagctacatggagactgctcaataaatattgaataactcacgagggactcaataaataacgattgcttaattgatta

SEQ ID NO: 266163 - DNA, 1071 bp, Homo sapiens
gtgagataggagactttttctaaccaatggaaggtggcaaaggtgtgtgagtcacatccttgagtatgttttgttagaatgtcacgtttgtgattttattacgtcactttatataaggctctgtctccctaggattttttgcttgctggcttgatgaattaagccaggtggaaaggttttctttaagtgggcagcctcaagccaacagccagcaaggaataaaagccctatattccacaacctaagaaaataaattcttccaacaacctgagtaaggttggaagctgattcttctccagactcccagatgagaacacaggcaggctgactcttgagtccagccttgtggaacccagagaagagggcccagaagtatagagaagttttctgtaaaatggaaatgagtatcatgaagttttaaatgaacagtgtaaaacagaagacatcagcattcattaggtcccagacctctttgagaatctgatgaaattctggacaacctctcctcccacaaacaagatgtactagaatacctacacataaaatgttgcattcaattttggaatgtgaagagatcatttgaagccgatccagaggcctctaaggtgacttgactggtgcagtattggtggctgctgggtcagatgagctccctgctattccaagaaacaatacatgtttgcagccactaagatttgaggacttttgttattactgcctatcctgacagactcaggtgctacaactatttaagggctgaccggatctcactctggcacctagactggagggtactggcatgaactcctgggctcagatgtcctcccacctccaccttctgagtagccggaattacaggaatgaaccatcatgctcagatgttcaagagtttctcctgaagtggatttgctggctgatttcaagctccctgaagatgaaggctgaatcctacacctcgcttgtatcctccatggctcattgaacaagtgctagctagctacatggagactgctcaataaatattgaataactcacgagggactcaataaataacgattgcttaattgatta

SEQ ID NO: 266164 - DNA, 1130 bp, Homo sapiens
gtgagataggagactttttctaaccaatggaaggtggcaaaggtgtgtgagtcacatccttgagtatgttttgttagaatgtcacgtttgtgattttattacgtcactttatataaggctctgtctccctaggattttttgcttgctggcttgatgaattaagccaggtggaaaggttttctttaagtgggcagcctcaagccaacagccagcaaggaataaaagccctatattccacaacctaagaaaataaattcttccaacaacctgagtaaggttggaagctgattcttctccagactcccagatgagaacacaggcaggctgactcttgagtccagccttgtggaacccagagaagagggcccagaagtatagagaagttttctgtaaaatggaaatgagtatcatgaagttttaaatgaacagtgtaaaacagaagacatcagcattcattaggtcccagacctctttgagaatctgatgaaattctggacaacctctcctcccacaaacaagatgtactagaatacctacacataaaatgttgcattcaattttggaatgtgaagagatcatttgaagccgatccagaggcctctaaggtatgtcttaaaactatttaaggggatccacgcaaaatgttgttcccttaaaagagggcacatctctctcacgtggagaaatactggtaagaggaaaagactttcaagtcaaccaacttgatgtggtgtgcaggtgctgcaatttacttcagacattgcatctataaaagaaagataaggtctcggctggcaagatggcctaagaggaacagctccagtctgcagctcccagcaagattgatgcagaagtgaccggatctcactctggcacctagactggagggtactggcatgaactcctgggctcagatgtcctcccacctccaccttctgagtagccggaattacaggaatgaaccatcatgctcagatttcaagctccctgaagatgaaggctgaatcctacacctcgcttgtatcctccatggctcattgaacaagtgctagctagctacatggagactgctcaataaatattgaataactcacgagggactcaataaataacgattgcttaattgatta

SEQ ID NO: 266165 - DNA, 1158 bp, Homo sapiens
gtgagataggagactttttctaaccaatggaaggtggcaaaggtgtgtgagtcacatccttgagtatgttttgttagaatgtcacgtttgtgattttattacgtcactttatataaggctctgtctccctaggattttttgcttgctggcttgatgaattaagccaggtggaaaggttttctttaagtgggcagcctcaagccaacagccagcaaggaataaaagccctatattccacaacctaagaaaataaattcttccaacaacctgagtaaggttggaagctgattcttctccagactcccagatgagaacacaggcaggctgactcttgagtccagccttgtggaacccagagaagagggcccagaagtatagagaagttttctgtaaaatggaaatgagtatcatgaagttttaaatgaacagtgtaaaacagaagacatcagcattcattaggtcccagacctctttgagaatctgatgaaattctggacaacctctcctcccacaaacaagatgtactagaatacctacacataaaatgttgcattcaattttggaatgtgaagagatcatttgaagccgatccagaggcctctaaggtatgtcttaaaactatttaaggggatccacgcaaaatgttgttcccttaaaagagggcacatctctctcacgtggagaaatactggtaagaggaaaagactttcaagtcaaccaacttgatgtggtgtgcaggtgctgcaatttacttcagacattgcatctataaaagaaagataaggtctcggctggcaagatggcctaagaggaacagctccagtctgcagctcccagcaagattgatgcagaaggcaggtgatttctgcatttccaactgagtgaccggatctcactctggcacctagactggagggtactggcatgaactcctgggctcagatgtcctcccacctccaccttctgagtagccggaattacaggaatgaaccatcatgctcagatttcaagctccctgaagatgaaggctgaatcctacacctcgcttgtatcctccatggctcattgaacaagtgctagctagctacatggagactgctcaataaatattgaataactcacgagggactcaataaataacgattgcttaattgatta

SEQ ID NO: 266166 - DNA, 251 bp, Homo sapiens
tttttttttcttttttacttaaagagatggggtctcacttattgctcaggctgttctcaaactcctgggctcaagtgatcctctcgcctcagcctcccaaagtgctggggattatcgtcgtgagcctccacaaccagcccaagtgtccttccttccttcctttcttccttccttccctctctccttgcttcctttctctttctttctttccttctttctttctttttccctccttccttcctttttttctt

SEQ ID NO: 266167 - DNA, 695 bp, Homo sapiens
cataactacagaacctactacagaggttaaactgtctccaaccacagagaagacctcaactcagcctccagacccagggcttgccataactccagaacccactacagagattggacattctacagccctggggaagactacagctcctcatccagatcagcttcagactctgcatcgaaaactgactgaagtcacaggtccacctactgagctagaacctactcaggattcattggtgcagtctgaaagttacatccaagataaggctttaactgcaccagaggaacagaaggcctccacaagcaccaacatatgtgagctctgtacctgcggagatgagatgttgtcatgtattgatctcaacccagagcagaggctccgccaagtgcctgtgccagagcccaacacccacaatggcaccttcaccatcttgtaagaatcacctttcctcaattgtcctctgtgtcctgcctgacatggcagccttttcctggaggccttcctgggccacctttatctccccaagccatagggacaactgactttctgctttcacctttgcttgtcaactcttccttctcctcattctcttttactgttaggccccttctccactcttttacttgtgattgctcagcaacatacatcttaaatgtacaaattattgagtgaaagaagtgatacagaaaataaaa

SEQ ID NO: 266168 - DNA, 587 bp, Homo sapiens
tatttagagctcagaatgagagcattatttgtcaaggtggctcagtctaacagattgtatagctgtgtaatttttcattagcaaaagtagcatggaaactgaagattaatacaggttttacaatttgaaagaaataatgaaaacagtttagagaaagtaatacatttcataaaaggattttgagaaaaatctaaagaaactggcattactttgattagagaagtgttattggggttttttaaagatgtttgtttaataatgtcaccatgagctctcactgaacaacaatagctatctgtttttgtggtctcacaggattagatatttttaggggcatccaccagaggtaggatatgagttaactctttccttgccttgagagttttcatttcaattgcattcatagagtatctaatatatactaggagtcttacttatagtatcttatttaatcctcacaatcaccctctgttagaaatgaggagactgagttctaatattctttctattttggtgcactggcttcatacccttgtacagatgtgagaaatttgagtggctataaagcataatagttccggctaggt

SEQ ID NO: 266169 - DNA, 433 bp, Homo sapiens
ggaatggggagtgagggctgatggggagggcgtttccttcccggggcatgacagtgttctggaactagatggatgtggctgcgacgcatcgggaatgaatgcaacggcactgaattgtccaccttagcacggctgagtttgttatgtgaatttcccctcaatacaaaaataaaaaaaattgcctctaattttctttccagctgtaacttccgtgtttttaaggcgtcgaacccaatccctccgttttacatcctctatgaactaatcgatgcccccaaactactaaatttcatttcccagaaagttcatgaaaaaccaaaactccaaggaagaaaaacttgagacccaagctagtctcgtgttttttatcatctgtgatttttcaaaatttccatgctgggcctgaagtactgttagtcagaacggtttattt

SEQ ID NO: 266170 - DNA, 503 bp, Homo sapiens
cacggtctccagggatcttgtctgtgcccaaactcctgagacttccctgtcctttcccacaagggccctggctctggtggctgcagaagtgggaggaggggatgtgggggagtctggggaaggccaccttccatgacgctctgccaagccaggaggagcgaaggaataacctggtccccgtgctggaccctggactccaggaagcagagcctacagccggctcagccttgggtcccctgcctctgtggagctggccctaccccagatggccactgtgcctgaggcccggcatctgaccctctgtcctccctgccgaggggccagaacagaggccccggcaacaggcaaggcgcagtgcacggagctgaccccgtgcctcggtccaggcctagcaacaggaagtgagaggccaatgccggtaaacgagatccgaaagattagaggcctcgctgccgccccaagttagaggacaagttcctggaaggaggaggaagctgccgcag

SEQ ID NO: 266171 - DNA, 875 bp, Homo sapiens
  misc_feature (99)..(99): n is a, c, g, or t
gaggctatggtgcattatgattatgcctgtgaatagtcactgtaatctagccactgcaatctatattaagaaacataggccgggcgcagtggctcacgnctgtagtcccagctacttgggaggctgaggcaggggatttcttgaacccagaaggcggaggttgcagtgagttgagatcgcgacactgcactccagcctgacaacagagcaagacttcgtctcaaaaaaacaaacaaaaaaagaaattacattagttgaggacctgctgtatgtgatatgaacaatgaggatcaactctttttgtaatagtttttttacatatgttatttcatttgtttatttcctctgtgagggtaagtattgatagtccagtcatagactggtaacacaggcacaccattaaaaataatagacatacagtatgcagtattttgttttacttatgaaactccgtattttatgtatgatgtattgagtatgaagaatagtacatactgtttccttttaactttatgtttcttgcctttgtatattttatatgaatagcacttgtcactaacatagaaagcagtagaggtggaagagggagacttgccagaataagtttttaatgtgaatcagagatttttattaggaattgggagtggaaggagagagatagtattagaaagtatgtatgcagcaaaggatggagaaactgtccttgttgttaaggcatctaaggatgctccaattactggggaaaacataccaggctcaaaatggtctgattatgcaaataccttctaatacgtttgtttcttttgttgtgcctataaaagatgccattaacttcatatttatgtcactaataaacttctagaatccatgtaaaa

SEQ ID NO: 266172 - DNA, 215 bp, Homo sapiens
agacatgagctcctttcctccccagtgaggacgcaaatgaagacacctgcagccttccagactgcttgcagctattccacccccaggaatggagctggccacttatttaaaggtgggatgggaagctattagaggatttcaggaggacttggtgcagttggattatgatttggaaggcccactccagctactatgtgaaaactgatagcagtgga

SEQ ID NO: 266173 - DNA, 308 bp, Homo sapiens
gtctgaattcttcttgaagctttaaacaaaatatgagtagagaaaatcttactgaagttttaatttaaataattataggttattattccatattagtttaaagataaaattaatgtggaagaagaaagcataacttaaagaattgtatctctttaaaaagttcttatatattttatctatttaaaaagtaaaatttgtttttaggagggtttgggttctttttttatgataattatatatattttcatgttagcgtactttaaaatgaagagctatcaatctcaagttttagttttgaagtaactttg

SEQ ID NO: 266174 - DNA, 440 bp, Homo sapiens
ctacaatgaaagatttactttgagcaactgcagacaggagttgagactgtatctcatgggctctagatagccatctgctatggtctgaatggttttgtccccttctcaaaaattcatgttgaaacttaaccccaatgcaacagtgttggaaagtatggcctttgggaggtgactgagttttaagagctctgccctaatgaatgggattagatgcccttataagagggctgggcaaagggaatttgacttttgtcccttcaacttctgctataaggacagagctttcctcctctccagaggaagaggtgttcaaggtgctatcttagaagcacagatgggatgtttaccagacaaccaaatctgcccatgccttgatcttgaacttcccagcctccagaattgtgagaaaataaatttttcttctttataattatagtttc

SEQ ID NO: 266175 - DNA, 382 bp, Homo sapiens
ggacatgcgggaaatagcatcacgattttactgaggaaaagaggaaagtcacactgtggagcaatgctttgcaccttttcaaaagaaaggactggctgggcgtggtggctcacacctgtaatcccagcactttgggaggccaaagtgggtggatcacttgaggtcaggagttcgagaccagcctggtcaacctggtgaaaccctgtctctactaaaaatacaaaaattagccgggcatggtggtgagtgcctgtaatcccagctactcaggaggctgagtcaggagaattgcttgaacctgggaggcagaggttgcagtaagccgaggttgcaccattgcactgcagcctgggcgacaagagcaaaactccgtctcaaagga

SEQ ID NO: 266176 - DNA, 660 bp, Homo sapiens
atagtagtcaacttttgactctccatttcagatttcgtcatgccctcctcaatgagctgctaagttaggcagtgcattgattattgctgcaggagagggaaggaaggagctaacgtgttttcacatgttttccttttggagatgagaaaggaggactctgccttccccctaccctgcccctttctactccaggacctctgaaaggccatgagcacaaagctgctgcctgagtcccctgaaatgcagggtacgccccaggtctctgatgtaccccaccacacttttcctctcaaacatattccaggatcacttgatttcttttgaatctatttaaacccaccgtgtcaatgtgctatataaaatgtctaatgcatttcagacaccctatacatctatacatttaaagtgttctccttctatctgtgcagggatgggaaagggcatatttctgaaagcacagatgggaagacgggatttgttccgtgtccaggtgattatggtacctctatgcgcctggccggcactggggacagaggccatgaaaatgaatacagcacagcctttgcctccaagaaacttaagacctagtagaaatggcaggctttaaaacaggttgttgggatctgatttggtgagtgcaatgacagagatactcacagc

SEQ ID NO: 266177 - DNA, 347 bp, Homo sapiens
ttttttttgttattgttctatttgggccttcaacaggttggatggtgccaacctataccagtgacaaccatctactttatttattgagtccactgattgaaatgctaatctcatgtggaaataccccaatggacgcagccagaaataatgtttactctgagcacaccatggcacaggtgagttgacgcatacagttaaccatcacacctaggaacacaggaacaatcaattctgttaaggggactcaggggaccaagaaaggaactatgagattttgagaaggaaggagacatttgcaaggctagtggggaggggcatttcaggcagagaaaacaacagtagcaagt

SEQ ID NO: 266178 - DNA, 393 bp, Homo sapiens
gggcacagtctagtcccaggctagagagaacgcaaaacatagtgtggttaatgtgtggtgagacatgtcatgggtaaagactactcatgacctcatgccataaataagacaggacacccattcacttatccgtgctccttccatcccaggcctgtagagggaagtggggacccagaaatcagtcctcagcttcaagaagctcataagaacacttggtttcctcatcaactgatcttctcttcatgtgtttatccagaaggctactgtgcatatgaagggttccggattcactcagaggcacaagagacaattgcttgttttcagctatgacatacatttttgcctcttctggaaatattagtcaggaagtatagtcatagtctttgtattgga

SEQ ID NO: 266179 - DNA, 348 bp, Homo sapiens
tgagacggagtcttgctctgccgcccaggctggagtgcagtggcgtgatctcacctcactgcaagcttcgcctcccgggttcacgccattctcctgcttcagcctcccgagtagctgggactacaggcgcccgccaccacgcccagctaatttttttgtatttttagtagagacggggtttcaccgtgttagccaggatggtctcgatctcctgacctcgtgatccgcccgcctcggcctcccaaattgctgggattacagatgtgagccactgtgcctggcctcagactttctataagagagctttgctccctcatgggctcttgtaatgccaaagctttgctttct

SEQ ID NO: 266180 - DNA, 212 bp, Homo sapiens
agttttaggaaatgtctacagtattagttttcttctcatactgctataaagacatacctgagactgggtaatttataaagaaaagaggtttaaccagctcatggttcttggggctatgcagttttctgcttctacagaggcctcaggaaacttacaaccatggtggaatgcgaaatggaagtagacaggagagagtttcagttttagtctta

SEQ ID NO: 266181 - DNA, 441 bp, Homo sapiens
cctataaaaaagtcttcagggcagggagggggctgggctctgggaacatgcaaatcagcaggggatggggcccactgggcacagctgcagggctggctcatctcagtaactcagcacaaggacagtgtcctcaggatctcaggtcggaccagggcaacacagatttgtctttaatctgtttcttgctgggggtcaatttgaaacaaagaatattttttgataattgtcgaaatttgaaatactgctgagtacttgagggagtaatgtattccattggcgtatggggattatttgggagaaattgttctctgtaggaaactcaaagtaaagtttttagagtgtggaatcagcaggtcttaaaaatactctgaaagggaggggggtactttgtggtatagttacatttctgtgagtgtgtaattgttccttcttaaaaaaaaa

SEQ ID NO: 266182 - DNA, 408 bp, Homo sapiens
ttttgttagtgaggcccctacagtagtgtcagcatttacaagaaaatcttctaaggactccttttcagtatgcattagcatagtctcattcctcagtgaaacaggctgtaaaaatcttactgtctgctcagtttggtctttgcagagcagaagagccttcctaaaagcataagaatccaaaaaagcagttaaaggaaggatttgcataaagtatcagaaacagtctaactttgctacagcatcgctggtaatgacccctattcttaaagagctactttgaagatagcagtgaaggctgtttgctgccctcttggaccccgaggtctgtcttagaggttaatatttcacatgttgtcctaattccgcactttagctgaggcaggcagaaagttcaaagaaacaaggaag

SEQ ID NO: 266183 - DNA, 218 bp, Homo sapiens
gatctcaaaagtattcctcagggtagtctccattcctgtcatttttcctcctattcatgagacggaaaaattatgaccatggtacagagttgtatcaaggaaatgaagaactagaacattgaattgaaaggttttgaaagggttcacaatttcttttcattttctattaatgtcttcttttaaattctcttaagaataaaacttttttctaatatttt

SEQ ID NO: 266184 - DNA, 779 bp, Homo sapiens
ctagctataccagagaaagtcaagtgaatggatcagacaataagaattgaaaataagcttaatagagcttcagagaaagaagggagaatgttggaaacacaaagcacaaacaagcatttgtgaattggatgttgacaaatattaatgaaataactcaatggatgggttgaatatagctggacagttcactcatgaaccggaagattagagcaaggaaggaactaagaaatggaaagcatgaaaggagagttaagaaatgtggaaggtagaagcataaatatttttctaatggaaattccagaaggggaaaaaaagaacatgtgaaagaattattgctgagaatttcccagaattgaagacatactttagaatgaaaaaggccaactctaactttgggatttctagcttcagagaaatgaaaatttagaatgaccaaggggagtgcacaggattttttgggcagtgaaactattctgcatgatactataatggtggatgcatgctattacacatttgtcaaaacccattgaatgtacatcactgagaatgaagcctaatgtatgcactttggatgattatgatgtgtcaatgtaggttcatcagttctaacaagtagaacatgctggtgcaggatgttgatagggaggctgtgcatatatgggggaggggatgaaaggaactgtgtactttctgctcgtttttgctgtgcacctaaaattgttctgaaaaaaatcaagtctattaagaaaacaaagacagttttttaaagcataagagca

SEQ ID NO: 266185 - DNA, 402 bp, Homo sapiens
ctgacttccttctcttcccttccctctaatctcctgctggtgcctgccattgtagaattcaatcgttagcatgtctgatgataaatccacagagtttcagtcccccaggatctcaaatcagggtagagaaaggcaggatgatggttctagaatagacaatgaccagtttattctatgattttaactatcataattttaaaatatgatttgttaaaaggctggtgccttctcattattactcaactttgataagctccacttaattcatgctattaatttttctatatgaagtttatcttatttttttctaaaaatttgcttcagtaaagtttgtttttgaaataactctatgcagaaaagtgcacatatcataaatacacagcttgatatttttgtatagtg

SEQ ID NO: 266186 - DNA, 402 bp, Homo sapiens
acagagtctcgctctgtcgcccaggcggagcgcagtggcgccatctcagctcactgcaagctccgcctcccgggttcacgccattctcctgcctcagcctctccagcagctgggactacaggcgcccgccaccacgcccggctaatttttttgtatttttagtagagacggggtttcactgtggtctcgatctcctgacctcgtgaaccgcccgcctcggcctcccaaagtgctgggattacaggcatgagccatcgcgcccggcaaaatgagactatttaatagcttataagtgactgaaaaggtacagaacagtctgaggtgccattctatgagtaggagatggggtgatggacagcagctatgccacgaaatacaaccacttacagtatggtatctaat

SEQ ID NO: 266187 - DNA, 400 bp, Homo sapiens
cttgatgtgtctctggtttcagcatgaataggtttggaaaaaacttagataatgtgactggaatgtaaatgtaaatttccattcctaaaatacatttttcccagagtagtaattgtttgaaagtcttaaaagcataaattttattttataagtgctttatgacttttttgaagggacatagaatagataaacttaaaaatatttaaagcattttataaatgcctttacacattcatggcaaaatgcttagtaaaatttcaggtacaaaattctctagggtattacattgttgagtgtccttaagaactataaaatttcctatccccattatttctcctgtttaatttcctgtcaccacagatgagtctgggctttgtttgttttgccaactacagagttg

SEQ ID NO: 266188 - DNA, 770 bp, Homo sapiens
aaatcaagtcatttccttctggcagcaaaactgctgggtttcactgccaggcctgccctggtcagacttgtttggggaggtggggaggactaatagcctgtggctagaaagctaaagactcccagtgttcttcctccaagttcctgccattcctctggagtaactgcctctcagtttgtttctttaatggatatccagcaccacaaaatggttagttttgacaattttgtccagctttatgctcattttttcaggataacagttgtcttatcctttcatagctaaaagttgctttaccccatattaatgtttttttgattatttaaatgatatgcaaaattaactatgacatagagtgtatttcttgtatattctagttgttgaccatagtccaacatgatacctaaaggttatttcgtaagcacgtgattggaagctttatgtgaatttatcatgagttaaagaacaaatttattattatattgtttcacacttttcattattctaatgactagatttaactaacttttaatacgttaccatgagtcaattctgtatgtgctaagcatgtttgaattagtacattttataccactcttgtctatttgttcataaattgatacttgtgaaccagatatggagtcttaactcaagctgagaaaaaagaaccttttataataaacaataaaggttgtggttaatttctatgcttgactttgtggggtttcaaatatgagctgcagatggctcgatttgcctgactagagtgg

SEQ ID NO: 266189 - DNA, 403 bp, Homo sapiens
gtaaatgcagggctagcacctgagggagtgcgtcctcccctcactctcatccttggcctgccctcatcttgcctaagagagctgtcccctggcctcagatagctccagtcactcccataacctgttgatttgcctcagagcccccccatcacctcgccgtcatcctcactactcactcggttggtactgactatatcttaggtggaacagcgcgaggcagggacgtcatgctttgcagtcactgccaagagcagtacctgtgttattcagacacaaagctaggctctattcagacatggagtgctgaataatacctgagtgagtaaataccatgtgtctgccaccctcttctccctgaggcctgcctgaatactttcccctagacacggctggctgcagtggg

SEQ ID NO: 266190 - DNA, 309 bp, Homo sapiens
ggtaaaagcagagtgaaacagagccatctgccttactcagtccaccactggcatcaaccaactggtcaagggcctaaatggaacaaagaagaggaagaaggttaaattcactctccacctgactgcttgaactgggccattggttttctcctgctctctgctcaactcttaggccttcagattacaccactggcttttgtgggtctccagcttgttgaatgcagatcatggtggttctctgccttcataatcatgtgagcccataccttataataccttataataaatctcattatatctattgatacc

SEQ ID NO: 266191 - DNA, 336 bp, Homo sapiens
acggagtcttgctctctcacgcaggcagtggtgcaatggctcactgtagcctctgcctcctgggttcaagcaattgtcctgcctcagcctccttagcagctgtgattacaggtgtgtgtcaccacgcctagataatttttctattttcagtggagatggggtttcaccatgttggccaggctggtcttgaactcttgacctcaggtgatctgcccaccttggcctcttaaagtgtggggattataggtgtgagccactgcgcccagcctattttcttacattctattactatggtcatttatttttccaaccaacatgtatatctaattaagtaaa

SEQ ID NO: 266192 - DNA, 220 bp, Homo sapiens
cacatcaccttcagggaaaagactgccgcatattactcactacctccctccacccctctgcgtgaaaaggttaatttgaataaggctgctgcttccacaaatagagcagtaaccagcacacagaggaaccgccaatgagactgtatttcaatgatgtcatacttatacctgcctcttattatttgctgagtagtgacaatgtgttccgtgaatctcacgt

SEQ ID NO: 266193 - DNA, 254 bp, Homo sapiens
actcaaggatactacccttaactattcaatgtagtgaaaaatactggataaagcattacaaattacatagaggggctctggttccagttaaggtagactaagcacactccatctgatctttcctactgattacaactaaaaatcctggactgaatatataaaatcactatcagataattctgaaaggtggatgacagaaggccaaggaagtagggagtacagcatttaaaggacaataaagcaatgaagctctg

SEQ ID NO: 266194 - DNA, 689 bp, Homo sapiens
atctggaagagtcatttttgttaggtttggaatattagctggggatagagtacttgagagagaaaagtagtaaatgcgaaagccataatcttcgtaaagtttgagatatctaagaacaagcaaattaagtcattaaagacatacaaataaaatgacttgccatatgtcttagcctgttttgtgctgctataacagaataccacaaaataccacatactgggtaatttataataaatataaatttatgggctcacagttctgaaggctggaaagtagaagaccaaacagctggcatctggtgagggccttcttgctgtgtcatcccatggcagaaggccaaagggcaagagagaacaagaaggaactgaagttgcctttcaataacagcacaaattccacctatgagggtggagttttcatggcctagtcacctcttaaaggtcccaatcccagcactttgggaggccgagaagggcggatcatgaggtcaggagatcaagaccatcccggccaacacggcgaaaccccgtctctactaaaaatacaaaaacaaaattagccaggcatggtggtgggtgcctgcaatcccaactactcaggaggcaggagaatggcatgaacccaggaggcggagcttgcagattgggccaccacactccagcctgggcgacagagcaagactccgtcac

SEQ ID NO: 266195 - DNA, 335 bp, Homo sapiens
tttttttttttgtggctgtgtagtagtattccatagtgtatatgtaccacattttctttattcaattccacattgataggcacctgggttgattcatgtctttgtgaataaatgttcactttattatgaacagagtggtgatgaatgtatgagtggatgcatctttttatacaatggcttattctcctttgggtatatacctagtaatgggattgctgggtagaatagtagtcctattttaacttctttgagaaactgccaaactgcttttcacagttgctgaactcattcacattcccaccaacagtgtatacgtgttcccttttctctgcagc

SEQ ID NO: 266196 - DNA, 505 bp, Homo sapiens
cacgaggctgggagctatttattgcgtgtttctctcaaggccctctggaccattctggaaaaatgttgaaacatgggctggagtggcatagaatgctcctccaaaagcacccatgtattcttttgctttgtttgtttgtttttttttaaatggagtctcgctctgtcgccttggatggagtgcagtggtgcgatctcagctctgcaacctctgcctcccgggatcaagtgattctcctgcctcagtctcctgagtagctgaaattacaggcacctaccagcacacctggctaatttttatatttttagtagagacagggtttcaccatgtttgtcaggctggtctcaaactcctgacctcgtgatccgccagacctggcctcccaaggtgctgggattacaggcatgagccaccgtgccccgcctctttttttttttttgagatggagttttgctcttgttgttcaggctggagtgcaatggtgcgatctggtgtcactgcaacg

SEQ ID NO: 266197 - DNA, 392 bp, Homo sapiens
ttttagcatcacaatgactaagcagtgctattggcaaccagtatttggaaggagaagggatgccaaacatcctgcgatgcacagatcagtcctgcacaatgaaagaactgtcccatccaaatacctagaatactcccaaagagcaacaacggacacaccaggatactgtatgaactggttacactggaaaaaaatacctctaggactaaaaaggagtaacaaagaacagatgaaacaagactttgcaagataatcttctatgttttaagcaagagtcttgcaggagaccccagtacttctctccaagaaactaaatctgtaatggatacatagctctaatcttttgtgcagcttatcttaaaaaaagagaatagtaaggtgatactgtacca

SEQ ID NO: 266198 - DNA, 433 bp, Homo sapiens
gacttcatgtctttaaaaaaattaagctaatgaaatgacacctaggatctaagggatgcccggaagcttcctcagtccttctctagcttggtgccatttcttgtagacagagaggagagctattaagacacacgacagcagattgttctgtaatgatgacattcttgcttcatgtaaatagccatttagaagcctcagttgggactttgcagaatggaatgcagttcttggataatcagaaaatgacttattttgggaattcttcatttgggaattagagggttttctattctgtttaaccattgcattaccatgcctggattctatttttaaaatcttacctacgttttaaaaaatgagtattatttaatggaagctttcccccaattgtaaattaacctgtgcattcattatagaaaattagagaaagtac

SEQ ID NO: 266199 - DNA, 602 bp, Homo sapiens
ttaagggcaaaaataataaaaagccctttttacctcttttaacctctgtaaaattactatagttatatgcctttctctgaagtgattggatttcttcaaaggcagagctacttaaggccaggtggctatgctaatggtcatctagggaacttttatgagagcatatgtatatcttacaagtaatgatttattcttaatatggctgtccttagctggaaaagtctttataggtcaaagaaccgcatgaatatttaaaaagctgttaccaatttttctaatcttggtggtgtttcttgatctcctttgccatgaaatcctggtatgtgtataaggaacagatggagtagttaatagaataatgacaaccagattttcttttactacagagcctaagtatataactaaaaaaaaaaaattaaactagtattcctctcaggacataatttaaatttatttatcttaattgtttgattgctaggtttttccaggaatgtttattatgaagattttaaaacatctgattgggccagtgaaacatccatagaaaatttttggtcctacgggaggagatctgttctcattataatagatactgatgagat

SEQ ID NO: 266200 - DNA, 229 bp, Homo sapiens
cacaaggaaattcctggtgagctccaagatttctgccctaaggtgttcctgttaaaatttcgccatggtaatgtaaatcgatagcttgtctttacaggtgcagtcatccccctgcctaccagatacaaatgcatatctgattgttcccctgcccttttgttatgttttgtctatgttaccttatgtaataatgcagattcctctgccccatttgtctgtcatcttatgt

SEQ ID NO: 266201 - DNA, 483 bp, Homo sapiens
gtgaccagaatttactgtgtactcacataaccatctagggccaccattgtcaaagattgtgttgtatttttctcctcatgagcaaccctaagatttggtttggttggttccagctctgaacagtacaagtgatatggtttggatttatgtccccacccaaatctcatgtcaaattgcaatccccagtgttggagatggggcctggtggaaagtgatgggatcatgggggcaaatttcccccttcagtgctgtgctcatcgtagagttctcacgagatttggttgttcaaaagtgtgtagcccctgccccctgtttctcttcctcctattccagccatgtaagatgtgcccattcctctttgccttcagccatgattgtaagtttcctgatacctccctggtaaccaacaaatgccagcatcatgctccctgtacagcctttggaactgtgaaccaattaaacttcttttctttataaattacc

SEQ ID NO: 266202 - DNA, 464 bp, Homo sapiens
atatagattaatctcaaaatacttatgttgggtgaaagaagccaggtcaaaaaacagataccatatgattctatttatttgaaattctagaaaatgcaaactaatttgtagagatggaaaacagatgagtgtttgccttaagagtggttgtgagattgggagggtggaagggaggaattagatgctctaaaggaaacattttggagtgatgtgtatgttcgttttttctaatcatggtgatggtttcatggctatttattacatgtcaaaacttatcaaattgtacatttaaaatatgtgcaattcattgtatttcaattatattccaataaaggcattttttaaaaagtaaaataggaaagaacagtatgacaaaaggtagccaagtttggacatataacagttcactaagcagatgctggtagaaaccaaataaacatttggggagctaaagaaaaaaaaaa

SEQ ID NO: 266203 - DNA, 614 bp, Homo sapiens
ccggaattgaattatgaagtcttcaagagtgttggtaaagcagttccataaggttcatctgtagaagtctgttgactttaaaacttggtgggaagccttattgtatgtaaagtttaaagattttagaacacaggaatatcttcttacctgagtttatcctatttgcctttgtatagtaggatgtaaaggggctctctaaacctaataaaaattaaatcctcaggctgggcaaggtggcttacatctataaccccagcaccctgggaggccaaggtgggagcattgcttcaggccaggagttggagacctgtttaggcaacatagagaaaccccagaattagtcaggcttggaggctaaaggtgggaggatcccttaagaccaggaggttgaggctgcagtgaactatgattgtgccactgcactccagccttgggccagagtgagacccctgtctcgtaaaaaaaaaaaatagtctaagaatttattgtgcatgggattttggctacttagactgaacctaaaggagtttttgagacagtttaagtctaggatgacagccattcctgtatatctattgattgtataaggagagctaactttcagttggcagttg

SEQ ID NO: 266204 - DNA, 448 bp, Homo sapiens
actggcctaacccaatcatggaagttccattttcagtatttgatctagacaaagccatgtgacccacaactctgaccagtaagatatgaagcattgttaaagaaattgctgcttctgctgctgaatgctatccaggatgcatgtgatggctgaaaatagggccataaggggcattagcctgaaatacatgctgagaatggcagagagacatttgatgacataactgaatcaatctgacactgccttaccatctatgaaatattataaaaacatcctgaaaactctatgctttcagaagttctttaaaaaacttagcctggcgtttggtggcatacacctgtagtctcagctactcagtgggaggactgcttgagcccaggagtttgaggctgcagtgagtattgaatcactgcattccagtctgagtgacagagcgagactctgtctc

SEQ ID NO: 266205 - DNA, 415 bp, Homo sapiens
aaaaaaatatttttgagataggatctcactgtgttgcccaggctagagtgcagtggtgtgatcatggctcattgcagcctcaacctcccagactgagtatccttctacctcagcctccagagtagctgggaccacaggcaagtactgccacacccggctaattttaaaattttttaggtagagacagggtctccctatgttgccctggagtttgagacctgcctggataacatagggagactccatctctacaaatatatatatatagcctggcatggtgatgtgcatcccagctacttgggaggctgaggtgggaggatcaactgagctcaggagatcgaggctgcagtgagccattattgtgccactgcattccagcctgggctacagagagagaccctgtctgaaagaaagg

SEQ ID NO: 266206 - DNA, 352 bp, Homo sapiens
cattaatgtatggtgatgaataaataatacgtttaaaacacgttattgataaaatactcacaagaatatgtatttccctagaatgtatccctatacttgatttaagtttcctattcatttgtatatgctcagtcagaaaggaatattgggcactttctataaaagatgtatcataagttgaatgtttgttctctgaagtatttcagggttaaatttaaggtaaatcatttaactaactatgcagtagaaaaatagttaatataattttaatatttggaaaagacttattgatatccttggctaggaaagaacattagaatgaaatgtatttttcacacgtaccctagaactt

SEQ ID NO: 266207 - DNA, 336 bp, Homo sapiens
cccctaaacacaagatacgagcttaagataagaaactatgaggactaaccaagctcattttatttttttatttttatttttccaagctcatttaaaaaataaccaaatacaacttgaaaaaataaaaatgtaataattaaaaataagagagtgaatgaatttatgaataggtaaatccaagctgcatagaaaattaatcaaaagaatttgagccgggcgcagtggctcacgcctgtattcccagcactttgagaggctgaggcaggtggcttacagtgtcaggagttcgagaccatcctggccaacgtggtgaaaccgtgtttcttctaaaaatac

SEQ ID NO: 266208 - DNA, 280 bp, Homo sapiens
agagaaaaaaaatctacaaaaaagaaaacagaacatcagtgagttttgagacaaaatcatatattctaatattatgtacttagagtctatgaagaggggagacaaaaactatttcaagacataatggctccaaatttttgaaatatggtgaaaactataaacacacaaatccaaggagcatgtccagctgagctcatggtcactcctattcccttttccttagcctcctctagatacatgtgtgccatccctttcctccacaccctggccactggatttc

SEQ ID NO: 266209 - DNA, 446 bp, Homo sapiens
catgcttagtgtagcctactctaggcacaggaagaggcagggctcacagctgccactgatgtatatgcagagtacgtacaaggcgagtggagcagccaagagaaccagactgtagcaggttaattggctggggctgacagattccaagtcaaactggcccaagctcatgtctgggattctaaagcagaaggaagagtcaagagagagggaatggacctggatgactgcaagaggaccaggtgcagaagccaaaacataccatactgaggcagacaggagcaggtggttaggggactaaggcaattactgaggagagaggctgatgaagacggaagtaaaagaaaaacaggttggagtgctgcagctgaggagccctgctggctgcagtaccactgtctacattattttaaaaactatttcttcttttttataaaaaaatcaaacta

SEQ ID NO: 266210 - DNA, 219 bp, Homo sapiens
tagaggctgttatggtagctagtacgagggagattatacaaatttcaagaaatttaggatttcctatctctagctctattcttttccaaaaggagacaacattttctgagttatgtttgatacaatatgtctatgtttctatcacagtgacttcatgctgtgaatatatacatcagaggaacattaaactctaatgaaacccttctaaaaggctgtaac

SEQ ID NO: 266211 - DNA, 431 bp, Homo sapiens
cctcccctgtccacagtctaaattggtgtgttgcctgggtgaaaaacacattgttcctctgtccacccctgtctgctctcatcaggagagtgagcctgcgcgggtctgcctgagcctgctctgtagacaggagaccactaaagcacttagtaaaggaaatttgcgatccagagcagagaggtttctggggaagcgaggacaagggcctgactttgcatgctacgaagagggcagcaagacgaatatgttacagataaaaaagggcagtttgcagaggcctgtggtggcacacacctgtaatcccagctactcagaaggctaatgtgggagaatgatttgagcccaggggttggaggtttggaggctgcagtaagcaatgatcaccactgcactccagactggacgacagggtaaaaccctgtctcttaaaa

SEQ ID NO: 266212 - DNA, 910 bp, Homo sapiens
gggttccaacatgaaccccaagtgaacactcccagggtaggtgctgtacattgtggccttctctgcattcaccacccacagcttatcacttcggcagtgactcccagcctgtagccttgttttctaatacacaaaatctgaacacaaaccaagtgcccatcaactggggactggttaaattaatcatggtatgtctttacaatggcgtatttgcagttattaagaatcatattgtgattgagcacggtggctcatgcctgtaatcccagcactttgggaagccaaggtgggtgggtcacttgagggcagaagtttgagaccagcctgtggtcctaagggaacttgggagactgaggtgggaggatcgtggctacagtgagctctcatcacgccaccacactccagccttggcaacagagtgagaccctatcttttttttttttttttttgagacagagtctcaaacaaacaaaaaagaatgatattgtggttcatgcctgtaatcccagaaatactggaggccaaggtgggaggttcgttgagcccaggagtttgagagcagtttgagcaacacagggagaccctgtctctcccaaaaaataaaaataaaaaaataattagcctgtggtacatgcctgtggtcctaggtacttgggagactgaggtgggaggatcgtggctacagtgagctctcatcacgccaccacactccagccttggcaacagagtgagaccttatcttttttttttttttttttgagacagagtctcaaacaaacaaaaaagaatgatattgtggttcatgcctgtaatcccagaaatactggaggccaaggtgggaggttcgttgagcccaggagtttgagagcagtttgagcaacacagggagaccctgtctctcccaaaaaat

SEQ ID NO: 266213 - DNA, 751 bp, Homo sapiens
gcctggagcggcgctccatctccctgtgaaacgactcactggctatttgtcctgataacaatcaccccaccccccaccccccacccccagcacatcctgccggccggcctaacgcagatacctaattggcgttattggaaaaaatagaatgagggtggaggaatgaactgtccacagctagaataatgcactccccaccccaggcttcagccccacaggatccagactgagtgaggtcttcggacctgagattcgccctgtgccaaaaatcattctcaacacaccggactgcactgaagaagctggctgttaggtgactctttccttttctttttaaaacaaatatactttggacaaagcagtagcaaatgcttaacgtttaattgttttgtaagatgagggggtgagccgctcatctctaaggcaacatccagctgaaatttcgtgactttaccattctgtgcctgaagaaccaggggttatcctttcctttttttttttaaagagaagctccgtaaataattatggggagtggggggagggcagaatatgtacacgcgattcataagtcttttcaatatattaacaagtttttttcttttttttaagctgtgcaaatgatttggaggccggttttagtttcctgggcccccttcccccatgtgttgtcgtaaaggctggtggctgagctgggtgtaagtggcactgccagagctcgggatcaggcaagcagagtgaggccaggggtgca

SEQ ID NO: 266214 - DNA, 403 bp, Homo sapiens
taggaggtcccagactcggaccattcaattagtttttaaaaataacaatttctttaaatttagagaagaaaataaaaggatgactgtccccaaactaatatttgaaacctacaaccccaaattcagaattcaatcaaatgccaccatctccatgaacccttccctattctccctggccagaagtcacattctggatggtttctgattatgagtgcgtcttctatgaccctgctaaatacagctccaagaaggtacgggctgtcttattgatctctgggttccccacagcaccccatgcaggtcagaagtaaaccccgatcattaagtgagtcaagggatccagtcctggctgggtgtgagggcttatgcctataatcctagcactttggggaggctgaggcag

SEQ ID NO: 266215 - DNA, 198 bp, Homo sapiens
cttggcctcccaaagtgctaggattacaggcataagccaccatgatggccaggcccaggctctcagaattcaaacagatgtgcttcccaggcccatgctccaggtctgccctgcctccccctcaagctctccttcccactccctcatcacatctcccattcagtaacttgttccaagaaccagtttccacttcctccc

SEQ ID NO: 266216 - DNA, 328 bp, Homo sapiens
ggctcaccgcaacctccacctcccggattcaaaactattctcctgcctcagccttcctgagtagctgggattacaggcatgcgccaccacgcccggctaattttgtatttttagtagagacagggtttctccatgttggtcaggctggtctcaagctcctgatctcaggtgatctgcccgcctcagccccccaaagttctgggattacaggcgtgagccaccgcgcccggcctgtttgcttattttaagagaaataagattttatgcaacagttttagttaagcagatagttaacgaaatcagatttacatttttaaaataccactct

SEQ ID NO: 266217 - DNA, 356 bp, Homo sapiens
cagttgtatctgtgtattggtttgctaaggctgccaaagcaaaggaccactgtctgggtggtttgaacaacagaaatctattttctcacaattttggaagctagaaggccaagatggtgtcaggagggtttgttttcttctgaggcctctgtttgacttgtagatggccattttcttctccctgtgtctttgtgtccggaatttattccttccagtgggttcttggtctcactgacttcaagaatgaagccgcggagcctcgcggtgagtgttacaattcttaaagatggtgtgtccagagtttgttccttcacatgttcagatgtgtctggagtttcttccttccagtgggttcg

SEQ ID NO: 266218 - DNA, 343 bp, Homo sapiens
aagccggaagaggtcctgttgggctcccaaatgctgatctgtgaggacccccatcaagctctgccaggggcccctaatcttcagacctaagtctgccccccaggccccagctcagccactcaccctgcctctggcctcacctcttccctttcctgcacgcaacgcgccctctcggccctccctgtccccctcctctgtctcgtctccccatctggtctggaacctgtttgcaagtgaagcaatatctccgtgttttgtatatacaaccgctcttgtagcctttggtttttgttaatgtagagaaacacagattctttatacactttgtaagatttacgccaaa

SEQ ID NO: 266219 - DNA, 388 bp, Homo sapiens
ccccaagagacgagggcgctgagctcccggtatcctctaggtggcgcacaattctctggggaaaaggagaattccaggtgaactaattccacgggaagaagggttggtttgggaggggctaagccctgcctacgggctcctgtaggggaatcagctccccatccccctgctccctccagagcagcgcccagcattcaatcattcgctcgcatttatttgtctcccgcctgcctgtggccaagacttgccatttgtaggtcacagcacaaagcggaggagggcagggttgtctgacttggagctcaggaaacctcggcttggggctggttttgcatctgagttgctgtaagacttagcacctttctgggtctcagtcgttccaacagtt

SEQ ID NO: 266220 - DNA, 327 bp, Homo sapiens
aaaatgactttattgtatagtctttgttgtaaagggtatttaagtatatgaaagttaacaagatagagaagaagagtagggataaacaaaattaaaataatgtaatctaaaaacaatgagaaggatgtttccacatgaatttcctactgtgatctttcactcaactgtgcagctcaatgaaagcaaaaataatagaaatgagatggtgggaaaatcgacctggaacaatttcttcttgagacaatttgttggcctggcatgttgactcacgcctgtaaccccagcactttgggaggccagggtgggaggatcacttgagcccaggag

SEQ ID NO: 266221 - DNA, 245 bp, Homo sapiens
agagtacatattcatgaaaaacttgtctgatttttttaaaaaggagatttttctagccctgacagaaaaaacttcagctagattaagcaagagtgataatatgtgaagaaaagcactaagcaattcttagctagactggtactattatataattaatgtttgcatgcaaaatagttttccattacctcaacatatttgtgtctttgtcattcaaacacgtcttttgtacacagcataaaactggg

SEQ ID NO: 266222 - DNA, 439 bp, Homo sapiens
gaaaagatggttgccaaaggctgggaagggtagtagggagcttggggtgggaaaggtggggatgattaatgggtacaaaagtaaatagttgggaagaatgaataagacgcactatttggtagcacaatagagtgactatagtcaataataacttaattgtacattttgaaataaagattatatttgaaatgtttgcaactcaaaggataaatgtttgaggagatagttaccccattctccattatgtgcttgtttcatattcaatgcctatatcaaaacatttcatgtaccccttaaatatatacacttatgatgtacccacaaaaaattaaataaaaacaaaggattaatgaatctaaataaaaacaaagcaggagtgccttgttgtctataaagatgggttttcttaagtaaaaacattttaaaatctctttgtgtt

SEQ ID NO: 266223 - DNA, 5311 bp, Homo sapiens
  misc_feature (1257)..(1257): n is a, c, g, or t
gaattcctagactcccgagtcttggaatcttagaattacagggtcgcaggatcgcaggatcgcattctttagatttatggaatcacgttagccccgtcgtccagaatttaaaatctagatatctgaatctcagaatcttgaaagttactgagagccacgaaatcccgtattaaaaggtgcctataatataatccagttaaaaattttaaaatttgaagtttttcctcctttgtaaaaacgaaacagacgaaatctgggcgttttgcttctccattacttgggaagaaggaaaccaggagttttgtttagcgagtgtaaagcccctctcccttcgttcgaccaaccctctaccgcagaaggttgtcaagcaaagcgctttgagcgtttccacacaccgggtcgacggagcaaggatctgggctttgcctcgctcttccgaaggcagctgcccaacgcttggccgggcttagcctgccctcagctcaccgccacgaagaacgcgactaaaaccctccaaggcatgccacccgttaccggccagaacctctcgtcttgggatctcccacactcacctggcaccaccctccgcgcggctctgcacccacagccccggcccgcccccccccccccacaccggaaagctgcgtccgggctggagcactggaacccgcgcccaaggggggaatcctatgcgtcaggggcctcggagatcagcacacgcccaccagctatttaacagagtagaaccctgaggccctgcgaggggacaaggacaggccctggatctcccagtgaatggccagggaacgaacccggcgagaggggcgcgcgcaggatctcaggttaaggaccaagttccggctcagggacagcaggaaaggaactcagaaattggacaccatgaagcaaacgtgtgtcccgactgcccgccccttcccccggagacgcccacccggccaccgttctcttcccactcccccattacccacagccctcactcccctgcggaaggggtgcttggctgcctctgggggcttcagagctaccctggtcccgggggattggaggaggaggttacctctcctgcgtcgttctttcaatccgtgcaccactatccatcaaatagagacagatcctgggcctctcaaagacggatgattgggggtggtgattggcctatccctaaatatctaccacgcaaggactcttgagagatccagaccccggtacagtcgagggacctggggcccaaaaagnggaaagcggctacctcttaccacacagttgggaagcgcagtcctaaaggagacgcaggttggagactccgctaagcggagaagccgcagtggggccatggaaagtcaccttccctttcggttctaggaattactcattcgaaagatggggggactggagtgccgagtggctgtggcagccacgattggggtttggaaaccatcctgaaaggcccggggagccagtctcctggaacttctccctccctattcccacaaaaaccaagcgccctctcggccaattctcaccctctcaggacaaaaaagtgagatgagcccgtcctttcacctgcgatccaagcccttggcagaggcctgaaaagtccgaaaactccgagttcgggcggtgaggtctcccgagccggttcctgaactctccgggcctcagtcgatcggggtgggacccccccccccccgcccatctccaagcgccctccccaccctgacgttgtggggctcctaccgggcgccacagctgctcctacctggggaggtgcgccgggccccaggggggcggacaagtcggggggcgggcagggaaccggttccgccccacgcttcgtgtgcccctttaaggaggggaagccggccgagggaggagccggtccagtgtgtgcaggggagcgcctcgccagcggtccgcggggctggagacccacgccgtggagaggaccagcctcaggtcgccccgcctgggcccgcgccccgacctcgctgcccccgcctcgcctctctgcccgtggcgcttaccgccaccttggcctcgggggcagggcatgggcggcccccgccagatcgcccagcgccagtactaactgccctcgctctggccttcgagcccgaagcctcttctgcgcgcacaacctaggcagtaatcctaaactagcgggcaccacagaccagctgcagccaccccaacccagggatcacttccggacccctcgaccgcccggcaccagcgcgcaagggacccttcagccggagaccagagtccagtcccggtcgcgaggccaccgccgctgcccgcctcgagaagcacaacgcgggctgagccgtcggctagcgggtcactcccgagcctctgtctgcaccgcgccagccccagaccacggacgctgagcctccagcgcgcgccagcctgggccgctgggctctccgggccagcccgcgacgatcccctgagctctccgcagaagggccgagcgtccgttccggggacgccaggcccgcccccgccccccgacagccgcggggatccagagcccgggggtgcgggacgcccgcgccatgactgccgagagcgggccgccgccgccgcagccggaggtgctggctaccgtgaaggaagagcgggcgccgcaagcgccccctgcagcgcgggaagccgccctacagctacatcgcgctcatcgccatggccatcgcgcacgcgcccgagcgccgcctcacgctgggcggcatctacaagttcatcaccgagcgcttccccttctaccgcgacaaccccaaaaagtggcagaacagcatccgccacaacctcacactcaacgactgcttcctcaagatcccgcgcgaggccggccgcccgggtaagggcaactactgggcgctcgaccccaacgcggaggacatgttcgagagcggcagcttcctgcgccgccgcaagcgcttcaagcgctcggacctctccacctacccggcttacatgcacgacgcggcggctgccgcagccgccgccgccgccgccgccgccgccgccgccatcttcccaggcgcggtgcccgccgcgcgccccccctacccgggcgccgtctatgcaggctacgcgccgccgtcgctggccgcgccgcctccagtctactaccccgcggcgtcgcccggcccttgccgcgtcttcggcctggttcctgagcggccgctcagcccagagctggggcccgcaccgtcggggcccggcggctcttgcgcctttgcctccgccggcgcccccgctaccaccaccggctaccagcccgcaggctgcaccggggcccggccggccaacccctctgcctatgcggctgcctacgcgggccccgacggcgcgtacccgcagggcgccggcagtgcgatctttgccgctgctggccgcctggcgggacccgcttcgcccccagcgggcggcagcagtggcggcgtggagaccacggtggacttctacgggcgcacgtcgcccggccagttcggagcgctgggagcctgctacaaccctggcgggcagctcggaggggccagtgcaggcgcctaccatgctcgccatgctgccgcttatcccggtgggatagatcggttcgtgtccgccatgtgagccagcgtagggacgaaaactcatagacacatcggctgttcacacgttccccgcaacctgagaacgaacaggaatggagagaggactcaactgggacccacgtggaaaagaccgagcaggccacagaggctcggtctccccgcgcacagcgtaggcaccctgtgtactctgtaaacgggaggaggtggggcgaggcagccagagcccttggactggcacagggaccctcgatggagcgaagccctcaaacgggatgctttctggcattctatcggggagggtccttggcggtaaccagagggcagcgtagtgtcaacaccagagaccaggatccaaattgtggggaatcagtttcagccttccatgtgctgccggaactcgggcctttttacgcggttcgtcctctagtgcctttaactgcgttactacaataaaaggctgcggcagcgcctttcttcttaaagtgaggaggacaaatttgcaaaagaaataggcttttcttcttttttaaattggagaaatctctgctctggttgacctgggctggttttccctgtctctgagaacttgagacctagctccgagttgaactgtgcgtcagcactccagtcccatcacctgaaccttcagtctcccccatctgttacactagagggctgcaggactctatccaccgcccccgggttatcattcagggccccatcatcttggatgctgccctgcgtatttggcagcaatggtgggccacccagggcctctgagtagccacccaaagcctagccgctgttctagggaacggaaaagagttcatggccaagcgtctaacctaaagtcccaggattggctccaggcagcaattatatcataacttattgaacttttgagcaggacgtgctggtaatttcatggctgttactgcccagtcataaatctgcttttccattataaggcagagagaagtacattcgttcatttgtccactgtttcttgtcatcacgcagccctggacccaaagggtgaactaaagtttaaggagatgagaggattcaaggagcccgttggtgacgcctttcagtagctggggagggctcttccatccccagcaccccctgctacacctcagcagcctcccccatgcaaaaaggaaagagaaaaattaagttagggcagtcagtaaagtgagctttagaaagaaactggaattttaacttcattttgtatcttgcttaagtagcaggctcactaaaattagagaaagtccaataactctccccctttcccttgagaaatctttaagtttcgattctggagcaaaaactttcagcattaaatatttcagaggctccattcacagctttcagataaactggagtgttcagatggactgttttaataaaaatctttgagcaagtgagttatggcaagagaaactcagcctctttctgtataaacttaacagggaagggctggggtgtgaaaaagaagattgtatgaaaaccattggtaatttttattttttatttttgggactgcactatcctgttcacgaagacatgtgaacttggttcagtccaaatggggatttgtataaaccagtgctctccattagaaatatggtgcaagccacatatgtaattttaaatattctagtagccacattaataaagta

SEQ ID NO: 266224 - DNA, 5373 bp, Homo sapiens
  misc_feature (1257)..(1257): n is a, c, g, or t
gaattcctagactcccgagtcttggaatcttagaattacagggtcgcaggatcgcaggatcgcattctttagatttatggaatcacgttagccccgtcgtccagaatttaaaatctagatatctgaatctcagaatcttgaaagttactgagagccacgaaatcccgtattaaaaggtgcctataatataatccagttaaaaattttaaaatttgaagtttttcctcctttgtaaaaacgaaacagacgaaatctgggcgttttgcttctccattacttgggaagaaggaaaccaggagttttgtttagcgagtgtaaagcccctctcccttcgttcgaccaaccctctaccgcagaaggttgtcaagcaaagcgctttgagcgtttccacacaccgggtcgacggagcaaggatctgggctttgcctcgctcttccgaaggcagctgcccaacgcttggccgggcttagcctgccctcagctcaccgccacgaagaacgcgactaaaaccctccaaggcatgccacccgttaccggccagaacctctcgtcttgggatctcccacactcacctggcaccaccctccgcgcggctctgcacccacagccccggcccgcccccccccccccacaccggaaagctgcgtccgggctggagcactggaacccgcgcccaaggggggaatcctatgcgtcaggggcctcggagatcagcacacgcccaccagctatttaacagagtagaaccctgaggccctgcgaggggacaaggacaggccctggatctcccagtgaatggccagggaacgaacccggcgagaggggcgcgcgcaggatctcaggttaaggaccaagttccggctcagggacagcaggaaaggaactcagaaattggacaccatgaagcaaacgtgtgtcccgactgcccgccccttcccccggagacgcccacccggccaccgttctcttcccactcccccattacccacagccctcactcccctgcggaaggggtgcttggctgcctctgggggcttcagagctaccctggtcccgggggattggaggaggaggttacctctcctgcgtcgttctttcaatccgtgcaccactatccatcaaatagagacagatcctgggcctctcaaagacggatgattgggggtggtgattggcctatccctaaatatctaccacgcaaggactcttgagagatccagaccccggtacagtcgagggacctggggcccaaaaagnggaaagcggctacctcttaccacacagttgggaagcgcagtcctaaaggagacgcaggttggagactccgctaagcggagaagccgcagtggggccatggaaagtcaccttccctttcggttctaggaattactcattcgaaagatggggggactggagtgccgagtggctgtggcagccacgattggggtttggaaaccatcctgaaaggcccggggagccagtctcctggaacttctccctccctattcccacaaaaaccaagcgccctctcggccaattctcaccctctcaggacaaaaaagtgagatgagcccgtcctttcacctgcgatccaagcccttggcagaggcctgaaaagtccgaaaactccgagttcgggcggtgaggtctcccgagccggttcctgaactctccgggcctcagtcgatcggggtgggacccccccccccccgcccatctccaagcgccctccccaccctgacgttgtggggctcctaccgggcgccacagctgctcctacctggggaggtgcgccgggccccaggggggcggacaagtcggggggcgggcagggaaccggttccgccccacgcttcgtgtgcccctttaaggaggggaagccggccgagggaggagccggtccagtgtgtgcaggggagcgcctcgccagcggtccgcggggctggagacccacgccgtggagaggaccagcctcaggtcgccccgcctgggcccgcgccccgacctcgctgcccccgcctcgcctctctgcccgtggcgcttaccgccaccttggcctcgggggcagggcatgggcggcccccgccagatcgcccagcgccagtactaactgccctcgctctggccttcgagcccgaagcctcttctgcgcgcacaacctaggcagtaatcctaaactagcgggcaccacagaccagctgcagccaccccaacccagggatcacttccggacccctcgaccgcccggcaccagcgcgcaagggacccttcagccggagaccagagtccagtcccggtcgcgaggccaccgccgctgcccgcctcgagaagcacaacgcgggctgagccgtcggctagcgggtcactcccgagcctctgtctgcaccgcgccagccccagaccacggacgctgagcctccagcgcgcgccagcctgggccgctgggctctccgggccagcccgcgacgatcccctgagctctccgcagaagggccgagcgtccgttccggggacgccaggcccgcccccgccccccgacagccgcggggatccagagcccgggggtgcgggacgcccgcgccatgactgccgagagcgggccgccgccgccgcagccggaggtgctggctaccgtgaaggaagagcgcggcgagacggcagcaggggccggggtcccaggggaggccacgggccgcggggcgggcgggcggcgccgcaagcgccccctgcagcgcgggaagccgccctacagctacatcgcgctcatcgccatggccatcgcgcacgcgcccgagcgccgcctcacgctgggcggcatctacaagttcatcaccgagcgcttccccttctaccgcgacaaccccaaaaagtggcagaacagcatccgccacaacctcacactcaacgactgcttcctcaagatcccgcgcgaggccggccgcccgggtaagggcaactactgggcgctcgaccccaacgcggaggacatgttcgagagcggcagcttcctgcgccgccgcaagcgcttcaagcgctcggacctctccacctacccggcttacatgcacgacgcggcggctgccgcagccgccgccgccgccgccgccgccgccgccgccatcttcccaggcgcggtgcccgccgcgcgccccccctacccgggcgccgtctatgcaggctacgcgccgccgtcgctggccgcgccgcctccagtctactaccccgcggcgtcgcccggcccttgccgcgtcttcggcctggttcctgagcggccgctcagcccagagctggggcccgcaccgtcggggcccggcggctcttgcgcctttgcctccgccggcgcccccgctaccaccaccggctaccagcccgcaggctgcaccggggcccggccggccaacccctctgcctatgcggctgcctacgcgggccccgacggcgcgtacccgcagggcgccggcagtgcgatctttgccgctgctggccgcctggcgggacccgcttcgcccccagcgggcggcagcagtggcggcgtggagaccacggtggacttctacgggcgcacgtcgcccggccagttcggagcgctgggagcctgctacaaccctggcgggcagctcggaggggccagtgcaggcgcctaccatgctcgccatgctgccgcttatcccggtgggatagatcggttcgtgtccgccatgtgagccagcgtagggacgaaaactcatagacacatcggctgttcacacgttccccgcaacctgagaacgaacaggaatggagagaggactcaactgggacccacgtggaaaagaccgagcaggccacagaggctcggtctccccgcgcacagcgtaggcaccctgtgtactctgtaaacgggaggaggtggggcgaggcagccagagcccttggactggcacagggaccctcgatggagcgaagccctcaaacgggatgctttctggcattctatcggggagggtccttggcggtaaccagagggcagcgtagtgtcaacaccagagaccaggatccaaattgtggggaatcagtttcagccttccatgtgctgccggaactcgggcctttttacgcggttcgtcctctagtgcctttaactgcgttactacaataaaaggctgcggcagcgcctttcttcttaaagtgaggaggacaaatttgcaaaagaaataggcttttcttcttttttaaattggagaaatctctgctctggttgacctgggctggttttccctgtctctgagaacttgagacctagctccgagttgaactgtgcgtcagcactccagtcccatcacctgaaccttcagtctcccccatctgttacactagagggctgcaggactctatccaccgcccccgggttatcattcagggccccatcatcttggatgctgccctgcgtatttggcagcaatggtgggccacccagggcctctgagtagccacccaaagcctagccgctgttctagggaacggaaaagagttcatggccaagcgtctaacctaaagtcccaggattggctccaggcagcaattatatcataacttattgaacttttgagcaggacgtgctggtaatttcatggctgttactgcccagtcataaatctgcttttccattataaggcagagagaagtacattcgttcatttgtccactgtttcttgtcatcacgcagccctggacccaaagggtgaactaaagtttaaggagatgagaggattcaaggagcccgttggtgacgcctttcagtagctggggagggctcttccatccccagcaccccctgctacacctcagcagcctcccccatgcaaaaaggaaagagaaaaattaagttagggcagtcagtaaagtgagctttagaaagaaactggaattttaacttcattttgtatcttgcttaagtagcaggctcactaaaattagagaaagtccaataactctccccctttcccttgagaaatctttaagtttcgattctggagcaaaaactttcagcattaaatatttcagaggctccattcacagctttcagataaactggagtgttcagatggactgttttaataaaaatctttgagcaagtgagttatggcaagagaaactcagcctctttctgtataaacttaacagggaagggctggggtgtgaaaaagaagattgtatgaaaaccattggtaatttttattttttatttttgggactgcactatcctgttcacgaagacatgtgaacttggttcagtccaaatggggatttgtataaaccagtgctctccattagaaatatggtgcaagccacatatgtaattttaaatattctagtagccacattaataaagta

SEQ ID NO: 266225 - DNA, 958 bp, Homo sapiens
agcggatgcgctcgaagggaggtggaggcgcaggtccgggcgaagggcgatacggtggccgagagggcacggagaggaggacggtggctgacgagatccggcatggagcatctggagcgctgcgagtggttgttgcgggggacgctggtgcgggcggccgtgcggcgctacctgccctgggccctggtggcctccatgctggcgggctccctcctcaaggagttgtccccgttgcccgagagctacctcagcaacaagcgcaacgtcctcaacgtgtattttgtcaaagtggcctgggcctggacgttctgtctccttctgcctttcattgccctcaccaactaccatctgaccggcaaggctggcttggtcctgcggcggctgagcaccctgcttgtgggcacggccatctggtacatctgcacctccatcttctccaacatcgaacactacacgggcagctgctaccagtccccagccctggagggggtcagaaaggaacaccagagcaagcagcagtgccaccaggaagggggcttttggcatggctttgacatctcaggtcactccttcctgctgaccttctgcgccctcatgattgtagaagagatgtctgtgctgcatgaggtgaagacggaccgaagccactgcctccacaccgccatcaccaccctggttgtggccctgggcattctgactttcatctgggtgttgatgtttctgtgcacagctgtttatttccacaacttgtcccagaaggtgtttggcaccttgtttggtttgctgagctggtacgggacatacgggttttggtatccgaaagccttttccccaggacttcctccccagagctgtagtttgaatttgaagcaagatagttacaagaaataaaagagtaacagaggggggacagaaggacaatggctaatctatttttcaaatatatattttgcttagt

SEQ ID NO: 266226 - DNA, 876 bp, Homo sapiens
agcggatgcgctcgaagggaggtggaggcgcaggtccgggcgaagggcgatacggtggccgagagggcacggagaggaggacggtggctgacgagatccggcatggagcatctggagcgctgcgagtggttgttgcgggggacgctggtgcgggcggccgtgcggcgctacctgccctgggccctggtggcctccatgctggcgggctccctcctcaaggagttgtccccgttgcccgagagctacctcagcaacaagcgcaacgtcctcaacgtagacagagtctcaccatgttgcccagactggtctcgaactcctggggctcaagtgattctcctgtcttggcctcccaaagtgctgggattacaggtgtgagccactgtgcccagcccaggaattacttttgattctctttacctcactcccaaccctcatgtaaattcctgctcattttatcttcaaaatacctctcaagcccattcacacctcaccatatccactgcaaccatctcagtccacgccaacatcatctctcacctgagctgctgcaccggcctcccctctgtctcccttgaaatccattttcacgcagcagttggaattctctcaaatataaaaccggaacaactcagccccatggagactgcaaacagggccatgagttcctcccattcctgtacacatgccactttgcaatgtgtgcatcttgatggctttgctgctcctgccatctaagactcatagttttttttttctaagactgcaaactccgtgagagcaagaatgacatctggattttgctcattaatttatccctaggacctagcatctaggagatgttcaataaatatttgaaaaaatgaatgaaaaagaatg

SEQ ID NO: 266227 - DNA, 686 bp, Homo sapiens
ccagggtggagtgcagtggcacaatcttggctcactgcaacttccgcctcccgggttcaagcaattctcgtgcctcagcctcctgagaagctgggattacaggtaaccgccaccatgcctggctaatttttgtatttttagtagagctgtcttggcctcccaaagtgctgggattacaggtgtgagccactgtgcccagcccaggaattacttttgattctctttacctcactcccaaccctcatgtaaattcctgctcattttatcttcaaaatacctctcaagcccattcacacctcaccatatccactgcaaccatctcagtccacgccaacatcatctctcacctgagctgctgcaccggcctcccctctgtctcccttgaaatccattttcacgcagcagttggaattctctcaaatataaaaccggaacaactcagccccatggagactgcaaacagggccatgagttcctcccattcctgtacacatgccactttgcaatgtgtgcatcttgatggctttgctgctcctgccatctaagactcatagttttttttttctaagactgcaaactccgtgagagcaagaatgacatctggattttgctcattaatttatccctaggacctagcatctaggagatgttcaataaatatttgaaaaaatgaatgaaaaagaatg

SEQ ID NO: 266228 - DNA, 297 bp, Homo sapiens
acgtgagacatctatcacatgaatttctcactcacatctcaggcaaacacactaaaatgaaatacaaaagtcaggctgtgggggaggaaaagtattttaaagcaagacccaaggacactctgcctggtgaagatttaccgcctatcatttttaccatatccacccattttcaatgtgaaatgcagagtttacaagctaagtttgccgtgtactgtttatttccatcattttcaaaaaagaatccatgatcactttctcagactcaaatagcagttccatgttgaatatttagctaga

SEQ ID NO: 266229 - DNA, 539 bp, Homo sapiens
cacgagggaggccgaggcgggcggatcacttgaggttaggagttggagaccagcctggctaacatggcgaaaccccgtttctactaaaaatacaaaaattagcctggtgtggtggtgaacgcctgtagtcccggctactcgggaggttgaggtgggagaatctcttgagcccgagaggcggaagttatgagattgttttgccagatttttagaaaagagagatgaacaccttttaaactctgaggaaagaaatgggctcattggtatggagcagaacagaatactagggtaatgaagattgtatggtgttggcatcagtggaccaatggatcaatggaacaaaatgaagagttcagaaataaatctacacatctacagtcaactgattttcaaaaaatggctgccaagatggtgtcagaagtgggatccgaattagagctttcagtgacccccaggagcatcaagtgaccaagcgaggtacctgcagggcccattgtgtccattgctctttcacagcaactggggatgatggtaagttc

SEQ ID NO: 266230 - DNA, 674 bp, Homo sapiens
aagtgcaaaaaacaaacaaacaaacctatcaaccagaatgttattctgtcaaaactgtccttcaaaagtgggtgcgaaatgaagacattctcagacaaaaaaaaaagctgagaaagttgactaccattagacccgtcttgcaagaaatgataaaagaagtccctgcagggtaaaaataaaaggacactaaaaagtaacttgcagccacataaagaaataaagacttcaataaaagaaaatgcaggagcaattataaaagtatcattgtaaaaacagtctgtaactgcattttttgtttgctctgtgatttaagagactaaactttctctaaaaatttagtctaaaaggtagtgctattagttacaatgccacattttgttttctacatggtttaagaaatgaatgcactaatctcttattagttcattattactttatgtttttgagcacacaaggtataaagatgtaattctgtgacatcaacagtgaaaaaggtggtgcctgaactattagaggaagagagtttatgtagttaagctggtataaattcaggctgggtgcagtggtttacaactgtaatcccagcactttgggaggccagggcaggcagatcatttgaggtcaagagtttgagaccagcttggccaacatggtgaaaccccgtctatactaaa

SEQ ID NO: 266231 - DNA, 488 bp, Homo sapiens
agagacagcttctgattcatgttcgtctcaccataatccatttccctctctgcagatacttccaaaagttacactagatgttaactgagcactaaggacactacgtgaaagactggagtacaaacatccaaaggactgaagaatttgaagagcactgaatgtgggagataggacagaggaaaggagtcaaatgtctccaagaaacgaagcctgtgtgccctggagaatgaagaagcatcatcaaatcggggagactgaaggaggaatcggttttcagagaaaaacaatttatattgtcttagctgtgttaggtggcatactattacattcaagtgaagctgtgtaatagacagagatgacaaattttattcatttatgaatgccccccaaaatatatatatagtttttgccctcatgtctcttattgggatgacagacataaatcaaagaattccataaataaatattaaaatacaatttgtgataaa

SEQ ID NO: 266232 - DNA, 443 bp, Homo sapiens
ttctgatacattgctacatctgctgcaacatggataaaccttgaagacattataactgaaattagccagtcacaaaagaaagaaatactgtatgattccactcatctgaaatacatagagtaaccaaatgtatatagaaagaaattagaatggtggttgccagggactgggagagggagggccaagaaagggaatgaggaattaatgtttaatgggtacagagtttcaattatgcaagatgaaaaaaaatttgaagacgaacgatggtgatggttgcaccacaatgtgaatggacttcatgccactgaatcgtacacttgacaatggttagaatgataaattttatgttatatatgttttaccataattttagaaatttgttttaaatatccttaaagtaagaggaggaaaactgaaaccaaaaaataaagaaggaaaaatga

SEQ ID NO: 266233 - DNA, 444 bp, Homo sapiens
agattgtctcctagagcctccagaaaggaatgcagtcctgctttcattaaacttgtgctaattaaaattgcaaatagtaattgatatatttattttagcctaatgagacacattttatatttctgacctccagatgtgtgttaaatcagtaaatttgtggtaatttgttacagcagccatagaatactagtacaacactctactccaaacaaaaatgcttcagaaagtcaaaactacagctcattacttttttaaaaagtaaattattaaagtagaatgtatttatttatccttaattgagaaataaaatttgctcattcacaattatatctttgtaccttattaaatttcagatgtcaagtttaacacatgtttctgggttgcttcaaacataaatcataaactattaaccatgtaagaatcatcttaaatttgagttattat

SEQ ID NO: 266234 - DNA, 386 bp, Homo sapiens
ttttttttttttgtagagattgtggtctcacaatgttgcctaggctggtctcaaactcctgagcttatgtgatcctcctgccttggcctcccaaagtgctgagattccaggtgcacacacacgcacacaagcacacatatgcacatagacacacaagcacatgcagacacacacagacacatacatgcatgcaaacacacatacacgtgcacacactcatacacaagtccacacaggcacttcctgtgatctccaagcctgaggctttatgcttggtgggtggggtctgcctccaccctctgtccagaccaaggaccccctcagcctgcagagcagtgctgcagcttcgggaatgtgctgtgtgagctcccttctgtcttagaccc

SEQ ID NO: 266235 - DNA, 179 bp, Homo sapiens
aactaaaatatttaatgcatactagggtaaattagttgtctgccaaagccttgtatgtggaatatctcacacttcatggatgcctggccattgagccttactgtggtcactttcacattttcagtagaccggtatgtgtacaaggctttgtgatttcttgttgaaggatggagattaaa

SEQ ID NO: 266236 - DNA, 879 bp, Homo sapiens
aggttaaaaataataattatattttcttgtcctctgggtaaaatgagatttctttttatttgtatagaagaatgacagttgtgtcatctaaaatttaaaaaactttcagattatcttgcatctgttagtttttttggaagaattaatttagagaagatatctctgatcctggaaattagggaaaaatagcatataaacgtttaagtgtgtaccttctggttaagattatgacttctatatttcgattaataggttggagtttgtcttaatctgttttctgttgctgtaatggagtaccacagactgggtaatttatgaagaaatgaaatttatttcttatagttctggaggctgggaagttcaaagttgagccgaatctggtgagggcctcttactatgtcataacatgctagcaggcatcacagagcaaatgcactacctcagatctctcttcctcttcttaaaaagccactagtcccatcatgggggccctactctgaagaccttatctaattctaattggaaatagggtcttgaagccctcatcactagaggtaacctttaacaggaagagagaatttataaaaattataatgcagcaccaaatccctccctacttgtgaatagtcaaggtcatttcatttacagacttgttattaaagaaacaggttaaacaaatagattgagaggaaatgtggttcatgtctgagatcagcaaacttttttgtccagaagtccagataataaatattttagctttgtgggtcatgtggtctcagttgtagctacttgtctctgctgctgtacctcaaaagcagccatggataatatgtaaatgaatggggatgactgatttccaataaaactttatttacaaag

SEQ ID NO: 266237 - DNA, 251 bp, Homo sapiens
gcgtcgacaatataaacagggactatgaggtatgtacaggaaattaatagctgaagaatattttaccatgttcaaaaactaaattcttcatgtggctgagagaagaaagaaaaaaatggtatgtttgtgttccatttgcaggtattacataaacccattttaaatgaactaaaatgcctaggatttgggggggaaaaattatcttgtgctcgcatttgaaggttcttctcagaaataaactgtttaaagag

SEQ ID NO: 266238 - DNA, 894 bp, Homo sapiens
tatgcagttattttgtttgttggagggcaaaacatgtccttcttacatgtcagaattcctaagtgaaattggtggtctgtctagttcaataagatcatagttttgccaccctgcagtgcttatcataccctttgttacgtagaatcatgtcaagtttgggggtacctgataatgtatataatggctttcgtcccccgttaaacatggtaatgggaacaaacccgaccagaaaacctggctatgggtcaaacagtgaagctggggaagggaagtggagtctcttcaaaagctctaggattttgagtagctctcattcatcagaatatcagaaagaggcagttggtgtgtttttagcatttgttgaatggataatgttgttttcagtgaacataggcttcaaaggtaaaatcaccaactagtgatcttagactctggattccatgttgctgccccacgaaggcctgtcctcctaggtttccagacttccccagttggtggtagagatcgccatcttcccatagctgtttgggagcatggacgtgtgtgtgctcctgtgcaaatatcaatgtgaaagacacatgcagagttaacaattcacattccaggcaccactgtggcaatgaaatgctccacataaccgtattttccaaaaattcaaagtctgtatctttaatttgttgtgttctttaggcccttggtttcttaaacagagcataataaacatccctttttatgatgagaactttttctgttatgaagcttcagcttaaagttgataaagttgttacagttattgatatttgaccactgtgtgtatgagagagtgtgtgtatataagtataaacaaaatgtgacttactgagtaactcctagtggtaacataattagtggaaa

SEQ ID NO: 266239 - DNA, 622 bp, Homo sapiens
catgattatatatgttatgttagagggtagtattggtgccagtttaatttgtctgacggggtacctattattcattttatatttgttttattagaatcattctccttcccatgtattctctttgaacttcctttgtgttgttaatatacagctcatcatgatctgacatttattgatgatttatgactagtttctcttgctcctacttaattgtgaactatttgattcttattcatagtacttaatcactactcactaaatacctgaaattttctactgagtagtcaccaacttgtagtagtcactacaagaattagttgtagaaaaagtagattggccagccatggtggctcacacctgtaatgacgacactttgggaggccgaggcaggaggatcacttgaggccagaagttcaagatcagcctaggcaacaaagtgagaactggtctctacaaataatgaaataaaacattagttaggcatggtagcaaacgtttatagccacagatactcaggaggctgaagtgcgggaatcgattgaacccaggcattcaagactgcagtgcactgtaatcatgccactgctctccagcctggacaacagagcaaaaccctgtctga

SEQ ID NO: 266240 - DNA, 247 bp, Homo sapiens
acaacacactcctgaacaattaatgggtctgagataaaaacttaggaaaacaaaacctaaaaagggaaataaaaccatatcttgagacacaaaaaaaatggaaaacgatgttagggaaataaaatcatattttgagacacacaaaaaatggagacacaacatatcaaaacttacaagtcttcaaaaacagttctaacagggaagcttatagcaataaacagttagattgagaaaaaagaaaagatct

SEQ ID NO: 266241 - DNA, 295 bp, Homo sapiens
ggcggaggcagagctgacgatggagagctctctcctccgtacagttcacttcccagagctggggtcagggtcctcgccccgcacccgccacagaagacgcatctccctctgcgctgattcctggcggcgggtggggagatgtcggagccagcaatgcgagatgtttgggcgttgggacccgagagtgggctggaggccagcctgggttggtcgagagtgtgggtgcgcgctctgtcgcgggcaggtgactccctgaccgcagttgacccaggcagtgcctgcgctcctgcgctgc

SEQ ID NO: 266242 - DNA, 421 bp, Homo sapiens
taggcagggtgtcattttagctctggaagtagggagaggaacttagggagatggtcaggggagggacttatatgatttggatctgtgtccccactcaaatctcacaccaaattataatccccaatgctggaggtggggcctggtgggaggtgattggatcatgggggcagtttcttatgctttaacaacatcccccttggtgttgtcacagtgacagtaagttatcacaagatctggttgtttaaaagcgtgtagcatgtccctctgtctctcttcctcctgctctggtcatgtgaagatgcctgctctggctttgcattctgccatgagtaaaagtttcctgaggactccccagccatgcttcctgtacagcctgtaaaactgtgagccaattaaacctatgttctttataaattaccca

SEQ ID NO: 266243 - DNA, 282 bp, Homo sapiens
cggtcttgaactcctgacctcaagtgatccacctgccttggcctcccaacatgctgggattacaggcgtgagccaccatgcccggccgatacttgtttagatgtgtcctcatacataccactttctcagttcacctttgtttctggcactcccagctgttcctgctggcacagtttacttcttactgaactcagtggtaaacttagccttcttttttctccccaaaacatctttatttcactttcttgaataatagatcatcagagtagaaactctaaatcg

SEQ ID NO: 266244 - DNA, 132 bp, Homo sapiens
atgtggtatggagactgaggagacctgggttccagaactccttctggcactgagtaactcgcaatgtgggcagagaactcaagctcttaagggctcattcatcccctctaagttggaaataacggcacgtgc

SEQ ID NO: 266245 - DNA, 509 bp, Homo sapiens
agcttttcattttcattcctgctagcagttcatgagcttagagcgatgggatgcatttacctggccttaagatgctcctgctgcaatgggaagtgaagccttggatagctttcctcctcctgtgcaatactttcttgtcattttcccacctgcactgagtcccaccgccagtcagggctgttttcaggtgtatgtgaattcatcccagcagtgtgccttctgctgccttttcctagggaactgaacatgttaaatcacagacgcgatgtggcactgattattgttcctcaaaagaaatgcgtgtctgaagatagcctcttacagattcctcacgggagtctctgttcagtgtcattgtaagtttctcagaataatcgcaggcgctctgatgcagcctggtaaagaagactcagtgatttctgggaactgcaaatgcttgccagctttccttctgtctgtggaaacactgaataaatgtattcatttctcctttccagcaaaaagttagt

SEQ ID NO: 266246 - DNA, 485 bp, Homo sapiens
atttggaacctcaaacaaagcttgatagaaggaagacaaaaaagcttccgtttacattccattttggttccccatttgacttcaaagaaaggaaagagaaggaggaaattcacatttttgtcattgttacagtcactttaattatgcaacgttttgttatgaaacacagttttctttttatgaaatagtgcagccctttggaagcagtgaaaatgctaagttcagaaaaattttacatggcacaccattgatctgcatgatgatagaaggataattaagatgctgtatcttaattatctggtagcagaaatatgagtctcctagtctcaagacttcaaacagtaagcagtggactgtacaagatcacgaggcagtcatcccctctctgctctgttccctctcctctacaatccttggagaaagctgtataggttgggttgtcctcaaaaccttagacatatgtgaaatacacaggattttggaaa

SEQ ID NO: 266247 - DNA, 465 bp, Homo sapiens
tattttaaattgtggtcagtgctatgaatgaagagaccaggatgctctaagagatcacattctagtcacaggaaaagactagggaagacctacatgaagttgggacatgaatgaaagagtgaatgaatggaaaaccagtgaggctggaggcagtgagcagtggggatggggttggagagagagatgaggactagctcttgcacagccttgcagaccatgttaaggagtttggtttttattctaaatgcaatgggactatatttataggttttaagcaggagggtgatggaatccagttcagctttctaaagattcactagctattgggtgagaatgaattacagaaagtggggtggtaaagagatgacaagtcagaagccttgtgctgcaggccagtcaagagctggtggtggtcccttgggccaaggggtccctgataatagagaagttattctccaggacaca

SEQ ID NO: 266248 - DNA, 282 bp, Homo sapiens
ccatgtatagattaccttttcagggagaaaaaaaaaaacgactaaaattggaagagcagagaaggaactgccttgagttgggttgagaccccacaaactctgagatgacagcaaaggagccatggaaaacaaggaaactatcccactctccaagcccctgccagagaactttaactaaaaacagtctctttagaacaactactgacaataccaccctggactgaaaaccactgaccttcaggaaaactcagtaataaaattcctcaagttaaagtccaagaa

SEQ ID NO: 266249 - DNA, 1059 bp, Homo sapiens
  misc_feature (6)..(8): n is a, c, g, or t
  misc_feature (48)..(48): n is a, c, g, or t
  misc_feature (218)..(218): n is a, c, g, or t
  misc_feature (460)..(460): n is a, c, g, or t
  misc_feature (839)..(839): n is a, c, g, or t
  misc_feature (953)..(953): n is a, c, g, or t
  misc_feature (964)..(964): n is a, c, g, or t
  misc_feature (993)..(993): n is a, c, g, or t
  misc_feature (1039)..(1039): n is a, c, g, or t
ggccgnnngcctgcgcaggggacagaggcctccggcggcgccccccancaacagcagggcggtgccacattggtcctgagccaggcctggccgccggagacggcgggactctctgggaggccggcggtcctcgggtgtagagggagacagctgcccgggggcacgggcgagcgcctctgggggtcctggatccgagacccgcggccccggggtggcgntgacgcctggagtcatgcgggcttggctgggccgggctcttggggcagccaggcgccgctgctggcgtctaggccacaccaccctgaacgcgcccggctcgcctctgatctgttgaagctaagcagggtcgggactggttagtacttggatgggattccgcctggtaatagcggtaccgtaggcttttggcttcccgctccctccttctttcccccttttgtctccgtgcttcccaactgcnccccgcctctgctccccgttgaccgcccccgtgccccagccgaagcccaggacctcctcctgaagatccgccactgcagcaccgccaggcagcagcatcccacctcttccgactcgcggcagccccacccaacccgggcgggacgggaccgaccccgagggtgcaggcgcgggttccctgaggtcccgggtctcttcacgctccccggactcccaggcaattgtattcattcattcagcgtcactgcaaccgtccaagccggtgggaggggcgagcaggggcagcgggtgccacagaccccagccaagacctccgctccagaacccgagggctgctttccccagaggaaggacattttcttcgccagccacgaggaaanccgtccctgtgcaccctgtttcccaatgccaccgacttcgtgtaaactccagtccggaggacaggagagagacccaggcctcgccccgtggacaggctcggcgccacggctccngccagacacangagcacactctacaaatctcggggcccancgcatcaaggagacagaaagaagcaaacgaaggaccttatgaaacncacccccaaagcaaccaacc

SEQ ID NO: 266250 - DNA, 889 bp, Homo sapiens
  misc_feature (147)..(147): n is a, c, g, or t
  misc_feature (389)..(389): n is a, c, g, or t
ggcgtttacagtcgtaattatcaggtgtggcagctcggtctgggcaatgccggcggtcctcgggtgtagagggagacagctgcccgggggcacgggcgagcgcctctgggggtcctggatccgagacccgcggccccggggtggcgntgacgcctggagtcatgcgggcttggctgggccgggctcttggggcagccaggcgccgctgctggcgtctaggccacaccaccctgaacgcgcccggctcgcctctgatctgttgaagctaagcagggtcgggactggttagtacttggatgggattccgcctggtaatagcggtaccgtaggcttttggcttcccgctccctccttctttcccccttttgtctccgtgcttcccaactgcnccccgcctctgctccccgttgaccgagaaccagcgccgccgccctcggccccgcggaagccccgccgcgccatgtcattcgccatcccgaagggaaactagagactaaagctggacagccgcgcgcgtgaaaagctggtggaatgccgaattgttgcagaaaacacgccacatacagggagacaccaaagaagagacaagaccaagggatgaccaggaatgggaacaagcccacaggtccacctaaaacccactgtatcaatctctggggcgtcatcgcccgggggtgacgaaagattttcccccccggcgaatgcaccaggtggtcacccagaaaagcagaatgtcttcacatggacgaggcattcttccccagaaaccaaagacatcaggagccacggcaaataagcctgagtcaccagcctgcccaatgccggctgatgatgattcctgacagagaaacaattgcaactattcgtggactaagaacaggcttcttca

SEQ ID NO: 266251 - DNA, 363 bp, Homo sapiens
aggtttccaacctgttcaattttaacctgccaccttttatgtccaaaggagtcctttctgactcattatctccgggcagggtgggactattacagggtgccatggggtgctgtgagctgggctgtacttgcccctggaatgttgtcacgtctcctccctccctcccagataaaacccaagcataagcgagatcctggaggtgatgcgagccatcttagacatcccagagagccccagcctttgcaccgatgttattaacattatgatttactttcctgctgtattttttcatcttagctgcagctgcttcccaccccgcctcccaccactagaagactgtttaaagtaaatccttctaaaatt

SEQ ID NO: 266252 - DNA, 357 bp, Homo sapiens
ccctccacacccacattaaattctttattcttgtagcaacaaaattagaaaattagctaggagcttggctatttgctttaaaagcatccttccaaatctgagattctgtagttttatcaatgttaggctaaaccagttggtttgtgctgctagcaaggatggaaaaaaccatggggcagctttcgaggcagatgacagcagctaatcagacactgagagcaagggccctggacttctagtcctttagttctggagtgttcagaaagattcttaagaaataatagtgaccaaaacggaacacttctctgatgcctaactttgtactttgcctctgaccattaaatggaggttttcact

SEQ ID NO: 266253 - DNA, 630 bp, Homo sapiens
cgtgtggataatataaaataaaatttatcatttaacagttttaagtgcataattcgttggaattaagtacattcaccatattgtgcaaccattaccactatccatctccagaaggatttcatcattccaaacagaaactctgtacccattaaacaatcactccacatcttcccctcaccgcccccaggtaaccactattctattttctatctctaagaatttgttaattctaggtacctcatataagtggaataatacagtatatgtctttatttttttgaggtggagttttgccctgttgcccaggctgaagtgcagtggttcagtctcagctcactacaacctctgccccccgggttcaagcgattctcctgcctcagcctccagagtagctgggattataggcgcctaccatcatgccctgctaatttttgtatttttagtagagacaaggtttcaccatattggccaggctggtctcgaactcctggcctcaggtgatccacccgcctcagcctcccaaagtgcagggattacaggtgtgagccaccacacccggcctgggttgcttttttctttcgttgttgattttagtgcagttttaagaaactttttaaagccttgtttatg

SEQ ID NO: 266254 - DNA, 418 bp, Homo sapiens
tggggaaaccagctgctacatcaccatcagccttgtgaccatgccacatggtaaggagctgaaatctcagcagccacacgagtgagctcggcagcggatcctttaggccccgtcatgcaatcctggattgcagccctggacatccacttaactagcaagactgagccagaaccacccagatgagctgctcctggattcccaactctcaaaaactgtgagagatgttcaacggtggttgtttgaaactgctgagtctcagtataatttgttacacagcactagctaactcatacacgtcacgtttctgcagcagaataccttggacctggggagagctggagataattactcagtaccacccagtacatgggaaagtgattactgacaggctcagaaatgttaagaagatgcttaaaag

SEQ ID NO: 266255 - DNA, 432 bp, Homo sapiens
ggcagttttgaggagtaccagtcaaggattttgtacaatgtccagggacacctttttgccttcacatttgggtgtcatgtgggctggtagcaggtcactctgagatccttgaaaactctgactcagactggcattgacagattggtgttttatttccagagggctcaaaaccttcagagaatttctctgcacctcctgtgccttggtgatattttgcaagttaaaaagaatttgtcctttggcaaaaccccattgctacaaaaaataccaaaattagctgggcgtggtggtgtacgcctgtggtcccagctactctggaggctatggtgggaagatcgcttgagcccagaagaccaaggctgcagtaagccaagatcgcaccacagcactacagcctgggtgacagagcgagaccctgtctcaaaaaaaaaa

SEQ ID NO: 266256 - DNA, 676 bp, Homo sapiens
gcctgttggtggtctcttcacacagacgcgtgtgacatttggtgccgaaacccaggacaggaggactccttcgggagaccggtcccctgtcctcaccctcactctgtgaggagatccacctgtgaactggggtcgtcagaccaaacaacccaaggaacatctcaccaatttcaaatcaggagaatgccacggactgggtaatttataaagaaaagaagcttcactcacagttctggatgctggtgagtccaagagcatggcactgtcatctggcgaggcctttcttgctgtgttgtaactgcagaaaacatcacataatgagagggcaagagcaaaagagtcacaaaccttgcttttttaacaaagccactcctgcagtaacaaacctattcttgtgatggtgacatcaatccattcatgagagtcgatctctcattaattcattaatccattcacaaggaagagctgacattaatccattcacgtgggcagagggattcgttttccaaaacatgaacttttgggaaatacattcaaaccatagcaattggtatacacttatgtttttaaagttctgtaattctatgacctgagaatgtgcaatatttctaagagatgctggagcacttaagaacatttgaaaaatataattctgatatttgctatttaagaagag

SEQ ID NO: 266257 - DNA, 481 bp, Homo sapiens
gaaaaactgagcaaaacaggcctcagagctgattctacgaacgttgaaccagagaagctgcatgactgtgggtagggtggtgagggtgagacccaggtccgtcagggccagcatggagagaaacagatacatgcgctggtggacagatggctctgtgcgaatgacagtgaggatggtggtattgcccatgatggagatggtgtagagacagcagacggggatggagatccagatgtgggaggcctcaaatccagggatgtccgtgaggatgaagtagatgccttcttgtgtggtgttagtcacctgggacatgactgatgaatgtgtcttcagattcaggatcttcactcagggagaaaaagaaacattagaaataatatctctttgccccatttaatccaaattctacacaaataaatgttcagagttgttgagggtaactaaagcaagatttaagaacattgtgatatatgatatcctt

SEQ ID NO: 266258 - DNA, 91 bp, Homo sapiens
aaccccttaatgtctgttctgtgccactagcttggccctgggccttttatttatacccgagtcttacaacgaagagtgtcctgagcagaca

SEQ ID NO: 266259 - DNA, 363 bp, Homo sapiens
ggggacacagccaaatcatatcaaagcttcagtagctttctaaagactacttctagctgtcctttttcccttcatacaattcagttcatctcacctctagaagagtaatatagatagatatcctactcataatttatttccaccagcccaaatcataaacttacaaaatttatcaaagacttactcagccctcaaataaatagtaagttcaatattagagtttttattatcataacttagcagtccactcgctctaactaatgagtagagcccaccattaacaacattactatggctgagcttccagcatcatccagaccaccatctctgatcagtctgaaatcttacaaaataccatttatt

SEQ ID NO: 266260 - DNA, 422 bp, Homo sapiens
caaataatgctgaaataatctggatatccaaatgcaaaatagtgaagctggatccttatgccatatatattaactcaaaataattaaagatctaaagccacgaaacttctaaaagaaaacatacaggaaatatttcaggatattctcaggacttgagaataatttctttaacaggaaaccaaaagctcagacaacacaaccaaaaataaacaaatgagactaaatcaagcttaaaaagttttgtgcactgaaggacacaacagagtgacaaggcaacctgtgtaatgggacaaaatatttgcaaatcatatatatgaaaaagggttaatatccaaaattatataatacataaagaagtcctacaattatacaatatataaagaagtcctataactcaacaacgaagtatcaaataatcaaag

SEQ ID NO: 266261 - DNA, 686 bp, Homo sapiens
ttcgaggagaaggaattgatggaggtgtcgttttctagaggatacatttaggcagaccttgctctaacaattgttcagatttttaaaaatctttttcttattgtctttcctccaacagttgttcagatttttttaaatttgagaattttaaaatcaaactttattgattcctccgtattttacctatttgtgctaaagtactgcaaatcaatatggtaattattgcagagcttggatggaggaacgttgacctctgttagctgggtttgggagccttcttttatagcgttgtatttccttaattgaagcagtggtcttcggcaattgcttacatgtctccctcaattcatcccccaaaacaccttgcagctatagttttttaaagcctcactttgactttgagctctaattattcattccttgcctctaatcttaccttctgttctggtctctcaccctgctcagaatgagttcacttcctgtcttatttctgttagagtctgaggcagccattgtgaaattgcagggttggtgcaaacttacctcagtacaaaagcgtagtgatttatttatagaataccttattagatagtttttggagactgtgaaagaatgaaacgggtgttcttattgtatcttcacacttttttgagattattaaagatgggaatttcaatacaatataa

SEQ ID NO: 266262 - DNA, 609 bp, Homo sapiens
catgtgattgcaccaggaggtgcagtggtggctttcctcttgtgccctgattgcattgaaaatcagacaggttaagaggacaaagccttctgaagagtggcctcggaacctgggttgtgtggaatctgggtaaataagattcaacctaaatgtaacgtcccgatttacagacgtttattaaatttatgttatttcattactctcccatcgtctcttaagtagttaggcatctctcaattatacattgcttctgcttacctttgttttttaaaaatcataaagttatagcagtttgactgcttttgaagttgatctttgccaacagaatgtagtgtgttattcttggtgctgattctgatataataactcaggaacttcagagtttattgactgtctatcagactaacaaaggagttgaccactctttttaaaaataattttttccttatttgccacctacttttgatattgatttacatgtattttcctttgctttcagatcagcattcaggactgtcatacagcctgaattggtcagaagtgacagggcaaagaatatgtactttgttgtggtttgtgagcagaggccctggttctttgtgatagcag

SEQ ID NO: 266263 - DNA, 402 bp, Homo sapiens
tccatttaccaagtgagttactctttatctctgcttctttagtttctgtttattcttaacttggatctgctgtaatttcccgtgggcccaatctatggattggcctctttctttctgtaattggttgggatttacattcaggtctttctgcctcaaaagccactatactagactgactcaactgcatagggctgcctcttctgtagtatctgtggcagggtagattcacttaaaagggactgacctgtcgagttagagttacagtcctgtctttaaagagaactatcaaaccctaattcattgaagttcatgatgtttggttccaagtggtaaaaaggatgggttttttaatgatccttgttatgtgactgtaaagcaaataaactaattctactagtaata

SEQ ID NO: 266264 - DNA, 330 bp, Homo sapiens
accagcgccaacgaggatcctctcagccacagcggccctggtgggagaggggtgggaggacctcagcagccttccccacctacgacccccgcaaaaagagagtccttggagttgccgtgtggtgaggggatggcctgtgagcgcggctgtggtttccacgtggcgtctgggatgggagagggagtcagataagcacatctgccggcagcggctgaggaagcccgtggccaacaactgtggtctacccaggttagatgcctccgttagatgcagaaacagaaaccacggcccacgaaactttgttttggtgcaggagaggggctctcatga

SEQ ID NO: 266265 - DNA, 462 bp, Homo sapiens
ctgaatcatagttctcctagcttggattgaattcaattcaacaaacttttgttgagcatctactctggagccaggtggcctgagtgtggttcttggttctactattctacctctctatcagtttcctcatctataaaacagagatataatagtagtctttatcttctgtgatttttttttttaggataaacagaattttaatgtatgtaaagtacttagaacactgtttgccacttttgcacacacagaaagtcaactgaattagagaccggaaactgaaaggtgcttatactgtcttagtgggagagacagataagaaacccaacaatttcagtagtattttctgataataccaataacatgtttatcaaaaggttgctatgggaacccaggaattgaagaaaaaacgaccttagggggatagttttctggaataaaattcaaaaaaggctttcaatagga

SEQ ID NO: 266266 - DNA, 320 bp, Homo sapiens
tcaaatgggcttaagtaaaaagggatttattggctccaaacctggaaggggctgaggtatcactaaatccagtgactccggtgatgtatttgtgtatctctccctttctgcaaagggccagtaacccctcagttccctatctactttgcgactataattgcaagcctcattctgtcctgttacagtcgtgcggcaattaggctgagggactggcgcgcccgctcccccgactgtgagcctaggcggcgggtgtcatgcccctccccactcccgggcggaacagttcagcaagacgcttccagttacttcctgctcttaaa

SEQ ID NO: 266267 - DNA, 443 bp, Homo sapiens
tcaaatgggcttaagtaaaaagggatttattggctccaaacctggaaggggctgaggtatcactaaatccagtgactccggtgatgtatttgtgtatctctccctttctgcaaagggccagtaacccctcagttccctatctactttgcgactataattgcaagcctcattctgtcctgttacagtcgtgcggcaattaggctgagggactggcgcgcccgctcccccgactgtgagcctaggcggcgggtgtcatgcccctccccactcccgggcggaacagaatattgggacatgttggtgattcttagctgtatctcactattccattgacatttcaaccagtgtgacacaaaatgtcagttatgtatgtgaatgagaagtaagatcttttgaatttaatgaattcagcaagacgcttccagttacttcctgctcttaaa

SEQ ID NO: 266268 - DNA, 615 bp, Homo sapiens
tctactgagtgcttcttaagtgtcaggcactgctctatctgctttacgtaggttatttcacgtaatccttacaataagccaatttactattatctccatttcacagaagaagaaattgaggtgcagagaggctaagccattggctaactagcagatggcgatgcttggaaatgaaccaagtctgaatccagggttcccgtgtgtaatctctgcattgagcggcaattagtgaatgaatgaataaacagaatgaagttaaactcagggaggaagaaatcggagctacacgagggaggcaggcagcgttatttcagaaccctcccagggccactgatgataaagtagaaagagaactggtatcccaagaaaaccatatctactacagcaggccagatgaccctggagacaagctgaacaaagtccagtgacaatctcccaaatgccagtcccggccaaaccccacttcttcaatgcctccggccaatctcaagagtttccagcctcagtgttcacatctgtagacagtatgcgcccagggccaggcacagtggctcacgcctgtaatcccagctactcgggagactgaggcaggagaatcgcttgaacctgggaggt

SEQ ID NO: 266269 - DNA, 590 bp, Homo sapiens
gctgactgtgagggagctatggatgtatgcttctgcgtcagaaaaccgaggccctgagcagctgagtaacccactcagaggaagaagaaattgaggtgcagagaggctaagccattggctaactagcagatggcgatgcttggaaatgaaccaagtctgaatccagggttcccgtgtgtaatctctgcattgagcggcaattagtgaatgaatgaataaacagaatgaagttaaactcagggaggaagaaatcggagctacacgagggaggcaggcagcgttatttcagaaccctcccagggccactgatgataaagtagaaagagaactggtatcccaagaaaaccatatctactacagcaggccagatgaccctggagacaagctgaacaaagtccagtgacaatctcccaaatgccagtcccggccaaaccccacttcttcaatgcctccggccaatctcaagagtttccagcctcagtgttcacatctgtagacagtatgcgcccagggccaggcacagtggctcacgcctgtaatcccagctactcgggagactgaggcaggagaatcgcttgaacctgggaggt

SEQ ID NO: 266270 - DNA, 632 bp, Homo sapiens
cccagctactcaggaggctgagacaggaggattgtttgagcccaggagttcaaggctgcagtgacctctgatcaccactgtattccagcctgggtgacagagcaagaccgtgtctgaaaaaatgaaaactgatagacaagaagaggcaacacaatgtagcctctaggacagagcactgagctaaatgcttttcttgaggtttcaggtttcctaatcatcctaccagctcccaaagctagtcacttgggttagtcaatctctctattcattcatagaatgggcgtgatgccagtcaaaggctgtgctatggtcaggacagaggggactccagccagcatgccctaatagaagtggggccttctgctacccagtcaatgagtggccctcctcttgagaggtcatgaaggtcatctttgttgttcaaaagctccagcttattaaaaaaatacaattagactttttttttctcccccaagacagagtctcactctgtcccccagactggagtgcagtgccactatctcggctcattgcaacctctgcctcccaggttcatgtgattctcctgcctcagcctcccgagtagctgggactacaggcacgcgccactacgctcggctaatttttgtatt

SEQ ID NO: 266271 - DNA, 464 bp, Homo sapiens
aaatacttatatttgatattgtgagcttgaaaacttcccagcacttgaggactttcctggtgagattggtgatgttgttaaccagtgtgattttgtatattggataatgaaatgtgttagcatttggagtactacataaatcagggcaccaatattttcaaaatgaccactgcatggtggcacaaaatcatggttaaagatccaataacagtacaagacacgcttggactttaacataacaggtatgaaatattaattgctgtggcttcagattctgcattgcagccagtctttaagaagtggccactttttgattattagtgtagtatcgaagaatatctaaaattgtttgaaaagacaaagtacttctttttacaactacgtatttatttggagtcagatttctttcatgtgtttcagtcaaaaaacatatcgagtgagactccatctcaggaaaaaaaaaa

SEQ ID NO: 266272 - DNA, 873 bp, Homo sapiens
acccaatccatatcacagagaggcagcatgggtgcccctagcccaatggccgggctatttgctactgcaataataggtttcttataaaccgtcagcctcctgagtagctggcaccacagggacaccacaggctattttttaaaaaaatttatgtagaaatggattctcactgtgtttctcaggctagtctcaaatttctaggctcaagcagtcctcccgcctcagcctcccaaagtgctaggattattggtgtgagaggaatccctttcaacccttgaaaataaatcaagcggtgatgaactccctgagcttatatttgcctaggaaggtctttatttctctttcatttttgaaggacagtttggctggacatagtatgtcttatttggcagtttgtccccttctgcactgtgaatatattatgtcagtcccttctggccatctggcaaggtttctgctatgaaatccactgttttatgaaggatctcttgttcatgacaagttgctttttgattttaaaatgactcaatgtggatgtctttgggttcattctagttggagtcctttggaattctcgaatctggatgtctattttctaccccagatttgggaaattttgagccattattttttttaaagaagctttctgtccctttttgtatttcttcttaaattcccatagtgtttatattggtccacttaatggtgtcccagaagttccttagactttcatcattttaaaattattttccctttttgatccactgactggataatttcaaataacctctgagttcattctttcttctgctttatcaaatctgctgttgaacccctctaataaatttttcaatttattttattcttcactgc

SEQ ID NO: 266273 - DNA, 377 bp, Homo sapiens
gttcttatgaggatgaaatgcgattttggatgtaaaatgcttccatccagtacctgctaaacaaagtgctgagattacaggcataaaccaccaggcttgcactattgataattattatagcataaagtttttctgaggactaaatggggcaaaatacgtaaaacactaattataattattggcaaatcccataatgcttgttgttattagtatacttagaattattttaacattaaaaactgaaaactgaagctctgagagtctgtgtgactttgaggattaaagaactgaaaaatggtagaagtagaatttgaactaagaaagtacggttattgaatgcatggatttaatccctattaaatactttatcttccaaa

SEQ ID NO: 266274 - DNA, 380 bp, Homo sapiens
ggcaagaaacttgagacactggaacaagagtcaagtcaataagtttaatagtaaggctttaagaaactgggattacaacccaaacaagccaggcgggtcctgcagagcaatgagaaaccagagttgactttctagagccaatatctttgctgtatttggtgtccagatatcacttataatgtattcctcagaaatggctcactctcataagaaatataattaccttttctaaacaccaagatgatagaagtcttaggagttgatctgagtcatgatttaactatacaccatgtgacctatgaccttgcgtatgtcactctgtctccattaaccttcttttctttatttgaaaaagtaggggtaggaatactagttttacc

SEQ ID NO: 266275 - DNA, 878 bp, Homo sapiens
caaaattactaaagagtaacgccatcctccccaactcaaaccagggaaagtaagcttgcctaggaacttaggctgaaactcaccacagtgccaaaaacctgttttcttgaaaagaggtagtgcagatagtgaatccactgagccacatagggtgggagtttgctttaagtgcttttcttcttgcccacaaactagcgtaggctgtgactggctccagctgatccttatcaaggcagctagttctgagggcttggttaagaagctcttcgtttacttaagggagcaaagagaagacacgtgaattggaaaaggatatctaaaatgtcccctaaggcttcataaagttgacatctttcgtcatgacttctacagttcaggaaaccagcaggagactttgattaaagtgagaagcagccaagattccgggaagcgcgtctttctcctgtctcctccccaagatgtgcgggtgtccttcccccaacaccatggaagaaggggtccaggaagaaaatgtcacacttgcctgtgacccccacctggtctgcagaaaggcagagaagacctgcttatggaggaaaaagacggcctctgtctggagcttctatgaattacataacgaataagtgatttcactacaaagcagtgaaatttttaaaagttaaccagtggcagaagtgtcaggacagtctgcacgggcaagaatgatacctaaatcactactcaggcacaggagagagcaggactggcatggctggcaggaatgagctatggaagatgggagagaagaatgaggatggatgactaagagcaatgaaagcttacaaagaaacccaagaaggcgaaatatttgcttatgaataaacaggaagggaagaaat

SEQ ID NO: 266276 - DNA, 787 bp, Homo sapiens
caaaattactaaagagtaacgccatcctccccaactcaaaccagggaaagtaagcttgcctaggaacttaggctgaaactcaccacagtgccaaaaacctgttttcttgaaaagaggtagtgcagatagtgaatccactgagccacatagggtgggagtttgctttaagtgcttttcttcttgcccacaaactagcgtaggctgtgactggctccagctgatccttatcaaggcagctagttctgagggcttggttaagaagctcttcgtttacttaagggagcaaagagaagacacgtgaattggaaaaggatatctaaaatgtcccctaaggcttcataaagttgacatctttcgtcatgacttctacagttcaggaaaccagcaggagactttgattaaagtgagaagcagccaagattccgggaagcgcgtctttctcctgtctcctccccaagatgtgcgggtgtccttcccccaacaccatggaagaaggggtccaggaagaaaatgtcacacttgcctgtgacccccacctggtctgcagaaaggcagagaagacctgcttatggaggaaaaagacggcctctgtctggagcttctatgaattacataacgaataagtgatttcactacaaagcagtgaaatttttaaaagttaaccagtggcagaagtgtcaggacagtctgcacgggcaagaatgatacctaaatcactactcaggcacaggagagagcaggactggcatggctggcagttctctatgtagcaggcgctgtactttgg

SEQ ID NO: 266277 - DNA, 790 bp, Homo sapiens
gtatttaggtgggaaagctaaaacccaactgtgcgttttctttgaccgatgaaatagcagcttaaatagactaatgtcaattacatcttgtcaatgttgtagtcttattactttatatgattttagacccattgggaaaagtttttaattgtacacttttagaataaatatataataaatataatatttttaaaagagcaactgccctttttaaaaaacttaactccttaaattgcagttgtacaacatgatgactaatataccttttcaagaatatttaatttggggctgaagaataaaaagaaattttcatgatcacaagtaaattcgctgggtgctaaaagattgaagaaagatttaaaataataactacagtaaacttctataataattacacttctgttttattgtctgattttaggaatacatagccattttttttcacaatgcttttttttacataaatactgttaaattttagcttcaaaaattttctatagtttctattaatgtttataaagaagtctcagaactaatcattaaaattatatttaggaccctttctggttttttaaatatgtttttatttataagcctcactcatagttaattttgccctgtacaagtttcttgatacatataataggtatactactttaaatgtttgcttcctccgtcaggctccttattcatgaacaatttattacttgagattttaattttatatgccactctctaaaaaccaaagatctctctttaacaaagcaaggtaatcgtgaaaacatgtctg

SEQ ID NO: 266278 - DNA, 1106 bp, Homo sapiens
gcccgggcagtcctgctgcatctgcatggcacatgcgcttggcctggtctgctcagtgtgtctccctgactgggctgtcagttcctggagggtagggatctgtcttcccttctctatccccagtgcctggcatgtagtagacactcagtaactgtcaaataaatgaaagccctggctcatcaaacaaagaccagatgtgatttaaattccaaggagccatactttttacaaaaatgctaaaatgccaagaagtactttttcattaaaacaaaacaaaactgttttagctatgtaagggtggccttttagaactctgactgctttagatctttcctctaggtggcatagagttgtggggtttggcagaccaccatgggaaaagaacagatgcatttgtcagaatctctgtggccatcagacgtcactccaatgaagccaaagctccgaggtttaaaaataattaagggaaataactaagcggagagacagaaaagaccacttcttagttgattctggaaaaatgaaccttttctttctaccaaccggcaccgaaattcagagtatcctggacacagctgagagactactcagggagagccactgcagtcacaccccacctccacttaggtctccctacactcactctaatcttctaaatcgtttaatcagacacggcgctgcctctgaggcttcaggactttcaggctgtttttttttccccgggcttaaagtctttctctgctgctgactcacatgttaattattgctttgcataaagtagaattagcagtgctcctgcactcacctgcctgcgtgttatacaactgttttatctgctggacagaactgagtgtgcaggccggcctgccatggtgtcaccagcggccctgtcttcagctgccagggcaatgagcatcgcacagaaaccaaccattgctttagaggctctggggaagaggctgtggggtgtgctctgcttgtcccaggaaaaagagggttaagtgccaagttttgaccaaaatcttataagaatggtccaggagtttcagttccctgtcacctgtcagtgttaatggacagaactggtgtttcacagaaaaaaaaaa

SEQ ID NO: 266279 - DNA, 450 bp, Homo sapiens
cacgagggccactgcactccagcctgggtgacaaagtgagactctgtctcgaaggaaaaaaagtctagaggatttacagtgaaaaatcctaatagtggtcatggccaatgacacctctgcatcttgtgtccgctccatgctaagtgttttacccaagttctcccatcgaatcctcacggtggccctaagacagttccgtgatcccattttgggagctgggattcaaacttgggcccgactctgggaggtttgctcctaaccaccgggccccactgcacctgtgctgactcattcagaccagattccaacacagagtgatgccctggagaggggcccatgcagtgcaagtggggccagcagcaccgctccgtcggaggccccaccacttaggtttctgaagtcttgtcttcccagctctaaaggtcaccgatctggggatcactgagatga

SEQ ID NO: 266280 - DNA, 536 bp, Homo sapiens
gcaggcttttttattattattattagattagttaaattagggacattcaggctgtgatgcttatgataatctcaatgtgaaatatgaatttgggaatcattatagattcaacccataaaaacaattaagattacccaaggagagcaagtggagggagaagagaaacaaggagggaatcttaaggaacatgaatatttaagctatggaaagaacagaggcaatgtggaaaatcaaatacagagcagactgtcaggttggcatactctattggaggcaaaaatcagaaaaacaaattccagtagatgggattttctatttcacatatttcagctaggtcaagtaacttgaaaattgaaatgcaattatagaagttggtaacgcttgggagctatggattttctaatgctcagaagatgggcttagaaaatccaagttaacgtgtccaagattaaacagccaaagtgttgacaattattaattttagctaagaatatttgatttctcaatcttaaacaatacagtttaaataaagtaaa

SEQ ID NO: 266281 - DNA, 403 bp, Homo sapiens
tttgagacagggttgcgctctgttgcccaggctggagtgcagtggctcaatcttggctcactgcaacctctgcccctggggttcgagcaattctcctgcctcagcctcccgagcagctgggactacaggcatgtgccaaccatgcccggctaattttttgtatttttagtagagaaggggtttcatcatgttggccaggctggtgacctattcatttttcaataaaatattgtaattgccatattccaagtataaatctcattaaatttctaaggatattcatcaatcacattaatttctatgttatttctaaggtcatctcattttttcctcaaaactgagtgacatgtagacaccccaggaccaaatactaagtaaacttgaaaataagaagatttataga

SEQ ID NO: 266282 - DNA, 353 bp, Homo sapiens
ctatatctatcactaataaacaccctgtcttctcaaaaaagctaggcatttttagtctgcttctggacttctctgaatgtgcatatattttttaaaaaacaatactgctttgggaggccaaggcaggcggatcatgaggtcatgacatcgagaccatcctggctaacacggtgaaaccctgtctctactaaaaatacaaaaaattagacgaacgtggtggtgggcgcctgtagtcccagctactcaggaggctgaggcaggaaaatggcatgaacctgggaggcggagcttgcagtgagccgagatcgtgccactgcactctggcctgggcaagagagcgagactccgtctca

SEQ ID NO: 266283 - DNA, 300 bp, Homo sapiens
tacaatattattaactcaactatagactttcttcaattgttacaccagtttttctcccagtatgttctctgtcccagaacctcacactgctttcagaagttatttctccttagtctccactaacctgaaacatttcagtcttgccttatctttcatgacagcaagtatttcataatgctccctttactacactgaagtgaaatccatagataatattagtgccttccatgaggctcatttgctgaaactgtagatatacacgtacgcatatataaatgtgaaataaaatttgaacgtaaa

SEQ ID NO: 266284 - DNA, 458 bp, Homo sapiens
ctgtgatacatcagtgttttcaaagttctggtccatgcatgcagccccacttggatattttatgttgactcttgtatattttgttctttctagaaaaagagacccaggtgtttcagggcattgggctattccatttcagagcctaatggaagtgctagtgttttcataattggaacagacaactgccatgctacatatggtgctgtgaccactgagcagcttgttcacaatgagaaaatacattgaagttgtgaccatttgagccttgaagaaactgctgttgaagttttgtttggctccagctccatcctggaatggatggagtcatttggaattattctgaattccagtagtggcaaaaaaaaaaattgtgtaacttgtatatagatggttttctgtttgattaacagcattgttcaataaaagatgcattgttttaaatcaagaatacggtgcca

SEQ ID NO: 266285 - DNA, 293 bp, Homo sapiens
cctcccaagtagatggtattacagacgcttgccatcacactcagctaatttttgtatttttttttgtagagatgggactcaagtgatccacccacctcggcctcccaaagtgctgggattacaagcatgagccactgtgcctggcctagatttttaaagtgaagtaagacaccaattcacagtatcccctcccccagttgtgggggatatagtctgtgctctctcggtggccttagtaaagtgtccctttcttgatttaaggtgaaaaaagaagtaacctgcctcctcttggc

SEQ ID NO: 266286 - DNA, 1647 bp, Homo sapiens
gtgaagaagcagcccggaagggaaagagaaaagagtagaaccaagggacctccagatgggagcggcggccggtgagtagtctagagccaggggcattgtagcagcctggatacatgacctgaacacgtcttgacctttgctttctacgtgtgggtttcaacacccatgtggctttttcttgtattctttaaatatgtatctggcttaggatcacctcatagaagagaaagaattcacagtgaagcagaaacaagccactgaccagcgtactcccaacctgaaccttctttttctcaccctctccctcaagtaaacatcttgctgacttgagcagtgtgattgccgtagcaaagcagagtggcccccagggatcccgctctgttgggcccacaggaggagccgatgaagctgatccaaggagtgaggacaagcgctgcagagggacgttcgctaaaagccttctaggggccgcacatgctctaacacggacataaggatgccctgaatttctgcagctgaggccatatagtctggtgaccaagtatttgggtcctggcttcagtctttggttgaaatgtctgcttggctacttattaccgcacctactaccaaaatatgaccttgagcagtaacttctttaagcctcagttttttcatctgaaaacgggaatgataatctaaatcacaaagttaatggaaggattaaatgagggtgatgaataggaatgtatagcgtctggccctggtatggctttataaatgttagctgtgttggagctgtgcttttcaaaccattggtcacagccattcatggtttgcaaccagcatgtttttcaagaaaaatgtttaatgcattacatattgcaggataagtattgttttatgaagcttagggagttgtgtgtatatgtgttctggaatgcaacagaaaaatgtttcctcttgtgggttacaatatagaggtatgaaatctctgatgaggagagacagtgttatctggcccgctatgaagagacacatttgcataggctgctccctgaggctctggctttctacatctgatgatacagggagcagggaacagcctgttctcgttctgtggggctcagctgagtctgttctgcacagactcttccttcctcgggagccttagtcctaatacattcattttggagtgttggtgagtttgttcacagatcacagctcatgtgtcacccagactgacctgggccaaaaggcccatcacacaccctgcaagagcttctggtgtcgactatgacccccttaccaggcatcaaccatttttgttcgttctcttgagcctgaagctactattactgctcctctgcaaacctcaagcttaagaactttgcctgcaggatccctttaaatccacacaaaactcaaaattgagtcctaccaggaaaaagcagccctcagcccatttttatacatcggatttgtttgcaatattttctttctagactcaaaagtcaacactccctgaaagtttgtcgactttactgctgaagacctctggtagacaggccaggctctgtctggaatactttatgaggttggtgaggaggttgagtataatccaagagtgcctatctgggagcatgccacatgaatggcaaataatca

SEQ ID NO: 266287 - DNA, 271 bp, Homo sapiens
cacactggaaccacaaagaaaaacaagtgccacctctgttgtcaggaagctcacagggggagacaggtcatagaacattacaacaaagcaagggtttctccatgatagacagatgctactgtgtggaaactgcaagtgaattgaggtggccagcggtttcaagactcagagactcaagctgggtgttgtccagtattgtccagcctctggtcccctcttgccaaggagctcagttctcacattaatgaccttggtacaacagacccaaata

SEQ ID NO: 266288 - DNA, 424 bp, Homo sapiens
tgactcttcttgatgtaatgacacccaggtttgttccatgttgtgactcaccttttttcaacatgtgacttccgaggttacttgcttgtctgcctcaagccaatggaagagcaaaaaacattgagattcatgcgttaagagatttttagagaccaggcttggaagtggtgctcatcactttagctcaaacagcattggcgggccaggcacggtggctcatgcctgtaatcccagcactttgggaggccaaagcaggtggattacttgaggtcaagagttccagaccagcctgtcaacgtggtgagaccccgtctccaactaaaaatacaaaaattagccgggcatggtggtgcacacttgtgatcccagctactcgggaggctgaggcaggagaatcgcttgaaccctggaggtggaggttgca

SEQ ID NO: 266289 - DNA, 421 bp, Homo sapiens
ctgaatatgaagaagacagttcaacatctagtagttgtttttcactctagattatacaacttcctaatttttgcaatctcattgcctacttaaaataggtacagtgaaaggaggactaagtgactaggaagaagacaattcaaatgcagaactgaatagagtttcacaacttggaatataaaaagtgctgcaccactgaggccataagacccaaatgagcacatgctattagacattctataaatttgtccaccatactcatctggctttttaatagaagtcagatcttgcctccacaatcctctgctacaggttactaaggatatacatctgggagctaccaaatgctgcttctcctttcaataaaaacaattgatttgatgttaggctctagtggaaacagcaatcatcactaatagaa

SEQ ID NO: 266290 - DNA, 353 bp, Homo sapiens
accaatatgttattctaaaaacagaaacaacaaaaagaatgaatcaagtgtttatcttgcccttcctggaagaactgcacctcagggtaacctaagggaatagttgatgcgagaaagtttgtctataagaaatattgtagttaataaatgaagaagaattggtaaaattaaaatatcacctgtctgcaactcataatgaaatcttgggtccaggcaatggtgattaattcttgctgacatcacagaaagagaaccaaccttatgtgtctcctgatttgatgcaatagtgcaaacaatacttcccatgacatattcctgctttaaataaaattgaaactgagttgaatcaaaaa

SEQ ID NO: 266291 - DNA, 254 bp, Homo sapiens
acgcctccaggtgttcaatcctataaaactgtagtttcttgctcttagaaataacaagcctttctctccctaacctgccatcatgagaaattaaaatgtcctgtattttctgtacggcaaatgattcaaaatgggagtggtggacgtttttatacccaactgcaacaagggtaatgagataaatatcagtttccttccctcagattattcttatatgtaaaatttactgtataaaaatacttaaaatttgcata

SEQ ID NO: 266292 - DNA, 281 bp, Homo sapiens
ttcttggattcattgaaaatcaaaaccatttttgcatgttgctcaacaagttgctctaatattggatgtttgcagataatattcaaactggagaaattttcgattgttaaaggcagttgggattggaagagataagaaaacaaattcccaagtgcctcctatgataggaggcactgggtctgatgctttcattactattatcttgtttcatcttacaacggggaaggaagattcaaatgcgcagtcttgcttcagagtcagtactcttaaccaatatgttg

SEQ ID NO: 266293 - DNA, 388 bp, Homo sapiens
agagtagaaattccccactgcagttactggacgcaccaattaggattcttttcttataagtagcagaatccaattcaagttaagggaacaagggagatacaaggatacttcaggaaatgcaagggcaggaacgcagccaggcctccagagctggcagtgtcttctctccatggactgggaagcagagagattgagttgcacaaaggatgatcccccaggccgcctcctccactcaccagtgtttcagttttcttagaccaacccaaatggaactggaattttaattccacttccagattctccatagagaaagatctgattagtccagcttgatttggacatcgaccctagtcctgtgaactgtaaccaaaagcacaaggtcatgtaa

SEQ ID NO: 266294 - DNA, 608 bp, Homo sapiens
ggaaaaataagcaccttggtttggggaaattttaaaaatcattttattgataatctctacttctttctttttttgagcatctgttatatggagattgggcttcctgtattggccttcttagcttcctatcttcttctaaaaaccttttgtcattttgttctattctctggaagatttcctcaattttatcttccaaatcttatattaggccaggcacagtggctcacgcctgtaatcccagcactttgggaggtcaaaggcaggcaaatcgcttgagctcaggagttcaagaccagcctgggcaacatggtgaaatcccctctctaaaaaaaatacaaaaattagctgggcatgatggtgtgtgcctatagtcccagctactcaggaggctgagatgggaggatgacttgaacccggagaggggcagagattgcagtgagccaagattgtgagatcgtgccactgcattccagcctgggcgacagagccagatgtgtctcacgaactcttttttcgcccccgcgacctccctcattcaggcttcctcctcctgtcctcttctcatctttttgccccgcgccctgtctcgccccccgccctcccgcccc

SEQ ID NO: 266295 - DNA, 496 bp, Homo sapiens
aggttttgtgtgtgtgtgtgtgcatcctcactattgtaaatggtatttttaaattttatttttccctggttcccttccttgatctagatattcagcaaccctgggaacagtgttatttgctcagccatctgtattcccatactacttgtttttttattgttatagttttatcattacataagtaatgtatgaattagttattgatgtaaaagatttaaaaactgtcttttccagaagtaaccactgttaccagtttgaagtgtattctcgtagatttatacttctcattgtggtagctacttccacatgtggctattgagcatttaaaatgtgggtagttttaattgagatgtgctgtaaatgtagaataagctctggacttcaatgcttagaatgaacaaaaagaatgtaaagtatctcattaattttttatattgtttaatgtagtgataatattttggctacgttggattaaaatgtgttattaaagttaatt

SEQ ID NO: 266296 - DNA, 485 bp, Homo sapiens
tagagttccagcaggagtgaacaggaacaggaaaacaaatggcagtatccctgagacagccacttccggtggttgccagccacctggggatgtgagtcttggctgaccaggcttctggggacagggggcccaaggggcaatagagggtaattcttaagattgtggatggactgctgggtactggttaagaattctggctttagccgggtgtggtggcccatgcctgtaatcctagcacattgggaggccaagacaggcggatcatgaggtcaggagatcgagaccatcctggttaacacggtgaaaccctgtctctactaaaaatacaaaaacattagccacgcgtggtggcgtgtgcctgtagtcccagctactcagaaggctgaggcaagagaatggtgtgaacctgggaggtggagcttgcagtggccaagattatgccaccgcactccagcctggtgaaagagcaagactctgtctcaaaa

SEQ ID NO: 266297 - DNA, 362 bp, Homo sapiens
attcaaaaattgcaaatatccaggtacagaaaggccagagaacaccaaatagatttgattaccccaaggcatataataatcaaactctcaaaggtcaagaacaaagagaggatcctagaaacagtaagagaaaagaaggaaataacacttaaaagagctctaatttacctggccacagacttctcaatcaaaaccatgaaggccatacaagaatactgtatcaagcaaagctattattcaaatatgaagaagagataaagtttttcccaaataaaagcagagagaattcaccactaccagatctgtattataagaaatgctctcttgaagaaagacagttccagagagttcctcaatccgga

SEQ ID NO: 266298 - DNA, 384 bp, Homo sapiens
tcccagaaacaatttcagaaagcattattttgttttgttttctgggatgggagaagagagaatctacagatttgtatttagttaaaaatcaaaactccagcaataggaaataggcagttcacatagccggccaacatttgaggtatcatcagtgtgagacaaggtcccggtctgttcctactggcctagctgacgctaacaaaatgggaggcttatggctctgcacagcaaattccagcaagataagatgactttaagcctgtattcagagccttagaagcagggcactactgagaatgtaatatttagaggtaaaaatagtgcaagagcccctgatggtacccctctacctgctttgtccatgcagcctgatcgtaactgcct

SEQ ID NO: 266299 - DNA, 349 bp, Homo sapiens
tcattttttattattagaatcaagaagagtacctctaaacccttgctgttgctttagggtagagagctctggtctagaactcaagttatgaaactgtgagtcccagtgtagctacttaagtttaaatacaagagctgtcagacatttccactacagcaacgaaatctgtagcatccattttgtactttgaaaacttagtttttggccagcctctaggaagaagaagagggtccagaactgggcatatgggtagggatggcaaaagaaaccggctggatgcaacagggaaagacgaagggatggagaccccaggaagagccagtcctcaggcttggggcctgggtctagg

SEQ ID NO: 266300 - DNA, 457 bp, Homo sapiens
ctcatcttgaattgtagctcccacaattcccacatgttgtgggagggacctggtgagagataattgaatcatgggggcagtttcccccatactgttttcgtggtagtgagtaagtctcgtaagatctgatggttttataaaggatttcccctttcacttgattctcattgtctcttgcctgctgctatgtaaaacatgcccttcaccttccaccatgatcccacgtggactgtgagtttattaaacttctcttctttataagttacccagtctcaggagtgtctttatcagcagcatgaaaatggactaatacatatctactttcttactgaagaaattatgtatttgcattcttttttactcctttttttgccagtcttaaaaaagtatctattttttaataatcttttcaaaagaatttcacaagtagaaaaatcacatctattttgttcatctc

SEQ ID NO: 266301 - DNA, 317 bp, Homo sapiens
actctcttcctacttagatctagaataacattctgtcttctatttactacatttgcatctttaagaaaaacagtacttactggtttttgaaaagtaccatactcttcaaaaagtgttgtgaataatatcacttgtattagactactgagtcatttattttatatgatacattgtggtgagatactgtctttgttttatgtctccattgcttactttactgctgtcccagacagatgtataggggaagcttttaaattaaatatagaattataaatgcagatgcatatgtcatgtatatgcatgcctattgtcagttg

SEQ ID NO: 266302 - DNA, 387 bp, Homo sapiens
gttagcagttattattctaccatcactttatttttaggaggtttcaaaagggtagttctttgtgaaagataattgtgaaggacttagaaggataccaaagacacattttatttacttcccaacatggcctaggtccaattctggtacaatctacttacaaaatctaggtggcaatccctctcccaaggttctttcctagtaaggttcttttaaaaaagttgtttacacaaattctgaaagtctgcccatcccccacccctcattcccttatgtaaatcttaataattgattgatctgtggcagagttctatttttctgtaaaagttttataagatagagatttataatttgtttttcagaagaagattgttactaaattggtttaat

SEQ ID NO: 266303 - DNA, 289 bp, Homo sapiens
cttctttcctgccctcctccttcttgaattggacaccatccctgttgccgcctcctgagtcaggaaagggatagaactttcccagggaggtgaggggtgtccccgtggcgatttcccggttacttcctcccagcagatatccctgtggagaggaaacgttcccgacttccctccccgcgacctcctccctagaaacgagcggagacgtcaggctgcttctgggtttattttgtaaacccagacagtcaactgcacttggcgcaggcaaagcctccttggcccttgcccc

SEQ ID NO: 266304 - DNA, 474 bp, Homo sapiens
cacgaggactgacccaataaagaacagtgacagagcagcaggaaaggtggggaaatggcttcatcaatgatttgttgagcccagggcaggccaggaattagataggcatgagaagaaagaatataatttacccaaaggttattttttgagtacctactttgtcccaggaactaggaatacagtggaaaacaagactgtagtctctacagtctaatgggcaaggcagccagacaggcagtgaaagtggaatgctcctatgtgaccttaaggagcacctgactcagccttggataaggaaatgggggaaatggcctgaaggatgaggaggagttagccaaggtggtactctagggaagtggtaccccagtaaagaacagtagccaaaggccagaaacaaagtgtggagcattccttgagttcctgttgtagtgaggtcttgtctgtcagagaagtctgggtctggccagactctta

SEQ ID NO: 266305 - DNA, 337 bp, Homo sapiens
agtttccttgttcctctttataatccggccctcttgccatccccatcctctacactccaagcaaccactgatctgctgtcactattgatgagtttgcattttctagatttatataatggaatcatacagtatatactttttttctggcttctttcacttagcataattattttgatattcttatatagtacgtatcaatgttcatttaaaaaatataactgaagagtatgtattgtatgaatacatcacaatgtttatttattcatctgtggagggatgttgaagttgtttccggtttttggctacttcaaataaagctgccacaaacatttgcaaa

SEQ ID NO: 266306 - DNA, 567 bp, Homo sapiens
gaggctgaggcaggagaatcacttgaacccaggaggcggaggttgcagtgagccgagaccgcgccactgaactccagcctggcaacagagcgagactccgtctcaaaaaacaaaaaagacaaaaaaaacctaaatacttgaaatttttaaaacccttttctaaatgtctcacgactgaatggaaataaaaccgggattacagacactcagtaatgaaccacagtgaaaatctgtatatcagactcttggtgaggacaaaatgacattgagggcgttatataatttactgagaaatcaggctggatgcagtggcttatgcctgtaatcccagcactttgggaggctgagtcaggtggatcacctgaggtcgggagttcaagaccagcatggccaacatggtaaaaccccgttctccactaaaaaagaaatacaaaattagccaggtgtggtggcacatgcctgtaatctcagctactcgggaggctgaggcaggataatcgcttgaacctgggagatggaagtttcagtgagccaagatggcacctccatcctgggcaacagagcaag

SEQ ID NO: 266307 - DNA, 581 bp, Homo sapiens
ttctaattgagtagaactgttgtaaaacatcacacaattctattgctctgaaaatattaatatgatcctccaggatacaaatgcaccttcactgaaataaattatgaactaaaagtattcttgattattttatcttacaaagtgaagagactgtatattttatatttatattttccatgcacagtggtctgttcttccattatcttttcttatgagaggcataatgacaaataagtccaaagaatgtgtagcattattatggcagatcaatcaaatggctaattacccctcttatctaagtggcattatcttgctttaaaggtgatgaaaataacaaatgaagaagtgatttcgttttttaaaaacaattctgtaaggaaccagtctatcactgatgggcatttgggttggttccaagtctttgctattgtgaatagtgctgcaataaatatacatgtgcttgtgtctttatggtagaatgatttataatccttggggtatatacccagtaatgggattgctggaataaaaattattggattatggggggagaaaatacatacaaatggccaacagataga

SEQ ID NO: 266308 - DNA, 630 bp, Homo sapiens
tgactttgagcaatggatagaagcagattttgtgggtttgctttctttttacatcactgtcacagataatgcaagatttctggtgttagccagtgttccggtttagcctggctacatgttttagcctcttctctgagattgaagccccatggccccctagtgaaaacgatcttcactggagtgactggaaaccttttcggattggtcggagcccagacacacgtggttgcagttaagcaaagtacaggagcatgttggagcggaaagggaccagggaaaagagggatggggcagatgtgggactggactccaacttagaccaggcaaccttgggcaagttcaccaggattttctgaccttcagattcctcatatggaaaaccgaagtgacagtacctttcctccttcagtgttgctaagaggactgaagagttatgcaatgtctgcttggcccacaataagtatgcagcaatgttacttttttccctttgtcttttaatcttcatattttatacacaagaaaactgagtccaaagaggtaaaattatatcatacagttagtagaaggtccagaactctgttatgctgccttcattatagtagtagaaagttgtatattataactagggct

SEQ ID NO: 266309 - DNA, 388 bp, Homo sapiens
taagcccggctaatttttgtatttttagtagagagacggtttcaccatgttcgtcaggctggtctcaaattcctgaactaaggcgatccacctgcctcagcctcccaaagtgctggaattacaggtgtgagccactgcgcccggccagaattcttaattatttcaaatagaaaataatattaattataaaagtaatacgtcctgttggtgaacatacaaacacagcaaagaagtatgtaaagtaaaaaatggggggtgataattcctcatggaccatgccacagatagcaaaactaatgcaaattaccaaagcttttataatctaaagagaatgatatttatgttaataaataacttacatgtaagtcatgtaaagtaaggtagggta

SEQ ID NO: 266310 - DNA, 257 bp, Homo sapiens
tgtttaatttcttgaggaacgaggaaccaccatatttttttttacattcctgtcagcaacgaagctgagcatccaacctctgcacatcctgacaacaattgctgttttctgaatagtggccatcctgatggatgtacccaagactgctctttataagctgacattttactttggggactaaaaatctcctttttttttttttgcagtggtgtcacaaattttaattcaaaataggcactctgaaaacaataggtaaa

SEQ ID NO: 266311 - DNA, 488 bp, Homo sapiens
atattccaaaacaaaaccatcaggtccagatgggttcactggtgaattctaccacacattgatggaaggaattatatcagttctctacaatctcttccagaagatagaagcagatagaatactctctaactcatcctgtgggaccagcattaccctaaaacccaaaccagacaaaggtattaccacaaaactacagaccaatatctctaatgattctagatgcaaaaaattctcaacgatttgtgaaaaaattcatataccacaaccaagtgggacttatctcaggtacacaaggctggttcaacatttgaaagtcagtgaatgtaattcattcacatcattaggctaaagagggaaaattacacaatcatattaatagatacataaaaagcatttcgcaaaatcgaagttttttattcataataagaactctcagcaaacgggaaatagagggatattttcttaacttgataaatagcatttacaaa

SEQ ID NO: 266312 - DNA, 627 bp, Homo sapiens
aagtgaaataatctattgctaaagtgattatttaatttcccgctctaacaggaggtcctccaatggatgcaaaaggacaggagagacatttcatcctatgcactgaatatattgggcaaacatatttcgaattacgggcttcttttccaccaccctcttctaattgtctctccttttcccagcattccctcacactgaaatttacattatagttcagaatagtaaagtgcattttgaatatgaacacaaatggattctatagccttccccttttcctcagccttctcgatgcacaggtgggctttattcgaacaggttctactttctaaggacatgcaggatcagaggccaatgactgtcagaactggaatctatgcaattttaatttgtaaaaaaagttattggttgctaaccttgggggagattgtgcatctctaagaaaccaaatctttgagtgctctccctgggaaatgacgttacacatgagcagaaaaatccaggcaagaaaggctaattgaatgaagagagagaattaggttaagtgtcttcaagtcgccagtgttgccagagtgtttagatgttggccacagatgggaacacctattgaaatgtgtctgaagaagatta

SEQ ID NO: 266313 - DNA, 394 bp, Homo sapiens
catttatgtacgaagctctgcctctgttcttttaatattattctacatttaaactaccccttagcttaaacacattatattcaccaaggcacaactctctatgagggcaattttgccctacaagggacatttggtagcatacagagacattttgattgttacaaaatggaagaaggaatactagcttctagtaaacagaggacagatattctgctaaacatcctaaatgcaaggatagagccccatgacaaagaattaccaagtccaaaatgtcagtagagtgaagattgagaagcacagccaaggcaaataccaactgtgaacagtcaagtcctacttgagtccttggttataagtggttatctggatgatccaaaatatgcttatatcaatt

SEQ ID NO: 266314 - DNA, 480 bp, Homo sapiens
gtttggagctgggcataatggtacacacctctagtcccaggaactcaggaggccaaggcaggaggattgtttgaggctgacctgggcagcatagtcagaccctgtctcaaaaaaaacaaaaatcaggtttggaataggtttctgaagtacaatggacatgacttagtgaccaattgttgcaggtggggaaggggagaagactgtgaaggatgtcagaagcttttagttttaaaaactgtctagatagtgataccattcatagagatcaggactaatacgttcacagtacatgataaatttaggttgattacatttgatatattttcaagacatctatgagtatatatctaagagataaaccacaagatgtacctggaattcgggaagaaagtaaacaagtaaacatttagaattgattagctcacagatagttgaagctatggaagcagaatgagatcttccaggaagaatgcagagaat

SEQ ID NO: 266315 - DNA, 421 bp, Homo sapiens
cttcatccaactttggttgctgttcttcatgctcaggaattctgcaactgctgtagcttttgctgttgttatgtctgtaggtatggactcatttctaccattctggaatgaaacattatttcaagggaagcttctcattgtaaaaggtccacacattcagaaggaaactgggagtacattttctcataggcctggagcattaactgactatgcatctttcccctcagtgttgtcatcatgttgtaaggggatgagtcatggacaacattttcacacacatacgtgaggtccattgaccagtctttaggacaactagaaatcttttctttctttgttttaaaaaggaagacaagtcaagatacagcaaataaaaatgctcagcacatttgctgaaatcttagcaaaatcaaattactagtaa

SEQ ID NO: 266316 - DNA, 566 bp, Homo sapiens
ctggttggtatcttttgtttctgcaagaaagctaaaacaataactgccattaagcactgactgaaaccaaggcttatttctaggtttggtcctaaagaggtgggagaatccagttacatggcctttgaccaggaaatgaatgaaatccctactagtttaatgaatgagtgtttgtaactccagtatcaaccatggggcaggagcccaccactgtcagtatgaggtcttaggggctgaaggacaaagtgaagaaagtaagtagagttgcttgagagggaaagagtgaatgaggacaaggctggggattggtggagaggaagcagcagatagggtgagagagaaaatgaacctaccattcaaatgaacctgaaatgtaaactccctctcacacacatacaaaaaaaaaaaaaaaaacccacagagaaatttaatactagggaggatttccacaaactcaaccatcagaagataaactcacttcagattgaaatggaaataaatgagcaaacgtcttgaaaataaatgtgtttagaattttctaagagagaatggaagaacaaaaatgg

SEQ ID NO: 266317 - DNA, 433 bp, Homo sapiens
gtcagcaggggtgggacaatcagtatactctaatgcttcatgttatagaatccctttgttgttcaaacagatattgtaattagagcatacttttaaacttcatagggcagcgattcataaagtttttcaaaaatccaaaacaaatactttgtttctcaaatgttgagattatttttttactttgtagttttacatcactgtatacagtggtttcaaaaatgaaatggaagttgttttattggttggaaatacgcattgtatattaagatctaattttagttttaacaacctcacctattcgaaactttaaagactagaggaattttatgtaagtgaaatagctacagatttatcctttttgtatatatgtatcattgtaatttgataggtgagtctctcatttagggagaaagcatttttctccctaggtgca

SEQ ID NO: 266318 - DNA, 352 bp, Homo sapiens
aaaagctaaagggaacaaaaaaaagattctggatggactttgcaaccataaatggtaaaactaaccctgttccactgccagctagaagaacagccgagtaaggttttgatttacaggaacagctcagcaagggccttgtagagagcttcatgcctgctataaaaatgtgattagctataaaacagagagctttaacaagagcatttaagcataggcaacagacctgctcaaaaataaacaaaaacagatattgctgcctgagtgtctaacccaacttcataaagatcaggtttaggagaatttttttaggcttgtgatataattaataactttttacttttagagtcgaaaa

SEQ ID NO: 266319 - DNA, 626 bp, Homo sapiens
agtgaatcaacaaatttttataagatactaactatatgtaagctcccagtagaagacacttcagatttaccttcctatatcttttctcatttttccataatcacaaatccccatttctggatagtcctattggaactcaactaaaatcttacttttcctagtctcccctgcaatggatgtggctgcatgactaaattctgcctattgagatctaagcagaaatattgtgcagtgcttacattttttaaaaaaatcatgaaaatgaaggagatgcacccttcttatcgcttctctccatcctattacctgaggcatgatgatgtgatgactggagccctttcagccatcttggaccatgaggaggatagctgtaccctgggaataacataatagtgactgggagggagctggctccttgacaactttgtcaagcctccacgccaatcctggattgctcatttccaaaattattttgtgtaagctgctgttttatttaagccactattatctaggttttactgttatatgccactaattctgatactattgatacaataataccattgcagtttaataaattctgatactattgatacaataccattgcaatttaataaactatattg

SEQ ID NO: 266320 - DNA, 448 bp, Homo sapiens
tttttttttggattttggaatactggcatattcctaatgaacccaagcttaaacacaaaattcatttgtttcatatataccttatatgaaacaactgaatttttataaatgattttatagtctgatggtaattttatacaatagtcttaataattttgtgcatggaacaatgtgttaagtacttaagtgtggaattttccacttctggcatcatgtcagtgtacaaaaaccttcagattttacagccctttagattttggactttgggattagggatgctctatctgtggtgccagatctctccttgcatctgctcttttaagtccagccttcgaccatgtggttccaacatatcatactgttccttacttttcatttccttcctaagtgacagagtagatcagcttaggtccaattaatgtccagatgaggtgaaagactcgctgct

SEQ ID NO: 266321 - DNA, 228 bp, Homo sapiens
atgtccaaggtggggctgcagggcctctttgctgctgccaccactcagggcccaggctgccagtagtgtcctctcagcagtggcttccttgatcatcaggacattgggaaggtgaacatggtgaattacgcactgctttctacccagaagggtcacatgtcattcctgctcaaatttcattgaccaaaaagagctacataacccaaatcctaccaggtgccccaaagg

SEQ ID NO: 266322 - DNA, 229 bp, Homo sapiens
cattcaaataaggtatgtagattaaagttttgtagcaatgctaatttcctggtttagataattataccatggttatagaagattttaacatttggggaagctgggtgaaggatatacaggaactcttggtttttgcaacttttctgtaggtttaatattattccaaaatttaaaaagttaattgcagcagttttaaataagtgaaaattccatgtactcctatcagtat

SEQ ID NO: 266323 - DNA, 239 bp, Homo sapiens
agaagatggagttgaggatgatggtgatcatgagcactgggacggggcagccctgggagctggaaggagcccctgccatattaaaaggagtatgatgtcccagtcaaaggagctgagaaccctgttctctcctctgagctggtcaagccccattgggggttccatctgggaatgtctctttgacagggacatggacactggagtgggggttggaaaccatgttctaagagaatgatctg

SEQ ID NO: 266324 - DNA, 327 bp, Homo sapiens
cctgggacgtgggggaaatagggagatgtttggtgtctgttaggaagaatgaataagctctggagagctaatgtacagcatagtgactatagttaatagaaccgtattatatacttgaaatttgtgaagagagtagatgttaaatgttttcactaacaacaacaacaaagataattgtgaggtggtggatatattaacttgattgtggtactcatttcacagtgtatacatatgtcaaaacatcatgttgcatactgtagatatataccatttttgtcaatcattcctcaataaagcaggaaaaattattgcattttccacatcacc

SEQ ID NO: 266325 - DNA, 548 bp, Homo sapiens
cttgctaaatattcagattcttgggcccctccttagacctacaagatctgggtctctgggcaaagcatgggaatctgtgttttaacttgctgcccagagatttctgttgcaccccttccctccacccgatcccagggctctggtcctggttcaggctttattgtgttcagctgtgctagaataaacacctttttaatggatcctccttcaatcctataacctgattctccttcaatcacctcagccgaatgacatctctcagaaatcttccctgactgtccaggcggaattaatggttcacttccctgttcctctataccttgagcatccctctacaattgaatgctccttcattccatttcattgcaccagcatgtatcgagggtctactgttatctatcgctgaagagaatgattgcaaaaaacttgaatgaacatggaaaatgctgatgatcagatttccattgaaaagaaaggtgtgctccttggggtgggggtgttgttgtaattgtcagaaaatgtttaataaaagaaacagaaataacaat

SEQ ID NO: 266326 - DNA, 356 bp, Homo sapiens
catatcatctaaggtggccctgaccaccaaggtggcctgacctaaggtcacctgaccagtagacccccccatttctggtttgtttccttcatcccacgacgatgtcatatgtgtttacagcactgttcccagccccagaatgtctagggtggggctcagctaagttcccaggagaaccccaatacccagcaccgtgcagggctcagagaggccctcaggagggatctgttgaattaatggggatacatcagtggacaaatcgaagtctcccgccctcctggagcctacattcccacagggggaaacacactgtaggcaaacaaaataaatactaataaattaatgaaagaataaaa

SEQ ID NO: 266327 - DNA, 427 bp, Homo sapiens
tgtggtgccctgcctggtgctatgttagcaagaaggcggcgccccgtttgatgggagctcagtagtctgtggggcacttgtggctctgaggccttgcctctgcctgccgcctgctgctgttgtccatgcgtaggcacagggactctgtgccagcttccctgtgtttactgctctcagctggaaactgtgggctccctggaggtggaaaccatgacggatgtctcagaaatccctgcctctgggacgagcgctggtgcacgtgtggccacagggtggcagcctcgcgacaccggatgggcgcttgtcagggagggacacccggggcggggagcctttccagagacctctgcagggctgcgtgccaagtgcacgttttattttattctagacactcgtccttgcgttgaggagcacccaggaccgcaca

SEQ ID NO: 266328 - DNA, 346 bp, Homo sapiens
gaatgaaactggatcctcatctctcaccttatgcaaaaatcaactcaagatgtatctaggacttaaatctaagacctgaatctataataaaaattctagaatattgtaagaatccttttagagattgtcttaggcaaggatttcatgaccaagagcccaaaagcaaatacaatagaaacaaagataaatagctgggacttaattaaactaaaaagcttttgcacaacaaaaggaacagtcaacagagtgaacagacaacccacaggatgggaggaaaatctttacaatctatacatctgacaaaggactaatacccagaaggtacaatgaactcaaacaaatcaac

SEQ ID NO: 266329 - DNA, 430 bp, Homo sapiens
attggttataccttccagtgctgacccctccggcacacagctgagggcacagcaccagctcagggcctcatggccatgtccccaccttcaaatcagtcttcctacctccacgctctttcttatccaatgtgccttatgtactgccgtaagggttaccttgcttctttctttttgtcctgcctctcctgtgttcacaagctgtgggtggctcttcattgcattcagaagaaagcacaagtatttaagcctcacatttgaagttctcaacactgtgaccttatcaaactttccaggtttccttccagcacaactttttctcaactgctactcctatccccatgcctaatttgcttgctgaccaatttaataattacctttctctggtttacctttaagaggttctgtcttgctacaattgccttttctacct

SEQ ID NO: 266330 - DNA, 415 bp, Homo sapiens
cgctgctttataattaagcatttaagttcaatatttagtttcctcagaatagtaagagttgcgtttgacacccttttaaatttttttctgattatacagtaatacatgtttattaaaattctagcatttgccaaggcatagtggcttgcacctgtaaccttaacactttgggaagctgaggtgcgaggatcacttgagcccaggagttcgagagcagcctgggcaacatagtgggaccctgcctctacaaaaaaaaaaatttttaattagctggatgtggtggtgcacacttgtggtcccggctactcaggtggctgaggcaggaggattgcttgagcccaagaagtcaaggctgcagtgaaccatgattgtgccaaggcactctagcctgggtaacaaagtgagaccctgtctc

SEQ ID NO: 266331 - DNA, 390 bp, Homo sapiens
cagtgacggagttcagtaaatatttgatgcatgaatcagtgaagacctgtcaaaaaagggcacgggaggctatcagggacttatcacaaccttcccgcgacccaacccctttagcctccaactgtcaattatctgtgctccaaagggcatggagatacacagaaaaatttctcccattgtagtcttcgtagtaactgctcgtttttaacaaagtaccccgtaggctatgaaccctggtgggaagaccagtctctctgagcagactgtaaaacttctggggagcaaggactgtgtttggttcactcttgtatctccagctcctccagtgacttcgtacatagtaggggctccataattatctgtggaatgaataaataaagaggaatggta

SEQ ID NO: 266332 - DNA, 271 bp, Homo sapiens
gagacacaatcctgacttgaaatcaagccaaggaatcatttcatgactattttggccatatctacaatattcttgcagggaagtaattaaaaattactttcataagactgaaatgaaattggggccttggaggggtggcaggagataacctgaaaactgcttggggatgggtgagcataaagtataaagcataacacaattctaggaggtaccatttatgttttattctatgaatgtccagcagtactgatgaagggcgagagagaagaag

SEQ ID NO: 266333 - DNA, 565 bp, Homo sapiens
cctcttttgttttccttacttttttccttccatctcttttcttctctttactggcatttatttattaaacatttgcatagcacttaatatgtagtaagcactgttttaagcactgtaaagtattaatttatttaattctaatagcaaccctatgagataggtattatttatatcatccacattttaaatctgagatggaaacattgacttaagaaacatgtccaaggccatggagcttgcatttggactcaggcatctggtcccagaatctgtgcttctcccactatgatattctgcttcttatttattctgctctccctgaagatgcacataatggaaatgaggtctcttcactgcatctctccatattgatttatgttctccagtttaaatttaattttgggggtgcttaccccagtgagttagcctgctttggtgcagagacaaaccaacctcgaatctccgtagctgactgcgaacacgtatttcttggccacttacatgccagcagtcataaatcacccgtggaggctctgttctatttctcttctcattctggcgggaa

SEQ ID NO: 266334 - DNA, 214 bp, Homo sapiens
gtggatatgtaaactgagccagagagtggtcaagcatcttctctggagacgaccccagaattctgctttttctactcggcttacaggacattttcttgggtcaatttctgtttctaaggtctgtctggtaggtgaaactgacttatttggaaaggagagcaaggtgtctggaaataaacaatagaatttattaaaaacatcgtgactatgaata

SEQ ID NO: 266335 - DNA, 423 bp, Homo sapiens
gtggttttgttttcagtaatatattcaaacaatattcctcacagtttggcatatataaccctggtgttgtgtaagatagtttcaggtagcactttttaatttttatagtaatgtatttactttattatgtatgacattataactagcatattgagccttatttcatgggtagtgttgcctaggatatacagtaatattttaaataatttacattacaagtagacatgatgaaaattggaaagtgatatgagaatgacttcagttttggaaacaataatttaagaagttcctgcactgcaggaataataatttgcagagggtacagaaatattttggaagatatctgcttgcaggtttagaatttaattctaggccagcatgaagcaacacattcattaaatagtctttgaagcattggtcatc

SEQ ID NO: 266336 - DNA, 447 bp, Homo sapiens
ctaaaaagctaggctgagcttatattcatatctggctctctggcagcacccctgatcaacaagcctcactaagtttaccaagggatttgtaaatgcagagaagccatttttttttctaaagatggtcaagtaattcatcattcaccatatatttatggagtacctattttatgctaggcatagggatagagggaataagaccaacacagagcctacttacagagcttgcaagcagtcaaggaaacaaataggttgagagagaaggactaaggaggatttactctaattaaggtgattatggtttactttggaaggctttgctgaggtgacattttatttgataactaggaagaataggctttaaccatgtgaaattaagaagagggggaaaaaagcagtgtgtgcatagaccacaaggtgaaaaattgtgctgtgttcaaggaactg

SEQ ID NO: 266337 - DNA, 321 bp, Homo sapiens
catggcctccgaaatagtgcctgacatggaagaagccagatgacactgcaagacttcatggataggaaatttctgggagaggcaaaacggtagagacaaaaagtagatccgtggttccctgaggatgcgggtggggattgactgccaggggtacagtgaagctttctggactgatgtggctgccttagaactggattttggtgatggttgcttaattatacgtttactaaaagccatccaatgccatctttaccatgggtcaactgtatattcattataatcctataaagctgcttttaataaaatcattgtccaaatatt

SEQ ID NO: 266338 - DNA, 593 bp, Homo sapiens
cagatgaaaaagaagactaatatcatagcaataagtgagaaatgttagcctttgaatacagctgaggtcattgtgccaacctttcatcttataagaaatgatgggtccagagaacttaagggtcaggacccaggtagttaacagcagaagctgaattagcaggtggggatttgacttccaatttaatgctctctgtcctatactaagcctgtttccatctctattacttctcaaaaaatctgtcagatagttagcaaatgttcaatgacctaaggtgagtgtgtgagactaatgcactgctggaaggtgagggaagctaaatcctcaagtgacagacgacggggttgctctgtcacaaacgctccatgggtgttgtgggcaggcaggaaggaagagttgaagaaaggggagaattaagcacatcagcaggtaagcccttcctctgcagtacgctggaagtgaacagtgtctcaaacctaagaagacaatttttccacaattgccccaggcttctcagcagggcagctggagagaacaggataaagaagaatttctaaaatttttgggaaaggatttgaaggcataccaccaaa

SEQ ID NO: 266339 - DNA, 432 bp, Homo sapiens
attcaagggggtgggcttagcccctgctcagacacttgcggcacatccagccagcctagggaaatttcatctacttctccacagtccccatcccctcttcggcacccccatctcccacctaggtcctaacggcatgtggcactcagcgagctccaactctcgctggacagtgggagttgtaaagggagcaaggtgcccctgcttgtccctggcagagagagcccagggaccccacgaggggtctagaggtctagaaacaggcatgcaccatctcctttctgggccagggccggagggacacacacaaggcagctgagggggtcgaggtcaccttcaggccacttggggatggtctggagcctgtcctgctgtgtccctcagccccctccgtgcctggaactggccctaccccagcagccccccattcctaga

SEQ ID NO: 266340 - DNA, 423 bp, Homo sapiens
aagagatctttctgaagaaaagaaaaagaatttcaaatgaatcttctaatccttcatatgtttttctacaactagtcctaacttttttaacccttttagttttattttgaaataaaatgagtaattggcatttagagtccttgctgaataaaacttcatgcctttgtgtatctctgagaagcagacaacaatctgatggagaaagtaaaagccatcggctcctcattaacttgagttgcaggcttattattgtgcgaggcactctttgacatttacagtcttcaagttaaaccctggttttaactttttcttttcctgagcattttgtttgatagtataatgttttctgatgctttatctacaaatccttggttaatgtcttcttgtttaaaaagatgtgcatattttttatggaaaattttg

SEQ ID NO: 266341 - DNA, 377 bp, Homo sapiens
cagccttctgagtagctgggataacaggcatgcaccaccacacctggcttttgtaataccctttataataaaccagtaatggaaccagattggaccatggatatctctgcctgcaaaacctcttgtgctttcaagttgaaggtaacggaaaagtatcagagtaactttaaaagtgtacaatgtctatgtaagcacaacaagaaagcaacttaactgcctgcagcatcagaccaagttcctggatcataagtttgaaagcagcttctagatgacgcttgtggatatttggaataatatctactaatttctgttaagcagctatgtttcaactccacttcaataaaaacagccaaatttctctcctggaaattcttaaa

SEQ ID NO: 266342 - DNA, 285 bp, Homo sapiens
gtgccccgaacgccggccctgcgaagagttaaatacgaactacaaacctggtgtacaatgtctatgtaagcacaacaagaaagcaacttaactgcctgcagcatcagaccaagttcctggatcataagtttgaaagcagcttctagatgacgcttgtggatatttggaataatatctactaatttctgttaagcagctatgtttcaactccacttcaataaaaacagatgcggccaatcccttcctttttttacactaattcaattagaaaaaagaatttggcac

SEQ ID NO: 266343 - DNA, 253 bp, Homo sapiens
  misc_feature (68)..(68): n is a, c, g, or t
aaggtgcattgatgaggatgacgctctccaggccaactaacccaaaaagctgcatggcactgtcttgnacttcacaggaaacaacttaactgcctgcagcatcagaccaagttcctggatcataagtttgaaagcagcttctagatgacgcttgtggatatttggaataatatctactaatttctgttaagcagctatgtttcaactccacttcaataaaaacagccaaatttctctcctggaaattcttaaa

SEQ ID NO: 266344 - DNA, 372 bp, Homo sapiens
gcacaaaccagatggcccagcttatgcccagcaactcagggtcaccagatcttgtctcatcaagacactttcagcccaccacccaaacctgtagcccacatgaagagggcaataatcctggacactgtgaaaagtaaaagcattacatccaaagaggcatccccaggatggagcagaaataagaaaacataatgaagacacaattttgcaatcacttctgcctatattccatggcctacaaaccactcaaatagctccacatgtaagagaagccaggatgtgctgtcctccagagcatccagaaagagataatgggactgataagtccttggccattttctagtaaaatctattaatttagtcaaaagattt

SEQ ID NO: 266345 - DNA, 383 bp, Homo sapiens
tgccatcatgcctggctaatttttgtatttttagtagagacagggtttcaccatgttggtcaggcttgtctcaaactcctgaccttgtgatccacccgtcttggcctcccaaagttatgggattataggtgtaagccactgtgcctagccttaggtcttttctttggttaaatttaattttattatttttgatgccattgtaaattgggattgttttattttcttattgttcattgatagtatgtagaaatataagtaattatgggggacaataatttttttgaaacttttttttatatcctggggattacccctgtaagtatatttggctaaactcaaatgtcaaagggtaaggcaagaatttataaatgtgtaaatttgac

SEQ ID NO: 266346 - DNA, 308 bp, Homo sapiens
gcctcatgcttctgatgcttcctgctccggctccactatagcagatgcgagcaggagtaggagagagggaggtaagagtcagaagcttatgttggactagagcttttcccagtgacatctgggaagggccagtctagaaggtgaaatctccgatggcagacaaactttactccccactgaaccctcgcgggtgcctaatcctccctgtggaacacattagacattcatcagacaccaggaaacctttccttctttcccagaacaaagagagacgtgggcgtttccatcaagatcaacacccttggtgt

SEQ ID NO: 266347 - DNA, 436 bp, Homo sapiens
caagactcagcttcatgaaaaaatttttagggaattcttttctgtaatatcttatgatggattataggtggtttcaaatagattatcaggagagtgaatgatgggaagtatgtaaagacactgtggccaggcacagtggctcacacctgtaatcccagcaatttaggaggtggaggtgggaggatcacctgaggttaggagttcgagaccagcctggcccactaatgtcatctctactaaatgacatctctactaaatgtcatctctactaaaaatacaaaaattagccaggcatggtggtggatgcctgtaattccagctacccgggaggctgaggcaggagaatcgcttgaacttgggaggcggaggctgcagtgagcagagatcacacctctgcactccattctgggcaacagagcagagactctgtctcaaa

SEQ ID NO: 266348 - DNA, 320 bp, Homo sapiens
ccagagacaaaatctcactctgttgcctgggctagagtgcagtggcatgatcacggctcactgtaacttcaaacctctgggctcaggaacccttctgcctcaacctcccaagtagctaggactataggtgtgtgccaccatgcctacctaatttttttttttttagttgcccaggctggaatgcagtgaagtgatctcagctcactgcaacctctgcctcccaggagaatcgcttgaacttgggaggcggaggctgcagtgagcagagatcacacctctgcactccattctgggcaacagagcagagactctgtctcaaa

SEQ ID NO: 266349 - DNA, 257 bp, Homo sapiens
gcaagacacactggccagaaagtccctgcccactgaagtcaccgtgcggcgccgtaggaaatcacagtgtaccgtgtgtgcatgtgcggccgtggtggcattggagacaggttgtgggtaaacagacggggcccccacacggttcctcatggcccagctccttccagttctggggctctcgcaagccttcgtggccaggcctgacagtgagcgacctctgaggccatgacacagatctaagtgctctgggtgtggag

SEQ ID NO: 266350 - DNA, 524 bp, Homo sapiens
ctccaagaggattcttttcaggttttccaacaggtaaaggaagaaggtgacagaggcagcgacttcctcaaatgtccttccagctggccaaactcaacctgtcaagatctctcccccataagctgtgtgtgtgtggtgtgtgtattgtgtacattgtatgtatgtatgtatgtatgtatgtatgtatgtatgtatgggacaggtactctaggagtgaggggttcaggcagatgacaggctcagacctcaaggagtagccaggtttgtgggggaaatttatatataaacagaaaaatgtagtgatgtgcacatgctatcagtacatggaagtagccatccatttatttatttatttattttctttttagagatggatgggggtctctcggtcttttgcccatgctggagtgtagtggtggaatccttgctcagtgcagcctcaaacttctgggctcaaataatcctgccacctcagcctttggactataaactacatgccactgtgcccagttaatctttaaaat

SEQ ID NO: 266351 - DNA, 465 bp, Homo sapiens
ttttgtatttttagtagagacagggtttcactatgttggccaggctggtctcaaactcctgacctcaagtgatccacccgcctcggtctcccaaagtgctgggattataggcatgagccaccacgcctggcctttgtttgttctttttacatcagaatacctttagttttcctaagtagtgtttgtatcaagtgcagtgactggtgccttcagcctgatagtgctatataagttacctaatctacaatataaaattcaattgatttttttggtagcatagcatcctatatatttgttcatgttctcattcccagcccttctttggaaatcaactccagctattctgaaactgtgaggggtgaaggtaatttaattctctgggctctaattcctaaaggagagtttgcagtatgttattactgatgacatgtaggatatgatctcagcataaggcttagtatgtga

SEQ ID NO: 266352 - DNA, 508 bp, Homo sapiens
ttatgcgatatatagtagtcaaatatagaagataatgcaaaacaatttaaagtgattgtagcagtttgctgtattctacagcagcagattgtagcagattactgtattctacagcagcagcatgtgagattgccagttgctcaaattcgtgccaatacttggtattttttatcttttaattttagacattctggagagtgtgtagtaatttttcatcttggaaaattacattaaattagtatccatttctctaattttgataacattttcataagtttattgttattagatattttctttattttgaagtgcttattgtccattttacattgggtcatctgttattgaattgtaaacattccttgaatatttaaatatgagtgcttggtcagtttttgtcacaaatatcctcttttttcactttttgcccttttattattctgaaaatgccaattgattaaaattaattttactattgttcaatatatcatgctttgttttttaaaaa

SEQ ID NO: 266353 - DNA, 475 bp, Homo sapiens
gataaatcagtagaaacttttcaagcagaaatttatagaaaaaaagagaaaaacgtaatatccaagaacttctgggcaaattcaaaagttgtaacatatgcacaattggaatgccaagaggagaaaaagaaaagaaaaaatatttgaagcaagagtggtggagaacattataaaattggtgacaattaagaaaccatagatccaggaagccaataagcaccctccctttttataattaaaaaaaatgtaaaaacaggacataggataaataacaaaaaatgacacctatgcatggcaaagtcaaactgcagaaagaaaaagaaaaaaaaaaggaaattctgagaaaaaaacaaaaacaaaaaaacaaccttacctatggaggaataaggaaagataaacattacaggaaagttgtccttggcagaagtcctgtcagcaagaagagtgtgggatgaactatatcaagagtagaaag

SEQ ID NO: 266354 - DNA, 592 bp, Homo sapiens
aaaaaacaaacctaatatatatataaatataaaatatataattatatgtatgtatatatgtaatatataacatataaatacatatataatgtaatatatattttatataaacatatacatatacgtgtatataaacaaacatgtatatacacacacacatatctacatacgcacacatgcttcttaggttaggtttccccagaagtataccctaagacatagattcggggtgaatatttcatttagttggtgatcccaggaagtactggtataaagtaaatacacagcatgttaataagcaggctaatgttggaacaactacagctcagtactgttagggtggatattgtagtttgagttgtcccaatagaggaatggagaaggcagggtattgatccactagctcttaactgccaatgattgaaggtccatcctctgggggggtataaatgcttagcactcccagcttgccctgtgtctgcctagcatgttctggtaagcagagagttgcacatgctcaattactaccctggaatggtggatgccagtggccacacctggacactaacacctactacatatgccatctagc

SEQ ID NO: 266355 - DNA, 510 bp, Homo sapiens
ctctcagtttcctactaatacctaagaaaacccagcaaagggtgggagctcacactgtgccccacagaatggacatgaaaggtaaagtgtcgcctgtccctgctgtgtccccacctaaaagcaggggaggatcttggaccccatcgtgcctccagttctgaaatacaacattggtaccagccagaaatgggcatcatcctccactgtgtgcttctgacttctgaggctgccaaagcattgtgatgtctcttgtcattctccaggcaggaagggaggaaatagtaaaaagcctgcaggggaataagaaaaatgtgtaaagaaacaaaagctataatgctgggatgaagaataaagaaaaggactcttatgagagaatatttgtattcatggtcatttttcaaacccctcccaggagtcaccaaatttgaaggttattatagtcagttaataccacacacacacacacaccacattcatagcactatgctgaatggtttggattagatttgg

SEQ ID NO: 266356 - DNA, 326 bp, Homo sapiens
cactcttgctttggctaacttctgctcatgctgtccgtttcttcctcttttcctcatagaggatttccccgacattcccctgccccacgatctgaatcaggctccccttactatgcactctcaatgcctctattttttttccagagcatttatcacactttgtaattagggatcattttgaggaattctttgcttgatgtctgtctctcctagtagactgtaatttaatttcatggggttagaaatttcatttgtgtctccagtatctagcacaatgcctgacacatagtaggctcaataaatatttacttaataaatggatacaa

SEQ ID NO: 266357 - DNA, 1319 bp, Homo sapiens
cagagcttggatttggactctgagcctatgctcttgacatccatacctaggaggaaacaaagagatgtgagacacgtttgatgttaatagtaaagtaaatttgattttctgaaatactccaaaagcttaccaaagttacagtctcagttttgtatttccttattagtggacctctagcacaaactctctgtggctgagtttttctctctgcacaatttgtatgatatatcccgtccatcaaattcatgaggattagaagggttcacacaaactgattaaaaatgaggattcactataatctaagagaaatatagttcaacgctttccaactcctaatttttttagtttttgtttttttataacaaatggattaaatgaaaagtaggggcaagctattaattgattgctaatttctccataggagaattagaaaactcagtaaagacgccattgtaatgtgagcttttcttccaggttccattattgtgtagagacctttttattctaaaataattctatgtaatgacagtaataacaactaaatctgtttaaatgttttatgcatgtttcatttaattctcacaaaaactctaggagcaggtgtcctattattatttccattttatagatgaggaaattgaggcacagagaggttaaagaatttacccatggtggtctggttccaccgtccaccttgttcctcagaacactatgggataattctgatttgcagtgttctctggtttttagaagcaatgggatatgatggaaaggaccaggaatcgggacgggatgcttgagtatcaccaccgtgtaagaagtctcactggaggttttgataaaatattaagggaggaacatggggtcctgtagagaaggaggcaccaaaggttagaatatggggtgtcagattagactgaagtaagctgtaaggtgttgggtttaagtagatgagctggagtcagtgtctgaagatctccctgggataggatggcacagacaaaggctgaatgggagtcaaggggttgcgggtcaggaacaatgcagtgtatgagatcacaaaccaagggagaccagcgtttagaatcagggctgagtgtggcctgagttctgatgtggggaaggacatagtggtatattttcccttagattagggccagaccatgcagacactatgaccggccctgaaatgcaccaggtggttaggtcctctgggatatttgtagagatccagcagttggaatttcctgtatagagttgcccatgtaaaattatccctgtttatacacatttgtggattggtcgtgttttaaatatat

SEQ ID NO: 266358 - DNA, 1066 bp, Homo sapiens
agcatatagtgaggacacagtatacatttgctagatgaatgaagcagatttctcaaatgtaataatttatatggaaaagagtaaaacttgtgcatattaactttgaaactggaatgttttcaggttcctgttagtggtattttatcttacttgcccaggttgagcttaaagtaaccaaaagtttagtagcaagttgctttctgcttggcagatcgctgttgctgctgctgctagtggtggtgggagtttgaaggataggaggagtatatattcaaagcccagactatagtattatgtcttctgaaaaattgaaaggaaactttctgcccctatagggatgacataatcagtatcatggcaaggagctctgggccccacatggtcttgtgacccatgggaagtccagaatgcatttgctgagagtgagcgttgttgaacactgcagtattcattgaaaggatcatatggttgactttctggaggtctttaagaacagtagattatcttatgtctgaagagacttgagtgcatgtcttccctgtcctcgctcatgcacttttttttagatgatacttgctttgtcattttgttaccatataggttctttttgtttatatttagattatcaaattaaatactattgtaattaatacataataaattagactatttaattttgactttttactttattattggctatgtttaagtgcctgtattgaacatcatctctctttttcttatgtagaattattttctgagttgagaaacttcttgagtttttgaaaaatggttggatgtcttctctttgtccctaaagttttgcttaacacccttgtctctgggatataagaccctggcactcagtttacgctcagtaaatgttcattgaatgaatgacagctcccctttctttcagactaacaggtgggcaatttgtgatcttttcttttgagagaaatgcatattttacatttactaccctagttagtattcctttccctgattttatagtatatttaaaggggatagcatgtaatttagcatttaactcattcttttttta

SEQ ID NO: 266359 - DNA, 617 bp, Homo sapiens
agcatatagtgaggacacagtatacatttgctagatgaatgaagcagatttctcaaatgtaataatttatatggaaaagagtaaaacttgtgcatattaactttgaaactggaatgttttcaggttcctgttagtggtattttatcttacttgcccaggttgagcttaaagtaaccaaaagtttagtagcaagttgctttctgcttggcagatcgctgttgctgctgctgctagtggtggtgggagtttgaaggataggaggagtatatattcaaagcccagactatagtattatgtcttctgaaaaattgaaaggaaactttctgcccctatagggatgacataatcagtatcatggcaaggagctctgggccccacatggtcttgtgacccatgggaagtccagaatgcatttgctgagagtgagcgttgttgaacactgcagtattcattgaaaggatcatatggttgactttctggaggtctttaagaacagtagattatcttatgtctgaagagacttgagtgcatgtcttccctgtcctcgctcatgccatcggatacatggacagatacacagatgcacacacggatacactgtcctcactacatggcat

SEQ ID NO: 266360 - DNA, 338 bp, Homo sapiens
tacttactgtttaaaattttgagttgaagccatcagttgtatttgttcatgtaagcgcagaagataaacatgaagttctgtagggtatgatgtataaacatggcagttgaaggcatggtgagcagtgaattccatttcagagtgccttgatgcaggatggaaccatatctatacttgagaaattaggcaacaacccatgatgacaaaaatctttggtggtagaagatgaatagagagtttgtggcgactatatttcacatttgagcatctacaacatactacatcctatgtgtctgaggccatgttgaaataaaatagaataatgcagaatgttaaac

SEQ ID NO: 266361 - DNA, 679 bp, Homo sapiens
gtaacacagaaaggaaaaccaacagcatgggcctcttggcttggaggaagccaaagtgcacatttcttcagtcatactacatctgggttcatctagccacctctgccatgctgcccaagttcaaccccaatgagatcagtcatatacctgccaggtgccctggtggaaaactgggtaccatgtctgccctagcccttaagatcaaccctctggacctgtctccaaaataagttggtgatgacattcccaaggccacaggtcaccagaagagtcaaaggattacaatgaaactgaccattcagaacagacaggctcagactgaggtggtactttctgcctctgccgtgagcatcaaagccctcaaggaaccagagacagaaagaagcaaaacaatcaagcacagtggaaatgccatttttcatgacactgtcaagattgcatgacagatgcagcaccaatccttagtcacagaactctctgggacccgtaaagagatcttggagactgcccagtctgtgagctccaatgttgatgggcgccagcctcctgacatcatagatgacatcaaatcaacagtggtgcaagtaaatatccagctagctatgaactacgaaggaaaaaatttcaataaaggatcatttgacaactaaaaataaaaacacagcatggttatgacata

SEQ ID NO: 266362 - DNA, 545 bp, Homo sapiens
ttttagaagctgactccaccagagacccgattcttgaacttttaatgcacatttggaaatccacgtgtttagttggcttagattataaactgcaggagaacaagaagtgtatcaattatgttccagtttctaggatgtactcttctagtggatccacaagcaaaagggaagaggggagtgtgaaggcagagaaaataaagcacagcctatgaaattatagcttgcagttttgccagaatgatgctctattaatgctcagtgcctcttaacttctcacttaaaacccaattgggaaaaatcaccaactaatagaggctattccgtatacttactagaatatatgagttttacaaattggaatgataggcattgatattgacacatctggagaaggagtgatcaaagagaagtggccctggagctctccccatgaaaagattaaatttttaagaagatgctgctcacctaaaacttatcaataaagtcaactatagtttccaattggtaaatcattgtatgaaaaaacaataaaactatgaaataaa

SEQ ID NO: 266363 - DNA, 511 bp, Homo sapiens
ttttagaagctgactccaccagagacccgattcttgaacttttaatgcacatttggaaatccacgtgtttagttggcttagattataaactgcaggagaacaagaagtgtatcaattatgttccagtttctaggatgtagggagtgtgaaggcagagaaaataaagcacagcctatgaaattatagcttgcagttttgccagaatgatgctctattaatgctcagtgcctcttaacttctcacttaaaacccaattgggaaaaatcaccaactaatagaggctattccgtatacttactagaatatatgagttttacaaattggaatgataggcattgatattgacacatctggagaaggagtgatcaaagagaagtggccctggagctctccccatgaaaagattaaatttttaagaagatgctgctcacctaaaacttatcaataaagtcaactatagtttccaattggtaaatcattgtatgaaaaaacaataaaactatgaaataaa

SEQ ID NO: 266364 - DNA, 448 bp, Homo sapiens
aaaaagaatgtggatctttttcactgggaaaaaaagtcgccatgtatcatcttaatcatgttttcctgggatataatctatacgtgacgcccatttaagccttcattgcatctatgcacgtggtttgctttcctcttgtgtgaaatagtgttggaccacacgggtttgggccacagcccaggaagacacaatcctgaacgtcataatcccaaatgttgaagtcccataagatctaaatctgtacagtctaaaatcctgaaaattacaatcctaaaaaaacaaaattctcaaaatacaattctggaaaaaaattattaacacattctttaagaagcatttattgggcagcacatggtggctcatgcctttaatcccagcacctttggaggccgaggcgggtggatcacaaagtcaggagatggagaccatcctggctaacacggtgaaa

SEQ ID NO: 266365 - DNA, 393 bp, Homo sapiens
tggagcttccaggctcaggacagctgcctcattccttcctactaagaaatctgtatctgctggttagagctatcaaactgtagaagacttagttcatgtcccagcaagtgtcccctaaaatgaccttcttgtttttccctcttctgagaaaagcatgcaggaataagaacttctatggtagagagtacttgctcttccgctctcagatggcttggttgactgatgaactgatgccctgaggaggggaaagatccagggaagagcctgtgctgggtgactctgtgttttcccagctgtgctgtttgtgtgcaaatagtggaacccccaagaaatcaggtgatagacagacagacactgcctaataaaattgtctgaatttaaataggatttaaa

SEQ ID NO: 266366 - DNA, 276 bp, Homo sapiens
ctacattggccagtctggtctcaaactcctgacctcaagtgatctgcctgcctcagccttccaaagtgctgggattacaggcataagccactgcacccagcctgttttgtttcaattgcaaataagaattgcacatatttatggggtacctagggatgttttgatacatatgcacaggttgtatgtgcaacctcacagatgacgttccccatgaaacgctctgagatggattgagcaagcaggatatttattaagcagtgcccttgaaggccaggc

SEQ ID NO: 266367 - DNA, 421 bp, Homo sapiens
ggtaagtattacagttgaggtgcaagaaaactgccctgggaatcttaaatttgcctgttaagatcaacatttgagaatgttttacattggaagcaattttgtttttcaagaatgaagagggatttgtggcctgttgcagtggcacatgcctgtaatcccaacactttgagattccaaggcgggtggatcacttgaggtcaggagtttgagaccagcatggccaacatggtggtgaaaccccatctctactaaacacaaaaaaaattagccgggtgtgctggcacatgcctgtgataccagctacttgggaggctgaggcacgagaatcgctggaccctgggaggtggaggttgcagtgagccgagatcgcatcactgcactccagcctggttgacagagcaagacactgtctcaaaaaaaa

SEQ ID NO: 266368 - DNA, 470 bp, Homo sapiens
gcccaaatgaggacttgtgtgaaggcagtttatgtgagacatgatgagggagtggaggcgagggagtgggcgatgcaacagggaaggagggaaaaccaaagaggtcagttgtcaagatccctggtgtgggggaggccagcttgatgccactgggagcagcacagagaactgtcagcagaggggtcagggactggagcatatattaatattaactgcccctcggctcccgttggttgagcgtcaccccagggggcattaattccccgcacttctggactgtttttgagctcaggccaagctgtctcctgtgggattagagaagttctgggcagaaagcataggaacgtgcggcatgctcttgaaatgacaggtggtcagcctgcagtcatcatctgagctcgtgtatgatcagctgccacaggtatggccgagatcagagacgggctgaagggatgtgacagctccaccag

SEQ ID NO: 266369 - DNA, 257 bp, Homo sapiens
gcccactccaggatgagagtactgaggtgccataaaagaccaacaggcaagatgttggagggttcaggagctgccaaggttgtgttcatgctgacctgttggcatagcgtacagcagtgccagctgctctgctaaaccgaggagctgagatgctgtgttgatttctacatgttccaggcaaatacttcctgaggattgtcaggatttacataatggattggccctgggaccactgagccagcatctatctttgacag

SEQ ID NO: 266370 - DNA, 711 bp, Homo sapiens
ggcggtgtttcttatttactgtcagcaaactgacacataagaaaacaaatgaaatcaacagcattagtaggtctaaaataatatggttatcaatgtttagctttccacttcctcccattggtcaccttactccacagcaagaatgactgtcagaacatgtgcagtaaaaggcactttcaagtcatgctatgtgttgtacaaaaagaattattaaaaagaaaaatgtaccagtcagatctctagatgtttgtcttcttcatttagagaaatattatctggaagaaaatgtcctaagtttctcaaagtcagaaattatttctatgtagtccagacctgactccagataaatataaaagacggcaaagaaaggaagaaaaatgggtcatagaaatagaaaaagcatagtaacatggtagatttaaccttaaatatatcaataattatgaaacctttaataggttaaagtatgcaagtttaaaaggttgtcagaatggattaaaaaaacaaaatccaactatatgttgtttacaagaaacacatctaacatacaaggacaccaaactcttaaagataaaagaatgaaaaaagatgtatgatgcaaaaactaacctaaagaaaatcaatatagccatattaatattaaaatacactttaagaaaataaacaagaatctttataaaagttttataaagttattaataataactcaaa

SEQ ID NO: 266371 - DNA, 560 bp, Homo sapiens
agagaggggagaataaaatttcagtgcaattgtaatttcctttaattcatgcaaatcttagcatattttatcatattcataaactttccttgggattcagttaattcctaagttgccaccttagatactatattgtaaggccctggaaactactactgtaaacgtgtttcagaaacaatctaacacataactcctactttaaaattattcagttttgtctaagagaaatatatagtcctttgagatatggcttttggcctccagggcaaaggttttatgacagtaattttttaggcttaaggaaatcagatgtggctttcttagaacaacagtgttttgggtgatgaaaagacgagttagtgggtgcagcgcaccagcatggcacatgtatacgtatgttactaacctgcacaatgtgcacatgtaccctaaaacttaaagtgtaataaaaaaaaaaatcaaagtgaaaaaaaaaaaatcaaagtcctttggagcccaattccttctttgtgaattatgtaatacatgcataggaatggaatcctagcatgagcagtaaa

SEQ ID NO: 266372 - DNA, 231 bp, Homo sapiens
ttttctgtcagtcactgggagcctcagccttcagatgtttgaccttcatgcagaagtctctagctatctatcttctgtcctacgccagcctaatgctttgtttcctgttcccaatgtatacagaccaatactacacaggctttagacccctcagctaggcagacatccccagggcccataccagccaacctcagagtttgtttacctttctagcttaatgagcactatcct

SEQ ID NO: 266373 - DNA, 555 bp, Homo sapiens
cacaatttgtccacagggaaattccttatgggcctcaagatctttaccttaaaacagttgtgctgaatttcaccctggcaatgtaaactgatagcttatcttcacaggtgcaggacaatagacagaactcaaagtcatccctctgctcacctgagacaaatgtgtatctgattgctgcttctgccctattgtttatgcaaaaatgcagatccactgagccagactaaggcatcagtgtgactattcctttactccccactccatgtaaattgtgtattcagtgaaaggctgatcaaagaccccaaaaaatgcagccttttgtctcttatctacctatgacctggaagcccccacttcgagttgtcccgcctttccagactgaaccagtgtacaccttacacgtattgattgatgtctcatgtctccccaaaatgtataaaaccaagctgtgcaccgaccacctttagcatgtgttgtcagaacctcctgaggctgtatcatgtcatgagtgtgtgctcaaccttggcaaaataaactttctaaattgattgagac

SEQ ID NO: 266374 - DNA, 615 bp, Homo sapiens
cttacttatatatcaaagtttccctcataatgtctgctctgtgtcactatgtaccctcccctgtcctccattccccacaccaagagtattatgagtattaaatgccacgtgggcaggttccccaggcaatgagggggtgggcctgtcaaatgcaggccatgcagaatgccgcagggcgggagacgggtgagccaagggagccgagagttccagataacagagtgcacagcaaatgccatggcccgcgtccagcaaccaggagaaacagaactgctgagctcagaataggccaaggccgcgtctgctagcagggagcaagggcacagcctgctgtctggcctcttctgccccatccctccaccgggacatggcccagatgagaaagagctgccagacggcaagtcaagcgtggggcgggagaggacaacgttttatgcaagagtggattctcggagcctctgcactctccatcagggctgctggcatggaaaacacagagaaaccatcacctaggacttgattgaactactggacttcccagaagagtccaatttaaagcaaagaggtccagagaaaaaagcattctagtgacatttttatatatttaaaaactgg

SEQ ID NO: 266375 - DNA, 513 bp, Homo sapiens
gcatgccattatgcctggctaattttttgtatttttagcagagatggggtttcgccatgttggccaaactggcctcaaacttctggcctcaggtgatccagccgtctcagatcaaagtgctgggattccaggcatgagccaccactcacagctcgctaaggccttttgccaagacaaattagctcttagagaaccacaggattcctcttgtaatgtattacaaactaaagtcttacctgctcttgaagagtagaaaacatgaaaaagttctgttagcccttagaataattaaaaattcataagctctgaaataaatacaggtaataaaggtaataaaattattgcctatgacaaaacaaaagtttaaattggcgtttgtaaactctgcacgaaagccaggtttctcactactagaaaaagaaaaaaagttataaataagccaagaattccagaatgaatcctgtggtgccaaatatatgttaactacaaggaataacagtgaccttacactgg

SEQ ID NO: 266376 - DNA, 473 bp, Homo sapiens
taggaaagcagatactctaatccagacagtccagttgtctgaactgtctaaatttaaaaattcttttgtttcctttttaaaaaaatacaataagctgaacatgtttaaaaggtacaatttgataaattttgacatatatatatacacctgtgagaatattaccaaactcaagataatgcagatattcatcactcccaaaagtttccaagggcctggttggaatcccttcctttcattcctcaccaatccttcccccatcttatgctcaggcaatctgatttgctttctgtaacaataaattggttgtcaccttctagaattttaagtaaatggaactatacagtatgtgcaatttgtcttgcttttgtcacttagcataataattttgagattcatcaatggtatgtttgttaatggctatgtctttatattgatagatagtatttccttgcacaaatttttccactgtttgt

SEQ ID NO: 266377 - DNA, 350 bp, Homo sapiens
acccattagtaatttatcaaaagagcaaatgtcattatgcaggaaactaagggaactattttgcatttgatttctggttttgataacattactattgatttagtattctccagcatgacatgggctagacaaaacatatcactgtatttttgaactgtcaatcacaaatgatccaaagctttccaaaagagtagaaggtccatgtcacagcctgaaaactgcattttatctgaaattcctcagtcccaaaatatttagtaaggatctgctttattactattaaaaatatttttaaatgaagaaatctcaatagttacttccaaaaagtaagggaatcatgtaattagtac

SEQ ID NO: 266378 - DNA, 449 bp, Homo sapiens
aaacacaacattgattttggagtcagacaacctaagttcaaatctagcctttgctaattactggctgaaatcattgagaaatctacttaacctgcctgagacctcagtttccttatttgtaaatggaatagtagtgcctcaagtgagataaggtgtcccgttcagagcatccagactaatggacagttaaggaaacgacccaacagctattagggctcccttgctattgccaagcttgttttcatgctgcaggtggtactgaattatataacacatgcgcagctaaacaagcaaagaccctgcatgttcaccacattctctctcctctgaactctgaggttaataccagttgtcaaactggcttacgggaaggcactatacctgctcacagcttggctaagaatcaaagagatgtttgttttgaaagaataaaatcctttacaccaaaa

SEQ ID NO: 266379 - DNA, 510 bp, Homo sapiens
tttttctcatcaaggtgctgtgagcatttggcagggtaattcttcactatgtgggtctgtttctagaatagcaagcattcagcatccctgagcctggcatttgaaatgccagtagcaccctccaatcattgtgacaatcagtgtccccacatattttcaaaagctcttgtggtaagtgttgccccttcccctccccgtgacaaacctgccccttatacctttactgatgtttctagcctatgtggcctacaaaaaaagtgtgaagggggaaaagctatgttgttcacattaaaaagagataggttttcatttctgctttttgtaagccattgctgaagttaaatttaattgcaaaatactaaactcttgaaccaattctaggacaggtttgcagaatgattttcttaaaggacctttataatctattaccctgaaatgaatttctgagacttaacattcgtaacactagggcatgattaaatatatgggagcaagattgggaacattttg

SEQ ID NO: 266380 - DNA, 614 bp, Homo sapiens
gaattgtaaaggggatacattgtaaagcataaaaataagatggaggcagggcacattggctcacacctataatcccagcactttgggaggccgagttgggtggatcatctgaggttgagagttcgagaccagcctagccaacatggggaaaccccgtctctactaaaaatacaaaattagccaggcatggtggtgcatccctgtaatcccagctactcaggaggctgaggcaggagaatcgcttgaaccaacctgggaggcggaggttgtggtgagccgagatcacggcattgcactccagcctgggcaacaagagtgaaattccatctcgtatggaaataccagtgcaagcttgcaatctctgtttccacttgatgcattaatgctggtatgcaggctttctcttcccctaatagctttctagggccagtgtggtatttctgtatctgtggactaaaattatgatgctgaagatttctagttgttcagttatataaatgaatgaagtcaaaataggtaagactgatttgggaagataaatgctaacagaacctctctcttcctctgtgaatagatttttttcatgctgccccacccctgcaagcttgtaatct

SEQ ID NO: 266381 - DNA, 354 bp, Homo sapiens
ttggttcttcccgtaaaaaaaccttttgtgtatattgcaaatggaactatttgaacaattttcagttttgaacacaaatgatcataattataatattgcatatccaaataaacattacattaagaaaaataagtaactacaggtaggcttattattggtattatcaatatttttgtaagtaataggtggactagagcaataaaaaataataatgtttgaactaggaatatgtattttcatgcttataactataattaaaatgctgcttaataactggaagcctttccataagttcaagcctcacatcctttgttaataagatgaggataatgatgccatcttgttttatagatt

SEQ ID NO: 266382 - DNA, 231 bp, Homo sapiens
ttaaaattcagaactgggacaaaacttccacccacttttacgtacttatgctctttgcatctcaattcataggtggttttttagtaattaaagggaaccagttgctgggcatgctggctcatgcttgtaatcccagctacttgggaagctgagttgggatgattgcttgagcccagcatttgagactaatctgggcaacatagtgagatcctgtcttaaaaaataaacaaa

SEQ ID NO: 266383 - DNA, 950 bp, Homo sapiens
  misc_feature (289)..(289): n is a, c, g, or t
  misc_feature (365)..(365): n is a, c, g, or t
  misc_feature (526)..(526): n is a, c, g, or t
  misc_feature (632)..(632): n is a, c, g, or t
  misc_feature (645)..(645): n is a, c, g, or t
cattttatgtttgctttaaactttttttcaaggaaaaaatagaaaagtatatccattggccctgtgtgcttcttatacgttattgtcagatcttcatctgctaggtgcctggatttttagtgtagagattacctgtcattctttgtttgcctatagccagtgaacttcaggaataattttttcttgtcttgaaacaagaatgaagctatatagataatggtcaccattatttagacatcaaagattaatatgaaaatattttctgataaacttagaaccatttttgttntatatcaggttttctagataaatatttcaactttaattagacttttcaaatgtccattattttgtgattttaaaangcagtgttacgtaaaaactattaatggaagagtcagagaagtcgttatatgaaagtaaaaactttgaggtaacttgctaatatttttgtatattttattgcaatattcttgcatttttaaagttggggttcttttacaaattttgtatcctactattttancattaatacatgtacatttcttcatttttctaaaatgatgcataagtgtatttcttaacggctaatatcccattgatagaaagtaatttaaccattcctctattgnacatttagattgntccctaattatgtgtgtctattatatatttaaactggagagacatgtatttgcaccaaaggtaggttatatgatctacttacgcaatgtgcaagtggaaaatggatggcagaaggattgttcttccttccttgtttgtttgtaccagaactcttcattgtttacatacattttagccttggtgccattttcagaagctttatttgtctcacttacttttttggtttggataagacttaaatataaaatccatctgtgaagcatattgtatattcacattgaaggctaaaaacccttttttaatta

SEQ ID NO: 266384 - DNA, 661 bp, Homo sapiens
tgaaaagaccgcttacctgatttgaaattggtgagatgttccttgggctggttggtctgaggacccgaggtcataggtagatctcttcacagagtgagggtgaggacagggtactggtctcccgaaggtgtcctcctgtcctgggtcttcggcaccaaaagtcacacccgtccgtgtgagaccaccaacaggctttgtgtgagcagcaaggctatttatttcacttgggttcaagtgggctgagtccaaaaagagagttagcaaagggagatggggtggggcagttttataggagttgagtaggtagtcgaagatttcagttaaagggggttgctctcttgcaggcaggggcaggagtcacaaggtgcttggtgggtagctctggggacttattgtccaggagaaggaatgtcacaaggtaatgtcattgggtaaggcaggaatgagccattttcacttcttttgtggttcttcagttgcctcaggccatctggatgtatacgtgcaggcttgggctcagaggcctgacacgcacctcttgaatcagtctatgcccagagatttagtcaaataaagagcaatgtatcccataaagccttggtgaagaatgtctgtctccctgtagcttttcttgaagtctgtagggacgttagagggcaaa

SEQ ID NO: 266385 - DNA, 650 bp, Homo sapiens
ctgagggaggggagaatcttgacaggacttggatccaccgggcactgtgcttggtgtgggccttggctctgtctggagaaacacgaaggaagtttttccaaaagggcaaggttgtccagaccagtggaactgtccagagagccaccatctgggccatgccacattcctcaaaggcagtgaaaccactttgcacatgtgccttgctggggtaacccaggacatcctatgcaatctctattgcttgaggggagtggcttgagtgcacttctgctccctttccataggcccaggggcagaggaagggcagagaggtgaactggaaaaatctgcaggtggttaaggctagggaaacctaaatgagcctttggagaaagggatactcttgcagactgaagctgagctcctgaagctccctctcttccccagccagactgcaacagataccagagcggcccctggctcctgctgagggccgggtcagccagaggtgggggacagcgtgtccagctggggcagatccagcctcagcctctacctcagacttatgtgccagggaagaaaccatgtctttacccttttgtatctacctctcaaccctttgcccagcataggtgctaaataaaagagcctgttggctaaaagaaccctct

SEQ ID NO: 266386 - DNA, 853 bp, Homo sapiens
ctgagggaggggagaatcttgacaggacttggatccaccgggcactgtgcttggtgtgggccttggctctgtctggagaaacacgaaggaagtttttccaaaagggcaaggttgtccagaccagtggaactgtccagagagccaccatctgggccatgccacattcctcaaaggcagtgaaaccactttgcacatgtgccttgctggggtaacccaggacatcctatgcaatctctattgcttgaggggctggagaagggaggcgcctcatgcttccctattccaaaccccttccgcatagccctgtgcctccctccttccccgcagcacttgggcttcactcacctgcttgcccccatgttcttcctggagagaggagtgattcagaccaggccccggcctgacctccacgcagggcgctttccttcctttgttctcagcttctccgcttgagtggcttgagtgcacttctgctccctttccataggcccaggggcagaggaagggcagagaggtgaactggaaaaatctgcaggtggttaaggctagggaaacctaaatgagcctttggagaaagggatactcttgcagactgaagctgagctcctgaagctccctctcttccccagccagactgcaacagataccagagcggcccctggctcctgctgagggccgggtcagccagaggtgggggacagcgtgtccagctggggcagatccagcctcagcctctacctcagacttatgtgccagggaagaaaccatgtctttacccttttgtatctacctctcaaccctttgcccagcataggtgctaaataaaagagcctgttggctaaaagaaccctct

SEQ ID NO: 266387 - DNA, 629 bp, Homo sapiens
cacttatgggaaaaatgatgtagtatgggagtggtgtctgggcatactggagcccccagttgcccttgccctggttcatgggatgaggatttcataagaacaaaggaagcatgccaaagatacctaaagatgctgccctcttcttatccactgagtgttcagctcttcaactggggtgtcatttagaaagaagctcgccattttccctgtcccaacgccaaacactgggttaatattttgtctgagaaaacaagcaagccgtagaacagagaacttcaaaggccactttaaagaaaggaacttcatttgtagcaaaatgcaaaaaagtcaggcactggagcactctcaggaggacatctaggtaagaagctagcttgttggaaagaaatggagaaatagacagcttgcaagagcccttctggtgtcagaacaaatctcaaacactgacctttggaactacaccttcaagtagcctaaatttgattggattagtgtgtggaacaatttatgccctgggatattactgtaaacagtagagcaatgagccagcaattgctggagcttaacatctggtgtggtaaggagagataaagagagtcctgtcgaacctagaataactctgggcttac

SEQ ID NO: 266388 - DNA, 698 bp, Homo sapiens
gtcgagcctcagacatcatagagtcctgtctccttatctcttggctctggatagagaaaggttagtatagaacgtgtcagacatggttttccccaaagaagggatttttggcacacaccaaataacatctcactataccaattaacgaaatcagtttgtgctttgtggaagattgccagttgttactcaaaatgtctttcccttcttccataataatagtgttttacttgcatatgatcatccagaataaaagctccacttaccagcttcacttgcagctagatgtgcccttgtggctaagtttttgccaatataatgtgagtggaagtgatacatgccatttctggatgaaatgcttaagaggaaattcatttccctcttttctcccctcctgtggactgacactgagatttgactcagctccagccctgtaggtgaagatagtacccctaggagatataggagcaacaagatagaaggaacctgggtctttgaatgaccttgtggagtacaactgtctcactaggctcaccattctagattaccagtactgttatgtatgatactatacatttttaataaaaatttttattgagatcattgtagatccacatgccattgtaagaaataatacagagagctcctgcatactctttgctcagtttccccaaatgataacattttgcaaaactgtagtg

SEQ ID NO: 266389 - DNA, 169 bp, Homo sapiens
cacaaacatgcagacatatatatgtttacatgtagatagctgtttatacagaagggtaagtccaatttctgttatttaaaaatggccaggtgtggtggctcacacctgtaatcccagcaccttgggaggcttaggtgggcagatcacctggggtcaggaactcctgatg

SEQ ID NO: 266390 - DNA, 457 bp, Homo sapiens
ggtttcctcagctgtaaaatggaaacagtgatagaatttacatcacatagctgctgtgaggattaaatgaggttggtacctgacacacaaatgcctaaaaacgatagttattgatataaaaagaacaaccataatatgaccttctttttacctgtcatgttttcaatcagggacagctcttatttgaggtcttgccatgtgatatggacaacgataacatgaacaggtaccaatatttagaggtcctaggatgtctcaggtgctgttctgcgcatcttgttcacaagcactgtctcatcagtcctcacagcagcctgtgaggggaaggaagtgttgcacgatgtaggaagtggtggagctgggattcaaaccaaacatgcgtgacttcaaatgcttgctcttgaccacgtggaacgtcagcagccttcaaaattctttgaactgaacccacagtaaa

SEQ ID NO: 266391 - DNA, 557 bp, Homo sapiens
actatgttataagatatttttgtcacccaagaatgcttagcaggctgagtaaagctggcaagtgtgataggaatagagggaggggtggtaataatcttagctataatacacaaggtgttgctacattcccttaataggtagaatctcatttaatccttaacagtaatgctatgagataggcattattggtatcctcattcttgagatgaagaaatggagacgcagagagactgagtaacttgcccaaagttaaacagctggtatgtgacacacagaacctatatttgaacttgttctggttccacagctcatggtcttaaccactaccctgcagttagcttgaaacactagtttttaagtaaaggacaaagcattaggatgagtccagctttaagggcttaaagaaatgcacagtggaagaaaaatcccagctaaaggcattggaagtgctagctggagggtggttgaatgataccttacgtgatctcaacataattaggaaagaaaaaggagttgtgtgagggtgaagatatggccagggtatatctgatttgagt

SEQ ID NO: 266392 - DNA, 713 bp, Homo sapiens
caatgcaaacaatttctgaaccattgaaatgcaaatgaatttcctgtgaaaaagatcccattaattattgtcctgtggatattgattacttttaaatggattagcaagtttatttcagtatttctgattgtctatatagttgtgatctttggattctcctttgaaatagtttttaaaatatcttattggttccttcattggtaactgagttccttaaagtatttgaaccgatagatgtgtatgtgtttaggtaaaaatgagaatatttatctggagctgttggaactgtattttattctactttttgaatttgagtaaataggcagtatgttcttatttcccaagtgtataccataggaatagttttaggagctgaaaaatgtaacaagaagttattacccatgaaatcaatgaaggagataataaaaaagcatccaccaatcctaaatcaacaagcatggtaagggacattgtcatgagtccatgtgagtgaacacgccacaccttggctgctctctctctctgtgtgggataaagggtcacaatattaaagggtctcttggtgtgtgggcccaccccggagtatcctcatctacaaagcataaaatagggtccctccttgctgacacacggggtgtgttggggacttaatgacccttgtgaataagaaatactacgacaaaaaatgtatatttacatccctttcaatgact

SEQ ID NO: 266393 - DNA, 1063 bp, Homo sapiens
catcagccgcgaggctcgacccccagcccccttcttccatcacaaacaagtggttaggaagaagaagctggccccagcccttcccgctccgagccggcggcctcgtcttttgggtctgggggcgtggggaaggagaaggccgcgcgaccccagtcccatctccagaattcagcaccctgctctcggctcccgctagccccgggcctcgcggcgccctggtcatcgagatgtcctcggagggcgccgcccgcgccgcgagaaagatggcgcccgccgagcaactgcgccaccagccctggcgacaggccaggcccagcgccatcttagcgccttccaaccgcacccccccacccaatatcccgcatttggggcgactcgggggggcgcgaacagcataacgcccgcgcgcactcggccaaaaatgcgccgtcccagccgcacatctcttctggccggcgcggcgaacagcgcgggcctcgcaggagacgcccggctgggccgccggtcctccgcgcggctgggggctcggccggacgcggccgcggatcctcggcggtgcttcgaaaaggcagcgaggcggctgggaaggggcagtcccgcggcaggtgcgcgccgccgccgcgggctcggagcgggagcgggaacggggccggggcgactcgcctgccccgagctctccccgccgcaccccggacctgctctcctcgccgcggccgcccgcagatgcggcgggaatggggaagccaggatgaaaaataaaccccgtctccgccgcctccctccccaccctctcccctccccctccccagacgcggggtccattttgccgagaagaaagaaaatgtgattcacaccctagagcttccgagagagaaaagaaacgagggggggaaaacagaggggaggagattggaaaagcttatttttcttcctcgcccgccgtcactccaggccctccctgccccctgctcgcggccccgccgcgccgtcttcccctcgccgagccctgctccctccttcccggctcccggcggctccggggggcggaaaacacactcacact

SEQ ID NO: 266394 - DNA, 466 bp, Homo sapiens
caaagcctaagaagaaggttggaaagaggacgtttctcaccatcaaagtgcccacagtttcctcttaagtcaggcactatgcctgactaaacaagatggctggcaaacccactatgataaagatacagtattattggcatttaaggttcagctgaaaggtgtcagcatttttctggtagtggtactttgccttccaaactgtaacaactggatattgatcacaataagtattttacagctaattgaaagccagatgtgatacccatagtttattatctaaaaattacttgcactcctaaattcagtaaattaatcagaatgggaatattctgagctaaatgttaccatcaccctgaatctgagcaacaatattgtatgtcttattgtatgtcttataaggtagaaaaataaaaatctcaatacctactgtttaaataaaaatctcaatacctactgttaaaaaaaa

SEQ ID NO: 266395 - DNA, 427 bp, Homo sapiens
tttgcttctcaccagcccatggatttttaaaaactcaagttgaaccatattctgtatttttctatttttcaatgactttatttcttaaagaaatttaacaatctgatacatgttaatacatcttgatctaccttgttttttttttaaaactcatctacacaatattccagggtgttgatgtctcccttatttctctctcttctctctctctctctctctctctctctctctctctctgtctctctctcatcttccttttgccacccaggctggaatgtagtggtgtgatcacagctcactacagcctggattcagcacacaggaatcagagtcagaatcagaaaaaaaacaaggaggaagctgaggttccaagaggtcacccaggcagctgcgaccagaacggtcccccgcgtctctgggcgcccca

SEQ ID NO: 266396 - DNA, 220 bp, Homo sapiens
gcgctcttattcatttagtggaatcttttatgccagtcctggcaccaccactttgttgagtgatcctgggaagatgcttctctgcgcctgtttcctcatctgcaataaaaagattcttaccgttttgctaagaatcaagtgagcttatttgcataaattgcttagaatagttcctggccgagagtaggtgatcaataaatattagctattattactgctt

SEQ ID NO: 266397 - DNA, 527 bp, Homo sapiens
atgtaccacattatactacaggtattttagccaaattgcttttgatttttgaaatgtgcagattgcctttgttgcaggaactgttggcatgaggatgcatatttgaggcttgttaaggacgctcgttacacaggagagagtgatggaattgttctagctgcgcagggaagcacagaggcgaatgtgactatcagctcccggagcttccgtatcatttcttacgtacggcacaggacctgaggactcagggtcccctccacctgcttctgaaagaaaagtcttcatttggctgtagttgaataacctcccctcgccgagactcttctgtatggcgaggctcgaagccgtttccaattaacctttcccaagaatgcataggggcccagccaagtgggccatttgtgattcttttctttagctgcttttactgtgaccatctcagataagagaaatgaattggagcaattctacagtgagtcttaggatggattttctgttacgaataaaatttgctgtcaagctaaaaa

SEQ ID NO: 266398 - DNA, 685 bp, Homo sapiens
accagcctgaccaatatggtgaaaccccatctctactaaaaatacaaaaattagtcaggcgtggtggcgtgtgcctgtaatctcagctactcaggaggctgaggcaggaaaatcgctggaacccgggaggcaaagattgcagtgagccgagatcgtgccactgcactccatctcacaaaaaaacaaaaacaaaacaaaacctaacactactgcattggctgagacataccaaagggcgttagaactagtctcagtcaggagttaatccagagactcaaactttctcatcagtatttgtcttattcttggcgttttgtttggctacattttcacctactgaatgcagcagtgggaaacatggctgcaagctgctccagcctccttccagctctctgactccaaattctcaaggcaaaaggaccttcctatttggctttccctgaaaacaactccagatgctggcaggcccagcctggatatttactcttccctagactaatcactttgactaaagaggcaactttacttgtaaaaacctttgtggcttttggccaggcatggtgactcacgcctgtaattccagcactctgggaggccgaggtgggtgaattggcagctcaaccaaaacctcaaagaatgagggagaggagtggctgggcgaaggggtgtctgctctaagaagggg

SEQ ID NO: 266399 - DNA, 215 bp, Homo sapiens
agcagacttaccactggtctggccctttgaacatgcttaaagctgctgttattgcctgggcccttggagggaggtctttctctggatggtattatataagagactctggtcttgaaagccactccctaattttctttgggccttcatttcctcacctgtgaagtgaaggggtcaggagagacccccttctatctctgaaatgatataaagggagg

SEQ ID NO: 266400 - DNA, 874 bp, Homo sapiens
tcttcttggtccaaactggcctctgccaggaagaaaggagctacttccttatcataattgtggtggcccttcttctggcaattaaaggatatggagaggggtgtgtatatttctactcagcaactaagcatgagcaaccactcaagagcaaatgggggataaatccatcatctgtactttgtattacacaccagttttcccaacctccctgccaaccacccccccccccgcccccccgcaatagaaatctacactggggctgggcgcagtgactcacgcttataatgctagcactttgggaggctcaggcgggtggatcacttgatcaggagttcgagactggcctggccaacatggtgaaaccctgtctctactaaaaatccaaaaattagccaggcatgctggcgtgtgcctgtaatcccagctacccaggaggctgaggcaggagaatcgctgggacctaggagtcggaggctgcagtgagccgagattgcgccattgcactccagcttgggtgacagagcgagactccgcctcaaaaaaaaagaagaaaaaagataaaaaaagaaatccacactggttttccagtttcctgtgacctcaagaaatttctatcctccaaagagggatgtgccccttccacaggtattgaccctggggctttcttgaagagtgccctcgttgggtctgccagttaacagaagccctgtgccacccgagttagctcagttctctcctgtgacgggtaaagggagccgagactagaggacttgctggggctcacaggccattatgaatgtgccttttgggtgaggggagtgaaaagggcccttagggaaacaagaagcaaagggtcagtgatgtggcctcaggg

SEQ ID NO: 266401 - DNA, 636 bp, Homo sapiens
ctattaatatgtctgttgacatctgtatagcccctctataggaacatctattcaagtctctcagctgtttttaaattgcactgtctgctttttgaaaattaatttgtggcctttctttttatttaacctcatgattactgaatatgattctgttttggagtaactccctgtggctaaattaatgcttttgtacccagaagttcatgaacagtgtaaaagtttactgattttgtcaaggagacgaaatgtacatcagcagtacaataagttaatgacctagttctgcataacgagaagggtcgctcactgaattgttcattaaatgaaactctagctcattctcctctaccttctctctcaccattcaagtttgcagaatggttcctcccattggccatgggtcctatgaagatgtgagatcattttttattctctactactctggtgcactgtcactgtgatgatggatatgttctaattggagaggctgaagtcacctgcagaaattcacattggtcagctccagcccctcaatgtaaaggttaactccaaacttactgagggcccttgctaagaaggtagagcctctatgaaaggtcaaacaagagtctcctcctagacaaaggcagcacttag

SEQ ID NO: 266402 - DNA, 410 bp, Homo sapiens
acctcttaaatttatggctcagaataggatctgtcttgggaaacttctgtgcatgcttgagaagatggcttgttctgctctggttgggtggagtgtttgataaatgttaatgagatcaagttggttggttgtgttgttcaggtgtattatatccttgttgattgtgtgcctacttgtatcaattgttggggagaggggattgaaatctgctgcatttgtggttctctttctctttgcaattttaccactttttgctttatgtattatattagatacataaatgttcaaggttattacatcctgttgattaattaaccactttatttatgtagcattcttttgagtaatgcatgcatggtatatcttattccatccttttacttataacgtatttgcatctttatatctaa

SEQ ID NO: 266403 - DNA, 1145 bp, Homo sapiens
caggaaggtgaagaagacatgaggctaggtgtagccttgggtgaggggagggcatccctggtcctttgaaggttctccccaccccagcacacgccacccctctgttctctcttcagctccacctgccactgatcctgcaacttgcttctttctattctctgcctctgtttagaaatcttcacgcaccactgaggcttcttgacttgccccttgtgacttgaaaccccagctcagatacaaattttcacctgccagccctgcctcctcctttctcccttttcctagacacaggactctgacaacttcatcctccttgtttagatgacttcccagtttccagtccccatttctccttctatcacttttcataaaaaaactcaggaaatatttgacatatcttccatttcaaattcttccattttatgcagatatcttgcccttcctataagctctcctcaaagctcaggaaacctggtctgctctcctgcatttagggaaggagaacccctgccaagacctttgctcactgcctgagaccccttccttagagagcacctcctttgctggtcagacatggagcctgcagttggtcacagatgatactgctttatttcagtttttacagttgtcttcttaagattcccgtcttataaatggagtacagggaacctcaagtagtgaagtggaaatccatgtgtaaggctttgtggcttcaggtaccagtggctaaggtagttttaaagactttgttgattttagaaaaagtccatcttccatcccctacatggcagttaatacccttctatatggtaaaaccttagagattaccttaatctgctaggaacagaagcaagaaaaaccatggcgtaaacacccccagagtttttgttcatttgtttcatctttcttgataaagcccgaaggtagcccattcagggctgttgtggttggttgctccatcatgtcatcaatagcccatatcttttcttttttatcttccttagtgtaacaccaaactacctctctgatagctggtgttcatgaaatattttaccttcaaatgattgtacctttttatttgctttagagttctgaaataaaatgaaattccactgtaataaaactgtcaaatgcatggtgtctga

SEQ ID NO: 266404 - DNA, 846 bp, Homo sapiens
tcactcctttatttcccaagctctgttctgcgtagacaatgaaacctcactgagattcttgctggtatggagtgggtggagggattgatgcctaactataatcagggccgacttcctagcagcaacaatacaccagatgacctggaaataggggagggttgtagagtgaagggtgtgttgcagatgggactaggggactagcataaagggactaatgaactggtttgcctgggctgggtggagggcaaggattgccacctattggctgctgaggtaggtaggtctgcattaagcaggatgctcaagagacctggcccaatgcaagatactatctttaaaactatgtcaacatttgcatcttatcagaagatacatgacatttatgtagttacatggtgcttgatttttgagattcattttattcattcttgagagtccatcagcctcaaaatccctaagcgccccaagaccaattcagtgggccataaatgtaaacagaatagtttaagtctggggttaagaccccgggaaggctgggttggggggactgtggaggcaattacagatttttacagatttttgttgatttctatccccttgattataaaagttatgggtatgtattataatttctaaaatgcaaataaatataaagaaaataaatataacccataattccatcactacagataatcattggtaaacttgttggtgtgtttcttttctacccatgtatatcacataagtaggaccatactgtgtatagtgttttgcatccattcttttacctaactttatattgtaaacatttccacatcattaaacatttctccaagaaaacaattt

SEQ ID NO: 266405 - DNA, 263 bp, Homo sapiens
cagtgttgacaagagtttcaaaatctccagagacaccaaagaaatgtgactcaattggaaaaaatggagtttttgacacaatgttagagaaagtagggtatgtagttctcaaaggaaatctgaccaaaccttcctgttttttacaaatgtgatctgcttcctatgtccagggtggacaacactatgatccttagctagagctttcttctcttattctttcaacatgtattcacggggtacacactatgtgccaggctcggtgc

SEQ ID NO: 266406 - DNA, 544 bp, Homo sapiens
cacgaaccccctccagcatgaccctataaagcttccttccagcccctgcctttttggagacagtcccttttctgctgtgctgcccgttgcttccttgcaacatactttccttctaataaatctgcttttttttttttaaaacctatgactgccttggcaaattcctttagcactcatgatccccgctctagtcatcacacctgcaacaggccctgcatcaaaacaggtgactgagctgttccaagtacatcaagcccatccttcagtgccttcaatgcctcctatgactcagattgtgtgtggatccagccatgtgcaagaccctcagcccctgctcgggaagaccttttgactgagcaggcattttctcagctttcttatggtcttaatgtatattatcatgtgtaaattaacataattatgcacatctgtatctcctttagtgaaattcaatggaataaaataaaataagtttgctaaagaaaagcagcacatatttgcattacatttaaacttctgcataattgagaatatatctatgttg

SEQ ID NO: 266407 - DNA, 921 bp, Homo sapiens
  misc_feature (811)..(811): n is a, c, g, or t
ggcttcagttactagctaggctactgagtttagttctcagtttggcaccttgatacctttaggtgtgagtgttcccatttccaggtgaggaactgaggtgcaaagagaagccctgatcccataaaaggacaggaatgctgagttccgccagaccatgcatctcttgctagtaggtgaggcgagtctctaactgattgcagcgtcttctattttccaggtcaagtacttgctgctgtcgatattggggcttgcctttctgagtgaggcggcagctcggaaaatccccaaagtaggacatacttttttccaaaagcctgagagttgcccgcctgtgccaggaggtagtatgaagcttgacattggcatcatcaatgaaaaccagcgcgtttccatgtcacgtaacatcgagagccgctccacctccccctggaattacactgtcacttgggaccccaaccggtacccctcggaagttgtacaggcccagtgtaggaacttgggctgcatcaatgctcaaggaaaggaagacatctccatgaattccgttcccatccagcaagagaccctggtcgtccggaggaagcaccaaggctgctctgtttctttccagttggagaaggtgctggtgactgttggctgcacctgcgtcacccctgtcatccaccatgtgcagtaagaggtgcatatccactcagctgaagaagctgtagaaatgccactccttacccagtgctctgcaacaagtcctgtctgacccccaattccctccacttcacaggactcttaataagacctgcacggatggaaacanaaaatattcacaatgtatgtgtgtatgtactacactttatatttgatatctaaaatgttaggagaaaaattaatatattcagtgctaatataataaagtattaataattt

SEQ ID NO: 266408 - DNA, 737 bp, Homo sapiens
  misc_feature (627)..(627): n is a, c, g, or t
atgacagtgaagaccctgcatggcccagccatggtcaagtacttgctgctgtcgatattggggcttgcctttctgagtgaggcggcagctcggaaaatccccaaagtaggacatacttttttccaaaagcctgagagttgcccgcctgtgccaggaggtagtatgaagcttgacattggcatcatcaatgaaaaccagcgcgtttccatgtcacgtaacatcgagagccgctccacctccccctggaattacactgtcacttgggaccccaaccggtacccctcggaagttgtacaggcccagtgtaggaacttgggctgcatcaatgctcaaggaaaggaagacatctccatgaattccgttcccatccagcaagagaccctggtcgtccggaggaagcaccaaggctgctctgtttctttccagttggagaaggtgctggtgactgttggctgcacctgcgtcacccctgtcatccaccatgtgcagtaagaggtgcatatccactcagctgaagaagctgtagaaatgccactccttacccagtgctctgcaacaagtcctgtctgacccccaattccctccacttcacaggactcttaataagacctgcacggatggaaacanaaaatattcacaatgtatgtgtgtatgtactacactttatatttgatatctaaaatgttaggagaaaaattaatatattcagtgctaatataataaagtattaataattt

SEQ ID NO: 266409 - DNA, 405 bp, Homo sapiens
cttacttctacttcctgcctttcctctgacaggaggattcttctacagccagatgattccttacagatcttggcaccagtggaagcagatgtgggtttctacacttgcaatgccaccaatgccttgggatacgactctgtctccattgccgtcacattagcaggattatgttgtcatactgtactccagtcacacatgctacccccttgcatatctgtttagcaacagtattcctgcccccatgacttcaggctgatctgggaagggacccttagcaggcggctttgcggggaagatcaaagtcaacaatgaagaaggcaatttaaggagccctgggccggattaaagactgatattattaatgcctattttttgtgaataaaacatttgcttttcttctaaaaa

SEQ ID NO: 266410 - DNA, 419 bp, Homo sapiens
gcaagatctcagcggcccagcagctctcagcctcggaggtggtcacccacctggggcagacggtggccctggccagcgggacactgagtgttcttctgcactgtgaggccatcggccacccaaggcctaccatcagctgggccaggaatggagaagaagttcagttcagtgacaggattcttctacagccagatgattccttacagatcttggcaccagtggaagcagatgtgggtttctacacttgcaatgccaccaatgccttgggatacgactctgtctccattgccgtcacattagcaggaaagccactagtgaaaacgtcacgaatgacagtgatcaacacggagaagcctgcagtcacagtcgatataggaagcaccatcaaaacagtgcagggagtgaatgtgacaatcaac

SEQ ID NO: 266411 - DNA, 565 bp, Homo sapiens
tgaactcctgaactcaagtgatccacccaccttggccttccaaagtgctgggtttacaggcatgagccaccaccccagtctggttgacgtttttcacctccttctctttacagcatattcagaaattttaaaccagtaatacgaaatacatatattggttgatttttctgttgtattttaagcatattgactttttaaatcggatcatatttttgcatgcaagtactatggcttttcaaggtcattctgatttgaaacaacacatttcttagtcaattcattggctctttacccccttttaaaattttttattttttatgagatttatttatttacttatttttagtgatggagtctcactgtgttgctcaggctgggctcaagcagttcttctgcctcagcctcctgtgtagctggaactacctaaggatgtgcaccactgtgcccagccagatcttcaccttttccaaaaaaagaaacatctctttccgcggatatcatccaaagaactacaagtactttgggttcatcaccaagcacctcgccgaccacgtgtgccgacatg

SEQ ID NO: 266412 - DNA, 407 bp, Homo sapiens
gttacctgagaagaaacccgtgttttcatgttcatctctttaacatggggcaggtccttaggtacaaaacagatctgaacttcttgctttctgttactcttaatttaactggctaaatcagtaatatgactttgcttttagacagttatactagacagatattttattgagtactctttgaatttagaaaaacaagggtactaaaatatgcccagtgatgtaggaactatgtgcagttggaaggactctttgccaaaactctaaggaatcttgtggattccttacaatgtgtttcataattgctacctgggttacatttgtactaaaatcctttcttcataggaatgatcttagagttaaataattttctattagtcttttaactacctcctctctataaattttta

SEQ ID NO: 266413 - DNA, 554 bp, Homo sapiens
  misc_feature (493)..(493): n is a, c, g, or t
  misc_feature (497)..(497): n is a, c, g, or t
  misc_feature (513)..(513): n is a, c, g, or t
tccaggacccctaagtttctaggccagagctgacggctggtgggtgcagtcagccaggctccagggaaggctgctccaggcagggctgagtcttcacggttcagcttttagaactggccaggttggaattctggctgggggcagacagggagggcaaaccacaaacacttctgcctgatctggctggggaatccacagagaccaccagctgggactggggtgagcctctcagagcccctagcaccagcccaaggctgcatgggctgactgtgtgggcggatgctgcctaagtcatgtgcagagccgtcctgagctgaggcagaactataagacatgaactctgttttcaagacaggtgacaatgacaaacagcaataaaagccacacaccatagctcaggataacaagggctgagatgcgtttggacaatgagaagaaaataaaaattaaaaaaaacagctgattcaccaaatgaagggcacagtcccagctnctanacctgattatccagcnaattccacacctggcggcttactaattgatccaaccgtaca

SEQ ID NO: 266414 - DNA, 402 bp, Homo sapiens
ataccttaaggttagagttatttagcccaattacttggcttgaaataaacaagattgtattgccattttcagatggggaagctgaggaccaaagaggttatgagatgtacctgaagattgtgaattctggccgggtgcagtggctcacgcctgtaatcccagcactttgggaggccgaggcaggatcacctgaggtcaggagttggagaccagcttggccaacatggtgaaacctatctctactaaaaatataaaaattagccatggtggcacgcgcctgtaatcccagttactcgggaggccgaggcaggagaattccttgagcctgggaggcggaggttgcagtgaactgagatcgcaccactgcattctagcctggtaacagagcgagactccatctca

SEQ ID NO: 266415 - DNA, 191 bp, Homo sapiens
  misc_feature (181)..(181): n is a, c, g, or t
  misc_feature (188)..(188): n is a, c, g, or t
ataccttaaggttagagttatttagcccaattacttggcttgaaataaacaagattgtattgccattttcagatggggaagctgaggaccaaagaggttatgagatgtacctgaagattgtgaattctggccgggattataggcatgagccaccatgcctgtccattatttctttatagtngacctanttt

SEQ ID NO: 266416 - DNA, 170 bp, Homo sapiens
tggtattgtactgagtcattgcaatatacaaaagattggcacctggtaaatccatgttgagttcaatttttctgctattaaataaaaaatgttcttcaaatgccctaataatcctttaaaagcatgagctcatcaatagttttttaaaaaggaaaaaaaaaaaaaaactg

SEQ ID NO: 266417 - DNA, 443 bp, Homo sapiens
accccagagggaatttcttatgaaatgtggccacctggagagagacaccaagttcagatgctgttgctgctgcttcttggctgtgttatcctgaacaagggcttaacctctctgagtctgaatatccctctctgaatacaaagtggagataatgatatttaaggaagaaacaactggaggttgagtggcccagagcagccatttttaaatttgtgggtggaaaattcctcctgttcttgggcctgaagtctaagtcccctctggactttcctcacacagttcccattttggaggacacaaatatcctaggccttcatgtgcaggagaggcagggaggaagccaagaaaaggggtaaaaagaagaagaaccatctcccccattttcctctaagctttaaattcttttctttctcattccaacttaaatacatgcaggaagatta

SEQ ID NO: 266418 - DNA, 870 bp, Homo sapiens
cacagcgggtgagtggcacgggataaggctgaggcagacagaggccagattacagagtgccttgccagccagagcttaagctctgggtttatttttcttttaacgagatgccactgacaggttttagcaaggaatagtatggtctaatttctttttcttatttttttaagagacagggtctcactctgtcgcccaggttgtgagctcaagtaagtctcccacctcagcctcccacatagttgggactacaggtatgcaccaccaatcccagataatttttttttttaatttttgtagagatggagtctatgttgcccaggctggtctcaaactcctgagctcaggtgatcttccagcctatgcctctcaaagtgctgggattacaggcatgagccactgtgcctgacctaattcatttctttaaaagatcactctggctgctgtgtgaagaagatattttgggaaagcctgagtgaaatgagggagaccactggagaggccagtgtagcaattcaaacaaggggtgttagaggcttgaactagaacagtgaacttgttgatgggctagatgatgaaggataaaagaatacaactctggaatcattcttaagtttctatttgagcaagcataagacaactttgctatttactgagaagtggaccaactaggaaggaacagattgggaagaagacaaataaaaactgacagttctgttctgacctagccactcagagacatcctgagtgaggatgtcaactaggcagctggtgatctgaggctgccactcagaggaaggggcttgccatggagctataaacatgcaagttggtataaagatggtatccaaagtcaaaggataagatagaata

SEQ ID NO: 266419 - DNA, 467 bp, Homo sapiens
catggggcctatggtgatggatgtcatgaggcccaggaaggagccatcatggtgggaagagttgagagcctgcatgtaagactcagactcgaaccaaacctaagtgcaaataacaaggaaaaaaagcaactccgcgcacctggctggtaccctgcttggaaacaaaccgtacctccccaccctcccatctcaaagctagtagagcctaggggcacaccattcctttggcttccctttagcttgacctgggaatggcgcagttaagcatatcaggaagctgagatgcatccactactcctcacttcccctggcgctgggctcagcttggctgaacttgccgttcctgtctttttagaagagctggttgtgttcccgaagcaggatcgcactgtgccgcctccccaggggtccccagctattgatttttaatatccgtattcaatattgtgtattaaacattgaatcca

SEQ ID NO: 266420 - DNA, 411 bp, Homo sapiens
tttttcccacctcttaaatccaggaactcaaaggagtaaagtgcggctggctggtgacattggacgtggaggaaggtgacaaactgtatataaactgtgtaggaacctcatctggggccagttgccccactcagatctagccagtggttgccatgctggaaacccagccccgaggggtggattttctgctgaccggagggaaagcctcacacgtttccttcaccatgtgttccttgctcaccatgttcatccagcgtttgtgtcatctgtttaaatatgctgtctggggccgggtgcggtggctcatgcctgtaatccagcactttgggaggctgaggcgggtagatcacctgaggtcaggagttcaagaccagcctgaccaacatggtaaaccccgtctctactaaaaat

SEQ ID NO: 266421 - DNA, 1726 bp, Homo sapiens
tttagaatgaatagcccttctgggttttctttttgacaattcttggacttgaggtaaaacaaggaggattgtggccggatttcagatcccaaagccagcctccatcttaggcctttgcctcattgtgccttttaggttttcttacccaccgtctcctgttttgtcttttttttcttttctcctacccctatcttgggacattcagaaactgcctgggtggtttgagaagagacaacccagtttgatctgcaatacaaggatccattcgtaatctctctctcactgatgttattcccccatctgccgtcttggttcatctcaccacagaagggcatttagtcctacccagccatcggctgcgtatgacagcaggatggcacttcccatttctctgtggttagtgctcgagtgaaaacctctttcagctgagtcctctgaggttctgctgttgagtcctgggtggctgatggaatgattgaggaggtctggtcaccctcaagcgccgtcatcgccttgtttccatgggcttctgtcacacaaaatgaagaacagaaatgttaggacttaagagaatgtttggaattcacacctctttgcagtcctttcaaggctgctgctctgtgctgtgtcccatgcatgtgaaagtagagctgtgatggctgctgggacgcttgcaaagatcatgtgtgagaattgagcacaagaccacaaattattactgcttgatgcgcttgttaaaactctatctgccaggaaaccaaattttcttttcttttctttttttttttgagacagggcctcgctctgttgcccaggctggagtgcagtggcgcgatctcggctcactgcagcctccacctactgggctcaagtgatcctcccacctcggcctcccgagtagccgggaccacaggcgtgtatgactggctacgcctggctaatttttgtatttttaatagagacgagtttcaccatgttgcccaggatggtctggaactcctgggctcaagtggtctgcccacttccgcctcccaaagtgttgggattatggccattagccactgtgcctggcacaatttttttttgtaccctcctttatgccaagaatcagtcctaatttctttactatgtgaagtaacttttaaaggtaatagaaaaggccaggcacagtgagctcatgcctgtaatcccaggcgccgtggctcacgcctgtaatcccagcactttgagaggctgaggcgggtggatcacttaaggtcaggagttagagaccagcctgaccaacatggtgaaacactgtctctactaaaaatacaaaattagctgggtttggtggcgcacgcctgtaatcccagctacctgagaggttgaggcaggagaatcgcttgaacctgggaggcagaggttgcagtgagccgagatggtgccattgcactccgacctgggcaacagagcgaaacactgtctcaaaaaaaaaaaaaaaaagtaacagaaaaaagagtgaaatatattagctatcttttattctgagccaaaacttgacagatgtgggaaatcttcatatagtgtatgaaaatttcattgtacagggaaattattttcctctgtgtcttttcttttactataaagtgattcagaattttactgttactataaaattatgcaaagtattgtgacaaaactgcatcaatttgttgactattaaagtgctccttgaacattatat

SEQ ID NO: 266422 - DNA, 1068 bp, Homo sapiens
tttagaatgaatagcccttctgggttttctttttgacaattcttggacttgaggtaaaacaaggaggattgtggccggatttcagatcccaaagccagcctccatcttaggcctttgcctcattgtgccttttaggttttcttacccaccgtctcctgttttgtcttttttttcttttctcctacccctatcttgggacattcagaaactgcctgggtggtttgagaagagacaacccagtttgatctgcaatacaaggatccattcgtaatctctctctcactgatgttattcccccatctgccgtcttggttcatctcaccacagaagggcatttagtcctacccagccatcggctgcgtatgacagcaggatggcacttcccatttctctgtggttagtgctcgagtgaaaacctctttcagctgagtcctctgaggttctgctgttgagtcctgggtggctgatggaatgattgaggaggtctggtcaccctcaagcgccgtcatcgccttgtttccatgggcttctgtcacacaaaatgaagaacagaaatgttaggacttaagagaatgtttggaattcacacctctttgcagtcctttcaaggctgctgctctgtgctgtgtcccatgcatgtgaaagtagagctgtgatggctgctgggacgcttgcaaagatcatgtgtgagaattgagcacaagaccacaaattattactgcttgatgcgcttgttaaaactctatctgccaggaaaccaaattttcttttcttttcttttttttttgcaacagagcgaaacactgtctcaaaaaaaaaaaaaaaaagtaacagaaaaaagagtgaaatatattagctatcttttattctgagccaaaacttgacagatgtgggaaatcttcatatagtgtatgaaaatttcattgtacagggaaattattttcctctgtgtcttttcttttactataaagtgattcagaattttactgttactataaaattatgcaaagtattgtgacaaaactgcatcaatttgttgactattaaagtgctccttgaacattatat

SEQ ID NO: 266423 - DNA, 1016 bp, Homo sapiens
tttagaatgaatagcccttctgggttttctttttgacaattcttggacttgaggtaaaacaaggaggattgtggccggatttcagatcccaaagccagcctccatcttaggcctttgcctcattgtgccttttaggttttcttacccaccgtctcctgttttgtcttttttttcttttctcctacccctatcttgggacattcagaaactgcctgggtggtttgagaagagacaacccagtttgatctgcaatacaaggatccattcgtaatctctctctcactgatgttattcccccatctgccgtcttggttcatctcaccacagaagggcatttagtcctacccagccatcggctgcgtatgacagcaggatggcacttcccatttctctgtggttagtgctcgagtgaaaacctctttcagctgagtcctctgaggttctgctgttgagtcctgggtggctgatggaatgattgaggaggtctggtcaccctcaagcgccgtcatcgccttgtttccatgggcttctgtcacacaaaatgaagaacagaaatgttaggacttaagagaatgtttggaattcacacctctttgcagtcctttcaaggctgctgctctgtgctgtgtcccatgcatgtgaaagtagagctgtgatggctgctgggacgcttgcaaagatcatgtgtgagaattgagcacaagaccacaaattattactgcttgatgcgcttgttaaaactctatctgccaggaaacaaaaaaaaaaaaaaaaagtaacagaaaaaagagtgaaatatattagctatcttttattctgagccaaaacttgacagatgtgggaaatcttcatatagtgtatgaaaatttcattgtacagggaaattattttcctctgtgtcttttcttttactataaagtgattcagaattttactgttactataaaattatgcaaagtattgtgacaaaactgcatcaatttgttgactattaaagtgctccttgaacattatat

SEQ ID NO: 266424 - DNA, 604 bp, Homo sapiens
gctttctggaaaatgtcttccttttggatatggaaagctcacacaatgcctgctttttatttcagagactcataggcaaaagagactgtagccttgacccagatgagactttggactttgtaactttgagttaatgctgaaatgagttaagactttgggagactgctggcaaggcatgtttgtattttgcaatgtgaggacatgagattcatcgggtcaaggacagaataatacggtttttgtctatgtccctaccaaaactcatgtggaattatattttgtaatgttacaggcaaggtctaggtggaaaaagatttagtcataaaatggtgcaggtagatacttcacgaatgataaagaaccatcaccttgatgctatcctcctgataatgagtgagttcccacgagatctggttgtttaacagatctcatcctcctgctcctgctttaggagacatctcattgtcccttggctttctgatataatgaggaggcttcctgattcctcccagaaacagaagacactatacttccttcacagcttgcagaaccatgagtcaattacacctcttttatttacaataatacagaaaattagaactgc

SEQ ID NO: 266425 - DNA, 287 bp, Homo sapiens
ggcctggtaagtactcaagccaccaacaaatactggtcattattattcgtggggagaaaaataaaatccattagcaggtgctgtgggctactcagtttccatcttaccctagactgaaagccaaggcaggtcatagaccatgagaccctgctggacttgctttctgtacctgcttatgggaagctgaggacacggccctggtatctagaataggcttcccacatatatccatcatgttgggccttcatttttcagtttcagtgtggcctttcctgcccaggaactta

SEQ ID NO: 266426 - DNA, 446 bp, Homo sapiens
aatactcttaaatgaaaacatctcacttgccctacaaatgcattttgacagtcttggaaaaagactccctctgcaagacggagttggcatagcctagggaacaactgggcattgtctgatcaatgccccctagcacaccctcctctaccccacgtagatagttctactgaaagcccctctaaaatagaaattttgcaatagctgcttggaagttcaccaaccctgatgctacttccttgtaaaaatccaacataattcattggaatatcagaaaatggagaaattaaatgagtggtacattttattcagtaaatcctcataggatgaggatggtattttctcttttcttttttttttttttaaatgattcccctttgaattgcagcaaagaattttatgacatgcattcaaataaactggttttaagaagttcaaggtattagttg

SEQ ID NO: 266427 - DNA, 647 bp, Homo sapiens
  misc_feature (538)..(538): n is a, c, g, or t
  misc_feature (568)..(569): n is a, c, g, or t
  misc_feature (647)..(647): n is a, c, g, or t
gtagagatgaaaatgatgaatattttatgaataagggagaaatgctatgttcaatagctaattgtagattagtaataaaggaataaatactggaatgtcaattaagaggttatattctgatttctaataaccatccaaaaataccatacaaatattttccatgtttttaattccccatctgtaaattcatgaaagtgatcatggaaaaaagcatcagaacacaacggggcacaaagtcctttcttgtttaccatctggccctagaaacctggtctatgcactccaccttctaagcttcctttcctttagtctatttaattcaacaactatttattgaggaaatatatgggctacattgacagataacacaaaccacttgctatcaggaaatctattgtcaatattgctgtgatgaatttacaggtccatgtgtctttttggaagaatggaatgaataaataaaatgtagtcatatacaccatgaaatatgacacagtcataattatcctgcactaaagcagcttgactatctctacanacctacaagacattggaacactatacctanntattcgcgcatgagctgggagtctaggcacagctcttaagccttcttaatcgagccgagctgggccaaggcggccccn

SEQ ID NO: 266428 - DNA, 381 bp, Homo sapiens
cctctttcccttccagtccactgcccccatggctgccagattgaccttcctgaagaactgctctgatgacttcacttttctgccagaaaacttccactggcccccaactggttcatgtacctactggggccagcaggtatcacaaatgaaggaagtggctacactaagtgaaacaggcacccttgggatctgaaagccaggaaacgtgtaacttctataaggaaatgtgcttcttcccatttatcttgaaaacgaagaccttctggatctacaattggtttcctgcctttagtcaaggcttggtacaagaagtaactcactttcctctttactatgtaacaaccaaacgattgtattaattagcatgttggtttgatcgct

SEQ ID NO: 266429 - DNA, 586 bp, Homo sapiens
aaagaagcacctctggcatttagtagatgatcaggaaatgttaattacctttaccagcttgaaagcaaatagttgcttaatattagaaaataataacgaaagcaattattttcattctttctataagctaaagttatataactccaaaaaaatattcaaccactatcattgtcagttttaaaatggcgcatctccatttggtctttctgtcccaatctgcatgctctgccaatatgtaagcctctgttaaccatcttgaatgtttcatagtgactagaaagggtttgggccagagctgggtctgctgtttggcacacccttctacactgtgcagtaagctggggaataagccagcacatatgctgatcagctacggtatggcaagggctaaactaggagctttcacatttccaatctcactgaatctttgtaacaacagcagaggcaatgttaacccccatttatagttgaagacaataaggttctgagaggttaagcaacttgctcattatcacacagatcatatttcaaaacctagataattttctaaattagtcttttgttcacagaaacagggtatgtttaa

SEQ ID NO: 266430 - DNA, 456 bp, Homo sapiens
caagtctctcttcggtgccaccggcgggcgaggccggattaatcaccgctgcttcggccgcccatgtgtcctgatgtcctgggacccgaaccccgtgccccgtaccttgcgatgctggcgcctacggagggcatccgaaactgccctacagagcagtcgccgggcagttgaagatcagctaaagatatgtggccacaggagggatgctgatgtctttgagctgttcctttctaaaaaaaataagagatccaactactccaggccacatcaatcaaatggaccaactatcctcagacagtgccctctcccaaacccacatctgcccctttgatgagtgagctgccttagcaacaagaaccaagaccacttggataggtggaatctcacacagttcaagagaagtgggtaatattttaatcctataattaataaataaagggagaataaagcacttca

SEQ ID NO: 266431 - DNA, 821 bp, Homo sapiens
cttagggttctcagaagcacatgtagagcactctctctgttctccaccatgtgaggatccaacaagaaggtggccatctgcaacccacaagaggaccctcacaagaacccaatcacgttggcaccctcatctcggacttccagcttccaaaacggcagttgaagatcagctaaagatatgtggccacaggagggatgctgatgtctttgagctgttcctttctaaaaaggaactgacagaggtcattgatctttctaggtttaaaaaattaaaatacttatggcttcatcataacaagtcttggggagttctttatagcagtgtgaaaatggacgaatacagagaattggcactggcagagtgggatactgctacaaagataacctgaatatgtggaagtaactttggaactgagtaacaggcagaggttggtggaacagtttggagggctcagaagaagacaggaagacatgggaaagtttggaacttcctagagacttgttgaatggttttgaccacaatactgatagtgatatggacaatgaggtccaggctgaggtgatctcagatggagatgaggaacttattggaaactggagtaaaggtcactcatgctatgctttagcaaagaaactggtggcattgtgcccctgccctagagacctgtggaactttgaacttaagaaaattatttagggtatctggtggaagacatttctaagcagcaaagtgttcaagacataacctggctgattccgaaagcattcagtcatatgcattcacaaagagattatctgaaactgaaacttttatttaaaagg

SEQ ID NO: 266432 - DNA, 1077 bp, Homo sapiens
cttagggttctcagaagcacatgtagagcactctctctgttctccaccatgtgaggatccaacaagaaggtggccatctgcaacccacaagaggaccctcacaagaacccaatcacgttggcaccctcatctcggacttccagcttccaaaacggcagttgaagatcagctaaagatatgtggccacaggagggatgctgatgtctttgagctgttcctttctaaaaaggaactgacagaggtcattgatctttctaggtttaaaaaattaaaatacttatggcttcatcataacaaggacggacatgatgggagatgactggatcatggggatggttccctccatgttgttctcatgatagtgagtgagttcccacaatatctgatggtttttaaagtggcacttcctccattgctccctttcttacctgccaccatgtaagatgtgccttgcttccccttcaccttctgtcatgactgtaagtttcctgaggcctccccagccatgtggaatggtgagtcaattaaacctgtcttctttataaattacccagtcttggggagttctttatagcagtgtgaaaatggacgaatacagagaattggcactggcagagtgggatactgctacaaagataacctgaatatgtggaagtaactttggaactgagtaacaggcagaggttggtggaacagtttggagggctcagaagaagacaggaagacatgggaaagtttggaacttcctagagacttgttgaatggttttgaccacaatactgatagtgatatggacaatgaggtccaggctgaggtgatctcagatggagatgaggaacttattggaaactggagtaaaggtcactcatgctatgctttagcaaagaaactggtggcattgtgcccctgccctagagacctgtggaactttgaacttaagaaaattatttagggtatctggtggaagacatttctaagcagcaaagtgttcaagacataacctggctgattccgaaagcattcagtcatatgcattcacaaagagattatctgaaactgaaacttttatttaaaagg

SEQ ID NO: 266433 - DNA, 1237 bp, Homo sapiens
caagtctctcttcggtgccaccggcgggcgaggccggattaatcaccgctgcttcggccgcccatgtgtcctgatgtcctgggacccgaaccccgtgccccgtaccttgcgatgctggcgcctacggagggcatccgaaactgccctacagagcagtcgccgggcagttgaagatcagctaaagatatgtggccacaggagggatgctgatgtctttgagctgttcctttctaaaaagactgggtaggactccaattattttaccacttcctggaatccacagttttctattggagagacaagatactgaaattgattaaaaaaaaaaaaattatggagacaggctgtttgaatcccagctctgtctcttccagctgggtgatcttggggaactgacagaggtcattgatctttctaggtttaaaaaattaaaatacttatggcttcatcataacaaggacggacatgatgggagatgactggatcatggggatggttccctccatgttgttctcatgatagtgagtgagttcccacaatatctgatggtttttaaagtggcacttcctccattgctccctttcttacctgccaccatgtaagatgtgccttgcttccccttcaccttctgtcatgactgtaagtttcctgaggcctccccagccatgtggaatggtgagtcaattaaacctgtcttctttataaattacccagtcttggggagttctttatagcagtgtgaaaatggacgaatacagagaattggcactggcagagtgggatactgctacaaagataacctgaatatgtggaagtaactttggaactgagtaacaggcagaggttggtggaacagtttggagggctcagaagaagacaggaagacatgggaaagtttggaacttcctagagacttgttgaatggttttgaccacaatactgatagtgatatggacaatgaggtccaggctgaggtgatctcagatggagatgaggaacttattggaaactggagtaaaggtcactcatgctatgctttagcaaagaaactggtggcattgtgcccctgccctagagacctgtggaactttgaacttaagaaaattatttagggtatctggtggaagacatttctaagcagcaaagtgttcaagacataacctggctgattccgaaagcattcagtcatatgcattcacaaagagattatctgaaactgaaacttttatttaaaagg

SEQ ID NO: 266434 - DNA, 1086 bp, Homo sapiens
caagtctctcttcggtgccaccggcgggcgaggccggattaatcaccgctgcttcggccgcccatgtgtcctgatgtcctgggacccgaaccccgtgccccgtaccttgcgatgctggcgcctacggagggcatccgaaactgccctacagagcagtcgccgggcagttgaagatcagctaaagatatgtggccacaggagggatgctgatgtctttgagctgttcctttctaaaaaggaactgacagaggtcattgatctttctaggtttaaaaaattaaaatacttatggcttcatcataacaaggacggacatgatgggagatgactggatcatggggatggttccctccatgttgttctcatgatagtgagtgagttcccacaatatctgatggtttttaaagtggcacttcctccattgctccctttcttacctgccaccatgtaagatgtgccttgcttccccttcaccttctgtcatgactgtaagtttcctgaggcctccccagccatgtggaatggtgagtcaattaaacctgtcttctttataaattacccagtcttggggagttctttatagcagtgtgaaaatggacgaatacagagaattggcactggcagagtgggatactgctacaaagataacctgaatatgtggaagtaactttggaactgagtaacaggcagaggttggtggaacagtttggagggctcagaagaagacaggaagacatgggaaagtttggaacttcctagagacttgttgaatggttttgaccacaatactgatagtgatatggacaatgaggtccaggctgaggtgatctcagatggagatgaggaacttattggaaactggagtaaaggtcactcatgctatgctttagcaaagaaactggtggcattgtgcccctgccctagagacctgtggaactttgaacttaagaaaattatttagggtatctggtggaagacatttctaagcagcaaagtgttcaagacataacctggctgattccgaaagcattcagtcatatgcattcacaaagagattatctgaaactgaaacttttatttaaaagg

SEQ ID NO: 266435 - DNA, 342 bp, Homo sapiens
ctgtgggttctctaaaaagaatactacgaccgcagagctgaaccttgctggcttcttaaacatcactgtacacacagatcttctgaggatcttgttaagatgcagtttcagattctgtgggtctggagtggggcctagaattctgcatttccagcaagcccccagacaatgtggatattccttttcaggggaccacagtcaggggggatgctgatagactatatctactgggccaaaataaaaattaaaatcttatacacaagctactaactcttcctttctcattgacaaccactattataatgtcttattcattctaatgaacatattttttaacttcta

SEQ ID NO: 266436 - DNA, 444 bp, Homo sapiens
acagcacaggaagacccgccctcgtgattaattatctccaccggtccctcccacaacacgtgagaattatgggagctacaagatgagagttgggtggggacacacagccaaaccatatcagggagatagtgcttaatggatacagagatttagtttaggaagatgaaagaagttctggagatggattatagtgatagtgtacaacaatgtgaatgtgctttaatactactgaactgtacacttaaaatggttaaaatagtaaatttcacattatatatattttaccacagaaaaaaggagtttttaatgtttggttatgaaatattttaatcatacagaaaaatacatatcagccacttgtgtaagtctttggatttaatagacacattttgtcatgtttgtttcttttttttaagaaataaatcatcacagatgcagctaaac

SEQ ID NO: 266437 - DNA, 416 bp, Homo sapiens
aaaatttattcaagataatatttatcatgtgtctttatgtaccaggaatgagaatacaatggtgaacagacagaaaagtctctggtttcctgtagtgggcattccaggagcagaatggcgtcataattcatttactctataagtcagagagaaaaatgatggcacgaactgcaagggatttgtgtgtaaaatttgtgacagtaagaaaaagaaactggaagggaatacgcatttgccatgttctataatatgccacagacattgtaacaaaatatttcatgtcagctacttccatttaggaaatacatgttcattattttcttcaaactaagaattactttatccctcttttctttgaagttatcttaaatctgttattattcagggtctctatccaacttctcatcaaattaccc

SEQ ID NO: 266438 - DNA, 401 bp, Homo sapiens
acctcatctaagaggtgtctcctgagagctactcttggaagcaccgaagtccttttcacaaagactgcaaggtccttgaaaagatacactgtgtaacttcagtgtacaatgagcagctgggagtgttttgggcgaagttggtataaaagggtagctttcaggagacacctcttagatgaggggcagaaacccggacacatggtccgcatgcggccgaatttcgccctcacttggccaattggacctatagtgagtaggattataattcattggacgtcgttctacaaagcagtgagtggtaaatacctgggcgttacccaatttaatccttggtgacacaatctagttttgaagactgccttataacattgaggctcagcggatgatctatccttggcgtc

SEQ ID NO: 266439 - DNA, 254 bp, Homo sapiens
ttaagtatataaaatgttttgagaatttgcatcactgcttcaaataacgatcgatttctgaatcagaaggaaaaggaaagccaagcttctccatcatactcccatgctattatacatacatcttgctagaaattctcagatattattaactaaaaaattagtaacaaatatgctttctacataaaaaaataaagtttaggataaattctaatgccaagactaaactgcaataaaacattttttatctatataat

SEQ ID NO: 266440 - DNA, 405 bp, Homo sapiens
tccacccacctcggcctcccaaagattacgagccaccatgcccggccttttccttagatatgttaatacccttggtgagtttagcggcaaggctggatcctggagagtccgatctcttgtgtgatctgcatgtctccacttggatctgttgcttgttttctattttaactctctgagtgcagagttatatttccatttctgagttcttgagaagtgggaggggaacattaactttgccttgcagtggagctttcatcagttttgtggacagagcagacagacaagacacaggacacaaatcatccttttaaaagaaaagagagggtctcatcttttattgagaaaagaatttctgaaaagggaggcgctggcaaaaattgatgagctgactttgctcctggccta

SEQ ID NO: 266441 - DNA, 409 bp, Homo sapiens
accaacaccagttgcctggaagccctttggtggtcaacagattagctttgataaactcctagtttctggtgacccttatgatactttggttctcaagccttaggtgctatagctgcttcttttagatcctatattgttttgcgttattaatacctgaggaaccaattatttacattaagtgacttatgtttgaaattcctagcatgatgtctatgttttgaatgtgccttacctgatatggaaagcattgagatattttgcccataggggtggcataaagtaatgtacttttaaaagtataattttatggtttgcagtattaacagaatgtacaataatctgactaatgatgttcattacgaagaactattagtagtttaggtaaagataaacagtctttattttttcc

SEQ ID NO: 266442 - DNA, 575 bp, Homo sapiens
cccagcagaagtgggggatgggaggatccttggtcggtgaatagagcactgggttgggagtcccacagcatgaccagagcaagtccctcccctcgctcagcccccttggtgggtgtgagattggttggtaaaccataaaccatacccctgctgctgcaaagccactttctaagctggctctgacctcactggaaagtggcattttaaatgttattgtcttttatatgttcacatgtctgtctccttcattaaactgaagttctttgtgggaaggaacctcgtagaatgaatctgggtttccctgacacctggctttgagtacacatgcagggaccctgtgtgtagctgtaaaattattgaccatgtctacacatcatcgcctgagtatcctggtagaagaggccaagtacctcagcagccacctccacttcccacggcagtccttgggtgctttggctttgggaggccgtgaccactgagagccttctcagcctcgtgctctgaccgactcctggtgcggctgtagcatccccctgatcctccattcccaaaggggccctaagggctttgactgg

SEQ ID NO: 266443 - DNA, 363 bp, Homo sapiens
ccatagtggctgtactaatttgtatacctacgtacagtgtaaggatttccttttctccacatcctcaccagtatttgctactgcctgtcttttgaatataggccactttaactggggtgagatgataactcaaaaaaataaagaacatagcaattgtaataaggatataatgacagatgaaaataagactacagttgtaagggagaaaaattattttaaattaaataaaatatatattatttatattaattatattatgtttacaagatatgtaatagcatatgctaccagagatgattttaaaaatgtatgaaatctaaataaaccaatttactttaaataaatggaaaaattagtcaatga

SEQ ID NO: 266444 - DNA, 409 bp, Homo sapiens
gacttgcattatattatcttctctcaattctttatctccgtggagttttaccttaaaagatgttcattcatatacttttattcactaggtataactatgaggaagctgataaaaagggatgtttctcattagtcttttgtttatctaagatttgttgtaggttctgatacattagcagaataatataatcaatactttgatttgtttatcagatctatctaggttcatatgctacctctttgtgttcttgaacttcttcgagtctttgaggattaaatgaaagaattgatatcaaattaaaagcacagtggttggcatgtggtaggcaccaataagccactaataacagctcttgaaatacgtcatatcctttcattgctcctttacaacattgagtttataacaggga

SEQ ID NO: 266445 - DNA, 477 bp, Homo sapiens
cacgagggcaatttaaatatgtaggcataaggaagaaacaatatcacagccaattaggaaagtgagtaagcttttgaatgtcattatgctttgttgtttttgttgtgaaaattaggggcatcaaattaattgattattaatgtcagttattttagatggtgaataaagacaaattttctttagatatcatctcatttattttcccttaattaacagtgaagggatagtttgcagaatattagacattaataattttatgtacaaaagagaaaataatacagtgttcataattctgtgattgaggatgtattatatatttacataaaacaaggctgtaaattctaaaggaacaatacattagacgtagtttacatttggctttttaaaattatattttaagttctgggatacatgtgcagaatgtgcaggtttgttacacgtgccatggtggtttgctgcacccatcaacccgtcatc

SEQ ID NO: 266446 - DNA, 129 bp, Homo sapiens
cagaaacgcaaaggcagcagaggaagcgtagtggaaccattacagaatcacaatgcagccgacactctccagaccagaaaagggagcataaagaaagggtattgatccaatagaagaagggaagggtgg

SEQ ID NO: 266447 - DNA, 499 bp, Homo sapiens
gccaatctaaaatgtcagcaacacagtcctgatggggatgagtgtctctaatagaaactccgcaccaaatcattttacctggtgatagcttgctgcagtaagtttgcaggcatgttgcttcgttgttctgcaatataaccacactcgaagcaacaggagaggggccggtaacccattctgcattgactccagctccctatgactaggaagcaatgagccactctatctaaagggctagaacacaaaacagacaaaacctcttcttccttgatcatttttatctcagctgccaaaatggaaattttctgtgatttcctttgagacttgaagaattacacctggtctccaaccattattcttatcaccgtatcggttcagtgctctcaaggcacaaagcacttggaattcactccatgatcttgcaactctttttgagtgcttttcctgagcgattttaaactctacccgtaagaaatttcatctgcaatttctgtaaaaa

SEQ ID NO: 266448 - DNA, 675 bp, Homo sapiens
ctatcagctatgtttctttgcatcctgggcaagccgccatcattagcattttgtgtagggcttgctgacgcttgttcatttgtcgtcttctttgctaggctctaagtttattaaaggcagagaccatatccaatttgcccttatatctccagagcctaagaacatacctgggactgcagaaaaaaatggatgaacaaaggaataatgattagcttccaaacgaaggaatcatgctaaaatttgtctagcacaaagggtttcccaagatgagggactttcaatgctaaaaccaggaaagtccagattaaatcattttatggtaaatgaaggttttgaaggttcatctagaaacctgcttaccactgaccatttcattttttaatataatttttgatgaaatatatgtttaaacttccaaacaagcaattttgacattcgaaacatatctgcaagttggaatctgcttctactgttaatactttcagtttattgagagatgtctctgccagacattaagccaaggaattttcaaatatcaaacttaacattttcacagtgaaggaaactgaaatttttaggagctgagctacgtgtgcagggtctcatagctcataagtgataagtttggaatcaaacctccgtctttgtgacacccagcttttggtcttgtgtttt

SEQ ID NO: 266449 - DNA, 471 bp, Homo sapiens
ttgtgattctcttaataccttcagatgtttgctacctaggtcggcaagtaggtctgtcagtatgacttgcgtatgaaagagaaagctcttctgtgtttagacaaagtaatgctaggaacagggtgtgggaactgattaggatcctgttctgtgggaaattggtccctaatggtaagaggggacaagcaacttctctggagtagtagtctaaagctcagaagagtgacaatcaggcttagtggcaatcaggctttgtaagcattctcaagaatccttaggtgcattggggagagaattggctaacttacagacacacaggctgaaagcttgaggtattttgtttggctcttaaaggctagcaatttggagacattggcttgcttatacccatatcataaaattctgttcacttaaaatattgatgttaattctattggttgtaataaactctatcatgtgcttctgcccata

SEQ ID NO: 266450 - DNA, 423 bp, Homo sapiens
caaacatgcaaaaggtgaataattcgttagagcaaatccactgaagagattttactcaaggcaataatcaagttttcactaaagaaaattccctggagggtgaatggcaaaccagaggagagcaagaacagaagtaaaaggaccccaggacgagctgtcagcctgatcccaaggagacatcacaaaaccctggactgaggggcggcaagggtggggaggcgggctaaatcctggagacgcgcagatgggcttttggggatagtttggatgtggagtgttttgctggttgaaagattactaggcagtatgtaagcaagagatgaccgcatccacatcactgcctgttctaagaagctcctgagcatggtgtgtgagagggagggagaaacggctttaaaatttgagtgtacaactcacagcgct

SEQ ID NO: 266451 - DNA, 510 bp, Homo sapiens
atggggactgcccaaagtttagcagcagtggaaagctatttccactcctgtcctctaaaggcatagtgagacggcagtggtttccaaggagacccatagctgtagaagacagctgctgaacacgaactatgaccttcaatagggaaaggcagccactgacaaactgcagtcctgtggaggaagccttggcctctctcctctagctctctgagctagttccccatatggctggatccaagggagttcaggtgatgcagtctataaaggttagtttcctggggaacagtactgcctctgacagttggcagagagtggatctgaagagtccactggagaataatgagcagaaattgttagtcctgatggggtgaagcaaatatatcagaattgggggtggcgaatgtgtatcatttgcaagagcattctagaagaatgtaaccacaccctcccccaaaagattgactaacactgattaaactgaataaaaatacaataggagaatgtcaaata

SEQ ID NO: 266452 - DNA, 437 bp, Homo sapiens
tcctgagacggagtttcgctcttgttgcccaggctggagtgcaatgtcgcgatctctgctcactgtaacctccgcctcccaggttcaagcgattctcctgcctcagcctcctgaatagctgggattacaggcacgtgccaccatgcccagttaatttttatatttttagtagagacggagtttcgccatgttggccaggctggtctccaactcctgaccgcaggtgatccacccgcctcggcctcccaaagtgctgggattacaggtgtgagccatcgttcctggccagggaccaacaaaactttataagaaaatgaagcagtatgtacaatagctgtttatagtgatatcttcaaattatgaggaaaagttaaattacatggacattattctgtgcacctactatttaagaaggtatatagaattatacaatgtat

SEQ ID NO: 266453 - DNA, 234 bp, Homo sapiens
agcccagatacatgatgtctgctacttttctaatttgaggttagtctgaacgtgtactgaatgcactgatagtgtgggttagtcctaactcacactgtctctttagtgatccactttagtatcttgtcttggtgtcaaacagcatttttcagcagcttgcagagtctgtcacagtctcaaattcaggtctacaggtgtccctcattttccatcattatccatgactttttaaaa

SEQ ID NO: 266454 - DNA, 368 bp, Homo sapiens
tcctcctgcctcagcctcccaagtaatagggaccatgggcacaggcacacaccactgtctttttttgtttgtttgtcttacttctaataccggaatgcttcgtatatctgaaatgccctaagaatatgcatgtcaaatacactaagcattctgaaaacctgtaattctcccataactccaggaatatgaatctgtcagttcacccagttaaattttttcatctactttttttttagtctctactaaaaaaataatgcaaaaatcagccgggcgtggtggcatgtgcctgtagtcccagctgctggggaggctgaggcaggagaatcgcttgaacctgggaggtggagatgcagtgattgcagtgagcc

SEQ ID NO: 266455 - DNA, 495 bp, Homo sapiens
gataagaaggcacgtgcattttcacttttttttttgagatggagtctcgctctgttgcccaggctggagtgcagtggcgcaatcttggctcactgcaacctctgcctcccaggttcgagcgattctcctgcctcagcctcccaagtagctgggattacaggcacactctaccacacccagctaatttttgtatttttagtggagacggggtttcaccatattggccagactggtctcgaactcctgacctgaagtgatctgcccacttcagcctcccaaagtgctggaattacaggcatgagccaccacacccgggcctgcattttcacttttgataacagttgatagagaagttgaatgatttccattcccagcaataatgctggtttttccatgcttttgccaagttgttttgtgtttgctaatctgatgagtgaaatatgatgtctcatttttaatttctctttatgaataaaattaagtattctcatagac

SEQ ID NO: 266456 - DNA, 374 bp, Homo sapiens
aaggtaaatgaagtcacctgaaccctactaaatatataatcctgatgaaggatatctaaggtaagtggtctattatgccgtattctttgcaaaatttaatttagcataatagatagattcatctactacagctattgaaaaaaggtggcttaaaaggaaatctgaaacataaagaataaataaattgtgcatttacatgtattatgccagctgacctaaatacattgtcaacagtgttcatggcaccgacctgtttagtaattgagtaacataaatgatattataggctcataataaaacaattttttaatcattgggaggcagctaattggcaagcacaacctttacattgggaagcattattattgaaaaac

SEQ ID NO: 266457 - DNA, 396 bp, Homo sapiens
cttatttccattaccagatattcaattatggatgcatcttggactcaacacagtcaattacattttcagttgatattcaaacacacataaactttgactctttctggtatactgtccctaacacagccaaattccataaatttggctcatgttttttctttcccttgcctacttgccatcaccctaagctgagaatttctttcttctcacttgaactactaccttggtctccttcttgtgtctctcaaagcagccaacaggcaaatattcctaatgttccaacctcactgagttactctccagcttaaaaaccttaaacggctctctaccactcaatcaccgaaaaaaaaaaaaaaaaaaaaaagctgaaagtcccgtttaactcatacgaacttg

SEQ ID NO: 266458 - DNA, 446 bp, Homo sapiens
aagggaacatcgccgtttggaaagtgtcgtgatatgatacacaagttgtgctgcctctgtggctctaaggcataccaccttcagaagtcaacctgtggcaaatgtggctcccctgccaagcgcaagagaaagtgtaactggactgccacggctaaaagaaaataccacggcgactggttgaatgaagcacctaaacattgtatactgcagatttaggcatggattctttgcaggaacaacacctacacccaagagggcagcagttgtgtcatccagttcatcttaagaatttcaatgattagtcacacaataaatattccggtttttaaaaatgtatatattttaaacatatatatgtttatatgtatatgttatatctgtattacatatatgtgaaaagaggcagagattgtcagattggattaaaaagctgtctgtaagaaact

SEQ ID NO: 266459 - DNA, 762 bp, Homo sapiens
atagtttccaggcgtaatttcataggtcctatgtacctcaaatagaaggtttgaaataccttactcagcaagtatattacctcatagtttaatgttcagtgttatagtagaatctaggtggtgggtatatagttcacagtttacagtgaactctaattcaattttctgtatgtttggaaaatttcataataaaatattgggagtggggagtaaatgtgatgatagaagctatctctttaacacacttagggaaaaatccgaaaacattttctaatgagagaacatcattaaaattttcaggatgttacacattttgctattcatgctatttgacttagcctttgtgggggagggttggaaaaaaagtcacatcctctaacactattttggaatgataaggtgaagattataacaatagtaatttagtgcccaaagtctggtttttcttctttatggtcactcttgtaatcagcttttccttcctaggcagtgtaattctgcagtcctattttcaaagaaaagaaagtgttctttctcactgatctgtactatggctgaatgcaagcaaatatttgaagagatgaatcattgattcctggaccatttgtcagagagggttagactagttggccagatgtctccatggtgagctgtttatgatggtagaggtctgtgttttataaagacagtgagtaccagaaccttactgctttaacaccaagcttaccaagaccctaagtttgattatttttttttgtctca

SEQ ID NO: 266460 - DNA, 694 bp, Homo sapiens
ggtggtggggataaagcaagtttagtaaaatgttagtagtagaatctaggtggtgggtatatagttcacagtttacagtgaactctaattcaattttctgtatgtttggaaaatttcataataaaatattgggagtggggagtaaatgtgatgatagaagctatctctttaacacacttagggaaaaatccgaaaacattttctaatgagagaacatcattaaaattttcaggatgttacacattttgctattcatgctatttgacttagcctttgtgggggagggttggaaaaaaagtcacatcctctaacactattttggaatgataaggtgaagattataacaatagtaatttagtgcccaaagtctggtttttcttctttatggtcactcttgtaatcagcttttccttcctaggcagtgtaattctgcagtcctattttcaaagaaaagaaagtgttctttctcactgatctgtactatggctgaatgcaagcaaatatttgaagagatgaatcattgattcctggaccatttgtcagagagggttagactagttggccagatgtctccatggtgagctgtttatgatggtagaggtctgtgttttataaagacagtgagtaccagaaccttactgctttaacaccaagcttaccaagaccctaagtttgattatttttttttgtctca

SEQ ID NO: 266461 - DNA, 639 bp, Homo sapiens
accctgcattccaattgtgggtccccccgagccatgcctaggagggggtacggggaagaggggactccctcaccaagagcacaccccgcacagagcatcttcagcacaggggaaggggccgcgggatgcaaagccacggccccactctcaactgcccatagatctgttggaaagacaaagcatgacacacaaaagcgatgagaagtggccactcccagaggacaagtgctcactctctccgcagtggcctctcaatattcacaccatcgctgtgctcactcagacaccacttccttcatttattttccacacatatggtggaaggaaggggctgtgctcattcctgctggggaacatctgggtcagacagtggaatatgtggatgaatcaaactattcagatgcttagtgttgtatagataacttatctagagcattaactaaactttcccttcctcttctagatgattggtctttgtagacataactccaagccttaaccgtctcactggaaagaggatgacttcaagatgcagaatagcggaatggtcctttgaccatcctggaaaccaccgaaactggattccatcttgaccctcccaataatcatccgtgtggtcctgagtaagttagtatctct

SEQ ID NO: 266462 - DNA, 702 bp, Homo sapiens
gaaaagtatcaatatataaattcctagaagaggctagctaattcgagtgctcttgtcgtatagagggaagaaatatgacatgaagttaacatattaaaacttaattgcctccataacaactcacctaaattatttaatttggaacattttttttctggtactggtaaacacctcagtatgaaacagtcattttgctcaattgttttgtagatacaatagagcttcactctacagaatccttgaaatgtgagtcattaaagatgacatgtcttcagaataacagaggggttacctatttaagtaccaaatatagtgcatacagatgtgtctgtgtgtgtgtgtgtgtgtgtgtgtgtatacatatatatatattaatttaacattttgacagaaaatcattctaaaatgtattaaattttataaggcttccttaaaagcacattaaacataatgcaattttctttgatggcccaaagtcaccattgtgaatattaattattatactgtgctataataaaattatgtctgtgaggccctcaaaaatgggtacgctctattgcctctagaattacacaatgtcagaatgaaatgggacctgagagcttgtccagcattcccaattacagatgggacactaacatcaagagaagagtgatgtgatttaattaagcggacacaacagttatctaccccaggtctccc

SEQ ID NO: 266463 - DNA, 421 bp, Homo sapiens
aatctttgggagctcaactaagaaactattctaaaaacctagagataatgaggtattttaaaaatgtgcatggacctgggagccagaagacaagggctccagacttgacttggctactcatgatggttataatcttggtcaaatttaacctcttttgcttcccttctagcaaatgaacaagctgaattatattgctaccatgagtatgtgtaagaagcaacaagaatgttgttttcatttttgttctccactcttcccctgatataaatattcactgccagtgaaaaagctattgtggctgacttttctcctctagctggaaatggacctgcgaatcaacacaaaatagtcctgtaaacaccagaatcctgcaggacctcatccagcaaacatacctggacccagggactgggggaggttg

SEQ ID NO: 266464 - DNA, 486 bp, Homo sapiens
gggccctctctggggtgcaccgggtctcctctttccagctcatgtctcccggggggctgggctgtctcctgtcctgcagccgcagcacttgatctcagcaggtggaatgcagagcagaggaatccgccagacattacagggatctatctgagtataaaacgggactgctctttccactaaattgcttttggagaataaagttaagtgaattaaaatttccccagtctcaattgctaatatggtaaatattcgcagttacaactctcattaacaaaatctcttaggagtcctcagtaatttgagactgtaaagacgtcttgatactacaatgcctgagaacgagttctctggatcttacctgcccctcttacatgaggaggcaccctgatgtctgggtggcttaccctttggcctctggcgggcattcagcatgagtgaacggtggctctcgagttgctccttactctcacagtgtcattcccatct

SEQ ID NO: 266465 - DNA, 425 bp, Homo sapiens
actggaggtcattatattaagggaaatcaggcacagaaagagaagtgtctcatgttcttactcacatgtgggagcgaaacacattgatttcatggagatagaatgatagcagaggttgggaaggatgggaggggaggtaaagagaggtaggttaatgggtccaaacataaagttagatggaataagttctaaggtttgatagcagagtagggtaactacagttaacattttgaaatagctaaaagagaggacttgaaatgttcccaacacatagaaatgataaatactcacggtgatggataccctaaataccctgacttgattatttcatactctttgcatgtatcacaatatcacatgtaccccataaacatgtgcaaataattatgtatccaaaaaatgctataaaacaatgttaccacctg

SEQ ID NO: 266466 - DNA, 261 bp, Homo sapiens
gttataaagctctataatggccctattagtaaaatgaggctcaaattctatggcatgggcacaaacgtacatgtatatgctcagaagtctttctgtaacacaaagaacccatgtggtacacaaacccaattctgtactcaacctacataaaatgaaaatattggttataaattttaacatgtaattaattgcttgccttcttacagtttaaaggcttgtggacagatgttttgaataaactaagcttcttaatatatataa

SEQ ID NO: 266467 - DNA, 457 bp, Homo sapiens
agataagcatgggattttgtttttaattgaaattttattgagataattaatagattcacatacagttcataagaagtaatagattccctgtacccttcactcagttccctccgatggtaatgccttgcaagactgtagtacaatatcatgaccaggatgttgatattgagaaaatccatagatactattccaatttccctagtttttttttttgttctcatttctctttgtatgtatttagctctatacaattttattacatgcgtagatttatgtatccaccatcacaatcaagaatcagaacagttctgtcattacaaggatccctcattgttttataaccatgcttacctcccttctgttgtcccttcctcccccctgctaccctgttctccatatgtaaaattttgtcacttctaaaaaagttatataaataaaatcagacagcatacaacct

SEQ ID NO: 266468 - DNA, 440 bp, Homo sapiens
caggattaagtgagttaattatgtaaagcacatagtaagtctcatttaaatgtttactgttttccttaacaataagaattgcttttctatgccacgcagaggtaaaaagtgccaatgagctcactggtcctttctcttgtaaaacaaatgttttccacttccatagaattttgcaagttgcaaagcactagcagaaaatattaaaatcatgcactttggtgtgagttagttttataattttgtctaggctctgtcacttagaattgtgtgatactgagcaagtcacttagcccacgacttagcctccttatctccaaaaatggttttgataataatatctactccatagaactgctaggaaaattaaagttcaatagaaattaactgagtgtgaacagtactgactcatcaaaattcataataacaacatgaataataaa

SEQ ID NO: 266469 - DNA, 331 bp, Homo sapiens
gatgactggatttttcttcaaggaaaagcaagcttacctgttctccaggatcatgcatactccctgtggtcttttctgatgctaggtaaatttgttccaagtttcccatgctctactaagagtacaggatcaaccagagctgggcatccacatcatcctcgtaaagtggagtaccaattctcctagtgcaattagagaggaaagccccagtggcaatactcttgcaggctttatggaaaggtaagtgtggaggaagcctaacactaaatgagaaatccatacctttcctacatgcctgcctgaaccaaataaaccttgtgttactatacaa

SEQ ID NO: 266470 - DNA, 695 bp, Homo sapiens
atttctacacaaaattgtaaaattaaccaggtgtggtgacacacacttgtattcttagctattcaggaggctggggagggaggatcacctaagccaggggaggtcaaggctgcagtgagctctgatcgtgacactgcactccagcctgggcgacagagtgagacactgtttcaaaaagacaaaaacgcccatagtattttaaattttacaaaagggctacaaagcggtcacaaatataaaacaaacatgtaaatataaatccattgtgaaggatctcagaaactatgcagcagattttttacaatatatctttttgaatggaggtggtattttctgtcagtctacagtgttcaaatttttgttgtgaatttgatgcttttgtaattaaaaatgtattaaaacatttttaattaaaggacttgtcaggatataaattaattactgcccatatgaagtatgatacaaatttttacttttctaaaacaagcacaagtcccctttttgcctctgaaatatcagctttattcaacacctttggctgggactcagaaatgaaggggataacacatttttctttattctgacatgcatttccattaattacatgttttcgcttgggttcatcaacagtaaacttcagggtaagtttttcctaccaatttcagttctgcatggccaattttcaggtctgtcaa

SEQ ID NO: 266471 - DNA, 334 bp, Homo sapiens
tgtcatcaaagtctccctctctgcacacacagcacttgacttcatccactctgtcagtcccattcctactaccacaaatctaaagcagcctttaggaaagtcccagagaagaggacctcagtctattagaacacggaaagaataagcataggaaaaatggagatgaaatcaaaatctggtataaataaagaagactatacattccgagacaaaatataaccgtgcattcattcaacagattttaatgccctgcttgtgctaaactaaagctgtggatatgtcactgaagaagaaaactataggtaactaataaaacacaaatgcatttaaaaat

SEQ ID NO: 266472 - DNA, 417 bp, Homo sapiens
gaaagatattttttcttattcatataaaaccaggcacttgcttaagggatttgctaaaatcactggaggtcaaagcaagattgccctcttttctgtagatgtgcataatttataagcatcaagcaaacaagtatggaggatctgtctttcatatggcatatgtgagccacagcagtcttccaggtagaagctgaagcaggctagttccatttttagtccacttccctcagccctacctctacccgaagctgtttgtgtgtaggtttgctttccctaggagcccttcagtgcctcgaagacagaaaatagaagcttaatttttgtggtaggttgagcctgaagcagagtgacaggcacagagtaggtgcttagatatgtacatttcaatcaatgtttgtttaaaaattcccatgcatg

SEQ ID NO: 266473 - DNA, 382 bp, Homo sapiens
gcagaatgaagtttgagatcatcccaaaagatgtatgtctgcaccacatttttcttgacaggagaaaaagtgacaagagctaattaaaggaaaacagaatgttcttttttgatggcccaacagacaattcttttcagtcacactttattattattagtttatcactaccctatttcttttaggtgtactcaaggtaacattctccctacttcctggtctactagttcaagaaaaacgtttgttttgagtgccacacggcgaacccattttagaagtgtttctattactaataaaacatttgcatatttggatagtaatatgtatcattcatagtttactttagttatttcacgatcacatttataaaagctttccagttaaa

SEQ ID NO: 266474 - DNA, 298 bp, Homo sapiens
cagattttcccaattccacattttggaagtatcaagagctgtttcatgagataagctggcgagaggaaatagactactctggtaggaaactagagcaggtgtactcaaggtaacattctccctacttcctggtctactagttcaagaaaaacgtttgttttgagtgccacacggcgaacccattttagaagtgtttctattactaataaaacatttgcatatttggatagtaatatgtatcattcatagtttactttagttatttcacgatcacatttataaaagctttccagttaaa

SEQ ID NO: 266475 - DNA, 290 bp, Homo sapiens
ctactgttcatagggaagatttttcacacaaaccaatgagaaaattcacagtaacgagaagaaagtactcaagtttggatcctggttaaaccttacacagcctcagtagatcaacttggtctgtctaaatcaatggtactgaaggtatgtattaatgagataatacatttgaaaatgattttaaactaaaaataaaaggatcattcagttatcttctagtcaggagctgccaggacacaccaaaacaagtaaaacagggttcatctgtttattcatctttgaaatgttac

SEQ ID NO: 266476 - DNA, 425 bp, Homo sapiens
cttaagttggaacaaagaaaatcaccccctgataattacaaaaagacaatatcatgtagttttaatatagttttatactcttgtgagtatacagacaccctactagcttgaaattcaattcaatgactatttttgtttgtttgtttttcccttttttaccaccctatctgtgacgggcactgtgcacataagtcagacactcagaggccagtttttcccactgtccatattctgacccaaagtgctcacaattttctactttgtcctttggatgaagtgccagaaaaatgatgaaagacaagagaacactaaaaacaaaacaaaacaaaacaaaaaattaacatggaaaaaattggaggtatgaaaggcagtttaataaaaaaccaaagcctgtattttgataagatttaagtaagtaatgaagt

SEQ ID NO: 266477 - DNA, 377 bp, Homo sapiens
gtactaatgtactaattattttttcattaacttgtcaatttagcagatattcattggccctttgcttctaatactcccaataccaatactgtgtttgctattttaatattaaaaaaacctccgttttgtatcttgttctccaaaaagacaaatgcaaaacatattgtataactgtagttcaagataaaaagtgaaaaatgttaccaagtctaagagactacttctagatccgggtgaggaaagggaaagctttgaaaagacagggaaagcatttgaaagtatggaaatggggagagtggtattcactccaagctggggttacaacatgatcaatcatgagaaggctggaaggagcacggatatgtgaaagcaactgg

SEQ ID NO: 266478 - DNA, 630 bp, Homo sapiens
tattgacttatgtctgttcaaataactggtgtggtttctctctcctgactcaaccccgaatgacacattcccttgaaggggcagaacatcccgagacaagatgcaacggtacacctaaataaagacataaaatcttcaaagaaagataatgtccttcagaaaagggtttgtcagccataggcgcctggcccagggagggtcagagaataaaccccaggatgacatcctcagcagtgacaagagaacagaccaccaccatccatagcctggatgactgtaaagactcctgctatagactggataactgcttcatgtgccccctaccctccaccccactgcccattcatatgttgaaaactaatccccaatgtgattgtatttagagtggggcttttaggatgtgattaggtcatgagtgtggaaccttcatgaatgggattggtgcccttaaaaaaagagacttcagagagctcctttccccttctgccacgtgaagacacagtgagaagatggccatctgtgaactaataaggcagccctcattagacatcaaatctgatgacactttgatcttggacttcccagcccctagaactgtaagaaataaatatttgttgtttataagccacc

SEQ ID NO: 266479 - DNA, 141 bp, Homo sapiens
tgccatgccgcagatagccgcagtgccaaccctgtttagatggtttggatctgcttggatggccccagcccctcttgcttcgatctttggggaagttccctagggaaaggagaataaacaaagtatttctgcccagaggca

SEQ ID NO: 266480 - DNA, 259 bp, Homo sapiens
gtggttaccatctaatttttatacactttagagataatttttttcaagaaatatgtttttaaacatgtgtttaaagaaaagtcaataatcacacagatggtatatggagaacaaaattcatgaaggaggaacatgaggttttataaacatataatgcttaattattcttggttttcaaagcatcttacgtacattaaaatatttgattcctacaaccacctcatgaagctcatagggattatgatccattttaaagatg

SEQ ID NO: 266481 - DNA, 475 bp, Homo sapiens
gagggatgcagagattaggcagaggagaaaacttgtaccaagcctgggcatggatccctcttttttttttccttcttcccattctggtgtttctccagagccctgttccagttgctgagaatgctagaggaacaggggtgatgtgtgtatcgcacctttatccactgacacctcctattcctgggtcccacctgtccttctgggtattgttggttttccccaagcaccctctgcttctgtggggcagggctgtgccatgccctgtgcgtaccccaagccccgtgtgcagcctggcataggagtgctcagtgagtgagtgtgcactgaagggaccgtggaaggagcctgtgggttgagcagggacttgggctgggctggcctgtgtggcatgtcctgccaccggttgtccttctgagtgaggggtcttccctgtgaggggcaccatggagacttagtgctgcctgagcatttggtg

SEQ ID NO: 266482 - DNA, 429 bp, Homo sapiens
gcagggacctggcacctaagttatctttaacttcccaaacaagtctgaaataaggacacttaggctcagaatgaggcccaaggtcacaccgatcgtgaacatgacaggtgcaaatttgaacccagtagtgtctgattccaaagctgaatatacggatatgttaggatgcccacctactatgtcacctcacttactccacccttgagatggaaccatctctgtcaagaaataaggattaaaccaaatcaagtacaaatgaaaacccagactgcaagccatcatagaaagtaagattcaatgtgtgtatgtatttgcatgattaagcacatgcagagaaagaatacatctagatatcaagtggtaattttgaaattttctcctttatacatttctgtttttctcaaatattaaaatagatgattcttatta

SEQ ID NO: 266483 - DNA, 346 bp, Homo sapiens
agaatagcttacagtaagttttcatactgccttcatttcctctttaaaaaataatcaattttaggctgggtgcagtggctcatgcctgtaaccctagcactttgggaggacgaggcaggtggctcacctgaggtcaggagttcgagaccagcctggccaacatggcgaaactccatctctactaaaaatacaaaaattagccaggtgttgtggcatatgcctataatcccagctactcaggaggctcaggcaagagaatcacttgaacccgtgggcagaggttgcagtgagcagagatcgcgccactgcactccagcctggccaaaagagcgaaactgcgtctcaa

SEQ ID NO: 266484 - DNA, 138 bp, Homo sapiens
cccaaggccatcagaagctggaagcggcaagaaaataacctactctagagccttcagagggagcagggtccaccgacactttgattttgtactctggcctctagaaccgtgagagaataaatctcttttgttataagc

SEQ ID NO: 266485 - DNA, 424 bp, Homo sapiens
ccactggaaaggagagtagaaacggaaacagacccgtctggacagaatccaaagtgcaaacaggaactgtgcccagagagaggaggaggtggcagaagcatgaaggctgcttagatccctatgttctaagaaagaccgctctttcctggctttaacttccttggctcagaagtttaggatttgctcaaaatcagaaaaagcaactttgggggaaaaaaaaaatctggatgtggaagaaactggcggtgaaagtcatattgagtgattaatgataaaaattatttccgctccttggttcttgagtcggtatgaaacgctggcagcctctaattaatcatcaccatgatattaacaccactgacttttcattgcttctgctactttctttctagacatctgtatcctctaagtaaatattatccgc

SEQ ID NO: 266486 - DNA, 338 bp, Homo sapiens
gccagggaaaataaaacctttatgtacccacaaaaaaaatttcaaaaaattcaaaaataaaataataaccatagtagataaatacataaaaccttgggccctatgcaatctcttaaggaattctgagtttacaggtgcagggatttggtggggtttttagtttgtgggaacttttcttggagtttttttctttttgccagcaaagtgtaagttccctgggcaagctcaagaccgtagtcctgtataatgaataatgttcaacatatatatcatagttcagtgcatgctaattatgccctgcacttacccaaaaaatggcatgacatatctttagagga

SEQ ID NO: 266487 - DNA, 377 bp, Homo sapiens
caaggggaaattagaatggatagtgaaggaaggagatagtgaataccacttatggcctagagataacctcagggatgggaaatacagttttttttggaaacctcccttttctaagtttctcttcaggaagtgaggcccactggaaccctggagtagctgcatctggacaaatgaagaagtgaatccatgtgacacagggtgaacaacagcacccacgggtgtatatcactccgattatcctgcaaagaaaagagttggcaatcagctgtttcactgtctgaattaagaattataaggtcacagctagcagggaaaaacagggggtatgatgttgactttatctgccttttcggatccatggaaggccctggattatc

SEQ ID NO: 266488 - DNA, 526 bp, Homo sapiens
agacagagtcttgctctgtctcccaggctggagtgcagtggcgcgatcttggcccacagcaagctccgcctcacggttcaagggattctcctggctcagcctcccgagtagctgggacttcaggtgcccgccaccatgcctggctaatttttcatatttttagtagagacagagtttcaccgtgttagccaggatggtctcaatctcctgacctcgtgatccactcgccttggcctcccaaagtgctgggattacaggcgtgagccactgtgctcggcctgagaggttgcgtcttatcttaaatcacatatgcagtgaagtcctttgtcacttccaaacactgctcctgaccattgttctgtacctcatggctgcctttgcatgtgtaattggcaagtcctagctataagacagcatgtaatgattaaggaggattggaaacctagtccttgtatcaccctttttccttcagtaactaaaatatctttttttttttttttgagacggagtctcgctctgtcaccca

SEQ ID NO: 266489 - DNA, 702 bp, Homo sapiens
aagacagttggtaactgacaaattgcaggtgtgatcattactctctgtgactccctgtttctcagatgcactgttgcttacatctttgtatgcttttgcattcctgctgattgattcaaggtgcaacgtgcctgcttgtcaggtatgctgttgatcacattatttaagaagaaataaagtcgttcccgcagctccacctgcagtgatgggctttaatgttttgtgcttcccgaggaaaacctgccgatgatgtgaagtgacattcaacccgccgagagctgatactggcagacaaatttcatgtcctgtctcctgatcaccagtttgctgcctccaagttgttagggatattaaaaacaggggtgggaagtccccacttgacaggttcaatttgtaatgtgaaaggtgctgagaaacaaagcaaggacccaggcagctttctgccaaggctgctggccccacactcagcaaggcaaagagaaaggggatctatctgctagtagcatgagtgtgggagaggagggggctgttgtagggtgccgtggaggactcatacatgatcctgggaagagcgctgctgctagcccagggccacaaagcgtcaaggacgttgagctcctgtgcatgctcctgtagccttgtgtcatctgaagaagcacagaagtggcaggaatggccttttcatagggcatgggatgctgt

SEQ ID NO: 266490 - DNA, 393 bp, Homo sapiens
aatcagagttgatttcctctttttaaactaaaacaaatatttgctttcattatataacatatatatatcaaaatgagaagaatgtctaaaataagtttgaagctaaagattaaaatcttaatatgcattttacaaacatgtggccctataggaatagtagtttgtttgtttgtttgagacggagtttcactcttgtcacccaggctggagtacagtggtatgatctcagctcagtgcaacctctgcctcccaggttcaagtgattcttctgcctcagtctcccaagtagctgggattacatgtgcacaccaccatgcctagctaatttttgtatttttagtagagacagggttttgccacattggccaggttggtctcgaggtcctgacctca

SEQ ID NO: 266491 - DNA, 217 bp, Homo sapiens
ggaagggagacagacttttgggcaaggaaatagcaaaacagatgcgtgcaaacagaagaccgtcaggaggtgggggaaggctggggagtagggggcactgagagagagaggcagggtctgtggccccaagagaagctcaggccaggcttaaggacagagagcagggaagctggaggccaagggggtttgctttggaagagtctggggacaggacagg

SEQ ID NO: 266492 - DNA, 221 bp, Homo sapiens
ttacccacctcatttccttgagaaccaaattctaaagctcttgccagccttatagatacccaatggaatccctgctcatatgcatactttgggttcatcggtgatttttgctcactgtgactaatccttccagtgtttgtagcctttcttataaggagaacttctatttcagctttgttaatttggcttcacaaagtaaaataaggggccccattgttttg

SEQ ID NO: 266493 - DNA, 461 bp, Homo sapiens
caccccaccagatggtccccttaatacaacaggctgccccacaggcctcagcactagcccaccagccactccagtcctggctccgctgtgtcccacacgactaccccaaaggctacagacatttcccagcaagccaggccacctgcagctttactttccactgaatcgtggctccgtctggcggcttctttctcactgtggaccgcagcacagtggccctctctccgcacccaccccagctccagtctccagcatgcccttcttcccacttttcctccctctttccatgggtgctcggctcacaaccttcctccagacgagtgcctgaccctcccacatcctctgaggagcaccagggccagcacacacctttcctatcgtcgtgtttgccactgttggatcggaggttttctcattttcattctgattcttctctgtcccaacagttttttaggactgtg

SEQ ID NO: 266494 - DNA, 289 bp, Homo sapiens
cactaactcgtcatctagcattaggtgtatctcccaatgctatccctcccccctacccccaccccagctccagtctccagcatgcccttcttcccacttttcctccctctttccatgggtgctcggctcacaaccttcctccagacgagtgcctgaccctcccacatcctctgaggagcaccagggccagcacacacctttcctatcgtcgtgtttgccactgttggatcggaggttttctcattttcattctgattcttctctgtcccaacagttttttaggactgtg

SEQ ID NO: 266495 - DNA, 433 bp, Homo sapiens
aaatgacgagttaatgggtgcagcacagcaacatggcacatgtatacatatgtaactaacctgcacattgtgcacatgtaccctaaaacttaaagtataataaaaaaatgattctgtgtgtataaagatcaaaagacagccaaaacacatctatggcagtgattatttttgctgtacagcagtatgaggcaaggatcatcactgatctgggtggtgtttccagaggtatgttcacttccctttctgtatggttaaaaagttactttaaaaattaacacttaaaaatatgtttaagaccatattttagacctatgaacagtttccttatactaccggagcatgctatgatttgcaacttaagtgaaagcatatatatatgtatatatacacacacgcacacacacacacattcactctaaatgtcttttttaaa

SEQ ID NO: 266496 - DNA, 460 bp, Homo sapiens
tttttttttgagatagagtctctcgccctgtcacccaggctagagtgcagtggcgcgatctcggctcattgcaacctctgcctcctgggttggttcaagtgattctcgtgcctcagcctcccgagtagctgggattacggccatgcattaccacgcccggctaattttttctacttgtagtagagaaggattttcactatgttggccaggctggtctcaaactcctggcctcaagtgatccgctcgcctcggcctcccaaagtgctgccatgtgctttcactacctttttgatcatggccaattaatgaccaggctcccctgagattgtttagtcatctgtgcagaagtaataaatgacatccacctcacaggactgttgggacaattcaagggggaaataaacctcaagaatctgagaacagagcaaggggccaactgttagctccctcacacccaacc

SEQ ID NO: 266497 - DNA, 497 bp, Homo sapiens
gatttggaggaatcgcacaaaccaaacttacagtcagtgaaaaaaaagtgcaaaagtatctactactgtgtgtatactaccttttgtgtaagaaagaaggagaaataagaaaatacgtatgtatttgttcattggggcaaaaacaaaacacaaagataaattggaggttgataagattgatttcctagaggatgggtaaaaaggtatatggtggaaaggatagagggaatgggggcagggacccttctgaggatacctttctgacttttgaaaccatgttaatgtttcacatactgagtatataagcagcaaacacaccaaccaaatcaactgatgacaaataaaaacaccttaacagggagtacaaatagaaacaaatgaactgaaccgtatttcaaatgagtaacttaactacactgaaggagtgaaaaacaactaatttaggtaacttttgatcctagtatttgaactctgtcctcaggataaagacaaaaaga

SEQ ID NO: 266498 - DNA, 489 bp, Homo sapiens
gagctagcaagtttgatgtccttcttctgttccctattctaggtctgggcttgatgttcaccgattttccctcagctccgactgtggctcctctcagctgactctgaccctgctctcagccgggctgcatctgcccatctcagcacatcaataaacagcagagggaaactaccaccttggaaggagccaggcagtttctgctgggtaggccgcagcctggaacatggaagtagcttcttccatcctacactggaaaccacccagcatcccgggccctccagagaagagccagactcccttccctgggaagagactatagtcctatctgtatcctccgtggtcattgcccctcagtcacagcaatgaagagcaaattacctgttttctgtatgttcctctgacaacaactgccacagagtaaatatgaaaggttctggatgattccttgtcagcttttattaaaattccacatacttggcaaaacttagc

SEQ ID NO: 266499 - DNA, 700 bp, Homo sapiens
gtcttccgaagttagcttggcccagtagcccaggaataattaagggaaaggcaagataggggttgggttagcttagcttactaagtttctcactgatacaacttttgcaagggtggtttcattcacatagctgccgtgccatttcttgtcagtttgctcctgcttaacctgagcagctgtattcagacctttgctttgctcttgcataatgtgggtgaattctccctgatgtccttccccacctttttttggaaacttcatctctccccaccttacatatagcctgagctacttatgaagaactgacttgtgtgtacttgattgtgggctgagcgtgcaagacatggcagggaaggctctttgggggctggatgtgctccttgttagaagccttgtgctgtgctgttagatgtcctgggccagtgcctacccatccatgcaggaggtttaacagtccccagttgagcaagaacctcaggaactgggaagaatgggtagtacttcctaccttttttgagattctagaagtttttttattgacttttctccagtctgcttacttagccctttagattacttctctacaaatcaggatactgcagggagtgtgtggaagtgggagcatgctaggggaacaggtagaattggcaaggtattttgacaattctttaagggtttataaaggaatctttcctcattg

SEQ ID NO: 266500 - DNA, 587 bp, Homo sapiens
gtatgtgaatattcatattaactttatttgtagtagctccaaattggaaacaacacaagtccatcaacaagtgaatggacagtgtcagatccatacaaaatactactactaagcaatttacaggaatgtactgatatctgcaataacatagatacatctccaaataattatgctgagtagaagtaaaatgaaaagtacatattatatgattccatttatataaaatcattaaaaaactataaactaatctatggtgaccagtgcttgtctggagttggtgggtggttggtgtttggggaggaaaggattacaaaggagcatcttttgggagggatgaatatgtagattatatcttgttacgatttcacaataaatatatttgtcaaacaccaaattgtacactttgaatatgtatagtttattgtcaaatataccttaaagctgtttaaaaagtttagtaaagatctatgaaaagctattttgtttcaccagaggaattaatcaaacatatctctcaatttacctctttgaaatttggttttacacttttagatgttaataagtcactatataagctcccattttga

SEQ ID NO: 266501 - DNA, 326 bp, Homo sapiens
tctagatttgtggctcttggcttttttcctagctctagccttcgatggcccaaggtggctaggtgagctaaaagtgtaaaagagaagggttcaaaagtgatagctgccactgattttggaagtggacttttgtataatttcaatatttcactttattattattttgcagaaaagttattacaccacagacagtagaatatccagcattcttatccccagacctgaatgttactgttgggactccagctgtgcaatcctccaaccagccatctgtagtgcgacttgaaaaacttcagcaacaaccccgggaaaggtaaaaaaaaaaa

SEQ ID NO: 266502 - DNA, 896 bp, Homo sapiens
agcggagtagcgggccgtcggttgggcgcagacaggccgcagaagatggagagatggagccaccccaagagacaaataggcctttcagcacacttgataaccgcagcgggcaggtccaagtcctgtccgccaccccgctattgcagaggaatccctacagcagcccggatatcatgcacattaaagggtcggaggcttcttcggtcccttacgccctgaaccaggcacgacggccctgcctaagaacaagaaccaggagggcaccgggcaccggctgctgaacatgctgagaaaaactcttaaagagtctgatagtgaagaactggaaataacacaggagacaccaaatttggtgccatttggggatgtggttggctgcctgggcattcatataaagaactgcagacattttatgcctaagatcagtttacaacattatgctaatttattcattcgcatctctataaacaaagctgtgaaatgtacaaaaatgtgtagcttgctatccaaaaacgatgagaagaacactgtaattaagttcgatgaagtgaagtatttttctgtacaggttcccagacgttatgatgataagcggaataatattttattggaactcatacaatatgacaatagagaaaaacgtgctttcttgttagggagtgttcagatacatctttatgaggtaattcagaaagggtgcttcattgaagaggtccaagtgttgcatggaaacatatttgtctgcaggctggaggtggaatttatgttctcctatggaaactttggttatggattttcacatcagttaaaacctcttcagaaaattactgagccatccatggttatgaatcttggcaccacctccagaaagaacagatcccgtgacaagtgtttta

SEQ ID NO: 266503 - DNA, 485 bp, Homo sapiens
agatgcacttaaaatatagttatccaaaagctttaaaagatttaaaaaatatggtatcctgggactagcttgtaccacaagagccagttttgggtgtctctttccaaccccttattcatgttggttgcttgaaatcaatcatggtgcatatatttatttcacagaaattgaccagtcatggtgggctcatgcttgtaatcccaacacttttcaaggccaagacaggatgatcacttgagcctaggagttcaaggctatagtgagctatgattacaccactgcatttcagcccgggtgacagagcaagaccccatctctaaaaaacaaaaaaacatatccgtaccaaaaaatcaacaaacattacaagtcatgctcttcccccaacatccaaagaactgatttaccagcacacaactaaatatacatcagataaatgctaagaaaaagaagatatagcaatattattccaagacaaaattaatggc

SEQ ID NO: 266504 - DNA, 402 bp, Homo sapiens
acaaaaggtttctactttttttcagcatgatccttcgttttttactataacatgtacctgtaaggtattatatgtaagtttcttttgaaaggtaaaaagacttcaccaatgcaaaatgatttttaaaaatatcctcattataacagcaaaggctaaatacattccagaaatccactgttcatatagtttatctcctggggataggggaaccaggaagaacaggagtaacatgtcctgaatgttgcaaagcataatctatgctgatttcataaagtttttagctaatgtatcagaaatcctttcaaagctttggtagttgtttgtggcaggaggcagcgttgtctgtataatttatgatgttcttatattaaatggaaaaaaattaaaagaaattaccaatat

SEQ ID NO: 266505 - DNA, 396 bp, Homo sapiens
gaggaggacgacgatgactccgattatccggaggagctggaagatgacgacgaggacgccagttactccacggaaagcagcttcagcagcactccaggatcttcatgacattcaatgagtagcaaaatttgaagataacttctggaatttcatctaatgtgtactcatctggatcttaggggaaataacctatcaggttatagggaaggaggacctttaataaccaagctaaatgtgtgggctgtttacctctccctcttatgcaaaggtatcccttgcacacactgaaaacttcatagaccaaaagcattatagctctagtttgccttgaaggaagttgtattgtctgtagagcatgtgggccattttctgccaataaaatgttcaaatgttctc

SEQ ID NO: 266506 - DNA, 404 bp, Homo sapiens
agctggtgcaatctcggctcactgcaacctccaactcccttgttcaggcgattctcctgcctcagcctcccgagtagctgggattacaggcacgcaccaccaagcccagctaatttttgtatttttagtagagacggggtttcaccatgttggccaggatgatctcagtctcctgaccttgtgatccgcctgcctctgcctcccaaagtgctgggataacaggcgtaagcatcgcgcggggccgggtggcatttttataaagagtttatttccctttttaaatttaagctacactatgcctatgatctgctactctttcttatggaggtaggggtgtgtgcgtgtgggtgtgagagagtgtgtcttgttcttgttgttgcttctgttgttgttaaagaaattat

SEQ ID NO: 266507 - DNA, 393 bp, Homo sapiens
gtatttggtactcttgacttgcagttgtagatgttagatttataagccggacccaggaggtcatataacccagacatgcttgttgtacagatgaagaaccgtggataggttaagtgctaacttcgtgtagcttgaagtcattgaacttcttggctatatatgaactttgggttcaggggtagttccctaacccatctgtgtccccattggcccattagtgtattttttggctcagttaaagttgagccacagaagccttaactaatagaaatacagttcttagttggtggatttgtatgtcagttaaccagggtctttggaaagtatattgtcttttctataaaatgcttgggtcctttagatgattataaataaatgttcaaaatcaaaaca

SEQ ID NO: 266508 - DNA, 371 bp, Homo sapiens
ataataacattttactttcaaatttgttttagtggttaaaaaaaagtacacatgcaacatgcttgacactaggagagttatcagaaatggatagcctctcaaattctgtcaattttgaaatggaaggtggttctgatcttatttgtgtgaatctggaagcatcagaatacttcacattcaatttttttagttagttagttactcccaatttgataaaatgagttcatagcattttggggaatgagcttacagccttgacaacagagcgtccagggagaaatgccctctagtggacgttttatccccactcggaggatacctgggaggatctcttaagtgtctcatttttttctctaacacattttacaagt

SEQ ID NO: 266509 - DNA, 701 bp, Homo sapiens
gttttttagtaaatgtaaagatgttgtatattaatttcatagttttattattatgaaagttatacatttgaaattcagatatcaaattaagtttctggatattaatgttttaaatactgtctgtgttgaattggtcaataggtataaaagtaatttaagacttctttgtctccattctataagatttggatttcatatttctttgtgaattattgttcttgttattcctgctatttgttttgattctatctgtgcagaaatgcatggaaatctattgaaaggtgattcagcaagtgctgtctcgcattacaaatgtcagctgctcaccacagcatgtgtgtatttttatttcatctcaaattttttaatcagaatataaagaaaaaaatccagcattattttgggaaaaagagaaaaataatttagatttcaattaagtatatttatcctctcccaaattatatgctctcctttttaaccttaatttaaatttaaccacacatttatctttacttatttatttttatttaggtaaaatatacatgtacaatttaccatatttgccatttttcagtgtatagtttagtggtaataaatggatttatattcttttttctcctccatatcccccctttcccttgcacttagcatgtatgtatttttaattttaaaaggagatttctctttctacccccacagct

SEQ ID NO: 266510 - DNA, 405 bp, Homo sapiens
ttttttgagacggagtctcgctctgtcgcccaggctggagtgcagtggcgccatctcggctcactgcaagctccgcctcccaggttcacgccattctcctgcctcagcctcccgagtagctgggactacaggcgcccgctaccacgcccggctaattttttgtatttttagtagagacggggtttcaccgtgttagccaggatggtctcgatctcctgacctcgtgatccgcccgcctcggcctcccaaagtgctgggattacaggcgtgagccaccgcgcccggccatatttaatactttttatgtgaagagaaaataagtaaggataaagcaaaaaaattcccaaccaatgttttgctgtttaacgttcctctatttgaagataaacctaaagccaaaaaatg

SEQ ID NO: 266511 - DNA, 375 bp, Homo sapiens
agctgcctcagttgtgacagttctaccagaccataaattaagctattattagtatcagctgttacttattatttaactcagtagtgctgcactgtaattctacaactcttaacttggcaaacatgttgtaatggagccagctgtatgaaagagtctatataaaattaactttactattcttgttattatagtttaggagtcaccctaccaagtgggtatgatgatgaaggtgagctgctaagaaagaggttgagagacagctgatgtttgtttcaagcaaatcttctttaacccgaggcaccaggagcagagggccagtgggtaaaaaggttaagtaggatggaatctacaataaagccaaatgtgtgggttcta

SEQ ID NO: 266512 - DNA, 627 bp, Homo sapiens
gtcagacagggcatggagcctcctgtgagtgccagctgctcgtggctagctgaccctgtggccagaacattagaggagctcccagcagctgcctaggcacctttgtttcagggaacctccctttcttttcctgccgtggcatctgctgcttccaatgctttgctgataaaaagaaagtgacattttgaagaagttgacaaactttggaactgagttgttggtgtgcacccaaccttcctctgcctcttctggggtgttgctggggctctgctctgtttagacttagctgctggcatcaccatttaggcatttttatgcatttgtacttgtgacacactcagggctttgctcacatcgactcaatcatctaggaggacaggttaaaattaagatatgaaatgtggaactctacccagacccgtatggggatttgtttggaagcaagctgtttgtatacatttgtatttgtttgtatttgtggcatcctcagggctttgctcacatccaactctgtcacctggggggccgttttgtgatatttgtgtttgtatgggccctgatctctctctttccccttcttccaacttcatcctcttgattatcttggaagctacccacagccttact

SEQ ID NO: 266513 - DNA, 380 bp, Homo sapiens
ctggctaattttgtatgtttttgttgagatggggtttctccatgttggtcaggttggtctctaactcctgacctcaggtgatctgcccacctcagcctcccaaagtgctgggattacaggcatgagccaccgcgcccagctaaaatgattttaaatgtagtattggtgcttataactgattgtttatagatttagattataattgtcttctattatacttgtttaaactttgtgaagtgatattttatagaaatatatagcatttatatataacacagaatattatgccaatatagaattatatagtattctatactatacattatatatacttctgccgaggtgggcggatcatgaggtcaggagattgacaccatcct

SEQ ID NO: 266514 - DNA, 452 bp, Homo sapiens
ccaaaaggctgtgtttagttttttggcattagactcacatcatctgtgaaaatctttctgcaaatgtctttgcttgcttgtactcacatttttgtaggacattatcctaaaatggttacatttccacttaaaatgattaaggctgggcatggtggctcacacctataatcccaggactttggaagaccaagtcaggcagatcacttgagcccaggagtttgagagtgacctgggcaacacggtgaaaccccatctctacaaaaaattatccgggtgtggtggtgcgctcctgtagtcccagctactcgggaggctgagacgggaggatcgcttgaaccctgggatgtcaaggctgcagtgagctgtgattgcactgctgcactccagcctgggtgacagggagaccctgtttcaaaaaggagaaaaatcagattaaaggaggtgtacattta

SEQ ID NO: 266515 - DNA, 402 bp, Homo sapiens
agataatatatgcaaaatactgtgaaaactactagggcaagtataaggaattatcatctaatttagctggctacagatacccaatggttcatccagaagtttgttccagctaacagcagttgtgcctctttcatgagacttatcatcctttggtggactagactagacttatttggaacatggagacctaagagtttcaagactgaaagcaaatgattaggacatttccctaaggtctaaccccagaagtcatatagctttgctgtgctgtattctttgggtcaaagaaaatcacaaggtcaggccaggttcaagggaaagggaaaatatgctccaccttgtgatggcagatttggaaataatcacatacaaataaaataaaaattaaaacatggtcaagaa

SEQ ID NO: 266516 - DNA, 557 bp, Homo sapiens
  misc_feature (95)..(95): n is a, c, g, or t
tcacggtgaggaagccccgatgctcccgggacgcagacagggtgtgcagggccgtagctcgggcctgtgtatgcacctgtgcgtgtgtgtttgangccaggacaaggcggcggtgtgcgcggcgaggaggctgcgacagctgtatagaccccagctgcagtgaaatggccatcaaaaagggaagggataatcgagtggtggaataaaatctgcaaacagaaaaaggacagacctgttttcggaacgaggcttttcgagttaccaccatgactgaaggctaagagcaacttgcttgcgcattaaagatcacttggagagagaggtccagtgagcaacaacggccagaaatttcagggagaccatcttgaaccatccagcctccaccaggccaacagctgacagctgtcacatgaatatgatcagcagaagaaccactcaggcaagccaagcccaaattgccaagccccccaaataataagctaattgttttttgttttaagccataaacttttgaggtggttatatagcaataaataactgaaacaggtgtttaaatt

SEQ ID NO: 266517 - DNA, 354 bp, Homo sapiens
gagacaaagcttcaggaagtcttgcagctttttctcttccccttttcctgccctgagaccaccatgactgaaggctaagagcaacttgcttgcgcattaaagatcacttggagagagaggtccagtgagcaacaacggccagaaatttcagggagaccatcttgaaccatccagcctccaccaggccaacagctgacagctgtcacatgaatatgatcagcagaagaaccactcaggcaagccaagcccaaattgccaagccccccaaataataagctaattgttttttgttttaagccataaacttttgaggtggttatatagcaataaataactgaaacaggtgtttaaatt

SEQ ID NO: 266518 - DNA, 233 bp, Homo sapiens
gctggcaaggtccaattggaaaagcattcagaagacaagaaggtgaattagcgaagtggaaagagaggttgaatgaaaatgtatacaattttttatgacaaactgggtgtaaatcatagtttatgtataattctaaagacagaggattgatggccctacatcaactttagtgccagagtaaaactaaaggagatgtgtgccactggggtctttcctaaaatacaaagttaaaa

SEQ ID NO: 266519 - DNA, 423 bp, Homo sapiens
aattaacccaattgcctctagagggcaaataattaacagaattgcctccagtttctccatggctttctaaagaggggtcaagacttgctggatgccagatgttttccagggatcccagagaattggtctatggaggcagtgctttactgtattatggaagaggaattaatcacactaattgcttactctgtacttttgcttaatgatacaatataaacaaatacaatgagaaatcattttaaagcaatcaaacgggcttcaagttattaaagctcctgaagaatcaaacattacctccatatatagaattattatactaggtgcaattaatgatttgatttatagatgtttttacataggtttgatatgcaacaagtctaggggtataaaatcaataaaatctgccttctaataagcagtggt

SEQ ID NO: 266520 - DNA, 603 bp, Homo sapiens
tgtgaaatgaggatgggaaagcacctgagtagtgggtggggtagtgagagcatcagtgcctcagaacagcaggcaggacttccttccaattcctgttctgacattcgccctctctacaagcctgagtaagacactgccttatctgtgccttcatttctctctgatacttggtggtactgggttgacttctccctgggggacccgaaaaaagaagtcatctgaaagaattttggtgacagaaaaaaaagtgagactttcatttcatattcactaaaagaaaggaccgtcttcaacatgtgaaaattaaaacagactacatctccaacgctttctatgcccacttcctgggttgcaactttataatctaatagaccttggaaaaggaattattttgcctttcgagggccaggttttctcaaatggatagagacacgtagctgacttcactgaccccaggacccgagtgcctcaagggcacagctacagaacagaaggctccagatcgcccaagtcagggagacgctgaacagccgtgtaccaaaaggtggccagttctcattatttttctcaattaaaataaaccatttattggaaatggaaaaa

SEQ ID NO: 266521 - DNA, 373 bp, Homo sapiens
tgtgaaatgaggatgggaaagcacctgagtagtgggtggggtagtgagagcatcagtgcctcagaacagcaggcaggacttccttccaattcctgttctgacattcgccctctctacaagcctgagtaagacactgccttatctgtgccttcatttctctctgatacttggtggtactgggttgacttctccctgggggacccgaaaaaagaagtcatctgaaagaattttggtgacagaaaaaaaagtgagactttcatttcatattcactaaaagaaaggaccgtcttcaacatgtgaaaattaaaacagactacatctccaacgctttctatgcccacttcccagctggctcagaggggtacggagctcg

SEQ ID NO: 266522 - DNA, 612 bp, Homo sapiens
acaaagaaaagttcaagcttttttgaagtatattcatgactcagccacctttattttgatcatgaaaatgacatcttaggttttctaaatatgattactctgtttagtcgtgatttgttttgtgctttttagcacatactctttgggagggattgtacataatctttgtgttcaatggctgtgttttcatttgtggacatttttaaaatatagcaatgaaagtttcttttttttttcccaaaaagatagttggtggaaattgttcagaagacaattgtatttcatttgggcttctgttttatttcacaaacagcaattaagtgatttttttaaaaaaatacattgcaaaaaatagaactttaactaatatggactttagtgttataattcccaacatttctccttcctcaacaatctagctatatatttctcctgttttttttttaacatggatgatctgcatgttttgtatatagtttttttagcccgagagggctgatataccaccatactcaaataaatttggacaaactcagaagatagtgtcattctcactctacagagacttcaaagcatagaggaaatacttttttttaaagaaagctgtgaatt

SEQ ID NO: 266523 - DNA, 232 bp, Homo sapiens
agaatcaattacaaactaagagagttcagtaaggcatgagaagtggcccctgacagctgagaacaggcattaccaccgggctgctgtcatctcctgttgaacataaacacttaagcagaacacaaacatcaatcaaggccactttatctcactgatggatcaggacaaaacccaaatttctctgtaatcatgtctgaacccaaaagaagacattaaaagtgaccaaacgtgc

SEQ ID NO: 266524 - DNA, 744 bp, Homo sapiens
gagtggaaagctgatctttgattacttattttacttagggctgaggagttcatggacttcgcaaaacctccttgaatctaaattgcatcttctttcctggtttctgggctgatacatgttttttcccatcttatatacccttggtcttttcattggcgattaagactagagaaagttagataccttgtccttttatgctgtcattttgtttaaaggctttctatgtagtaaaactatctatatagacaaaatagagccttgagttgtggtcttgaatttgatcaacatgatttaccacattctgtactggatatttcttcacctgctgctactgtaaaccattttattcttggatcttctgtagagtatattatcacaggtactttttacaggggtgtctaatcttttggcttccctgggcacattgaaagaagaagaattgtcttgggccacacatcaaatacgctaacactaataatagttgatgagctaaaaaaaaaaaaaaaagcaaaaaagtctcataatgttttaagaaagtttatgaacttgtgttgggcctcattcgaagccatcctgggccacaggttggatgaatttaattgacccaaaatcataagggttctactaacagttgtacttaacagtatctgggaagatagaaacagggccatctgccaggtgtggtggctcatgcctgtaatcccagcacctaggaaggccgagtagggtggattacttgaggtc

SEQ ID NO: 266525 - DNA, 473 bp, Homo sapiens
cacagctacttgggatgccgaggcaggagaatcacttgaacccaggaggcggtggttacggtgagccaagatcacaccactgcactgcagcctgattgacaagagcaaaactgtcttaaaacaaaaaaagaaagaaaaagaaaaatctcaaccaagcaagggacactgagtgcagaagcgatgaattaaccacagggaggactaacaaaggctccttggagaacgggacacttgagagcacctcagcagatggttagagaagctcttacattagaaactactgaaggagggaggggtgtccaggcagaggcaatggctgaagcaaaggcgcagagctgggaaaggagaggtgtgtgggagtgctggggcccgtcacccgctgtgcgaggacgccctctgggaaggtcactgagtccaggctgaagagtatggactttatcctccaggcactggctagcccctgaatgtgctag

SEQ ID NO: 266526 - DNA, 537 bp, Homo sapiens
gacagaccaaaggcaatttaattttggttataattgaggatgttgaagaaagcattgaatggaagacattgcagaagaagaaacagcagaaaatcaaggaaaaacttagaataagaacaaaagcagctgtaaagatccaggcctggtggcggggcaccctggtgcgcaggacactgctgcatgcagccctcagggcctggataattcagtgctggtggcggatgacgctgtcgagggtgctggagaagaaacggcaggcagctctgatcgcctacgcaaccagagagagggcagtgatcaagctccagtctttggtccgtatgtggcgtgtccgctggcgatactgccaggtgctcaatgccatctacatcatccagggccactggcaatgccacaactgccagacctgcgctctcctccagggccactgtgtggtcacagccactcacctgcagttccacattgagatcatcaactcctaagggctggcaagaagggcactgtgtctctgtccctattaaaggaaaaacctggaaa

SEQ ID NO: 266527 - DNA, 451 bp, Homo sapiens
tatagtcagtcccctgcttttatctattgtctgctgttatataggacaggcaaaactgggtcaacactgtctctgctgcttactagtttgtgactttaggcaagttaacttctcagagttttaattttattatcttaaaactggagtttataatagttcgtactttatagcattgttgtaaagatgaggtctttttaaaacataacaactagaactactctcaaagttccaaatacaaatgctattttctgtttctagtaattttcctgttaactactcaacatttaggtgactgttatagctgcagaagcacagtacgcttagagctttaggaagtgtcactaataaactatgatatctctaattaaatgtctgtaaattataaatgtctctaataaaaataataaagtaaatcttataacttacaatctaacaaattataagttatatg

SEQ ID NO: 266528 - DNA, 675 bp, Homo sapiens
atcaggctgctttctccaatagtataatgttgataaatcagagcattgttcactcaagaactgtcgattccataaagtcttactttgggttgtctactctgagatcgatggagtacatttgacccaaataagctgtcctgtcttacatatccagactatgctaagttcagaacttctccaaatgccttggagaagctatagtttttgcaaggctgggccttaagagaggatgttgtgctccaggtgttggtatttaaacatctgcaccctttggaaatctctttttgtgttggtgagttgttctataaatatgtttgtctattgtcatttgtaaatactatttactcattcattgttttctgatgaaggaattattaaattactcctaagtatttctttcatttgaaacttattttattattatgtttctagcattttgtgcaatgggttactttatctacttttttttttttgagacagagtctcactctgtcacccaggctggagtgcagtggcatgattacagctcactgcagtctaggcctcctgggcttaagctcttcatgcctcagcctcctgagtagttgggaccacaagtgtatgccatcatgctggactaattttttttttttccccatagagatggtatctgcctatgtcgcccaggctggtctc

SEQ ID NO: 266529 - DNA, 1685 bp, Homo sapiens
gtgggtaccctttaagagcctagctcagtaccaccaaccttaggatagctctccttgatgagttccattttctgatgactatgtttattactcagtacattctgtgtacagttggcactttgtggatttggacttaacttctcttatttgtacattgcacaaacttaagtctgttttgcctgtgtctcctaactcctcaagattgtatgtttcctaaggacaagaaccatgcctgcaccttaatatatgcctcaaatgtcaaagcatttctctgtaccagtaaatagttgttaactgttgataagggtaaatatggtcataaatacaaagatctctgagtcatttgggaagcatattaagtataagtccattttatactggataagcagacttttcatagaggtgaagatcccctaaaagtcatgattttaagatgtgacacagagacacttgggtttttaaaaatgtgcagagacattcatactaaactgccccctaggatttatttagtttcattcttaattatctacaggtgatatactgggcagtctgactttttacttcccatggaccttatcagcatctctgctaacccctactcctgagtgcaatcttgtagttcaacaatagctaggaggaaaagcctttgaaaacaaatccatgccttgccttttgtttctttccccaccttgtgaaggaatgaagtaggacttaggagaacagctccctttggatccctctcaaaggtgataccattggctcccagcttagagtaagaagctctgagaagttgaatgaagggtgagatagagatgctgaacccattcttccagcttcttctagtgttgttatttccagaatggccaacacccctacattgatacataaacacattccaaggccttgtgtaatacaaagttcaccgtcctcctggaataggagccctgggttctagttctcactctgccactgggggaaaatccaattaaagtctggtttagtcagcttgggtcaccatagactgggtggcttaaacagcagacatttatttctggtagtttctggaggctacaaatctaagagcaaggtgccagcatggtcacattctggtgagggccctcttcctggcttgtagacggctgccttctcaccgtgtgctcacatagcctttcgtgtggtgtgtgtgttgtgtgtgtgcgtgcgtgcaagcttcctgatgtctcttcttagaaggaccaccaaccccatcatgagagccctactctcatgacttagcctaaccctaattaccctccaaaggccccatctccaaatgccatcacattggagggtagagcttcaacatagggattttgggggacacaaacattcagtccataacaaaggctgtagtccttagtttccttgtctgtgaaatgagagtgttgagattctttctagcctttatcatttataattctgtgagatgtagatttgcattattttcgagttcgagttatatgaaatgtttccctctacattttcttgggcaactgagaactgaatagggctaggtttaaatagagttaggcagttaggcttattcttttatttaataagcatttttggagcatctacggtgttccaggaactgaactgttgtaaacattggagctgtaacagagaacaaaagagacaaaaaaaaa

SEQ ID NO: 266530 - DNA, 531 bp, Homo sapiens
gacatagtctcactccgtcgtccaggctggagtgcagtggcgcgaccttggctcactgcaacctatgcctcctgggttcaagcgattctcctgcctcagcctcccaagtagctgggactataggcacatgctaccacgcctggctaattttttgtatttttagtagagatggggtttcactgtgttagccaggatggtctcaatctcctgacctcatgatccgcccgcctcagcctcccaaagtgctgggattacgggagtgagccaccatgcccagcgatgtttagatgtttttgcggaagcaaaagtttcttgccctaaagctttagaactccattaggtattgaagatgactctttggggctataaaataaaatgcagtaaacatactagttttatattgcatgcaaagtccaaatagttgagaaatgtcctctattagatttcacaaaacagaaagaattctgagccaggcacaatggctcatgcctgcaatcctagcacaagagactgaggtgggagagaatcact

SEQ ID NO: 266531 - DNA, 586 bp, Homo sapiens
gaattaccttaagtagtcaaatttacagaaacaaagtagaatggtggttcccaggggctgggagaggcggggaatggatgtgtttggtgttgcttaatgggtacaaagtttctgatttgcaagatgaaaaagttctggagatggatggtggtgatgattgcacaacagtgtgaatgtacttaataccactgaactgtacacttaaaaatcgttaaaatcgtagaaataaacaaatgcagctcatatttaaagggaaaaaaatttcaaattaaccatcatatcacagatctcttcagaattaaagggatgctttatatgttaggtattttgtacgtttgttctggtttgtccagttgcagagagaaatacacaaatatgtcaacattgcttaaatgctaagcagttatggggaacattttgtaagaacagatacaatattggttaaattccatgagggggttgagtgagaactaaggaaatttgaaattcgagcttgaaatctccatttggatgtagaattgatatctcaaatttgaaatgttctaaactgaattcatgattgccccaccccaaaatcaaaacagag

SEQ ID NO: 266532 - DNA, 489 bp, Homo sapiens
ctctgcactggaacaggagattcagatttacagtgaagtaccattaaaattaactccacagttctttagtggtatacttttctgtggtatagaagccagcagtatctgacacttaaaagtacttttattttattgaacagattttttaaaatacattgacattgtataaaatttgaaagttttacaaaggtactcagtgggccgggtgcagtggctcacgcctgtaatcccagcactttgggaggccgaggcgggtggatcacagcgtcaggagatcgagaccatcctggctaacacggtgaaaccccgtctctactaaaaatacaaaaaattagccgcccgtggtggcgggcgcctgtactcccagctactcaggaggctgaggcaggaggatgatttgaacccgggaggcggaggttgcaatgagctgagatcgctccactgcactccagcctgggcgaaagtgcgagacgccgtctcaaaaaaaaa

SEQ ID NO: 266533 - DNA, 431 bp, Homo sapiens
ccgccttggcctctcaaagtgcgtgggtaagccaccgctcccggcccaacatatcacttctttaagaatcttagccttgcaagttttaggtgtattttggtaacttgtagctacttcaaaataattatggaagcattttagtcatatatatgttttttttcctgagggaatgtccagaatttgttccacaggcaccatccttagggatgatatctctgatagttttcctggtcttcaaattctagcaaaatgtacacattggtggtactgtcttcaacatgcggagctaccatggagttaattaatttccgaattcctccaagaatcaaaacaaagacatggacaatgataaaacttgtcacaaggtgctgcttaactgatcactaaactcggggtaccagaatattgaacaaaagtatgaactaggaaaa

SEQ ID NO: 266534 - DNA, 291 bp, Homo sapiens
ccaagatccatggaggctcctgtgactcagatcaactgccctgcccgggaaacctggtctctccggaaaccttgattaaactgctttttctgacacctcttcctctacaacccttgattctatcaccattgaaacttcagaaccaactctaaccatccccacctccaggtgaggggactaatgagaattactgacagcctgatggctacccccaagtcagtttcccttcatactttactacaaatctgaccatgttcccatatttactgagtaaatttgatgaaatttacc

SEQ ID NO: 266535 - DNA, 573 bp, Homo sapiens
tgctgccgctgccaccaccaccacgaccgctgccccagaagagctacaggtaggtttagcaaagcttgtagattatcgacccactctgataatctacaagggagacagacctgagaactccaacctggaagaacctctcaacatcagacttcataaaaaagactctgagagaaagatacctcaccaatttctcagggtgaaaaacactttgcttggaaatcacaacttactgagcaccaaaagattcattcagcagaggaacctcacatgtgttgtggcttgagagaagctttcttagttcagacctttatagacactaacatttccacacaagggagaaaccctaaaatgtgctacattttatgaaaagcattttgacagtgtgttttcagaattgtaagatatttctccccagtgatcaagaaattcctcatctgataaactattccgaggggaaaacaaaagagcaaaacaaaattaaatctttatttatacactcacacacacagagaacctccagtgactcagtgactctctattgcactgataataaagcaataaaccactctacag

SEQ ID NO: 266536 - DNA, 461 bp, Homo sapiens
aaatacttaacattgtgttacaattgtctgcagtattcactatagtaacatgctgtacagacttgtagcctaggagcaatgggctatagcatatagcctagatataggctataccatctaggtttgtttaggtacattttatggttttcccacaaggaagaaataacctaacaacacatttctcacaatgtatgcctgtcatttagtgatgcatgactgtatttattctgagaacaaaaggcttggtgcaaatgaacctttgaagcaagtctgaattataagaataagatagtcaaggataaaataacagtgttcaagtagttcaggtgcttcagtatcagaaacaaatttattatggatgaatcttccttaggaaaaccactggttgtgtaagatgaagttctgtgtatgacggtggaagaatagccataggccagtatccatgaactgttgcctgcacg

SEQ ID NO: 266537 - DNA, 400 bp, Homo sapiens
acaaatgttgactgaagatagataaaactctaattaaaaatttaaaaggttaaacactgtattagaatgggcaactaaaatattcgtggtgtcagtttaattagtgtcaaactggcaagtcagagttttacaacctactagtaatctatgccgggtcttgttgtttgtgcactgtgttttgctttgctttgttttggtttttaaacagacttacctgtaaagttatcttacggaattattctttctccatatcttttaaggaattattctttctccatatcatcttttaattcctgttattagttttggaagcttatccataagtttccaaagacaagatgatataaaagttaaaaagcattcctctttacttatatcaaattattcttgtctttcaaaa

SEQ ID NO: 266538 - DNA, 519 bp, Homo sapiens
ataaccaaaaatgtaaatgttctatcagaaagggaaggaagaagtaaaaaagcttgttttccagaagaaattagaaaagagcgatgacatgatatatatatacccacatttgacccttaagacgaacacacaccaagcatacgggaagaagctagaaatttgaatcactttaataaatatatatggcatatcaattctgcacaaaactgcattaactggtacaatgacacccaaatgaatgtacaccatatactatccccagggcctcacagggataaagaagaggagtgtacatatgcttaatgatcaaaagaaaagagataatccaacctgaacaacaactacagttgaaactaaggggaagagaatctgacatagataacaccacacagaagcaaaggaagtcaaggaactcacattcactgcttgcccactatttgccagtcactctgttggctggccaccttcatttcaatgctacagataagcagcagggtggggagagcagggatggacaag

SEQ ID NO: 266539 - DNA, 373 bp, Homo sapiens
aattgattcctttgaggcaactcaaaaaattaaatccaacagcataagaaaaacagaagaaatagagttaaaggagaaaattaaaataagataaaacaaggcttgggtgaggaccacacccataccccatgctctaaagcctgtactcttgctagaaatgggcttagttgtggctctggctttttagcagccaaaacacaaaggaaagtgagacctggtgcccaatccacatgggtcacagtgaaaccaacaagaagctcagaggtgtggcctgagagtgatttgtcccaagggctcagactgaaagaatgcaatgtgagaggtatgccacatcttcataaataaagcacaatccatatgcctacaaagtctg

SEQ ID NO: 266540 - DNA, 340 bp, Homo sapiens
aattctttctgaatacgtcagtatttatatttattagatcttactgttcaataagtcattcaaatcatgatcaaaagtcgttattttattattaaatacaaatatttaagttgggttttttcttatactagcttaaaattttattctattccatcaaaagctatcatgctcagttttctcacgatcatactcaaatttcaatactatcataacttatttctctgaattatatacatatggtttattttaatgatttgtggcatttaatgaatgttatacagttgttcattgttatttcagaacaatgtaagtttagaaaattaaaatgttcaaaagttta

SEQ ID NO: 266541 - DNA, 473 bp, Homo sapiens
gcaagctggaggagcctgagctaaatgcccagatcagacaggaagaaatagagaggtctttcagaaagttctcagaatggcagacaggaataaagggagaactggaggcttcatggagtagcactgtagagagagggaaaccctggggctgaacacagagaagtatgacttcagaaaagcacgatcctggtgagaagagaccctaatctcttgctctcatctttctttctttctttctttccttccttcctttctccttccttcttctctacttttctccctccctccctttcaatcgcactcatacacacacacacacaaatgtctaatacatatctttctttctttcatgaaattccatgtgctatgtaatatagaccctctctggccaactataaatcatcagtaaagtctacatttttcacgaatgcctgtagtgtgagttttctttttaagggatacaagaaaatcct

SEQ ID NO: 266542 - DNA, 413 bp, Homo sapiens
cagatatcaagtattactagaaactgtaaaaattaaggtagcatagaactgtcacagaacaaactaaaaacacagaataggaagcccagaaacacatccaaacatatatggacactagatttagacagaaccagtgctgtagagccttgagaagaaatagatggacaataaataggactgggatgaccggttatctacatagaataacataagttaattggactgctgcatcacagtatgagcaaaaaattacctctagctggattaaatacagaaatggaaaatgcaaaactataaaactttcggcaaaataattttttggctttgaattaaggaagattgcctctgtgtacaaagcataaagggaatgattgataaatatgaatttattaagattcaaaacttgtgttctt

SEQ ID NO: 266543 - DNA, 724 bp, Homo sapiens
gaaaataagagccacaagggaagaggatatgaactgcaggaacacaaatgtccagtgcagtgaaaagtagtgtcttggcaaccccagggggccctgagaacatcattgagtgagaaggaaaattaagacacaccctcatgaagggcacggaacacctgctaagccccggtggaagcagcagcatgctgcagtctctgcctccagcagccccagcccagagtttctcctaagtgaggccacctgcagatcccacaataccatgagtcggagcctggcaggacatcaggagaatgttccctcctttagtcttggggctgggggctaaggtgttaggactgtgttgtattgaaagatgtggagacaacataaggggtcacctgggtgtgctgtgaaaacgttgctgcttatttagttagtatgggacaggggtgagttctacatttctcaagctcccaggtgatgtgatgctgctggtccatgggccacattttcagttgctaccacagaggtggcataacttccctaaattatccccgaaggggccaggtacccacctcctaataagggaatcgagtttaggcccccatggaaggaactggaaaggaggcctgaagcatggaaaagcagatgcctcggcgtcagggacaagaggtgccagcctgggaagggtctcgcccgcctgcaagcatccagaaggagcagatccactccaaagaataataat

SEQ ID NO: 266544 - DNA, 687 bp, Homo sapiens
acaaaacaaaaaactgaaacaacgtgaacatctatagtaggaattgacaatactctcatggcggactagtctccatttagggcagcagtccccaatctttttggcaccagggactggttttgtggcagataattttccatggatgagggtgggggacagtttcaggatgattcaagcacatgacatttattgtgtactttattcctatccttattacactgtaatatatcatgaaataattatagaactcaccatcatgtagaatcagtgggagtcctaagcttgttttcccgcaactaaacggtctcatgtgggggtgatgggagatggtgacagatcatcgggcattagattctcaggagcatgcaacctagatccctcgtgtgcacagttcacaatagggttcaagttcctatgagaatctaatgctgctgctgacctgataggaggcagagctcaggcgataatgcaactgatgggaagcagctgtcaatacagatgaagcttcgctcactcacctgccactcacctcctgctgtgtggcctagttcctaacaggacatggtctgtggccgaggggttgaggactcctgatttaggaaaacactacaacagacagctctgaaaagcttcgtaagaaagaggcagcacactgggtgatttataggtacaaatatgatccaactg

SEQ ID NO: 266545 - DNA, 723 bp, Homo sapiens
tgagatgaacccggtacctcagatggaaatgcagaaatcacccgtcttctgcgtcgctcacgctgggagctgtagattcggccatcttggctcctccccgactttgtttttcgattgttttgtcccttgagattttatcttagtttgacgtggattttttttcatagaatcattgcccaggtaattttttaatttctaaaaagaaatcattgagattttgatagacattatgtcaaatctgtagatcccttttggtaatattgacttcttaacaatattatatcttccaatctatgaacatggattggaaaggatattctacttaagggtgtcttccttaatttctttcaccaaaatttgtagtttgcagtgaacaagtcttttgcctctaaggttattcctaagtattttatccctttgatgctattgtaaataaaattttgttcttaatttccttcttggattgtttgttgttagtgcatagaaagacaactgatatttgcatgttgattttatatcttgtaactttgctaaattggtttattagtttcaacactgtttttgttgggatttttagggttttctacctataagaccaagttgtctgtgaacagagataattttacttcttcctttccaacttggatgccttttatttcttttccttgcctaatttctctggctaagacttctagtactatgttgaatagagtgataaaaaga

SEQ ID NO: 266546 - DNA, 376 bp, Homo sapiens
gttgaatttcaaagataaatatttattgatgtaattaattacttatacatagtattaatacttaattcagagggcagttcatgactaataaaaaaaagagttggctattagatggtcatttaggagcaattccttccaaatagcaaattttgctaatttcaaggctaaggcacatgcatttttaaatgagattttcaaagaaagttaaaacagcacttgaattaagtagaggtgattgaagtgataatcaagtaaaacctttatcaagaaaataaaattgacccatcccccacacattccacctacccaactaattttttgtagtttttagtattccaaaaagttgtacaatactcacaactacctaactccagaa

SEQ ID NO: 266547 - DNA, 488 bp, Homo sapiens
actatatctctttttattcacaacactatattctcagtgcttagaatgaggcctgacagactctcaatgagtatttattgaatgaataaatgtgtgagtaaatgaataagtaacatctgatctaaaaccagagccagattctttctgaccttcagcctaataatactttacttactataacctggagattcccattttgtaatgtcccctctatgaggcttgtcttaacaggtagatatgaacgaattgaagacacccacaatgccagctattgttttctatggcaacactgcccatctcagtgctggttcctggggcacatgacaagaatatctggttgagtccacaggagacagacctcatgggaagatgacacgatcatgaagcctgctcatctcctctactgtccagtgaacttgggcaaagtcactttaactctttggactttaatttcttgtttattaaacaagtgaatatcaaaaaaaaat

SEQ ID NO: 266548 - DNA, 320 bp, Homo sapiens
acaatgctctttgaaacaaaaggctgtccatggaggccaacagccttcttgtttcaagcaacatttgctccaaacaaaatttcagtgtgaattttttaaaaaagcagggcactcctggagagctcactgttaacaagaagcaatctgggccccgagagggctgggctgcacgctgcctccttgcatgcacttacctgcgttcagaagtccagcgacccactgatcaggcatcagctcactgctcccagctcccacccatgccccctctgcagcatggagcccaggccaggctgaggacccagccatggttaaccatttcc

SEQ ID NO: 266549 - DNA, 384 bp, Homo sapiens
ttggagaagcaggagggcattggcttaaccaagccgaaggctgctggctgggctgcctagcccagctaagatcttccttcagcccacctcaggatccgggcttgagggctgcagggcctgcgtgcgctccctcccccgaaatcacttctcagggcaaaggagccccaggcatctcatgctttgcccttcttagggctcaggttcttgccttagcacatagcttctgggagcttttttgaagcatttcataagggccaaggaagtggggcagggcttttctgatccaaagaaaacaaagtttctctggttacccctcttcccttgttatctaagctttcctcagttgtcatctcttcccagctctttggtccaagagggggctga

SEQ ID NO: 266550 - DNA, 538 bp, Homo sapiens
tcatcattttttcctgagctttcaggttctcctcagctcctgatacttaaataattcccatttaaaaagcatttaattgagaggagcctggaaactcaccagctcagagaaaaattcagtccatcaagaggttctgagagtctttgggtttaagtctttctgatcttttactcctcaatcctctaatcctttttgtgaggaatctttcacaatccttgtttttagttcttatttctcaagtttccctttgaaaagcaggattcccatcacatctcaaaggtgaaggcagcataaagcctgcttccaacaacactactgcggttacataaagacacgagtcatttctgctgctggaggctccagtggagtgttcccttggatttgctcatttctttgcttggtcctccctgtgatcttagaggattgcagtatttatgaacatcatcttgttactttccatttagtacatttctgcctagtcattggtttttaattttgtcctcgtaccctccatttacaaacagaaatgtttaactaa

SEQ ID NO: 266551 - DNA, 285 bp, Homo sapiens
aaagttgttaagtattcatttgaaaacatagcatttagtacctattaatttgcgaagacctctgctatttgatttattttgaattatacctcttcaacaccctgaactccaataattctttgatctcaaaaggatctacaactcactattgatcttgcctacccttcaatgttcattatccttcttaagccttcactccgaccttattcagcttatatttccagttcagctttagaatcacttattgggatatctctatattcccttgtacatgtacctgccacc

SEQ ID NO: 266552 - DNA, 399 bp, Homo sapiens
tatcattgataattatgaccaaatgtttgttgaataccaaccatatatcagatggtaccaggtgcttggaatccattatctcaaaatgtaaccactcactgaagtaggccttgttatcatcccaattttaagaaagaggaaagtgagaatgcagaaagttttttcatcatggccacataatggtgtacaaagcctggtcacagtccagagccacttcaactgctgcattctgacattttacatttatatgccacctatgtcacatagttaatatctagatataagcagtatgattctgttctgtgtttctgagctaacatgagtgttatgccatactttccatctgtccctgcattttcaccttacagtattatcttatggctcatctgtcaccttttg

SEQ ID NO: 266553 - DNA, 81 bp, Homo sapiens
atgtctgagatttagcatgcatccttgtatttgcaaataaggaagaaattgacaatctgatgtctccagtacaaaaaaaaa

SEQ ID NO: 266554 - DNA, 194 bp, Homo sapiens
ctgccaacacaatatgaagttaataccagtgtgagacaggcacagtcagtgtcacttcagtaaccagaaaatagctactttgaaccttattactcgtttatgcctcctatattaaaatgtttcaattaaacaatcatttactggacccctatttgcaaagtaccatatttgtgacatcactgagcaaatactaa

SEQ ID NO: 266555 - DNA, 313 bp, Homo sapiens
ttcatgcgaatactaatatcattaaacattcattccaaaaggaaatgtgatgataaaatgttaacatatctccatgaggggtacatttgaactccgtactgtttttgcaactgttctgtaagtttgaaactacttcaaaataattttatttaaagttacattctctttaattaccttctcttccatgcaaccaggttcactaggcagcagccatacctcagtcaataagagaggacaatctctgcccttgttgagtttatatcctagcaggcaagggcaaatattaatcaacacaataaatatgaaaattgtc

SEQ ID NO: 266556 - DNA, 724 bp, Homo sapiens
taaattatatatgtgtttgtctctataaatatgtccccaactttgctcctggcttatcttccatattttttggctgaatttcagtggttgtcttatcttgtgaggatgaatagtcattgaaataatcttaatttcacaatgagtttaattataaatctatacttcctttgtgtgagagaaaatcttttgtgaacaaaatttaatttttggaaagctttataagtccatatttttccttttaaaaactgcgattgtggtaaaaacacataatgtaaaatttaccattttaattctttttaagtgtatatttcattagcgttaagtacattcacatagttatgcaaaagatctgtagaacttctatgtcttgcaaaactaacattaaatgtcttttaagacaattgcccattttaccatctcttcagtccttgacaaacaccattctaactatttttttcctatgagtttgtctacttaagatacctgattatgaatggaatcatagactgtcactttgttcctggcttatttcagttaacgtgatattctcaagaataatcatataatgtgactttttaaagactgaataatattcgactttgtgtatgtgccacttgttattaatctcttcattggtcaagggacagctgggttgtttctgccttttggcttgtgttagtaatgctgcaataaatttgggtgtgcaaatatctcttccggatca

SEQ ID NO: 266557 - DNA, 389 bp, Homo sapiens
ctgaataagctcttcaggtgggccttttctgaccacccaatctaaagtaaccccctgtaattccctcatatcaccttggattttcttttttatgattacttttaccagtactcattttcttgttttgttttggtctctttttctcactagtctcatctccgtaagaggaaatgatgtctattcatttcaaccagtgtcttttcagtaaagaatgccttttatatgctaggtactcaacaaacattgaattaatgaattattgagcttgatgccaattccatgcaagattgtcgactagattaaaaggatggtttgtgagcataattagacatccctgaaagtcccccaaactcatacttgagtttgctaagaccacgtgtcaaactaat

SEQ ID NO: 266558 - DNA, 406 bp, Homo sapiens
tagttgaggtcaacaaagggatcattgatggcaacaatatccactttgccagagttaaaagcagccctggtgaccaggtgaccagtacaactaaattcatttaccctggccttcaccttcaccatggtgtcccaggggtgcagctggccctgcacaagaagatgctgttgtcaaacgggaggagcagaaagcctaattttcaaaatatttatttgaaaaattgttttatacattggtggactttagactgttttatattaaaatacataaatacatgaataaatttatgctaataaatttgacaactgaaatgacatttcttgagagacataaacaaccaaagctcacccaggaagaaaaagataactggagtagtcctatgtcttttaaagaaatttaattaatg

SEQ ID NO: 266559 - DNA, 445 bp, Homo sapiens
actctgaatattggatgggtttagacttaaatagatccttgctattcaaataaatcagaaattacagcacagcatgattcaacatgtggtctctgtaccaaccaaatagggatctccaagcagctttatagaaatgtcaaatctcagcctgtaaataagaatctgcattcacacaacattcccagatgattcttaaattcagtaaaaattgaacagtactgctctagtgaggagtcgtttcattctgttattctaaatcatgtttataactagcaatacatttttaacagaaaccatgtaagaaatggtagttaggagttcagtccagcccctgggggtttaaatgcttcataatttgaaatattctgtgagatctaatgttgaggttccaggtggggcagtaactgttgcaatgaagaagagttgtgtcttgtttagagaagag

SEQ ID NO: 266560 - DNA, 400 bp, Homo sapiens
tagcccactgtggtgttagttggtttccctcgtgagaaatgttgagtgcttttcaggtgcttctttgccatctgtctgcctcctctgatgccttgtcccagtctcctgcctgtgtttccttaggccgcttgcgctttgctttgttttgttttgagagttctttctatattctggagatagtcctttatcagatatgtgatttgcaaatactgcctccaagtctgcagcttatcattttttaatgcatatcccttaatctaaataaaagagagggggaccaggtgcagtggctcatgcctgtaatcccagcactttggcaggtggaagcaggaggatcatttgagcccaggagttcaagaccagcctgagcaatatagagacaacctgcctctataataaa

SEQ ID NO: 266561 - DNA, 460 bp, Homo sapiens
ttttcttttttggcaagaacattttattttattcaaactattttttttaatttaatttaagttctgggatacatgtggaggacatgcaggtttgttacaaaggtaaacatgtgccatggtggtttgctgcacctatcaaatcatcacctagatattaagccctgcacgcattagctatttatcttcttctttttttttttttttttttttcagatggagtttcgctcttattgcccaggctggactgctgtggcacaatcttggctcactgcaaccccctcctgggttcaggtgattctcctgcctcagcctcccacgtagccaggactacaggcatgtaccaccacacctggctaattttgtatgtttagtagagacaggggaaatggaaatttcagtttgggaaactcaatgtgtagttttaacctaacataagtatgtcaaatactaaaatgttacc

SEQ ID NO: 266562 - DNA, 304 bp, Homo sapiens
agagttgtaagtcaatatttgtaataggtgccgtgggccctgccgaagtccctctggccttacaccttctgtgggcttcatctgactgtgtctgcaccttgtggcctgtggggtaataacacattctgggagcagctgtcaaccaatcatcgatgggaatttgataaacaccaaattctccatctccccatgtgtggaaaactctgaagcatgtgttttagtttccagaggttccccatgaattgcacacaggcactcacccaaggtagatacctcattgggtgacttcccttctgtctcttcc

SEQ ID NO: 266563 - DNA, 744 bp, Homo sapiens
atacagagcaataattgcagaaaagatatttcaaactaagagcttcaataactgcaggggcacaggtctatctttttttataccacataaccttatgccagtttaggttgactgagtagctatgtcctcaaatttcatgtatgataccccccagcaaagatggatttaattgtgcagaattgatatatatgtgtgttccagttactaatttaaagtgtatagaatattttaatatataatttttgtaaagaactgggatttttatactacagtatttgtaattaatgtgtctcactaattaagtttctcttgaagaaaatatgcaaattgttagacacataatgagtggtttccaaactctaaagataaaataaatgcactactatggtgttgttagaataccttttttgtggctgtatgaatctttactctttaaatgtgtactttacaatgtttacaaggagcttctctggtttgttatcccagcaatgcccttggtgagagcttcattctgcatttgtttaattcatatgctttgcttttggcatatgcttgctttttgcactagtagaattttaacttacctcattattatgtttgtaatcatttgtctagcttctgtaatgtatctgatataggctaaacaaatacttaaccaaagttaaaatacatggtaagcaattttgcacatattaaatattagggtttgttgtgtatatgtgtatacttaattataaaagaata

SEQ ID NO: 266564 - DNA, 384 bp, Homo sapiens
atttgaaatcaatggaatattaaagaaagtgactgtgcatttttactgccatacagtataacaaagtagtacagcctgctttaagttaatttcagtatttaagaatgtgaattaaaacaactcagaaaagtgaatttgaaaagagcacacgaggatagcactgatgctgcctgcatcagtaaatgaaatttgcaatgattttgtctggaatattatactagcatcaacttccaaatgtgtccagggtgtttctggaattttaccctgtgcccttagcttttactctgatgccatctccactggcctctcatataatatggtttctgactcatttacttttcattattgcggatgtgcaattgtccaatatgtccctggtttcag

SEQ ID NO: 266565 - DNA, 383 bp, Homo sapiens
gccgtcgcccagcgtctggcccaagacggggcccacgtggtagtcagccgccggaagcagcagaatgtggaccaggcagtggccacgctgcagggggaggggctgagcatgacgggcactgtgtgccatgtggggaagatgaaggactgggagcggctggtggccacagtgagctgcagggaaatgggcacagagccaggaggtggaaaagggagccagcctgagcctccttccctgctttcctggacagcattggtgagatccaacgcagtgatgttaactaaaacataacagtgtgttctgcatacccaaccagcccaccagcacgtttttattgtgtgcctttctattatgtccatatattaaagttggagaataatccc

SEQ ID NO: 266566 - DNA, 349 bp, Homo sapiens
attaaagtattaatcatagcattaatcgtatgcatagatcagatcaggggctggaaaactgtggcctatgggccaatctggttgtcacctacttttttaaataaagttttattgaaacatgcccaggcacattcatattcatattgtctatggatgcttttgcactagaatggtagttaaatcattgtgatagaggctgtattaattgcaatgcttaaaatagttactaacgagccctctacagaaaaagtttgccatccctgacacagattagcactgtccaacagaaatacagtatgaaccacatatgtaattttaaattttctagtacacattttttaaaagtaaa

SEQ ID NO: 266567 - DNA, 483 bp, Homo sapiens
gtcataagcaggctgtaagtgtagcgtgttacttaggagtgagttggatgtacttatttttatcatatacagtgttttcataaattgaccattatatataagacactacatcaaaatgtgctttgaatctttcaaagcctgttattgtttgtaacttttgcaggagggctattagttcattatttagaggtcaatttttctgtttttaatgtattctcttaaacagtgattggtatgtacaccacagtcaggtatgtacaatttaattaaacaaccactactggccttaatgattttaatagtttgaggtggtttttgtttgtttgttttcatttttgatacagcttttttttctagtacagtgcatcatgggcctgtgtatgattcagtgagatttctaaatcttaagatttcaacacaatgtagtactttctgttcatgctgtaaaaagtatttctgtattttaaataaagaataaaattt

SEQ ID NO: 266568 - DNA, 436 bp, Homo sapiens
cttctgcagtcccagaggagttagataaattcaacagggatttataataattgcatgcctactttgtatctagccctgtgatcacgaaaatgggcaatcagagattcggaagaaagatgaactaaggcgtcctttgacaaaggtgtgatcttaaagttggacagtgtgtaatgagaggaggaaataaattcctcactgtggtgaagggttaaacattttttaataaatctaataaaggattcacatacattatttcttttaatatttgcaatcgccctatgaatagatactaatatctccattttccagatgaggaaaccaaggctcagaggttacacggcttcccccaaagtctgacacttgatagagtcaggatttaaacctctgattctgaaggccatgttatgagattgtaccttatatcttgagggctatt

SEQ ID NO: 266569 - DNA, 819 bp, Homo sapiens
ttcaggaccgttggcaccgggctaacggttccaccacgtccgccgccctggacgcccgcggcctgcccccccctgcctctcctgcgccgatacacttcgagtggattctggccatttgagcattctctccaactctccaatccccagtctgcccccacgggggtctcccccactctcccccgtcccacagcctaaacccctcttcgccctgaacctcccttttcctcatgcggtgaatgggcactggccccgctcagactcccaggagcaccagagctggccctgagccaagccctgccccaccaggacctggggacacgggtgactcagacgtgactcaggaaggctcaggtcctgctggcatccgcggagccccaccagcatgggcagcctcggccagagagaagatctccaagatgaggacaggaactcagcattcacctggaaggtccaggccaacaaccgtgcctacaacgggcagttcaaggagaaggtgatcctgtgctggcaaaggaagaaatacaagaccaatgtcatccgcacggccaagtacaacttctactcgttcctgccgctgaacctgtacgagcagttccaccgcgtgtccaacctgttcttcctcatcatcatcatcctgcagagcattcccgacatctccacgctgccctggttctcgctcagtacccctatggtctgcctcctcttcatccgtgccacccgggacctggtggacgacatggggagacacaagagtgacagagccatcaacaacagaccctgccagattctgatggggaagaggtgaggctggggctgcag

SEQ ID NO: 266570 - DNA, 1049 bp, Homo sapiens
ttcaggaccgttggcaccgggctaacggttccaccacgtccgccgccctggacgcccgcggcctgcccccccctgcctctcctgcgccggtgagcggcgggtgctcccactgctgtgcgtccccgggagcccgcgcaccctctctgggctccacccaggctgagagctggggtcgtggcggcgggggtggagagcgcgcccctagagatacacttcgagtggattctggccatttgagcattctctccaactctccaatccccagtctgcccccacgggggtctcccccactctcccccgtcccacagcctaaacccctcttcgccctgaacctcccttttcctcatgcggtgaatgggcactggccccgctcagactcccaggagcaccagagctggccctgagccaagccctgccccaccaggacctggggacacgggtgactcagacgtgactcaggaaggctcaggtcctgctggcatccgcggaggtgagacggtgatcagagctgggatgggagactccccaggcagaggggcacctgagaggaggcacaaggcccagcctggccgggctaggaagtatgaatggagaccagaaggccccaccagcatgggcagcctcggccagagagaagatctccaagatgaggacaggaactcagcattcacctggaaggtccaggccaacaaccgtgcctacaacgggcagttcaaggagaaggtgatcctgtgctggcaaaggaagaaatacaagaccaatgtcatccgcacggccaagtacaacttctactcgttcctgccgctgaacctgtacgagcagttccaccgcgtgtccaacctgttcttcctcatcatcatcatcctgcagagcattcccgacatctccacgctgccctggttctcgctcagtacccctatggtctgcctcctcttcatccgtgccacccgggacctggtggacgacatggggagacacaagagtgacagagccatcaacaacagaccctgccagattctgatggggaagaggtgaggctggggctgcag

SEQ ID NO: 266571 - DNA, 304 bp, Homo sapiens
cccagaagcacagctgcctagttgacaggctcagctgagaccagaagaatggccccaccaagcccagcctaaatggctgaccatcacaattatgagctaagaagttttggatggtttgttatgctgtaagagctaactaatacgtgcacccagtgcagataggatgccaaaaattaatggcaagttgattactaattacgttctaacagtgggcaccctaaaagtgctgacttttttcccctgatttaaagttagatgttttgtaatactgagaaatgaataaatacatgtagacatgaaaaaa

SEQ ID NO: 266572 - DNA, 347 bp, Homo sapiens
agagtaaatcagaaaatactgtaaagaagtgaaatacacagatcagctagattttgctgctttctattaacagctgttttgcaatataattcatgtactgtaaaatccagctttttaaagtacacagttctctggtttttaatatgtttacagagttgtacaaccatcaacactataattttagaacattttcaaaatgttcaaaacatcccccaaacaaaccttatacccattagcagtcattccccatcacctctccttatgccataggcaagcactaaaaagctttctgtctttatggaattgcctgttgtgaacatttcatatatatggaatcatacaatatg

SEQ ID NO: 266573 - DNA, 330 bp, Homo sapiens
ttgcactctaacttattttttcccaatcctttattgaaaagcacatttgagccaggcgcagtggctcacacctgtaatcccagctctttgggaggccgaggcgggcggatcacaaggtcaggagttccagactagcctggccaacatggtgaaaccccgtctctactaaaaatacaaaaattagctgggcatggtggcaggcgcctgtaatcccagctactcgggaggctgaggcaggagaatcgtttgaacccaggaggtggaggttgcagtgagctgagataccgccattgcactctagcctgggcgacagggcgagactccacctca

SEQ ID NO: 266574 - DNA, 446 bp, Homo sapiens
caaagtgagaccctgtctcaaaccacaaaaacaataacaacaacaacaacaaacaactttgcatcaggccgggcacagtggctcacgcctgtaatcctagcactttgggaggccgaggtgggcagattgcctgagctcaggaattcaaaaccaccctgggcaacattgtgaaaccccatctctactaaaaataaaaaaattagccgggcgtgatgacatgtgcctgtagtcccagctactcgggagaccgaggtggaaggatcatttgagcccaggaggttgaggctgcagtgagctgtgatcacagagcaccttaggggcacagaacagggcatacttcatattttctcttgtattaaaattattcatggaaaaacttatgcatgtacatatccccttcaggattttgagcttcttgtatatgcttcattctcacattttcctca

SEQ ID NO: 266575 - DNA, 166 bp, Homo sapiens
ttgacagtgatttatagttcttttcttctgtataaattttgaagtgagtttgtctaattccttcaaaggaatccaactagattgattaggataaaaatgtatagattaagttagaacaaactgacatccaccttgttagcttgctctattcatgagtatgttatat

SEQ ID NO: 266576 - DNA, 308 bp, Homo sapiens
gccttcccatttttttcttattatttctgaaaatgtcatgggttagaagagtcaagaaaaatgtccactagcacaatattttttgttgatcagagatatttacctgtgggcactgaaactatggacaacagctttttcatactgaactcaatgtgtgcgcttttggagtaaagcactctgtgtaatcctttgaattacaatttttttttgataactggtataacattttcaaggctagtccaaaggactgaagctcaggttttcagagactcttctccataaagctgcatttaaaaaatacttactgt

SEQ ID NO: 266577 - DNA, 417 bp, Homo sapiens
gctttttggtgccttgttcttggttttccccgatagaaaatcaagcaaaatctaaatgaggcaaaagggcgcttggtgggccaggtgacaggcacctttccaatcctgtaacatttatctcctaagtcacagttcgtcctctctgggggaaaaatattttttaacacttgtaccttccactgaccaccctctttctattccagttcccggctaccgagaaaaacaaacacagtaagtcacattgttggtgcggtccttccagacccaccgcagtgtcttgcgtcgtggggtcgtgagtctctgaacctggttcttctcagagttgacatttggacgtgggggtaatttctccggtgctctgttacatcaaaattatcaataaactcgcctgggcaattagtgtccccaactaacagc

SEQ ID NO: 266578 - DNA, 435 bp, Homo sapiens
tacatggcaaccctttaacaacccagtagttagccatgatcattgtattaggctgcttgggttgctgtaacaaaatgttaataccatagactgggtggcttaaataacagacctttatttctcacagttctggaggttgggaagtccaagatcaaggtgctggccaattctgttcctgcctctcttttctggcttatatatttctgcctttttgccgtgtccttgcaaggcagagaaatatcttctcctactccaattcttccttctactccttctttttcttcataagccactaatcctatcatgacagccctattctcattacctcattcaaccttaattatctcccaaagggcccacatccaaataccgtcatattgagggttaaggcttcaacatctgagttttgggggagacacaatttggtccagagca

SEQ ID NO: 266579 - DNA, 511 bp, Homo sapiens
cagttcacactgcgagttcagattcggatcgcagtcccgattatcctcccctccagcctctccctttctcgttgaagggttaatacagcgtcctctcccctcgccacccgacagaggcgcctacactggcggtaggtagcccctgggagagggggagtggggggaccccgccgctttcgccgctgggcgacccagagccccagcctgccggagagggcagcggctcgggtttgacatcccagctgggtcccgggccggctccctgagcctcctcccgggttgctctctatcaggaaagcaatcggaagtcaggccggcttttgcttttgttctgccagctactctacggaatcgtaggtgaagccggggtgggcggatgccccgggagggggctgtggcgggagttccaggtgcgtccccgaaatgaccattggaggcggcggctgtttcccgcccctgggtggggaatggattccgatcgctaatcgataccctggagccagcagtgggt

SEQ ID NO: 266580 - DNA, 492 bp, Homo sapiens
gtctcccttttcttggaggagtcagggaacgctcagctccaccagcttcttgtgggaggctggatagtatccaggcctgcctgcagccatccggaggcctaaacccctccctgtgatgctgtgcttcaatggtcacgctccttgtccactttcctcctgtactcctggtccctctttgaagttctcagaagatagcggtagaagaaatagtgaaagtcttaaagtctttgatctttctgataggtgcatagaagaaaacgctgacgtatactgccttccctctctgcttcggctacctataagggaagggccccctgtcctatgatcacgtgacttgctcgaccttatcaatcacttggacgactcaccctccttaccctgccccccttgtcttgtatgcaataaataacagtgcacgcaaccatttggggccactacccatctccgtgtcttgatggtagtggtcccccgggcccagctgttttcgcttta

SEQ ID NO: 266581 - DNA, 496 bp, Homo sapiens
ctggttctagtcgttttaaagaatgaagtaatgcttgagatgttctgtaaactcttagtcatattagtacattatggagtccttttattagcattttttcaagtatttcacttaaataaaaagcccttattgcacactctgcattgtaggcatgggaaaatctgacttttagccttaccatcaagtcaacattgacctttaagattcctgttttggccgggcgcagtggctcacgcctgtaatcctagtactttgggaggctgaggcaggtggatcatgaggtcaggagatcaagaccatcctggctaacacggtgaaaacctgtctctactaaaaatacgaaaaattagccgggcgtggtggcgggcgcctgtagtcccagctactcgggaggctgaggcaggagaatggtgtgaacccgggaggcagagcttgcagtgagccgagattgcgccactgcactccagcctgggtgacagagcgagactctgtctca

SEQ ID NO: 266582 - DNA, 469 bp, Homo sapiens
caccactgcactacagcctgggcaacagagtgagactctgcctcttaaaaaaaaaaacagaactgaaagaagaaatctactagtatattctagtatttcaggggtatggttttttcctggaccattttaactttctaggcctgtgatctctcagtgtgaaaatgagaaatctctaacactttttgggaaactccatggtttagaaaaatcacttcatcaaattttcaaacttgttaaaagtcaagaaattgcttgaattatgaaataagtctaaggaaaaaaacaattccctgaaaagtttataactgctctccatcactatgataaaacacctaaaataattctagaaaagccataattttaaaaaggtttctctaattcttatgaaaagcctactaaggccaggtgcagtggctcatacctgtaatcccggcactttgggaggccaagacgggtggatcacttgagg

SEQ ID NO: 266583 - DNA, 777 bp, Homo sapiens
ccagtggctcagaggctcaaccatgaagggaaacagaaatggttcccagtcccaggagctgtgcctcagtctcctccttggagggagagagtgaaagctgctgagcttggaggagactggcaggaatgtcacacaacctgagttcaggttgtagctgaggtggaagggacagtggggatgccctggttacccttctttcccagcagctttgtgattgtctcttggaaaagaggaagcagctatggaagcagtgtgggtggaaaggaaccttggcccttgtgatgctaagaccaggagggttggagggggcttaatgacatggtggcactggtcaaagaccagctatgccagcgggacaagagaacctcatgctgggcaaggggctctgttctcttcttgtaccaacaaatctttctcttgtttcccattcacagctaaaggcacatctccattcctgcttcagtatcttagggctctgagaagtggaattcaacagacctgggtgtagattccaaatctgtgattgatcagttacataatctaactgaatctgactttcatatataaagtgagcttgatagtcttctgtctcttaagttttttggactctaatcaaataacacatgtaaaattttcagcactaagagtcatgcaataaagggtggccgccaatattagcattattagcagtaattactgattatatctctgtaaccttggtaaataaggccatctctaggtgcacttatccctctgtccatcttacatgaatatacc

SEQ ID NO: 266584 - DNA, 423 bp, Homo sapiens
ttaaccttaatctaaagcagattttcctccacaatatggtgggcctcatccaatcagttgaaggcttgaataaagcaaaaggctgaccctttctcaaatatgaaaggattagcccgtttgaatgccttttgagtgaaacatcagctcttcatcagctctatcacagctactggctgttggacttaaactatgacattggccctgtagatcttagacttggccttcctaatgacatgaacgaattccttataataaatttctttatatataggatatacatataaaatatagaaaatttatatacaggatataaatatatatatgcgtgcacacgtgtgtgtctatagaggatatatatacataggctacagatagaatatatatagattgtgtttctctggagaaccctatagtatactatag

SEQ ID NO: 266585 - DNA, 706 bp, Homo sapiens
aaggaggagcgcctggcagagcgggatcttcagggcagcgggcaaccccttggcccaggaagcctggaacgcaaggaccggagggcgtgggctgggacgcccctacgttggtctttcagggaaaggccttggaaagcagtcgttgcgccagacagcccagggaagagcggcagcctgaggacctagggccacctgctgttccctgggattcatgtccttctggggaggagggaggacccaggacaatggctgctgttcatgatctggagatggagagcatgaatctgaatatggggagagagatgaaagaagagctggaggaagaggagaaaatgagagaggatgggggaggtaaagatcgggccaagagtaaaaaggtccacaggattgtctcaaaatggatgctgcccgaaaagtcccgaggaacatacttggagagagctaactgcttcccgcctcccgtgttcatcatctccatcagcctggccgagctggcagtgtttatttactatgctgtgtggaagcctcagaaacagtggatcacgttggacacaggcatcttggagagtccctttatctacagtcctgagaagagggaggaagcctggaggtttatctcatacatgctggtacatgctgggtaagcaatgatagttaagcccctggtatcagaggtgattatatcattgtaacctctaacatttgt

SEQ ID NO: 266586 - DNA, 649 bp, Homo sapiens
ccctcacagaacccccccaagagcgcccccaaaagaccctgcaataatttttgacgaatattttcaatgtttttgaaattacctcaaaaattaaggtaatactcaaatctcagttaagtctttgctaaatactactgggaaagaggatgaagaaacatcaaatgaatattaaccaaaaatcttatgaatatttcatcaatcttagtttaacagcatttatttatctatttatttattgacatgttaagtgctgattttatattacttttattgagattgtttctggctagcaaaattgtgtcatttatattattaaattaaatgtcttgtcattttattctccaaagtgcattgtacttcccaaatacatttaaaaactcggctgtgacactcatgctttgttttgcaaatatttgatactggaagattatttcaaatgaagagcagatgaagagggagtagagttgaggtttcatttgtccatagatagcttatataattattatttatctctttttaagaattttcaagaaatgattcctgcctttggaattttcagactgctgatcatcatcctgataagtaagtgtgttttgtgaatacttcatactgtccaagtgaaaataaaatatagagacaaatctctaaa

SEQ ID NO: 266587 - DNA, 1831 bp, Homo sapiens
aaggaggagcgcctggcagagcgggatcttcagggcagcgggcaaccccttggcccaggaagcctggaacgcaaggaccggagggcgtgggctgggacgcccctacgttggtctttcagggaaaggccttggaaagcagtcgttgcgccagacagcccagggaagagcggcagcctgaggacctagggccacctgctgttccctgggattcatgtccttctggggaggagggaggacccaggacaatggctgctgttcatgatctggagatggagagcatgaatctgaatatggggagagagatgaaagaagagctggaggaagaggagaaaatgagagaggatgggggaggtaaagatcgggccaagagtaaaaaggtccacaggattgtctcaaaatggatgctgcccgaaaagtcccgaggaacatacttggagagagctaactgcttcccgcctcccgtgttcatcatctccatcagcctggccgagctggcagtgtttatttactatgctgtgtggaagcctcagaaacagtggatcacgttggacacaggcatcttggagagtccctttatctacagtcctgagaagagggaggaagcctggaggtttatctcatacatgctggtacatgctggagttcagcacatcttggggaatctttgtatgcagcttgttttgggtattcccttggaaatggtccacaaaggcctccgtgtggggctggtgtacctggcaggagtgattgcagggtcccttgccagctccatctttgacccactcagatatcttgtgggagcttcaggaggagtctatgctctgatgggaggctattttatgaatgttctggtgaattttcaagaaatgattcctgcctttggaattttcagactgctgatcatcatcctgataattgtgttggacatgggatttgctctctatagaaggttctttgttcctgaagatgggtctccggtgtcttttgcagctcacattgcaggtggatttgctggaatgtccattggctacacggtgtttagctgctttgataaagcactgctgaaagatccaaggttttggatagcaattgctgcatatttagcttgtgtcttatttgctgtgtttttcaacattttcctatctccagcaaactgacctgcccctattgtaagtcaattaataaaaagagccatctggaggaaataaaaaaaaaaggaagactctatgaagaaacagagaagtctcagaaaaggctaacaattttatatagaggacaaaacagcattaaactcatcagttgcaaagattgcctataaaaggaccttaggatttaaggaaggggcttcttaatgtagaaagggaactacaaagatgagaaattaccagaagcctcgccttttcctaagcaccagcggaaggagctgtgccccgggatggagtgagggtggagggcgcgtcagccacgggtgggccttgtgtcgcctcgtatcggcccaggtaggttgttggcctcttacttgggctgacctgacccccgaaagagaaacagacaactctgttctcaggattggggatggacggcttcggccaagcgttttagcctcattcactcaggccccactcagcactctgccagccaagaccattgatttggaaaatccggtccccacccgctaatgagctgttgacactgttgttccttgctgaattggattgttgacttgtagttcagaggcgtacaactagttggcgattagacttgttatgtgatgttaccagcctgaaatgcgatcaccccgtaggaaataaagcaggcatctctggacctc

SEQ ID NO: 266588 - DNA, 1532 bp, Homo sapiens
ccctcacagaacccccccaagagcgcccccaaaagaccctgcaataatttttgacgaatattttcaatgtttttgaaattacctcaaaaattaaggtaatactcaaatctcagttaagtctttgctaaatactactgggaaagaggatgaagaaacatcaaatgaatattaaccaaaaatcttatgaatatttcatcaatcttagtttaacagcatttatttatctatttatttattgacatgttaagtgctgattttatattacttttattgagattgtttctggctagcaaaattgtgtcatttatattattaaattaaatgtcttgtcattttattctccaaagtgcattgtacttcccaaatacatttaaaaactcggctgtgacactcatgctttgttttgcaaatatttgatactggaagattatttcaaatgaagagcagatgaagagggagtagagttgaggtttcatttgtccatagatagcttatataattattatttatctctttttaagaattttcaagaaatgattcctgcctttggaattttcagactgctgatcatcatcctgataattgtgttggacatgggatttgctctctatagaaggttctttgttcctgaagatgggtctccggtgtcttttgcagctcacattgcaggtggatttgctggaatgtccattggctacacggtgtttagctgctttgataaagcactgctgaaagatccaaggttttggatagcaattgctgcatatttagcttgtgtcttatttgctgtgtttttcaacattttcctatctccagcaaactgacctgcccctattgtaagtcaattaataaaaagagccatctggaggaaataaaaaaaaaaggaagactctatgaagaaacagagaagtctcagaaaaggctaacaattttatatagaggacaaaacagcattaaactcatcagttgcaaagattgcctataaaaggaccttaggatttaaggaaggggcttcttaatgtagaaagggaagaagaagagagaaaagaagggtagtaaaaactagagattggggccaggcgcagtggctcacgcctgtaatcccagcactttgggaggctgaggcgggtgaaatcacctgaggtcatgagttcaagaccagcctgaccaatatggtgaaaccctgtctctactaaagaaaatacaaaaattagccgggcgtggtggcgtgtgcctgtagtcccagctacttgcgaggctgaggcaggagaattgcttgaacctgggaggcgaaggttgcagtgagccgagattgcgccactgcactccagcctgggtgatagagcgacactcggtctcaaaaaacaaaacaaaacaaaacaaaattagagattgggtctttcccaggcatatggtattctataaaacagacttactctccttggaggatatattttggagaatgcttcataaaatctatgaatactgtacaatgctgataataaaaactttttatacctgtgtcagactcc

SEQ ID NO: 266589 - DNA, 997 bp, Homo sapiens
acgcttgtttaactgtgacggtatttgtgtttgaataagagagatgcaactgaaatacacaattagcattgtcttcacttatttccattttccctccttttctcccaaggtgtcttttgcagctcacattgcaggtggatttgctggaatgtccattggctacacggtgtttagctgctttgataaagcactgctgaaagatccaaggttttggatagcaattgctgcatatttagcttgtgtcttatttgctgtgtttttcaacattttcctatctccagcaaactgacctgcccctattgtaagtcaattaataaaaagagccatctggaggaaataaaaaaaaaaggaagactctatgaagaaacagagaagtctcagaaaaggctaacaattttatatagaggacaaaacagcattaaactcatcagttgcaaagattgcctataaaaggaccttaggatttaaggaaggggcttcttaatgtagaaagggaagaagaagagagaaaagaagggtagtaaaaactagagattggggccaggcgcagtggctcacgcctgtaatcccagcactttgggaggctgaggcgggtgaaatcacctgaggtcatgagttcaagaccagcctgaccaatatggtgaaaccctgtctctactaaagaaaatacaaaaattagccgggcgtggtggcgtgtgcctgtagtcccagctacttgcgaggctgaggcaggagaattgcttgaacctgggaggcgaaggttgcagtgagccgagattgcgccactgcactccagcctgggtgatagagcgacactcggtctcaaaaaacaaaacaaaacaaaacaaaattagagattgggtctttcccaggcatatggtattctataaaacagacttactctccttggaggatatattttggagaatgcttcataaaatctatgaatactgtacaatgctgataataaaaactttttatacctgtgtcagactcc

SEQ ID NO: 266590 - DNA, 1237 bp, Homo sapiens
aaggaggagcgcctggcagagcgggatcttcagggcagcgggcaaccccttggcccaggaagcctggaacgcaaggaccggagggcgtgggctgggacgcccctacgttggtctttcagggaaaggccttggaaagcagtcgttgcgccagacagcccagggaagagcggcagcctgaggacctagggccacctgctgttccctgggattcatgtccttctggggaggagggaggacccaggacaatggctgctgttcatgatctggagatggagagcatgaatctgaatatggggagagagatgaaagaagagctggaggaagaggagaaaatgagagaggatgggggaggtaaagatcgggccaagagtaaaaaggtccacaggattgtctcaaaatggatgctgcccgaaaagtcccgaggaacatacttggagagagctaactgcttcccgcctcccgtgttcatcatctccatcagcctggccgagctggcagtgtttatttactatgctgtgtggaagcctcagaaacagtggatcacgttggacacaggcatcttggagagtccctttatctacagtcctgagaagagggaggaagcctggaggtttatctcatacatgctggtacatgctggagttcagcacatcttggggaatctttgtatgcagcttgttttgggtattcccttggaaatggtccacaaaggcctccgtgtggggctggtgtacctggcaggagtgattgcagggtcccttgccagctccatctttgacccactcagatatcttgtgggagcttcaggaggagtctatgctctgatgggaggctattttatgaatgttctggtgaattttcaagaaatgattcctgcctttggaattttcagactgctgatcatcatcctgataattgtgttggacatgggatttgctctctatagaaggttctttgttcctgaagatgggtctccggtgagttcagtttctttcttttataaaatagaaattagtttactgtcaaaaagggttatcaaataggggttacaacgctgtgatttagggcagccaaatttccatttggaagttaagaaaatttttaaggaaatcagacttttgaattgtccttcccacttaactctctcacagccctgatcactggctctacttcactgcacctgccatattggtagctattccaaaacaggagagaatggccaggcgtggtggctcat

SEQ ID NO: 266591 - DNA, 581 bp, Homo sapiens
gtgaagaagtgtatttcatgtcaccttctggcactatggtgtggcccacttgagagctgaatcatctgaaacagttactgcccacgggcttggatggggcccctctctggagaaggtgtggttaatactcatgtctgctccctccatcagctggcagtgtttatttactatgctgtgtggaagcctcagaaacagtggatcacgttggacacaggcatcttggagagtccctttatctacagtcctgagaagagggaggaagcctggaggtttatctcatacatgctggtacatgctgggtaagcaatgatagttaagcccctggtatcagaggtgattatatcattgtaacctctaacatttgttgagtgctttattattgataaggcactttcatgtccataatcttcacagcaaccctaaggggtaggtattgctcccactgttttatgtctgaggcataggagatgtagtcatggaggctgaggtgggcagatcacttgaggtcaggaattcgagaccagcctggctgatatagtgaaaccccatctctactaaaaataaaaaaattagacaggcat

SEQ ID NO: 266592 - DNA, 1865 bp, Homo sapiens
aaggaggagcgcctggcagagcgggatcttcagggcagcgggcaaccccttggcccaggaagcctggaacgcaaggaccggagggcgtgggctgggacgcccctacgttggtctttcagggaaaggccttggaaagcagtcgttgcgccagacagcccagggaagagcggcagcctgaggacctagggccacctgctgttccctgggattcatgtccttctggggaggagggaggacccaggacaatggctgctgttcatgatctggagatggagagcatgaatctgaatatggggagagagatgaaagaagagctggaggaagaggagaaaatgagagaggatgggggaggtaaagatcgggccaagagtaaaaaggtccacaggattgtctcaaaatggatgctgcccgaaaagtcccgaggaacatacttggagagagctaactgcttcccgcctcccgtgttcatcatctccatcagcctggccgagctggcagtgtttatttactatgctgtgtggaagcctcagaaacagtggatcacgttggacacaggcatcttggagagtccctttatctacagtcctgagaagagggaggaagcctggaggtttatctcatacatgctggtacatgctggagttcagcacatcttggggaatctttgtatgcagcttgttttgggtattcccttggaaatggtccacaaaggcctccgtgtggggctggtgtacctggcaggagtgattgcagggtcccttgccagctccatctttgacccactcagatatcttgtgggagcttcaggaggagtctatgctctgatgggaggctattttatgaatgttctggtgaattttcaagaaatgattcctgcctttggaattttcagactgctgatcatcatcctgataattgtgttggacatgggatttgctctctatagaaggttctttgttcctgaagatgggtctccggtgtcttttgcagctcacattgcaggtggatttgctggaatgtccattggctacacggtgtttagctgctttgataaagcactgctgaaagatccaaggttttggatagcaattgctgcatatttagcttgtgtcttatttgctgtgtttttcaacattttcctatctccagcaaactgacctgcccctattgtaagtcaattaataaaaagagccatctggaggaaataaaaaaaaaaggaagactctatgaagaaacagagaagtctcagaaaaggctaacaattttatatagaggacaaaacagcattaaactcatcagttgcaaagattgcctataaaaggaccttaggatttaaggaaggggcttcttaatgtagaaagggaagaagaagagagaaaagaagggtagtaaaaactagagattggggccaggcgcagtggctcacgcctgtaatcccagcactttgggaggctgaggcgggtgaaatcacctgaggtcatgagttcaagaccagcctgaccaatatggtgaaaccctgtctctactaaagaaaatacaaaaattagccgggcgtggtggcgtgtgcctgtagtcccagctacttgcgaggctgaggcaggagaattgcttgaacctgggaggcgaaggttgcagtgagccgagattgcgccactgcactccagcctgggtgatagagcgacactcggtctcaaaaaacaaaacaaaacaaaacaaaattagagattgggtctttcccaggcatatggtattctataaaacagacttactctccttggaggatatattttggagaatgcttcataaaatctatgaatactgtacaatgctgataataaaaactttttatacctgtgtcagactcc

SEQ ID NO: 266593 - DNA, 355 bp, Homo sapiens
tttaaaacaattacatagaaaactttattttgggccatttaggaggtttagatcattttgatcatcttcagctgtcttctcttcacatacaggaaaggccttggaaagcagtcgttgcgccagacagcccagggaagagcggcagcctgaggacctagggccacctgctgttccctgggattcatgtccttctggggaggagggaggacccaggacaatggctgctgttcatgatctggagatggagagcatgaatctgaatatggggagagagatgaaagaagagctggaggaagaggagaaaatgagagaggatgggggaggtaaagatcgggccaagagtaaaaaggtccac

SEQ ID NO: 266594 - DNA, 420 bp, Homo sapiens
aaacagttgtatgtaagagtgccttaaaatgatactctgcatcttaaaatttatagttataagtgcctatatttaaaaagtatacttttcaatcaattacctaaccttccacttaagacaatggaaaaatgggccaggtatggtggctcacgcctgtaatcccaggaccttcggaggccgaggctagcagatcactggaggtcaggagtttgagaccagcctggccaacatggtgaaaccctgtttctaccaaacaatgcaaaaattagcctggcatggttttgtgtgcctgtagtcccacctacttgggaggctgaagtgagacaatcacttgaacccaggaggcggaggttgcagtgagccaagattgcgccacagcattccagcctgggtgacagagtgagaccatgtctcaaaaag

SEQ ID NO: 266595 - DNA, 489 bp, Homo sapiens
tttttgaaatccagcatgagaaatacagtacctgctatggcaaaaaatacacataaaatgcaacttttcagcttatttgtacattagtagagtttaacattttattgtttgtttttttaagtgaaccagtgattttaagtaccactatactaaaaaggaaaataaaatatagaaaagggggcccagcctgccatgcaagtgcacctctaaagtgcctagtttctgtgtccatgtaaaaccagtaatatgaggagcaatttcaacatatgggagtttgattaaacctctatgctaaaaaaaaaaaaaaaaaaaagacaatgccacatcctcccttttctcccccaggcgtccttaaatcccattatctacttcctctattgcccatcaaagagagaaaagaaagccaccaaaataatatcgtaaaagcaacttcaagtataagaaaaaaaaaacacttaaaggtaacttgcagagagcatcaatatgtgc

SEQ ID NO: 266596 - DNA, 1046 bp, Homo sapiens
tgacctttcagagagatgataaaagaagggtcttttcaacaaatgttcctgggaaaacagaaattctatataaaaagaacaagttttgattcctatctcacatcacagcaattcgtaaatcaatttcaagtgaattaaatatttagatgtaaaagacaaatatagaaagctttggggagtctgggcatgatggtgaagaatataaaagcaaaaagccccattcaaaagacaataactttaaagattaaaggaacatcagcctacacaggtgagaaagtgcgagtgcaataactccagccactctgaaagcaagagtgtcttcatacctccaaatgatcacactagctccccagccatggttctcaaccagactgaaatgactgaaataacatagaattcagaatctcaatgtcaaggaagctcattgagatacagaaggttgaaactcaatccacagaaaacagtaaaatggttcaagagttgagagaggacatattcattttaagagagaaccaaactgaacttctgaaatgaaaaattagcacaggaacttcataatgtaattggaagcattaatatcagaatagaccaagctaaggaaagaatctcagaactcaaagaccattcttttgaatcaatacaagcagataaaaataaaaaaaaataattttaagaaaatgaacaaaacctctaagaaatatggaattatgtaaaagagaccaaactcattggattcttgaaagagattgagagagagcaagtaactttggaaacatatttaaggatattgtccacgaaaattttcccaacatctctagagacgtcaacgcacaagttcaggaaattcagagaacccctgtaagatattatgcaagatgaccatccccaagccacattgtcatcagattccccaaagtcaatgtgaaagaaaaaatcttaaaggcagctagagagaaggggcaggtcatgtacaagggctaacagtggacctcttagcagaaaccttacaggccagaaaaggttgggggcctatattaagcatcatt

SEQ ID NO: 266597 - DNA, 354 bp, Homo sapiens
ttcaatcttttcatggaacttccagagaagaagccatggatagctttcctcttttcattggaagagaaaaagtgatgtatctgattattttatgtatgagaggccaagacagacataggtatggatcgcagtaacagctctcttacggggtaaagctctcttatgaggtgaagctggactggataagaaaagaaaacgatgaacattcccctcccctcacaaaatgcacacacattaaccttcagcagactagttgctttcttagaaattttgtagatagaaatttatgtcatccattaactatgataaatgttctctagcacatagtctctgctaattaaataattatctgcc

SEQ ID NO: 266598 - DNA, 521 bp, Homo sapiens
tttcttttttctctcagatgtcagaggtgatgaaacacgctgatgatatctcctatttgtcttggagtctcttctattttggaggtcgggtgaacacatgccattgacacatgctctgtggaatgcttcacaaaggacttggtataaagaactgatggaacaccacctgttcgacagtcatgccatcggcagcaggcagagatccatgctggtgccaaagttccttgctgtggctggtgtgaagtggaggtggttgtcagggaggaggcaccatgcactatagcctgtctgcagtgggcaccctgtgtgaccttagaggctctcctgggggacccactgctgctgctgctgctgctcctgggacctctggccttgggacctggctaagaaagcattgttttgggggaaagttctgcacctcctgcttttcaatggtacaactggctgcaaagtaaagtccaaagtagagtccaaaaatatgagcaagtgattgaattcaataataatatttttgttagata

SEQ ID NO: 266599 - DNA, 241 bp, Homo sapiens
gtttcacctctaacaagaaaagggtttgaaagttatcattcccatcttaaaaaaaaaaaaaaaagatgagcaattgaaaaatcagtgagttttcttgcatgcatcagagtattgcgttgctttggatctgaaaaaaacaaactgaatacaaagaaacaaacctcagatcaggttacttagaagaggccctgatagaactataaactgggacatttcaacagtagtcaataaattgttggag

SEQ ID NO: 266600 - DNA, 457 bp, Homo sapiens
ttttttttttttgagacagagtctcgctctgtccaccaggctggagtgcagtggcgtgatcttggctcactgcaacctccgtctcttgggctcaagcacttctcctacctcagcctcctgagtagctgggattacaggtgtgtgccaccacaccgggctaatttttgtatttttagtagagatggggtttcaccatgctggccaggctggtcttgaactcctgacctcaggtaatccacccactttggcctcctgaagtgctgggattactggcatgagccaccgcacccagactgttaatgcattcttttttccttaaccaataattcatttatccttttagtggagaaattggtcatcatttttcgtaagtctagaacatttatctaagtctaagaacattttcattaaccctctccctagaactccaaacccattaaaagtcgttccccatctt

SEQ ID NO: 266601 - DNA, 498 bp, Homo sapiens
tttaaaacaaaacaaaaaaatccttccaaagttcaagctgcagtgagacttaattttatagttattatttacatggtaaaattcccctcaagtcaccagtccctggtatgggaatttttaactctgaaagcctttgaattattactaggaaaagcatctggtgttagtgaaaccagtgactgtgaagctggtatcaaaatgaaagtgccttttgggaaccaaaattttacaggtctttctgctgaactctggttcactgacagtgattgcttaagcttgtctaaaatatttcagctttactcttatcaacatgatttgtgctgtaattgtttaaaattttcctttgtaaaataactaaccaaattatctgattatagtttgttgtaacagatgtgaatcttattccacaaactcaggtgtgcaagaaacaatgcattactttattttcagaaatccaaattaaatttgatgctgagctcccattccaccaggttgcca

SEQ ID NO: 266602 - DNA, 180 bp, Homo sapiens
ccagatctgccattcccatggggcctccatccacagaagccagagatgcccagatctgccactcccacggggcctccatccacagaagccagagatgcccagatctgccactcccacggggcctccatccacagaagccagagatgcccagatgtgccactcccacggggcctccatcca

SEQ ID NO: 266603 - DNA, 295 bp, Homo sapiens
cagagagagacaaagagtgcagtgccagcctggggtgatggggcacaaaggcagttttgcccccttagccattctgatgcaaaaaagaacctgaaagaaagtccaggcctgagcagagggactgaaatgggaagctctggggttctccgttcactcagcactcagcagcccttcccaggaagtcctctgcacaccacctcctaccagaagccctcagcccaggtcaagctctacagagcccatgctcaagaagtaacctagaagcacagatggtggagaggctgtgaaggagggg

SEQ ID NO: 266604 - DNA, 195 bp, Homo sapiens
gttaacatacagaaaatataaagcagtcgcaacaacaacaacaaaaatcaaatacctaactaaaagatgggcaggccaggtatggtggctcatgcctataatcccagcactttcggaggtcaatggggaaagactgcttgagcccaggagctcgagaccaggatggacaaaacagtgagaccccacctctaaaaa

SEQ ID NO: 266605 - DNA, 414 bp, Homo sapiens
gtgcctataatcccagctactcaggaggctgagccaggaggatcgcttgaacccaggaggcagaggttgcagggagccgaggttgcaccactgccctccagcctgggcaacagggcgagactccgagactccgtcttaaaaaaaaaaaaaacaacaaaaaacaaaaaccaaaaaaaaaaccccaccatagattgttaaaaggtagtaaccgcatgaaaaaaggagaacagggcaggggagattgggaatattggggttagagatgtggttacaattttaaatagagtggtcaaggcaggcctcattgagaaggtgataaccagaggcaagggggtgagccatgtgtaaaactggaggaagagcattgcaggcaatggaaacagacccagcagcagaagcatgcctgctgtgctt

SEQ ID NO: 266606 - DNA, 322 bp, Homo sapiens
aaactggctctaaagtgtatggcatcttgcccaagttctgacacttagcagaggcctgagtttaaatacagcctcgtcttgctcttcgacagcctcagcaccacatgccctgggtggcccacgcagtgagtcactgacagccctcgtggttggcccgtggcacagcatggagcgaaatggtccagtgaccttttcagacactcgggcaatgcgtggtatagtgtatgtggtcactcccagtgagtcctattgttcagtttaatagaatatctaattctatgtttattctgaataaagggagatttcttgtggtttttaagaa

SEQ ID NO: 266607 - DNA, 538 bp, Homo sapiens
acccctgttggtcctcagaatcacctggcctatgcacactcccgctaaaccactgaagtccaatttctgggagctcagccagggaatgtgtatttttaaacaagccccctaggttactctgataagtgcaaagtcagagagcgctgctctcatgcactgagcctgagcactcttctattaataaaaaaggagaggagaatcctgggttgggtgcccttcgccttctggcggcagaagagcagagccaggctctaagcacctgcacccaccgctgggctcaggagctgcgctggagaatagaagggctaatttagtcattcatgcctttttagagcaaattacatgtggagagggtggggcacactgaattttattttagccaaatgccccttatctccttatgcaattgatatttttatattgaacattagaggattggtcatttgtcatcaagtcgtctgtaatacagaaaacgataaatacaacctaacagttcaaacatgacgagttaaataaatgatggttaaaaataaaaaaa

SEQ ID NO: 266608 - DNA, 380 bp, Homo sapiens
ttttttttttttgagacataatcttgctctgtcgctaggctggagttcagtggcgcaagctcagctcgctgcaacctccgtctcccaggttcaagtgattcttctgtctcagcctcccaagcagctgggactacaggcacgtgccaccatgcccaggtaatttttgtgtttttagtagagacggggtttcaccatgtcggccgggattgtcttgatctcctgacctcatgatccatccgccttggcctcccaaagtgctgaaattacaggcatgagccactgcgcctggccagaaattcttatttatccatacattcactcagaaaacacttatattgaacaactaccatggcttgggtactattattggcattaggaac

SEQ ID NO: 266609 - DNA, 283 bp, Homo sapiens
aaaatctcaccagccaggatgaggtacccagagataccaggtgagaagagaggactcctgacatgcaaagaccaagcggaggaggcaggcagacaggaaggaggaagttgagagactggagcagtctgtattattatcatcatcatcatggttattcttgtttagaaacagggtctctctctctcacccaggctggagtacagtggcccaatcgtggcttattgcaaccttgacctgggctcaagccatcctcctgcctcagcctcccatgtagctaggacta

SEQ ID NO: 266610 - DNA, 354 bp, Homo sapiens
attactcttttttagaagtccatgtgatcagtgtcacatccttactttgtagatatttattctaataattttcaggataagaagtcacatgaaataatctgtaaaattcctaagttgactttttcaccttttggggacaattatgtttcttatattctcattactaatagctagatatgcagcaccataattatctagtttgagtggcatttgtggtaagatgttccttctcttacattttaatttaactgaaagtaaactcttgcatgccaaaatgtgatttatattagctatttttaagtgtttctaagatacatcttttttctccccctagagacagtcttgctctgttgc

SEQ ID NO: 266611 - DNA, 327 bp, Homo sapiens
gttatctgttatagcattatttataataccagggttatcagaagcaacataaatgtccaacaacagggaatgaaattatgacatatgaccattaaaaataaaggtctagaaagactattaacatagaaaaatacctatgacttaagaaataaaaggcaagttataaaacagtgtgaatgatatgatcctgttcttataaaaatatgcatttatatatatgtgcacagaaaaatgtctagaagaatatacaccaagatgttaacaagggttatttctgtgttttgggattataggcaatttttcttctttttgcttttcactgtttcc

SEQ ID NO: 266612 - DNA, 191 bp, Homo sapiens
cgttcctgcagcagttaaagctgtgaaagacaggcactctgacatgcaattccttgtgatttttctttttcctttttggagttggggtcttgcgctgtcacccagactggggtgcagtggtgtggtcatagctcactgcggcctcagactcaagctcaagcgatcctcttaccttgcctttcaaattgctg

SEQ ID NO: 266613 - DNA, 150 bp, Homo sapiens
cgcatcttggcagaaagttcactctgtttgatgcggctgatgagttcccgagccttgtcctccagtgtgtttccaaactccttcagcttatccaaggcactggagacgtctggggtcccctgggctggggctgggcctgccaggaagatg

SEQ ID NO: 266614 - DNA, 383 bp, Homo sapiens
tatcccagaagtgtgctattatcacattttaatgcatgccttgccctctgtttttgcatccttataaaagcttatgccagctgaaattagcctgtgcaaccactaacatgtggaagcattacaagttcactggacttaaaatatttaaagaagctaatcctgttggaggaacttccagtctgtagcaccctagtcacttaacattaggtttttgaacttcttttttctttgtttctatgatgttgtgcatcaaatgattgagatccctaaacttttgtgttggatggttttctgaacttcaacttgggaaaggtcaagttttatgtgaaagttatcttttaatttaaacaaataaatgctgatactcttttgattcgatatgt

SEQ ID NO: 266615 - DNA, 204 bp, Homo sapiens
agagagacagagagagacacagagagagagagggggcgagagcgagacacagagagagagagagagagagagaaaacgagcgagggagagagcgagagggcaagagcgagagagagagaaaacgagcgagggagggagagagcgagagcgagaaagaaagaaagaaagaaagaaaaagaaagaaagaaagaaagaaaaaaaaaa

SEQ ID NO: 266616 - DNA, 179 bp, Homo sapiens
gatcacataagccctgggaggttattggtggggctttggcttttactctgacttagatgggaactgcgggagggttctgagcagagaggcgacgtgatctgtctcccgatttaaaagcattctctggctgctgagttgagaaagactgtgggaagatgtgatagaagcatgggggccaa

SEQ ID NO: 266617 - DNA, 390 bp, Homo sapiens
taccacagcatgctgcaaactgatggtgtgagaagctggagtagagattgggctggggggaacatgcatggaaactccctgtactacttgcttaattttgctgagagtctgaagctgctctaaagtctattaattggaaaattttaaagtttaaaaaatttaaataacaaaaacagaaaaaccttgtacttaagagaggttacataacttgcttaaggcctcacagtttgtaagtggtgaagccacattatttctgttctttaagttaactattccacaaaggctgtatgattacatgctacatttcagccatttcactatgccataaaggacctacataccgtgatgcatataatgaaataaaaatgattgacataaagatttaccacc

SEQ ID NO: 266618 - DNA, 649 bp, Homo sapiens
gccaggtgtagaattttccacttgtagtatcaggtcaatgcagaaaaagttttggttcttggagcatttcagatttcagacgttcatattagagatgcccaagttgtttatgagtttggaagttaactattttgtaaaatacaagtcagctgataagctttcctgctacttaagccaaatatgcgagttatagtatagccatttctgattattcattgtttttatgtttgtcatgtttttgagacagagtcttgctctgtctcccaggctggagtgcagtggcatgatctcagctcactgcaacctccacctccccggttcaagcagttctctgcctcagtctcctgaatagctaggattacaggcacccgccaccatgcctggctaatttttgtatttttagtagagacggggtttcaccatcttggccaggctggtcttgaactcctgaccctgtgatccacccgtttcggcctcccaatatgctgggattacaggcgtgagccaccgtgcctggccttttttttgagatacagtttcactctgtctcccaggctggagtgccatggcgtgatctcactcactgcaacctctgcctgctggcttcaagtgattctcatgcctcagcctcccaagtagctgggattac

SEQ ID NO: 266619 - DNA, 445 bp, Homo sapiens
agtcaagactcagctaaggaaattcatttttgggttgaataggcagacaggaccgatgctaaaaacacgagaatgggagcaaaagggggttcaagtcactataaggctggcagaggccagggttctgctccaaggcaacccctgggaggtggcgagactttatagggctgcagctgggtggctatgcaggagaaccggctccatgatgcacggcccagggtgcctccataaaggtcatggcaccacccaactgatgtgaagcacaacattgcataataggtggccaacaacaaacctggtgatcctcatagacaaagaaccaagcctgtctgttgcctgccttccctttcagtccatttctaccccacctggaccccgagaccataagaacaaatcatccagcagtctgaaaacttctgtaataaaacgagtctaccatgttaga

SEQ ID NO: 266620 - DNA, 413 bp, Homo sapiens
aattggtgtgtgaattaaagggatagattctatttaaatgggtaagtctgatttcaaagaataggtacgatttaaagggttcaatttttgaaatgcatagcttctgggggagaaagaaacaaaaaggagggaaggcgtttcctttggcaattggataatgaagaggaaaagaaggaaaagggaaaaattaaggccctgtgagacaaaatagaactacacaggtggaggattcataatatgccccctaatgaaaccaaccacttcattaaagtatatagcatggattgactggtaggaaagggtgacattggactagaaatattgtaaaacagcccaatgtcacaaaaatgaacaaaatatttctaaatcaggaaacaaatttgcacgcaaacctaggaaaattctttttcccc

SEQ ID NO: 266621 - DNA, 686 bp, Homo sapiens
tcactggtcaataagggaagaagaattgcacttattcttgacaatgtgattggaaaacacaggagaggcacaaagtgggaaactcttgagaagcactgacttcctgtaactgaaagagttcaagtctggaaaatgtagccacttagtgataatgttgaaggagaccttcaggcaaacaatggtttattacctccctaaagtcctttcaggctctttttaagtgtgggattatatgccccaaaatatctacattacatcagaagaaactgctgcagggtcagaagcagaatgggagaggcattaaaaatatatgaagtccaacttcttaatattttacataaaactgcatgcagctcctggtagaaaaattctaaattttatctatctattaatattatttctctccgaaagtttgcaagcaattcaaaaacagtttaacctaacatgtaattgtagaatgtaaattatgaaatcaaattaaggctcaaatcccagtagtacaatgccacttcagaaagtgatatgcaaaagcatgtgaaactccaggtaatgtaaaattagaatatggtatagataccaatgtgattgtgagcaggattaatctacttcatttgattgattgattgaatggtacagttgacttatatttttagtataactataataactagtgtgctatatagtct

SEQ ID NO: 266622 - DNA, 274 bp, Homo sapiens
gaagggcgtggcgaggggagaagcaacaaccacaggacccgtgacagtggccaagccttagaggccccgcatgcctgccaggctcccgagcccacgcagtccaggtttccccatccgggcgggaaccagctgtttcccctgcacgggcgagggcgctggggtcacctccgccgacgccaggcgtgagctccagaacccgctcccaaccgcccggtcccgtgagcgcggggagcctggctctcgcctgacaataaagaaatcatcacggacagaa

SEQ ID NO: 266623 - DNA, 434 bp, Homo sapiens
cagtagcttcaaccccatgtttctactcagcattgctttactgggggcctgctgcagtggccctgctcagctacaagcttctgactgggaccacaggcttttgaagacatcctttgaaatgtatgtggaggctgccaaacctccagctttcttgcttcctgctaggcagcaaaatccgcaccacatggacactgtcaaggcttatgactttaccttctggaactgtggcatgagccccacctggagctgcatcagccacagctggggtagccagggagcactgtgctgaggtgtggagggtagagtcctaagatggccctcagcttcaagcccaggaagagcagctgaggtctgtcccttggaatcattctgccttcctaggcctctgggcctgggattgaaggggaaaccttaaagatatctgaaatgctttc

SEQ ID NO: 266624 - DNA, 423 bp, Homo sapiens
agatggggtgaggaaaattacgatactgtgaaaaattattatttggtctttaactgtgtttcctggcatacaactctttaaatccttagaaactccaaagtgttatctggtagcccctaggtagcttctggatgggggctggtcaccaaaccaaggcatgattagagagttggaactttcagccctacccccacaacccctggggaggggtgaggggctgaaggttaagttgatcaccaatgaccaatggcttaatcaatcatgcctatgtaatgaagactccataacaatccaaaaggacagggttcggagagcttctggatagctgaacatgtggaggttcctggagactggcactcccggagaggatatgaatgttctgtgcccatccccatgcctttccctctgcccctcttcaactgc

SEQ ID NO: 266625 - DNA, 342 bp, Homo sapiens
ctcaagcaggtccttaagtggatgtttgtgatggtggggaattggaagaaatctgaatgtcctctactgtgagcaaaagatggaaggtaaaatagggagggtgcacaccacagaggatgaaatacatgagagctggaagcagcagaccatgttgcacagcagcatgggtggatcaaaacaaagtaccaaaccaaagacacaagtaagaagttttacataattaaagacacttgcacaaaataaaatatatattttacatgaatttatacaaataatacacataaaacattgtttaatatttacctgtggttgaagagaggactagagataaaagggatttac

SEQ ID NO: 266626 - DNA, 295 bp, Homo sapiens
aaaatgtcattttagcaagatgaggcttaatttaatcaattcatacccaccaaaaatagcttaatttaataaaactacataatcttagagataaccaaacaataaaaaatgggaataacgtacactggctactatagtagtccccaatttatctatgggtcttttttttttgagatggagttttgctcttactgcccagctgggttgcagtgagccgagatcatgccattgctcttactgcccaggctggagtgcaatggcatgatctcggctcactgcaacctctgcctcctgg

SEQ ID NO: 266627 - DNA, 573 bp, Homo sapiens
tgctccaggggattgtaaatttgtatttatttattctttgaaagctccctagctcttccccaaagtattcttacactaaagaggggtttattttattcatgagtttactttaaattctccctttattgttggagacttgcatttgttttcctgttatatactttacaaaaagcaacgcttctaaggcgaaatggtaaatgtgtccctccattttttttgacccttgtttcacctgccacttcatctgtgtttaccctcttgtttcaacacctgtttaattgtgacctcagattttaaacagtttagatgtgtataagaaatacctggaaattttatatctctgaagaattttcccagaacattatgggaattctttataaatttttctttctaaatatggagattttaccttcttatacatattatttaatttgtacacttacaatgaaaacaacacaactcaaattgttttgtctgaacatgtcacaaagtctatgttggatgtcatttttgttagaaccaaaattagctttattcagctttatttgattccaacgtaaagctaaaaaaagt

SEQ ID NO: 266628 - DNA, 435 bp, Homo sapiens
aaaaaaaagtcttgtgatgacattggcccacctagtaatctgagataatttccctgttttaaaatctttaatttaatcacatttgaaaaattccttctgctatgtaaggcaacatactcagaggttacagagactaagatatggacatctttggagaactattagtaagtctacttcatctaccataagtaaaacctttgagctggtaaagagaggaaagctaacagaactttgagagtgtggtgttggagtaagtctccaggaaaactctctacttcccatttcaagttataaaaatatctaggcaatttggggcacctgagaatagagaacatatgttctcatttcttgagtggagcccaagaaagcaaacaagatttgcttgatataataccagtgaagtttaaagaggaagttgacattttaggcatagct

SEQ ID NO: 266629 - DNA, 569 bp, Homo sapiens
tattgcgagatacccgctttctagggtgctaaagaaagactactttaaattgttattaaaaattacagaacatagaagatatctgcatcttgaactctgcataaaactgatttttctgtgtggttaaattcagactatactttttggggggcaatatctcagtaatgatgctgtgttcttcggtgtgcgtcagcacatcacaaaaatttgtccttgtgcagttgattttaaaatttacttcaagagctctcggaaatattcatttcactgtagagttaattatttttctcctcattattaagtatctttatgtagccaaagaagagctgtgcataaatcatcacatttaatctggcagctgcctttctttcttaggttttctttgcatatgtctatctttggaaaatgaagactcttatctttgtttacaggccagaaaaatggggtaaaacacaggctcttccacttactggatgtttgacaaaatgttctttttgggcgaaatacattggcattactagtgagcttgttagaaattcagaatctcagactttatttcacatcttctg

SEQ ID NO: 266630 - DNA, 587 bp, Homo sapiens
ctgttttaatcttttttgatatctttattctacctacttatattgttcgctgtcctattatcttcatggccaatgttcaagtggtagcctagtaattttcgatcagggtgcatatgagaaatttacagattaggggctgaggtatgttatatttgaaaacaacatatagttttgtagtataaactatattaaattaaaataaacaaatggctttgctggaacaaatatacagaaggtaaacttgaatatcgatgatggttggcaagtagcaaaaggaacagataggtgttcctgggttaagggaagcatataggaatcttggggttagtgagaggaatataccatttcaatatttatcaaatagaacatgggtattaaaatgttaaaagaacattatttgagtctttttttatctagctgttttttatctaaggtttcaatactataacctaatctttaccccaaatttagtacttctagctaagttttgttttaacaaagaaaagtaacatatattatcagtgtaggttaaaatgcattaatccatacttgttggatcaataaataaggcatgaattaaaaaaaaa

SEQ ID NO: 266631 - DNA, 665 bp, Homo sapiens
aggggagggaggctgatccagggactgggaaggttgaagcggggaagatgcgtagacctggagggaggaccagtacgcgaaatatgggccaggagtacaacctgggcgacagagcgagagtctgtcttaaaaaaaaaaaaaagaaaaagaaaagaaatactcaaccaaacccctgcccttccccttcttcactcttttcccaaatgtagtcccaggttggaaattcttttaattaacaaacagccaatactccctggaaagtttccaagtgcacagtggtctccacactttcattttatttgatttaatcacaccttatcccagcatggaagagcaagtaaggagaaggtggaactaggtgaggaaggggaaagaaagaaccaaagaaggccaggcacagtggctcacgcctgtgatcccaacactttgggaggctgaggcaggaggatcacttgaggtcaggaattcaagaccagtctggccaacatggtgaaaccccgtctctactaaaaatacgttagctgggcatggtggcgagtggctgtaatcccagctactcaggagactgaggcaggagaatcgcttgaacccgggaggcggagattgcagtgagccaagattgtgccactgcactccagcctgagcaacagagaagattcagtctc

SEQ ID NO: 266632 - DNA, 556 bp, Homo sapiens
atctctcacaaccaagtaccctgccttaatcgtccccaaacaattaacagaaaggtaaaaccaaacataagactgcacacattttaggactgaaagtaaaataactaatggaacaacacaatggagtccgaagagaaagtactcagggaaggggtgacaaggacatgctctagccaaagacgtttatttcatttcctagttctcctgatactatggcgatgggggcataagggacactcacctgtccaccagagcacatatggtgctgactgattttccccatgggacccaggtgaagatctcgccaggatacctcagcttgggtggacttaactgccacaaagggtgggtcctgcacagggggggcctgtaacccactggtcggccagtcagacaggtgggtgtcacataaggtggtgacactatggctgccctgccagtaggctcagctgccgcagtgggaggggcctgcactgtgtcagtaacccaccaggctgcaaattttctgaacttttatactgtgcttcccttataaaattgaatgcctttaaacaat

SEQ ID NO: 266633 - DNA, 396 bp, Homo sapiens
tcagactaaataaatacataatcataacttccagctcagctttagcttttcaggtatacatccagaaggcctgaagtaactgaagaaccacaaaagaaagccagttcctgccttaaccgatgacatctctccattgtgatttgttcctgccccaccctaactgatcaatcgaccttgtgacattccttccctggacaatgagtctcatgatctccccaccctgcaccttgtgacctccacttctgcccaaaagagataaccacgtttaactgtgcttttccactgcctacccaaatcctataaaactgccccgcccctattctccctttgctgactcctttttcgtactcagcccgcctgcacccaggtgattaaaaagctttattgctcacacaa

SEQ ID NO: 266634 - DNA, 389 bp, Homo sapiens
ggttcagtttgtggttactgaacctttaagcttcatttgccagcaggtatacatccagaaggcctgaagtaactgaagaaccacaaaagaaagccagttcctgccttaaccgatgacatctctccattgtgatttgttcctgccccaccctaactgatcaatcgaccttgtgacattccttccctggacaatgagtctcatgatctccccaccctgcaccttgtgacctccacttctgcccaaaagagataaccacgtttaactgtgcttttccactgcctacccaaatcctataaaactgccccgcccctattctccctttgctgactcctttttcgtactcagcccgcctgcacccaggtgattaaaaagctttattgctcacacaa

SEQ ID NO: 266635 - DNA, 628 bp, Homo sapiens
gaagtaaggaatagtcttctgaagaggctgtctcctgtttttcaagaagatccatagagtttatctcgttcctgaaacctcagggtggataacagagcctggactgcccttcagtttcatgcacatattcagcacgttagcccaagttaacatatgtcctaatcatacacagcaatgcatatgtatgtacctgtagaattttagagcaggaggatatctatgaagaaccggaatatgtagataagaggtttcatggaggggaaggtacttgtgttggaatatgaagactgggtagaatttgctaaggggagtagaagtagatctatgtgagaagaaattataagaaaaatacagaggtggaagtgagtatgctgtgcttgtggattcttgaagagggataaggcttattggaatatagaatataatggaaagaaaagttgactagataaggtgagatggccatattacaggaagtatagaatattggagaaaatagtttagatttgatatgagagaaatagggtgtacaactgtaaattttagaatagaggagtgatatatgaacctgctttggaaagatttccttgatagctttttacaggataaattgaaaggaaggggagagacc

SEQ ID NO: 266636 - DNA, 365 bp, Homo sapiens
cacacatacatttctttctccttataacagctctaatgaaggagagtaatgtatgtattattttaaaaaggtttccaaacttgaaacaaactttcagagtggaaggaagatcccaacctaggattaacataaagtgatagacgctttttcttataacgaaataataaaaatgaataaaataatgcttaaataaaaatgtattaggggaacttaatggctttttatagctgctcttgggatgggtggattaatttaacattaagagaaaacagcagtacagaaaactctttgcaatctatattgctccattctgttcaattaatgataattattttaaagcatgaaagaataaaacatatttgaaa

SEQ ID NO: 266637 - DNA, 623 bp, Homo sapiens
cgtgccactgcactctagcctgggtgacagagcgagactcttgtctcaataaaataataaaataagatgtaaagagacaatgctggcatcataacagtgctgagtcttgcagcagacacccaacctgctcctggctcatggaaagctctgctcagacgcatctgccagcaggatgggtttcagctatgacctgcgtaagccagggcaaatttttcacaaattcaaaccaggaagcgtttagttacactcagctctgggtaagatgctgtaggggtaaaaaaagaatataaaatatacttcccaaagcaaagactattcagaaacgaggggaaaatacaatacactgtgaggtcaaacatcaaataaaacagtatcaacattaacagtgactacataaaaacagagatgcagcaaagggctagaaaacaaacaggccgggcacggtggctcatgcctgtaatcccagcactttgggaggccgaggcgggcggatcacctgaggttgggagttcgagaccagcctgaccaacatggaaaaaccccgtctctactaaaaagcaggagaatcgctggaacccgggaggcggaggttgcagtgagccaagactgcgccgctgcactcc

SEQ ID NO: 266638 - DNA, 389 bp, Homo sapiens
atcttgcctgttaccttctttttatttaatgacctttaactcaaatcaacttttggttgcaactttaatagttttttatttgacttgcatttgtaaacctagggttttatagactcaggaagctattaaatctctgggggttccccttctcactctgcattacaacatagtgtgtaatttaactatttaatgtcatccttatgttttcagtgccttttgctaagccaaatcttatctcagccttaaaaaaaaaatagtccataaactctctgtggtgtaagtcaagtgtttgcacagtacagccatagaatgtactgataatcggaaatttatcttttttcaagacattgttaatgggatacctctcataattacacctttcagaaaga

SEQ ID NO: 266639 - DNA, 271 bp, Homo sapiens
  misc_feature (79)..(79): n is a, c, g, or t
  misc_feature (134)..(134): n is a, c, g, or t
  misc_feature (195)..(195): n is a, c, g, or t
  misc_feature (204)..(204): n is a, c, g, or t
  misc_feature (211)..(211): n is a, c, g, or t
  misc_feature (214)..(214): n is a, c, g, or t
  misc_feature (262)..(262): n is a, c, g, or t
gtattgttcatagttttcttttcttgcaatgcctttgtctgattttgctatcagagtcatgatggattcataaaatgangttggaaagtatcaacttatattttctgaaggagtctacagaattatattatttncaatttaaaaattttactgattttagcttctacatttattagttccttcttttacttattnattaaattncaaattngtntgttttttctagtttatgaagtcagaagcttagattattaatgttagntcttttttc

SEQ ID NO: 266640 - DNA, 424 bp, Homo sapiens
agtacttccagtagtgatttttcttcccctgctttccttgtcactccattttagtggtaaactttttgagtgctgaggttctttgttagatctcatgctctgtccctttctcagacgggcattcagtctggcatctttcatttaggggatgaaacatgacaaattatttctcagtagccgagacgaaccagctttttgttggtaattcaggggcttctgagggaacagctagtgggtgtgtggtttccatgagtcctctgaattcgatgagagtggccaatgtgtggcagcaatgagtcaagacacctgtgcacctagcgtagagaacaggtattttgctggatttgattgaagatattcttccatggcaccttatgtttatattttctatatcgattattaatgaaagataaagatctgtaaa

SEQ ID NO: 266641 - DNA, 433 bp, Homo sapiens
gattgagaggctacacttaggttcaacaggaaagaatattaaggtcaataagtattgtgagccacggtgcacaatagaagcattctgcccatttaacctttctgaccctttcccttgaggtttttctgtacaatgagcaattgaactaggactgttgtccagatgtctttgtttccaatctggaatttttccctctacctcatatttctgtattattcagtgagaaaagattcggattattgacttggggaacattaaggatgatgtatgcgctattccaaaatcttgaattttgtttaaatcatagaattacttaccattcctactcaccccatctaagtttaaagtttatttaaaacttcagaaattattttatttgtgtaaataatttcaacttttagattcagggagtacatgtacaggtttgttccat

SEQ ID NO: 266642 - DNA, 464 bp, Homo sapiens
tggcttactctgtcagtagctgctaagctattttgtgattcctgaaactattgctttgataccagcactggacacttaaaactctcttcagctgtgctctgtgtggtttgtgattatacttcttgcctgaatttccaaatcttgatgacattttatttataaaaatataattaactagttatcagagtacttaccatttcttagtatcatagaaccactggactatagcttattgaattataaaggggtcttgaagatactttagtgagttccaatcccagatcccaccaagttagcaaaggagaatgatgtgctgttttcaaaaattcaaaatcctaatgaatactccaaatgtactcatgttaaaactacatagaaatgccaactgtgggctaccctctttgggtcacctccctttgtatgggagctctgttttcactctattaaatcttgcaactgcaaaa

SEQ ID NO: 266643 - DNA, 268 bp, Homo sapiens
tagaggtgcttgaaaagtcaacttcaaggcaacagctcctgttctgtggctaggaagaggcagagaccacacgaacgcaaccatgccctacactcctggtgttaagaagccaaagcttcctccaaaaaatggcataggatgacgagcttcagcgcagaacccatgaaaacctctctgatgaaaggcaactgcgagggaatgctagagttaatccaggtgcaggtgggaggctcgattcggcccagacaaacagagccaccaagcagag

SEQ ID NO: 266644 - DNA, 323 bp, Homo sapiens
ctgcaggctgcctgcgtcttgagtaaggaaggaacaatccagggatctgccaatgcctcacaagtgtgcaaatcagcaaatattctgagactatacactgtattgaaaaagaggatcgtcagcttaataccattagagtactgtgcttttgttctgtacagcaccaaaatgcagttttcattcaggattaatttattttttcaaactatatatgtacttttctgtttaattgtaatcctaggagagcagctatattatctgcattgttgttatattcccaaaacccagaaaacagatgttcaataaatgattttcaaatgaaa

SEQ ID NO: 266645 - DNA, 764 bp, Homo sapiens
gtcccaactccacccagtccggcctggcctctgtccccgggtgaccgcggaatgggggggcgggagctagcgagcaggccctcaagcgcgtctggccgcctcctttgtcttgatgcccacgtctggttaggacccctgctgtccattttattaaaggagctgtagaaagcggcctggggcccagcgacctgcccagggcggacgaggaggcgcgactggcccgatgccgcaggctctctgcccagtgtgctcaggtgggagggcggggacatgaatcgagccacagagtgccctgggcacggacccccccccccccccggccccgggccccgagccccgagccccgagcccggccaccgaagcccgtgccactcgccagctcctgcgagacgagcctttcgagcgcagctcaggcatttggttcagggtcctactgccggagtcgtctgaggcctccatccgtctgtcgtcacgaaaaaggttttggggggactaataagcacttcctgaatgcacatttgctccacgcccctgctgtagggagagggtctgcagacacttcaacaaatagaatcctaggaccttacctgtgagtacaagagctggaatcttcccaccaacttcttaaaattcaatcctatacttggtccatttagcttagactggaaatttcccaaggcagtttgttttgcaatcttttgcatgattttagctctgtatagtttagtgaatgtttatggtactgaataaaacagtctaaaaac

SEQ ID NO: 266646 - DNA, 1028 bp, Homo sapiens
tatttgatccatactgaatgtatttgctagagtgcattgtacagatggttcaggtgtgttagatttgtctctgtaaatgaattggtcagtagataaaagaacatgactcaaggctgagcagggttcagcaggccccaagcttcatcattaaaaatcgggtgttttttaatatgaggctggctgtgtaaagcagacctcatgaactcaggggtctgagaggccaggccagattatcagttgggatgttttcagtcccaattagcagacagcgcagttcacactggcttaaacaataaaggggacttactgattcctgaaagttaaagtccagcggttgggtggacttcagggttggtttgaatcaacagttcctcagtgtcatcaaagatgctgtttctttctggctgtctactctgccttcagtggcatgagcctcatcctaaggctggctcccccttgtgggcacaagatagtgccagcaactccagaggctacaaatttcctcctgccccattcagagagcaggagaatggcttctagaatctctgtcagaagagccaggaagcttctttcccagaagcccccccagatttcatgctttttagtctgaatggatccaacgcctactagcctactgtgctgcttcatgtcagctgtgtcccccgctagaaccttgtgtggagccaggttcctcctaagcacagaggtggtatgggccaaacgaagctgcctaaatgaaaatggggaaaggtgtcaagagaaggaagacttagtgctggcaaccaacagtatttgttgcaatcaatctcttggccatcctcattcatacacaccttccttcccacgcatacacctcccaaaatgcccacacttagggaaaacctatttacccctttcccaaagggatccaactccaatccggaaaccctaggtgatgtgtcatcctctgaatttggtcagtatatagctcttcatgtttcagggaccactggtcaccatgctcaccttggcatagaaagtaagagtgc

SEQ ID NO: 266647 - DNA, 415 bp, Homo sapiens
aaagaatgagtctgagtttgtaatcctgggaaattaagtgaatgttagtgctttcaacttactgagaaacagaaagctgtaaagtcttgatggaattgtccaaaaagtatctggaaatatgaatctggggtgcagacagtttggagtcaaatgaatgaatggatggatggataaatgaatggatggatggactgataaatacttgtatacctattcatccattctccctttattctttccagtcttctttctttagtttctaataaatcaaatggcataacttgttgcctttaaaattttatttgcttcattttatattactttaaattatttaatatgttttatttttcttttgaatttaattcttttccttacacactctgcttgcatttcttcctgaagcttttaaaacata

SEQ ID NO: 266648 - DNA, 470 bp, Homo sapiens
cacgaggggcagaactgcctcggaattgccactgtgggtactctgcatgtggggtagccctgttttgcaaggagcagcacctctgctcctgttgtacactgtcccttcaataaaagttgctaacaccaccaccttgcccttgaattctttcctgggcaaagccaagaaccctgttggcctaagccgcagttctggggttcgcctgccctgcatcaccagcacagtggaaggccacaagctcacagcattttcatccgtaaacaaagcttggcaatatctctgatggttaagagcttacgtgtttgcgccagtgagacttgcactcagtcttctttgagtgagacttgaactcgattctgagtctcctccttcctagatggactcattatttacttatttatgtattcactcatctattcattaatttatactcttagtttgatatcaacatctgtaaaatggggatggta

SEQ ID NO: 266649 - DNA, 572 bp, Homo sapiens
caagttcagcttgcagcttccggggaaatgcaaccgacctctatgccatctctagctgggtaatcttcgaggccctgaaatgcaattttctgaacctctaagtcacttttattttatgtcatgtgataaagacacaagtagtcacgcactattggaaataggttgggagggaggtctttaagatcgcttttaaaatagtttccaggacttgtctaaaaatgatgacaaactttgaatccagagggcctgttggtcaatgtgttggaaaggacatttcaggccggcagagtaattggataattcacaggcatagaggtgacttttggaaaattcattctcctatccatgctgaaccaggcttccacgactgggttctacccaggccagtgggaagactctgggaaacttcaggccagccttgattggaagaacttccaggaggagccattgctgagatccaggctcactgtgattcactgaaaatgtagcgaaagggctgtcactggatattttgctatcccaaactctcagcctctgtgaataaagttgttttttcattaacctctcagtga

SEQ ID NO: 266650 - DNA, 473 bp, Homo sapiens
cagagtaaggtgataccttattgcagttttaatttgaatttccctgatgattagtgatgttaaccatttttttaacatgcttgttgtgggtttgacatttaaaaagactcatattcctcagataagtttttttctttttcatccccacccccactctccccgtcccagttgagcctccatcatctctcacctggactggtgcagtcttctccaagaccctaggcttcagaagcagacgagggaacgagcagaagaacagaagaacagcagaatggcatggcagagagaagaaagggaccatctgaacgccaagagaaattcagctgggggaggtcagagaggagatagactgcaggacagccaagctccaggggaagatcatcttcccactccatcccctttccagctccccatccatcccgctgagagccacctccaccactcaataaaaccctgcattcaccatcaaaaag

SEQ ID NO: 266651 - DNA, 513 bp, Homo sapiens
gaatggaagaaaattcttctgtttatgtgatatatcatcatacttttctacataaattgagtgcagaataactccaggaaataacaggaaagcaaactaaccaagttgagaccccccatgtctaccaaatggtttgtatgtgttaactcattcagtcccagcagccaccatctggcagattctgagcactgtgcttcaggttacattgcttaaaaattgaataacataaggattgtgaagtatggagcccagtgcacatttatcaaaagcatctgattcaagattttaatctagttccacctttttcaaagttctttatattctcttgtagtattctttcctaaattttctcagtaatgtagcaagatgaggaagatactagatagaattgtccttaaactgcctgctatatagttatctgtgaagaagcaaaagggaagcagtgtggtatgttgaaaggaactcaggattggaggtgagatttggggttcttgtctttgtcttaaaaaaaaa

SEQ ID NO: 266652 - DNA, 446 bp, Homo sapiens
ctcattttcatttctcctttttatctacttgtgagcccaaaacaccctcccactgaagcagcctcgttgtctggggtgacacctgaggtttgctgtctgacggccacagagatcaaggatgcagacacacaaagagtgaggttaagatcagaaatttaacaggtgaaagaatagttctctgctacagagaggggtcttccaaggactcttttgccctcactatctgcctaaataatctctatctcctgtatcactatcagctatcagactgtaactataagctttaaaaattccaaacttgttttggtgttaataaatttttagtaaaaactggtgaacacatttcccggcatcttttcatttaaaggaatgtgtcataaccaggtcacttttactgtaatttgatgcattaaagaagtaatcttacaaatgtgactgatgacatg

SEQ ID NO: 266653 - DNA, 417 bp, Homo sapiens
ccaggggaactcactggggaaaagctagctttcttcaataatggtactgtaaaaattgggtaaccaaatgcaaaaaattgaacctcaatcctttacactataatcaaaaattaactcaaaatgggccaaaaatgtaaatgtaagacctaaaccaatattattttaaaatagagagtataagaaaatctttgaggcgttgagttagtccaaaactgcctaggttaaatataaaaagcacgtatcataatagaaaaggatgataaattaaaaagtattagtctttaaaagataacattaagaaaattaaaagacgagattaggagaaaatatttgcaaaacatgtcgataaagtatttgtattcaaaatatataaataactcctaaaactcaacaataaaagaaaataaccaactttta

SEQ ID NO: 266654 - DNA, 339 bp, Homo sapiens
gaagaatctcttataaagaggttgctagtgctctttttgccttatacaaagccattatcttcattatcctgatcagaaaacacagcttcctcttgccctgatataagacactcttgctgtcttccaagattgtttgctatacaaacattcttaaaaagattgtccggacctaaggctgtttattccttagtggacatgaagaaatgcaaaatacccacggagaattatctcccaagagcatccaagagcaggctgctcatcaatatatcaaaaggatgtttaaatttcttcaagatttactaacagtttgaaaaaaataataaaacaagtatacttatc

SEQ ID NO: 266655 - DNA, 829 bp, Homo sapiens
gggtgaagcaaatgcagaacattggtgttacttccattctagctgtagaattgagaagaaaataaattaatttcttaagttatgacaggaaaattttctatagaatcctgctttttttcatctgtgagaccagccgcatcattccagtttctaaattatcggcatttctaaagatgaagtaacaggggaagtgatgaactttataaatagactccctaaaatatttggcatgaggggtcaagatgtaggcgaagctggaaaaagactttagtttgggtattagccagaggccaacagttgttaaattctctaaatttccttaagaaaggaaagagaatcccttgaagaacattttttttttctccaatgtgtagtcagtgaaacccagagggggaaaaatgtacctttcaagccagaattaggtcatgccaaccacagcaaattggaagctctacttaaactgtagtcttgcaggattgctatgtatcatcttaatgtcatgcatgtggtggggccaacacttccagatcatagctgctaggctctgctgagcggggcagctctgctgggtgaatctgaccaccccattgggctgcatttggcacacagacataacctaagactgtctgaaaggtaagccctggaatatggcattttttaaagtgaaaaaaaaattacaatttctaaaaacaaaatatttcattttgttttatgattttagaggggggaaatgtcaagggaaatagagaatggacaaatccaccattatgaccagcaggcacagcttcctggcaattgagacaaggttgccaaaaacctaccttaccat

SEQ ID NO: 266656 - DNA, 439 bp, Homo sapiens
ttataaggccaattacttatctaagaaagagtaagtagaataaggcaaaatacttacaaggcaaagctactgctgcggtttcaatgcgtcttccaaaagttcacatgttagacacttggttgccattgtgtcagcgttaagaggtagagcccttggcaggcaattgtgttatgaggggtccaccctcatgaatggattaatgccattatcttgggagtgggttagttattccaacagtggctttgctataaaagtgagctctctcttgcacccactatcttgcccttctgcctatctggcatatattgacccttgctagatgctggcaccatgctcttggacttcccagcctccagaaccatgagccaaataaacttctttatacatttcctactctgtggtattctgttatagcagcagaaaatgaactaagacaaat

SEQ ID NO: 266657 - DNA, 387 bp, Homo sapiens
atgaagaaaactgagggtagggtagagaagcaccatagggagagaactcaagaggacagtttgggacgtgttaagcttgagatgtcaagcaggtggtcagaggagctgaaccagaagcatctcaaattcaacatttctgaactaaattcatttcttcccaatcaaaactgcaactcctcctgtattcaccatctcactagaagatatcaccactcaatcagggtgcacaagccagaaacctgaaagttctcaggatcaacccctaacacaaatacacacactaaagcagtcacctgcccagtgagtttccctgtttcttctctctctccgtatttcttcacctgggagctcctactcatcttccaggcttgagtctggaaatcactt

SEQ ID NO: 266658 - DNA, 317 bp, Homo sapiens
gatgaactacaaaatgagagtgagctcctcccattagtccatcctgatatgtgatttcccttccagaaaatgggatagattctgatggtgtgagggatgattgtggtggtaagttgatataggtaaaataggtcccttttttaaggctcccttcatagctaagaatttacaaatgtgatttcttttctttttttgaaatcgagatagggttttgccatgttgctcaggccggtgttgaactcctgagctcaagccatccactcgcctcagcctcccaaagtgccgggattacaggcatgagcaaccacacctcggcc

SEQ ID NO: 266659 - DNA, 724 bp, Homo sapiens
agccaatgttacaggttgaaagaatgaatgagcgacacaggatgaaagacagcaagggaacaggctactggggagatacctgtaacaacatcaccaaccacagttggggtaatggagaatttgtaaaaaaaaaaaaaaaaaggccttactactttctgatcatatcttagatatgtcataagccaaacatcctactttgagtcaactcaagtcaatggggtatatcatctataagaaaaatgtgggatatttgggaacatctacagaaacactataaagtagaactataagatgaatacccctgaactacatgaaaagttaaaattatactctcctgtaccagaaagagagctacgatcaagaggactttatttatggacagtaacattactacttattctgaggtcatgcttcctgaacactgcaatcaaattaaaataaccttaaatagcacttggaagggcaaataactcacaaagcccaacagactgtcccttaagagaggtagaagaaaactgaataactgaagcaatcaccagcaggttccagcagctagacacaatgatatcaattagaagtaaccaataaaaatacagaaatgaaaaaaagaaataacagaaaactaaactattcattcatttttctagttttcagcagcaaaccatctgtagttattttgtcatagaggcaaatgacactctttgaggactcaattgtattataa

SEQ ID NO: 266660 - DNA, 625 bp, Homo sapiens
agccaatgttacaggttgaaagaatgaatgagcgacacaggatgaaagacagcaagggaacaggctactggggagatacctgtaacaacatcaccaaccacagttggggtaatggagaatttgtaaaaaaaaaaaaaaaaaggccttactactttctgatcatatcttagatatgtcataagccaaacatcctactttgagtcaactcaagtcaatggggtatatcatctataagaaaaatgtgggatatttgggaacatctacagaaacactataaagtagaactataagggtacatctcaagtctggcctcacctttcccagtgaaagtgacagggagacccaaggaatttcacatccaaagaaaactaagcacatgcaacaaccaataaccagagaaagttcttcatcttgggtagaagtctgatataactgtaagaagccaaagtactcctggctcatccatttgagaaccttggattttaggggcagattcatctagatatagaggtgtctggcttggagtgaaaatctccattgaatcattgcagttctgttttgttttgttcctcctgtgatgacacacgcttaggtataactattaaagaaagggttattaatttcc

SEQ ID NO: 266661 - DNA, 418 bp, Homo sapiens
gattttcctaaactcacctagctacttagtggccaggccatggttagaacctgggtctcctggtgtactctgtgtttttcaatcctacatggttgcctgacaataaatgcacacatagttaattctctagtaatgtgctatattcattcataacttagtcaataattatttcttcagttggaaatttgacattagacaactcatcactgatacataggattcttataagtcaagatttaattaaaatccattttgttctttttaagctgtaagagatggaaaaataaatatgcaaagcagtggattctattatgaatcaattaggccactattctatgtgttttgttatccatggtgggtttcattcattcttgttcagtttgtgagctgtaataaagtgtgtgttttgtcattgaca

SEQ ID NO: 266662 - DNA, 426 bp, Homo sapiens
aattctatatggtcttagacaatacggaggcccaagaaaaggggaagagacaagggaacggccagtaggttggaggagtcaacacacacatttattaagtttgtggttgcatatgtgcatgatttgtggtgccccaaaacaattacaatagtaacaaggatcactggtcacagatcatcatcatagacataatgataatgtaaaaataatataattatgaatagacaatcatatattaatatatattaataatgaaaaagtttgaaataatgcaagaactaccaaaatgtgacacagagacacaaagtgaacacatgctattggaaaatggcacgaatacacttgctggatgcagcgttgctacaaatcttcaatttgtaaaaatgtgtatttgtaaagtgcaataaagtgcgataaaatgagcta

SEQ ID NO: 266663 - DNA, 223 bp, Homo sapiens
cctttctccccagtcttttatttttaaaataactgtgttaatcagttagtgctttatttataatgaatttctgatagtcgaataatttctaaatctcctgcaagttagtacttgagaaatttgaaattaattttcaatattaacatttaagctaatataaaaattttaaatttcaataaaaattaaaaattatgtaagctacaatgtaactggcaagtttccg

SEQ ID NO: 266664 - DNA, 816 bp, Homo sapiens
agcggggtctgagcgcgcggcgcctgcggcggcgaacggacggacggaccgcggacggacgtactgaccccaacccgcgagccccgggagccgtcgatctgaggaggggccgcttcgccatgtcgccgcgcacctgctgagcccggagcgtccgaggatgtccgcgctgaggaaggctttctcgccatccgaggcttggccctagccctgcgcggcttccctcgcggctgcgaaccctctgcctgcgcccagcccagccacaatggggactgctcggttttgcctggcattctgcagaagcattgctgtatcttaccagacaggaatacaggccgtctccaaactatagtcctattggactggtgcaccaaatatggatttggggtgtgcgtaattcagtccatagcacccaccaaaccacagaagctgccccgagctgatgtcccgctatcggtgcggctgcaggacactgtcccattgctgcatggagcctctcgctgtctgagcctcacctgaagccggcccacaccattttcttactctatgcattggagcgaaaatgtttaattgactacgatgggtgattcctaaagttatatttgactcagaaaaaaatgcattagtaaaactccctgtttgaatgtttctagtattcacagcccgggtcactgtctttctataacgattggtatctgaaataagaacatgggctgcaacttacagccttgctctttctactatataaacttccctaatcaaatatttttcattaaaaaaatgtgtttttggaaataaacagttacaacctggttccca

SEQ ID NO: 266665 - DNA, 824 bp, Homo sapiens
accactgggcagaccttgctggccacggcctccacgtgcagtgaccgttctcttggcagcgtctcaggctgtctggaccagctgtcacagtctcgctgtgggtgagtcacctgaggcactgtatggcggatagaaggattcattgccctgggagggttttgcctggcattctgcagaagcattgctgtatcttaccagacaggaatacagatgaagacccccaggcccagggaattcgatcactggctgagaactcacagctaaggagggggagcctgggattccttcctggtgctcacacccgagacccttttgtcactgtgttcaaaggcactgctgcacagacgtgattcttctttcaacgaacatctccaggacttcctccggggtctgtgacctcatctataattaaagggaacagagatcttcctgagattagcccatttaacttgtttaactagatgcatgctgcaaaaactgttttcaagaaatgaacaattgactatttaaaaagagccaagccttaaaagaagaccaggttttaatagggaaaacattcagtaaaatattattctgcagtaacttgtggaatgactgctgtacacacagctctgggctgggtacctggaagctcacgagcttgtctggcctccctcctggacacaggaggtgtcaggctggtgggcagccagaatctgacccagctggacactggagtgggacgacctgatgcgcgtcgcctgcgaaaatggcgcccactcgcagcgccagcatccctcaacaccctcctgacacggcccacaccacaacgcacccacctcaca

SEQ ID NO: 266666 - DNA, 879 bp, Homo sapiens
agcggggtctgagcgcgcggcgcctgcggcggcgaacggacggacggaccgcggacggacgtactgaccccaacccgcgagccccgggagccgtcgatctgaggaggggccgcttcgccatgtcgccgcgcacctgctgagcccggagcgtccgaggatgtccgcgctgaggaaggctttctcgccatccgaggcttggccctagccctgcgcggcttccctcgcggctgcgaaccctctgcctgcgcccagcccagccacaatggggactgctcggttttgcctggcattctgcagaagcattgctgtatcttaccagacaggaatacaggcaatgctgtgaagcgtcagagggaattccgttggttactttcccatacggtcttgttcagctgcttgttctcagaaaagtgtgtttgttggtggaggagaatgcgaccaaggagaccatccttttcatgaaggcacaaacgtgaatacatatgtgacttttaagcctttaaataaaaacccaaagcacaaaaaaacaaaacaaaaaaaaaacaaacaaaaaaaaaaaaaaaaaaaaaaaaaggggggggggacacaaagaatctccccaggggggcccacaataaaaagggaacacacagctcaggtggaaaaagggggcccaaaaagagagaggagaaaaaaaaaacaaaaacgagggacaagagaaaaaaacagcgagaggaagaaagaaaagacgaagagagaaaaacaaaaaaaagaggacagacaaacaaagagaaagagagaaggagggagaaaaaaacagaacaagaaggagagaaaacacaaaacaagcaaaacaccccaaaataaaaagaaagagaaagaaggagaaaaaaaagcaaa

SEQ ID NO: 266667 - DNA, 590 bp, Homo sapiens
  misc_feature (577)..(577): n is a, c, g, or t
accactgggcagaccttgctggccacggcctccacgtgcagtgaccgttctcttggcagcgtctcaggctgtctggaccagctgtcacagtctcgctgtgggtgagtcacctgaggcactgtatggcggatagaaggattcattgccctgggagggttttgcctggcattctgcagaagcattgctgtatcttaccagacaggaatacagggcctctgaagagcaccggcagcttccttcttagcagaggagaaaatctctgccatctcgtgctcgcctacctcgactcgccagacgccctggagcagaggaggagcagtggtcggcagcggccagccgtgcaggtgccacacctgatggtccacctgggagaaccaggcaggaagccggaaagagtcgcagtgcacctctgcggggagccggaagatacagacagcccaactaaatccttgaaatgcagcgtggcgtgaaaatggagcggcattttagttaacgagggtctggatgccattcacaggaatgcagtttctacagggttctgctttgcagagacctctcctgataataataataaatntactcagaacaaa

SEQ ID NO: 266668 - DNA, 1080 bp, Homo sapiens
gaagaggaagagaccaagtactgtcttctatgggagggcatggcaggaaggcaccatctgagcccggaagtgggtcctcaccagacactgccgtcacctccgcgctggacctgcagcctccagaactgtgagaaatgaattctgctgttcatttatgggccccccagtctgtggcttttgttttatcagccccagctgactaagacaagtggtgtctcttaatgaattgatgaattctttgtgttttgaagagtcttcatggatggtacttcagcccgaggagatgcgtgtgctttgtaagagatttgaggggtgaagtcgccccaagttttacatctgtaacaggctttgaatgactgttcttgcctcagtgccaccagagtcagtggcgcaagggagaatcatcggaggaaaccccctcactggtgtggaatcggagcccccttcctgcgcttggagtgggggttcagcagcagggttttgcctggcattctgcagaagcattgctgtatcttaccagacaggaatacaggcaatgctgtgaagcgtcagagggaattccgttggttactttcccatacggtcttgttcagctgcttgttctcagaaaagtgtgtttgttggtggaggagaatgcgaccaaggagaccatccttttcatgaaggcacaaacgtgaatacatatgtgacttttaagcctttaaataaaaacccaaagcacaaaaaaacaaaacaaaaaaaaaacaaacaaaaaaaaaaaaaaaaaaaaaaaaaggggggggggacacaaagaatctccccaggggggcccacaataaaaagggaacacacagctcaggtggaaaaagggggcccaaaaagagagaggagaaaaaaaaaacaaaaacgagggacaagagaaaaaaacagcgagaggaagaaagaaaagacgaagagagaaaaacaaaaaaaagaggacagacaaacaaagagaaagagagaaggagggagaaaaaaacagaacaagaaggagagaaaacacaaaacaagcaaaacaccccaaaataaaaagaaagagaaagaaggagaaaaaaaagcaaa

SEQ ID NO: 266669 - DNA, 817 bp, Homo sapiens
aagtccagttgttttttttttttttctgtgagcatacatctcaaatttaaaagacagtggaaaactaagattttatttaagtcctaggtacaactttccagaactttttggaagcacaggagggaacaatattcttcaacctccaaaaaaaggtatagtattttaacaatttatgccaactttgagactttgtcagaattggaaaatatctctaagataatgggagatctttagagatgtttcataccaggataaagatcaaatgccgctgtagcctagagttaatatgtttggtggttatcaactagatctaaggcatagtgaggcaaacaatgtctactctttgatgcatacattctttttcatttttgctcctttcagtttttcctctgccccattgcagctagtaacagtttggccctatttcatttgtagtcaagagctctctctgtaaagaaccatggttccctcaaacagtggtaccagcaataaaactatgataggggacttagaaaaccccctgcccaaaagaaatattcatagtaataccgagtgtctttcagttcaaatatttatataagaaaagcttaattcctttttctgtgagaaaccatttcaaataacttgtttaaaaatactttcaaatttggaggtcgaacaaatgtgttctgtgtatagaaactaataacataggccgggcgcagtggctcacacccgcaatcccagcactttgggaggccgaggcgggcagaccacgaggtcaggagatcgagaccatcctgcccaaccgagtgaatgcccatctctactaaaaatt

SEQ ID NO: 266670 - DNA, 428 bp, Homo sapiens
gtctggggaggggtgatctggataatgtgaaactgttctttctaccctcttcaatgtatcttttcttgtttctgtgctctaaccaggtactgtaatctctcacctggatttcctagctcttgtagagatatttttatgcatggatagtcattcaaattaaagtttctgtgagagaatgagcactggaaacccctattctatcatcttgctgatgtcactctgccaataatatttctcttttaaccttgaattccagtaagctctgagacaaattttaatttcaacttttgcagttgtgtttttatttgtttctttagttttacctctcattgtttcataaatatgagacatccatggttgaatttcatactattattttttctagttttctactaatatttttcatgattataccttttctaatttta

SEQ ID NO: 266671 - DNA, 442 bp, Homo sapiens
  misc_feature (10)..(10): n is a, c, g, or t
  misc_feature (25)..(25): n is a, c, g, or t
cactaaaaanagactttttgaaaanggattaaaaaccatgttgtgttaagcagcaaactgatgttacatcctgggcacgaggaaaatctgtgtgttagactgtgcctagcatttaggtgccatctgcaattgttcggctgtttgcattttcatggttccttttgacagtagttccaaacagctcctaatttttgttcacagagataagtgctaaggattttagtacagtgctcctggctgtcatatttctaaaaaaatcaagtcagcagctggtggcaaataaaccagtgctctctctttcactacctgtaacttggtatgattgtaattgttaataactggtgaaaatacagggataagctggctgtgagccacccagcagaggtggactcagccttgcaaaggaagctctttgaaaggagggatactgttctagtcaaaa

SEQ ID NO: 266672 - DNA, 409 bp, Homo sapiens
acttaatttgtggtgtaaaatatttttgttatagaattgttccgcctcttaaaggagatccgtggggaaagacctggctggacagccttttacatagccccagtgaaaacaatgcaggaatctgaaaaggtcattaggaaaataaaaacttaaagtcctgaaaagctttctgacaattgtccaaggccatgcagtcctgaggacacagaggacaccagccatccctcagccacgacccacgagccaacccaatcagaccacatcttgtctttcaggaaaatgcactgaattttgtaccatgcccccaaaagcctggatcaaattaagagttttaatactcaaagtcatttatattgtgtctctaaagcatatacaataaatgtacgcatcactcaggatatattaaaat

SEQ ID NO: 266673 - DNA, 370 bp, Homo sapiens
taaaaaggaaaaatagttcacctaataaaaaacctttgggaaagaaccccctaagcattcccattaatggaaacctcagatcctctcctactttcctaaaaacgtagctgtctcaggtcattcactgcagctgtcattttacaaaagaaaatttaaattccctcttggccggggcaaatagagggcgacagcccctcgcccctgccgaagtaaggcagggcgccagccctctcgttactagaaggcaagctaaagctccttttaaacggtctccggatgacgacgcattcctaacgggtttcgaaggcatgtttaaatcgcccgcttttttgtttgctctcagcattcaccggcgccgggactgcggccg

SEQ ID NO: 266674 - DNA, 325 bp, Homo sapiens
gagatctgacaactgcctcctttggggacgctgcagccccatcacatctctgaggccccactcagagtggaaaacatgtctcacccgaaacctggtagggcaggacgggagcctgggcggcccgccccaggaggaggcccaaggctgctctccctcctttgggacgtcaccagcctcctcctgggcagctgataccttctcacgaccaccttccatctcctgccctgccctttgctgcactgtgggtaacacccctgtgttactttctggagaggtgaaaggataaggcaagatcccccaaggcctaagtgctgtgtctcatctt

SEQ ID NO: 266675 - DNA, 647 bp, Homo sapiens
gacagagtgagaccctgtctcaaaaaataataatgaggtcagacaaggtgctgggattacaggcgtgagccaccgcgcccagcctcaaaactaggatcttaaaaagctaagctagatggtacagtttgctagacagcattacctgctggtgaaggtagcgttgcaactcagccctgtaagaagctatcatcaccccaatgacaagtacagagtcacaaaaacctcaggtttggtgaacttcatgagggcagagacaatgagcggaagaaatgaaacagacttcatcagtgctttaagatcctatgtcttctcccagtattattctgccagcataccagaagtctggtcactcccttgactcctatttcttcatcaagctttccattcaactactgcatgtgctttaacagattcattccatataaaactctgaaaaaatatatgtattctacaaaataaaatttacctatagaattacaaaacaattgtttgtagattacagagaaatatgcaagtataagaacagtgtgggcctggtgcagtggttcacacctgtaatcccaatacttcaggaggcagaggcaggaggatctcttgaagccaggagtttgagaccagcctgagcaacacagcaagaccccatctct

SEQ ID NO: 266676 - DNA, 583 bp, Homo sapiens
gcttttctacttttcatgacatgacattgcttcgaaggaatctaatgtatatctttgaaccaatgccatattgtttctgctgaaaaaataattctaagaatattatgtatcttcatccaaattttggtggcaagtgtttaatttgtattttccttccaggtcatgttttgtttgttttgttttcatttttgtttttgttttgagacggagtctcactctgtagcccaagctggagtgcagtggcgtaatctcggctcactgcaaccttcgcctctggggcttaagcaattctcctgcgtcagcctcccaagtagctgagactacaggtgcatgccaccatacctggttaatttttttgtttgtttttagtagaggcagggtttcaccacgttgccctcggtggtctcgaactcctgagctcaggagataccgcctcggcctcctaaagtgccagctcatgttttaacgacacagagaacatctttacaaactgcctattccaatgcaaagaaaaattcattacaaaaaaagttagtaaataatttttattccctgaataataaagttggataaaatgtttact

SEQ ID NO: 266677 - DNA, 324 bp, Homo sapiens
ctggcctggcacagtggctcatgcctgtaatcccagcactttgggagatgatggtgggaggatcgcttgaggccaggagttcaagaccagcctgggcaacgtagtgaggaacccccgacctccaccatcccccccgccccccaccaaccccctcacttcaaagttttttaaatcagccacgcatggtggtatatgcccttagtcctgtgtactcaggaggctgaagtgggaaagtcctttgagcccaggagttgaacgttgcagtgagctatgaatgtgccaccgcactctagcctgggcaagagagctgaccctgtcacttaa

SEQ ID NO: 266678 - DNA, 400 bp, Homo sapiens
caaagacaaggactgtccatgaccatggtagaagagagcctgtgtctgctgagacatttaaatcagttccattttaactaatctaacatttatgaacagctctgtggaaattagtctttatgttaacaggttcaagccagcatcaaaacctcagctaaaattagctcttgctaactgataaagcctcctgattggcctagaaatggctccagttagacaaaatgtcgtatttcaacaagttttgtttggcatttgtcacctgatattggtattggtttgttcattgaaccaacatgttcatgagcttatttgctaagcattcattctttccacggacatttcttgagtgcctgtagtgacctacacactgggccgggggtagggagacacctgtgaccag

SEQ ID NO: 266679 - DNA, 421 bp, Homo sapiens
tattagatgaggctttaacagaaaaaaattaaaatgaaaatatgctataacatttttcaaaacattctcggcctcttgcttattttcctgtatctttctttgaatcttttttgtattttcttttctgtccctgcccttcaacctagaagactcactattctcatttatattattcaataaacttctacatgaagagtaatgatcaacttcatgaatatagtattgctgaatgatcacatcatggctgcatcacattaattgtctttattttcagatgaatatattccgaatcagtgtcttttgagtttttacaaaaagacaaaaatttttaaatgaaggtaggaagatacatagtattgagaagtaaacgtcccctttaaatttacagctaggaattattttaacaactttaaaaaaaaaa

SEQ ID NO: 266680 - DNA, 542 bp, Homo sapiens
agctggagcccttcaattgagcttgatttgattgcttaggggagtggaccatgctggttagctcaaactaaccatagtccactcctggatgtgggggtagattcatcttcttccaaagtatatggactgtggggagttgggagggcaccagaacaaaaggctgccatcaggaaataggaggaggtaagttggagaggatgttaaggtaaatggttagtattcatacctcttaagcatttttactgtaactcttcatcagatctcaactacaaagaaaacacatgaatttcattaattaattcatgtatttaatattttttagagagagcctgccatgtgtcaggtactgttgaggatatagcagtaaataacagagaaataatctctgctctgtgggcagtggggagggaccatcccattttgccaagaggatgtgcgatagtattgttggatctcatatgatgtttatatgtgaacatttacttgatacagcttgtaaatgatgtgttgaaggcccttgtgtatacaaaggtgataagaag

SEQ ID NO: 266681 - DNA, 467 bp, Homo sapiens
agcatatctatcgttctagaaaattttacgagacagtgctgctctagactttaaaagtcaagtactctcagaaagttaggatttaaaattataagcttccatccatctatgcaagaagtccggatccagacaatatccaaaattaaggtccagggacagattataaatccatttagctaatttttctaccacagtcatatctatcatcattgtgtttatcccaaatagtttgtggtcataagagccaagtatctttcaaagtgcatccgttactgacatgaaaatggatccaaattacagcagcatttctgtcttcaaggaggctttggacacaacaatgatcatgtgtttttcacacatgtgatgaagctacttccaaaagtaggccttacaaattcccagttcattacacagaatctaaaatggcagctcatttctgcatcctttccacacaagaaaaatgaaaa

SEQ ID NO: 266682 - DNA, 81 bp, Homo sapiens
gactccagactctggtctccctgtttgcagagtcttaaaatggggagccactttgggttctttctacaagattgctttttt

SEQ ID NO: 266683 - DNA, 463 bp, Homo sapiens
agcatctctcatgattcctggcctcttgggacaggaagcctcaccttgagctctgacactgtctgtttccatttagttccagcaccactgtttggggactgctgtctttccctcttcagctttaaatatattagcaatatgtatgaatctcagcgacctcttggagaattacattcctatgattacttaaaagaaatcagttctgcatgatgaagcgtttacttctgttttctgcccgtctgtgcacctgaagaatgattcttattagattagaatttgtctaaggctgtattcgcattgagtgttttctctgctctttctcgtgagaggagtgctccctcccacgcaccgtccacagctcatttccaagtctgcatatctcattgtgcatctgctgctgctctgctcaggcctgagtagccgctgacagtgattggcagaaaagggtttccaagaatattaa

SEQ ID NO: 266684 - DNA, 421 bp, Homo sapiens
tattttgataatttttctgaaacaactgatagagaggaaaatcactctttgtaaaccaggatgaggagagaatcatagtgggtgttttgtatgcagaaggctaaatgttcagaggagggagaaattaagctgcccaggccaactcttcccaaggacagtgaggctgatgtgaatgggcaatggggtttctgtgctgtggcagggcaccagcagcgtagtgaaggagaagcgtgagcacagagccacagtgcagggaaagctgggggcatatatggggaattttttttgtgtgtattggttttttgtgttttgttttgagacggagtctctcattctgttgcccaggcaggaggttgcagtgagccgagatcgcgcccctgcactccagcctggacaacagggcgagagttcgtctaaagga

SEQ ID NO: 266685 - DNA, 534 bp, Homo sapiens
tacaaatgattatgattttgtataacaactgaagttaggtgtgtgtgaagttttataattgctggtcttcattagataaattaaattataattaaatgatctgttttatttttgctttttatttggtctcttattaataggcacaatactggcattagctataacacaaaccaatggcactaaaaatcttcagaacctttttggatttgagtttttgaaagatattttgtggagactacagatttaattttaaagtataaatatgctcttattttaaataaatggggtttatactttgtgttctaatgattgagataacttttttttttgagaacttaaattaaaattcccagtcttctctagttctgtcagatttctttgttccccctcccagtggttgagttcttatgggatttgtggcttatttttaaaatccaatgattaaaatgaagttttctggcaatattaatatttgtgtgaatctggatatcctcctcacttaacttctaaggctttttcttcatctgaaaatga

SEQ ID NO: 266686 - DNA, 367 bp, Homo sapiens
ccaccaccgtctcaacaaatgaccttgttcaagtcatgcctctgccaggctttggcatcaccaccagcctcctctgtgcccggctcccctccccatcaacctcgctccctggtctgtggctggagagttgtaaaaaagcttcaggggatggccaggggtcctagaaataccctaacacctctcaagttcctagggtcagcctatggccagagccacctgtctgcaccttggcgggccctggcttgtacaggacatgcagaatttccagaacctcaggattggcaacttgcaaacttttttgactggacccataggaataatatattttgcatcatgacccagaatacacacagagaaaatttttact

SEQ ID NO: 266687 - DNA, 466 bp, Homo sapiens
catggtggcgggcgcctgtagtcccagctactcgggaggctgaggcaggagaacagcgtgaacccgggaggcagagcttgcagtgagctgagatcgcgccactgcactccagcctgggcgacagagcgagactctgcctcagaaaacaaacaaacaaacaaacaaacaaacaaaactcctaacatcctttggcccagatatatggtgggggctggtgaaatttgggcaagccagcgttgaagaggagttttgttttgttttgtttcattttttgagacagggtctctgttgcacgggctagaggacggcggcacaatcatagctcactgcagcctcaggttcaagtgatcctcccacctcaggctcccgagtggctggtactataggtgtgcacgccacaatgcccagctaatttttattttattttttgtagttagagagtctcactatgttgcccaggctggtg

SEQ ID NO: 266688 - DNA, 445 bp, Homo sapiens
taattcccctcctcacatatcttcagtaaatggtattggagaaggattacattgtttaatgctatatctacaatttaagtgaaatgtttttggtgttagtatttctctggaccacttgttactgcctctcttgtctggtcctttatgctctcacttctagttggtgacacatctagaacaggtctgagaacttactgctttaccctacataatactgccattcagagcctgagaatcttttctctgctactgcgtttttctccttttgctccctgtactcaggagtgtgtgtcatagggcaggctgagtttcagttagctcctaatgtggatattggaaaccccacctgcctgccaagtccttttggctgtgagcaaagtggaggcttggtacttgtcattcctttgcagcagttgagctgaaggaatgctgcatggcttgttgg

SEQ ID NO: 266689 - DNA, 576 bp, Homo sapiens
ttgcagagatgggatgcaaattcagttccatttgactccggagcctgagcttggggagattatgagatgcagtcttctttcatatcacctgtgttccctcaatcattctggctttcccagtcaggggctcactctccaccgaaccccgggcccagagtacttactttctccaaatcacttcctggtatttttcatggacacagtttgtctctcccctgcattttcaggatcctgaagtagaggccaaggctttacctctggaagcaccaataatacccagctaaatgccctcactagtcatccctgatactagttatttgctcctttctttttgtgagcctcaccagaagtatatcaactttattagctttttcaaagaacctgctattggctatcttggccctctctaaattacatttattattttattagtagcagctttaatatttattattttctttcttctactttctttgggttccttttctctttttctagtttaggtggatgtttcagtgcactaatatttgtccttccttcacttaagtctctgcattttcctccactgcttcagcc

SEQ ID NO: 266690 - DNA, 457 bp, Homo sapiens
gagtaagagaaggacatgctttttccctttatgaagcacttcactgaagctgtgcacaccacttctgcttatatcccatagccaaaacttactcatgtggccacacccggttcaaggcaggctgggatatgtggtctttattcccggcagccatgtgcccagttacagagttctcttagcagcttttactaaggaggaaacaaggggaacactggcagttgtgtctggctcttctgctatttagctaaccagcagtgtttgctcccaggagcccccaaaattgtgatgttgcagttcactcatggcccagctactgaggacattatgtaggtatccccataatgtcatgagatataaaagaattgcctcccagcactttgggaggccgaggcgggtggatcacgaggtcaggagatcaagaccatcctggctaacacggtaaaaccctgtctgtact

SEQ ID NO: 266691 - DNA, 470 bp, Homo sapiens
ggttattttcaatagtttgcattcaatagaacatattcttacaaataaaatctgtccatgtatccaaggatagttccatttgttttaagttttgattttatcactattacatcactataccaaatatcccccaaaagattataccagtaaatgtcttttaaaatataataataaataccagccgggtgcagttgctcacacctataatcccagcactttgggaggccgaggcaggcagatcacttaagctcaggagttcgagaccagcctgggcaacacggtgaaaccctgtttctactaaaatacaaaaaactagccgggtgtggtggcgggcgcctgtaatcccaagtactcgggaggctgaggcgggagaatcgcttgaaccagggagtcagaggttgcaatgagccgagattgtgccactgcactgcagcctggctacatagcaagacttcctctttaaaaaaaaa

SEQ ID NO: 266692 - DNA, 542 bp, Homo sapiens
ccctagaacaagaatgcttatgaaaactggcatgagtgcttttccgtatgctaatgctgtagatctttgaagtgtcgtaaaacagtaaaggtgaactgttttgctcattggtgggtactactttgccttttttcatgttcattatgtttcccccaatgggtcactgtggaatcacctctttccagaaatactgctccacactgtggcttgagtttagtatctgaaagttatcctgggtaggctagatcatctaagaaggaaataggacattatccaggaaagttagttccttaatattggtattatatctgcctgtagtgttttaaaatatattaaaataatcatctggttatactgtatattctgaaagcctgtgaactcatcagaactaaccaaattgcacagaatattaaattttagtgctgtattttaagaaattatctgatggttcaaattctggctttgccacttgccaaaatgtttgaatttgaacacgttaacattttttaaccccagtttactcatttatagaaagaaaagaa

SEQ ID NO: 266693 - DNA, 289 bp, Homo sapiens
cacgttgtggcccctgttggtgccttgttcctttttacagccgagccatgtgctgctgcgtggagatgccacatgtgtgtcttttcatccgctcacaaaccaggcttggcttttgtgacttggccaagttcccaaagccagccggtggcatcactgggacgagaccccacaggcggtgggcctctgagcagggggccacctgccggccaccctggcctttgaggacacagcctggcgggggcggtgcaggcaaaggcttccttgaagccttctggtctgacctgtggct

SEQ ID NO: 266694 - DNA, 318 bp, Homo sapiens
acagagctgtcaatgtcctctttcccttccttctcatttgctgtttcaatagggcttcatcagcctgagttctttattagaattgacctgcatcaatccagtgcccccctcataccacctactagggaaggctgcattctacattacggtcttcagggatcctctctggggccccacatgcttccctttttgtttacctgtgtctcggggcaattttaatcttagtcttatacttttcatttaagcaggttaggctacactatacacttacagattttgccagtagaagctttgagacttcacatcttgtaaaataaa

SEQ ID NO: 266695 - DNA, 478 bp, Homo sapiens
tgaaatgggttggaatcagaaccaatgatcggcgatgttcaccagctctaggagactgtagttcatagcctttgaggacagcgggtctctggtgtggcgggggctgggggactgggcctaggaggggcggcctgctgtctgggaggcttcctttaggaatggggttgattaggactatgaaaaactagtcacaggtggccaggtgaagagggaagtgcggacctggaagggagcacgatgccagtcaatgtgtggaggtattgtggggtaaacacaaatttttaaagatcgaattttccctggtgtcaaaagagaaagacgtctctcttagagcatttcctttagaaaacttgtaactgtaaaattttctctgtccctttgagatgtatgtaagtccttttaaaagctaaatctcttgccagttttacatccccggaatgtttttcttaagagccttgtagccatctctttgaaatgt

SEQ ID NO: 266696 - DNA, 272 bp, Homo sapiens
gtaaaagtacttaaaatagaatagtacagtattttaaaagctatacaatacgtctctcaagtgttatgatgcacgaaggcaaatgtaaatgaagaggcaatctgaaatttgggtacaagaactcagtaaaagaaaaggcagtctgaaatttgggtaaagtttaggtgaaattatatagtgaatcacttgaacccaggaggcagaggttgcagtgagccgagattgcaccactgcactccagactggtgacagagcgagagttcgtctaaaca

SEQ ID NO: 266697 - DNA, 360 bp, Homo sapiens
aaggaaggaaggaaggaaggaaagaaagagagagaaagaaagaaagaagagagagagagaaagaagaaagagaaagaagaaagaaaaagaaagaaagagaaagaagaaagaaagaaaagaaagaaagaaaagaagaaagaaagagaaagaaagaagggagggagggagggaaggaaggaaagaaaaagagaaagatgaaagagaaagaagaaagaaagcaaagaaagaaaaaagaaaagagagaaagaaaaagaaaaaaagaagggagggaaagaaggaaggaacgaaggaaattgttcacaagaaggtaaaccataaatcttggtactattattgttcctttctcattctgcatttgct

SEQ ID NO: 266698 - DNA, 307 bp, Homo sapiens
acatctgactctccagtttttttattctcccaggattttatgtttttatgactcactgaaagggcacatgttttcctgtgacaaaatccaaaccttctatactgtctgtgagtgataagttaataatgcatatttaagtatatcctacacagatgcttagtaatggtaaaattgtattaaggtaaactacacacttcctattctggaagtttcctgcaaaaggaaaaactattccaacaatgtcaagaaacttaggattatgtacatattcaaacattgctataaatcaatttctaatcactaaacg

SEQ ID NO: 266699 - DNA, 483 bp, Homo sapiens
ctcatcccactctccaccctgaggtcgaccccagtgtctgttgtttccttctttctgttaatgagttctcatcatttagctcccacttataagtgagaacatgtgctatgtgtttttctgttcctgtgttagttggctaaggataatggcctccagctccatttttgtttccctctccagcatctgtttttttttttaatttttagtaatatccattctgactggtatgagatggtatctcattgtggttctgacttgcatttctgtaatggtcaatgatgttcagcttttcttttcatgtgcttgttgcccacatgtatgttttgttttgaaaagtgtttgttcgtgtcctttatccacttttcaatggggttgtttgcttttctctcgtaaatttgtttaatttccttatagatgttatgacctagcagctgtaccttttttaatttcaagacattcaataaactaagaaccaacagcaaa

SEQ ID NO: 266700 - DNA, 391 bp, Homo sapiens
acacctaacatgtccgattaatgtcatggaagctgcctttcttgacaatccaccacaggcagaaccccaacgtgaaaaggccataaaacaacccaaagcctttactttattccttttctaagtatgttttggtagcattttaagttccttgaaggaaacaccatagaatcacaagctctgtggtctgaaatgcctttgagattttcattctctttcttaattttgtgaatgtcactgtcagaacccctcaattctatcttgcgattctattgttacaatctctgcctgttggaattgtttttttttcatgtacgtacctttctgtgtcatccacctttggccaactctggcaggctgatggctcttaagtgctggtctaaaatttggtgtc

SEQ ID NO: 266701 - DNA, 397 bp, Homo sapiens
gtgttttgaaggtgattaggtcaggagggtggagcgctaatgaacgaaattagtgcccttataagaagagacagggcagctctctctctctgatctctgtcacattaggacgtagagagaggaaggccagcagtaagtgggccctcaccaaaatcaaattggcagcaccgtggtgctggacttccagcctcctgaatggtgggaaatgaatatttgatgcttaagccacacagtctacagcagcccgagcttagacagagcggacgtttcagttcaagtccaaaggcaggatcaggggacgggaccccctttgtcctattcaggctgtcaactgattggatgaggcccacccatattagggaggggaactgctttacctggcccactgttccatgtg

SEQ ID NO: 266702 - DNA, 450 bp, Homo sapiens
gtgttttgaaggtgattaggtcaggagggtggagcgctaatgaacgaaattagtgcccttataagaagagacagggcagctctctctctctgatctctgtcacattaggacgtagagagaggaaggccagcagtaagtgggccctcaccaaaatcaaattggcagcaccgtggtgctggacttccagcctcctgaatggtgggaaatgaatatttgatgcttaagccacacagtctacagcagcccgagcttagacagagcggacgtttcagttcaagtccaaaggcaggaaaaagctagacattcagctcaaaggctggcaggcaagaggaattctatcttactcaggggacgggaccccctttgtcctattcaggctgtcaactgattggatgaggcccacccatattagggaggggaactgctttacctggcccactgttccatgtg

SEQ ID NO: 266703 - DNA, 419 bp, Homo sapiens
gttagttttatggagacaagaagggaaaggtgataaaattatttctaaactacatacttatctgaaaccactgccagaaaagctagaccgtcctcttactaggtatcactgcctcagggtaatctgaattttctatctcaagttagagattactcttcaccccttcccaagcagatattaaagtctcttattctgtttttttcctttaaaaagtatcagatctgtcaagagttgtttcttcagaatcttctattgccaaaaactgttcttataatctattttatcattcactcactttgtcactgattaacatattagcaccaaagttcaaccaatgcttacctttataaaatgaaaatttccccttatttaaataaattttatattaattgcttagctgaatgggaatgatagtaata

SEQ ID NO: 266704 - DNA, 481 bp, Homo sapiens
caaactcttgtccctggactggccacattggagtccccctgagatctgattagacatgcaaaatcccaggccccactctagacttcctgtgccagaagctgcgttctaacaagatccccaggaggttgagaaaagccctgccctaaatgattctaacagtttgctgtcaagacacagtgacagtaggagggatatatgacaggggagacagggatggtagggggagattttggcctccctctcatgaatccatgcagagagcatcctcttctatctgctttcctcaagtgtgaaagaaaagtaagaatccaggtcccgcccctgttgcaggcctgatctgaggtttgtgagggcagtcgccgtgcaggtgagaggtatgactcgcagagcattcaggagaaggactctaacacttggagggtcatggggggtgcccataagtgggatggccatggagatcagctcagagacagaggacgat

SEQ ID NO: 266705 - DNA, 448 bp, Homo sapiens
ctgaggcaggagaatggcgtgaatccacgaggtggagcttgcggtgagccaagattgctccactgcactccagcctgggcgacagagcgagactccgtctcaaaaaaaaaaaaaaaaaaaagtcttttgaacataagttcttaactttgataaagtcaaaattacaaacttttttcttttatggatcataattttggtgttacatcaaataaatctttgcctaatccaaaatcacaaagatttttctcctttgttttcttctagaagttttaaattttatatttaaaacttgaaagctttagattttacatttagattttacatttagatataggatacattttttagttaatgtttatgatgtgaggtatggattgagttttctttcccacatggatattgaattgtaccagcacagtttattaaaagatgtctttttttctactga

SEQ ID NO: 266706 - DNA, 89 bp, Homo sapiens
tacttaatgttgtaatgacaggtgtaagattaactttgttaggtgtctagccactcatgcaaactaaattaaattaatggaacaaattt

SEQ ID NO: 266707 - DNA, 629 bp, Homo sapiens
agccatgcatctctacttcaggccatttcttacaagtagccattcctgtgttctgaagagcagatcaagaaagaagatggttaagtggtgttacctttgtgcaggatagtgcagtctgccactgaggggatgcctgtatacctgctttcctggtggggtggttttctctggggctatcagggtgcattcagctgcagcagagtctatgtcttgatgtttcttctggtagtctgagtctctaatacggggaagtttttgtacttgtaagaggttggagtcagttattatcagcgtcattatttttctttgatgaaaacataaaatttgaatcactttcttattgatttggctttgagctacattttttttttttgccttttaagttagcaacaacaacaaacaaaaaaataacaaatatatatataaaatataattaaattatacaatacttaatataaaaaaattaaaaaaggggataaaaaaaaaattatataaccttgttgccgcttggcccaatcaatttataattggcaagtttatcttgcgcccgaattcaggctcctttggccaattcccctatatgggggcgtattacaattcactgcgcgggtgtttacaccgttggtggg

SEQ ID NO: 266708 - DNA, 326 bp, Homo sapiens
atctattaaaatgcaaacaataaatagtccccttttctgcctttagatgttagtgtgaagatgtctctcctgaagtaccttagtcttcttatgactatgaaagaagctaaggtaatatgctcaggatggcaaagcaaaaagatgggaaggacctggatccttaataaaattgttgagctatctaatcaactacctcttgcaccaccctatcttagaacgttttaacatgtgaagtaataaattcttaatggtttatatcaactgtccaaggtttttatttttttgaagtcaaaaatatcttaactgctaacaacaacaacaacaac

SEQ ID NO: 266709 - DNA, 588 bp, Homo sapiens
gtggcaggtgcctgtactcccagctactcgggaggctgaggcaggagaatggcgtgaacccgggaggcagagcttgcagtgagcggagatcgcgccactgcactccagcctgggtgacagagcgagactctgtctcaaaaaaaaaaaactagacactaccgttcattaattgcagtaccaataacatcatctcagagagaaagtgatctccaatacaacagtagtcaaagaacagaacttcccagaaactgacctccaactggatttacgatgctatgattcttctttgataaaaacacatgacacagccaggtgcggtggctcaagcctgtaatcccagccctttggtaggccaaggagggaggatcacctgaggtaaggagttcgagaccagtctggccaacatggcaaaaccctgtctctactaaagacacaaaaattagctgggcatggtggtgggcgcctgcaatcccagctacttgggaggctaaggcaggataatcgcttgaacccaggaggcgaagcctgcagtgagccgagatcgcaccactttactccaacctgagtgacagagtgagactccgtctc

SEQ ID NO: 266710 - DNA, 412 bp, Homo sapiens
catcactttgtactccagcagtgacattttaatttacaagccaagaatgcactgatcgccaactgcaaaaattgatttggttgttcatctgattcaacccatgtcagagtttgaaagtaattatgatagtggggctgataggcaggcaattacatttttgttctcttgctttctggctccttctccctctctttcccttcccacacctccacctgcaaggttgttcttgtcaggaaggcaatgtaagcaggagacgagagagtaatctttggagatgtggtatatggactcttgtggcagaggctataataaataatagtatggctggttctttatcctaatttttgttagcctcttatgaactctaaccagataaaagatgcaaactattttgtctccttctttaaagtac

SEQ ID NO: 266711 - DNA, 333 bp, Homo sapiens
gaagaaaacataaaggaaaatctccttgacattggtcttggcaattatgtcttggatgccacactgaaagcacaggctacaaaagcaaataaataaataaatgggacttcaaactaaaaagcttctgtacagcaaaggaaacaaccaacaaaatgaaaaggcaacctagggattgagaaaaaatattttcaaatcatatatcagatagggattaatatccaagatttataaagaacttacacaactcaaaatagcaagaaaacatattactcaactaaaaactgggcaaaggggcacagtgtgatggctcatacctataatcccagcacgctg

SEQ ID NO: 266712 - DNA, 580 bp, Homo sapiens
gtcttttttactgacaaatggctaagtgaatgctgtttgtttgagggatgaaatatttaaatgagaagccaactcaactcttcctcttgatcttagagtcattctctcaagtgtaactcccagtgcaaagcatcacatcaacttatcaatcgactgtgatgtcaactacagcctctgcaccagaccagccctcctctgtgggacgaagaactatcctgtggtcctgccaggactgcctcactgggacaacgcactgcattaggatctatcccttacgatggctcagggttttccagtctctaaggcaccttatcattatcttacctaaacttcctaataatcctgtgagggaggctggacatctgctttcatcccatgttacagatgagaaaacgaaggtccacagaggtcaatgacttgcctaaggtgacctggcacagaaagttgtgtggcagaaggggaacttctgtttcctaacttctggataagcgccctcctaggataggagaaatgaatgactcttgctactccagccaccacttccactaattaaccactaataaaaatgtaaaaatcagta

SEQ ID NO: 266713 - DNA, 496 bp, Homo sapiens
tgagcccagggagctcaaggctacagtgagccgtgactgtgccactgcactccagcctgggtgagacactgcctcaaaaaaaatgagagagagaataattaaaactcacttttattttcttttcattaatttaatataggaagttgaacagacaacttcattttaaattacttgaaaacatattttggaagataactttatattttgaaattatcattacagatatcaactaaaatattttcatataaaaataataattatggtagaaataaaattatagtgatgacagtattctaaaaagtgatcctcttttatgaagtaccataagtaatgcaggtaatagataagaaatgagttccataaattgatagatcactaagatatttttaaaagtaaataatattaaatttctttaacaaacaaaatgattttatttccttaagaaaaatatttgttatagaagccccatcattaagagttctccagcctgggtgac

SEQ ID NO: 266714 - DNA, 390 bp, Homo sapiens
tcgatcatagagaaataatccttctctctgggatgtatagttttgaaatagtctagaagaaaaacacaataggtttaagaataacatggggcaagttaaaataatgataatacccaccattacaacatgatctaacaggaaaagtatggacgttgaagtcactcatatgtagattcaaacctcaagtctgccatttacttatctacagattcacatggcatgatggttatgattggtgagacagatattttcaaaatgttactcctttcaaccccagttgattattatacaaatactatgatatccattagtttcttttattaaccacaacaaactagaacaaaaatgtaccctatgtagtttagagtattaccgaataaaactaataat

SEQ ID NO: 266715 - DNA, 423 bp, Homo sapiens
ttttttttttttgagacagagtcttactctgtcacccaggctggagtgcagtggtgcgatgtcaggtcatagcaacctccgccttccaggttgaagtgattctcatgcctcagcctccctaatagcagggatcataggtgtgagccaccacactgggctaatttttgtattttttgtagaaatgaggtttcaccatgttggccaggctggtcttgaatacctgacctcaagtgatcaacccacctcggcctcccaaagtgctgggattacaggcatgagccactgtgtccagccgaggttattttaatctagctttgcagaccagaaagatggtgacaatgaactaatattaagaatacaggatcactgagaatataaaatacaaggagagagatggagaaaaataacaaattccatttagat

SEQ ID NO: 266716 - DNA, 592 bp, Homo sapiens
tttaagctgttatcaaacaattatttggtacatagcatacctttggaacatgtgataagattatattttgtttcctatttctttttcttagggaaacctcaaagagctcttttggaaagttgattgtctccatatattgacctactgaattcagtaggattacattctgtttcttctttaacgtataggtaaaggcatcaaggactatgatatcttaggtatgttgatataggtgagctaattttggatctgccgtggactctatttttttcccccactgatgaagtataatagtaaaggtatggagatttggatgggagatgagtttttaaaaatatgtctttattatgagtttccaaacatagtacatctgcttaagttataaggacatttggggtagtttggggtagtttcatcatttaattaaaaaaaaactgcttcaaatggagaagattagtagtagggaacaatactagactttgtcagataacccaaattttttggctagatggactaagaaaaaagaagactcaaattaccaaaatcagaaatgaaagtgggtacattactactaattctacagaaataaaaa

SEQ ID NO: 266717 - DNA, 516 bp, Homo sapiens
atttttataaaatattcttttatccttgggttattaatatctaattttttataatgcttattaactcttacaaaaatcataattcttaagaggtaatacagatgtattatagaatgttcaatgccagtacttttttcaagctaaatatatctgtaaatatttgtttatcgattcaaactttttaaaaaacaaaaatgccattttaaatagtagatctcttggagcttaccgaagctattgttgagcatttggaattgcctagaaattgacaatagatttttctaataaaaatgtgactaatgatgtaaaaccttctcacttccaaaattaatctgcagttcaatgtaaagaccacaactttaggaaagagtataactctgcaactggccagcaaagttgcttatccttatcgatcacatgggattaacagtatttattcttagaatttttgtgaggattaaatgagagtacatacttaaagtttccagcacagaacctaacctggatttgattctt

SEQ ID NO: 266718 - DNA, 484 bp, Homo sapiens
caaaagaactatatcttttatgtctgagaaaaagttttaaaatcagcacctacacagcaataaatggtttaatgatagccttttaagtgcaccatcagagcccttttatagaattttgtgaaagacatactagataatttccatggaagttggtctcatttaaatgatactatcctaaggaacatttcatataaacaactcatattttctttaagtttcttttaaaggttgagctgacagtcacatcaggatttgataagtcagagcagtgctgatgttattacaaggtaatacttttgcaatcatcagcaacaggataggactgcagaactgtaacagactttgcatgaaaaaatacaaaataatatcatgtttgggcagttgtgataataaatgatggcatatcagtgtagaggtagtagtgaaacaaatgaattattaaagaatattatttttaagtatattaaagaatataaagaatata

SEQ ID NO: 266719 - DNA, 918 bp, Homo sapiens
ggtcttgaactcctgacttaggtgatccacctgccttggcctctcaaagtgctgagattccaggcgttagccacggcacccagcctgtcttttttttcttttcgagacaggatctcactctgttgcgcagacgggagtgcagtagatcagggctcactgcagtctccacctcccagcctcctaccctgttgttactgaattaggagagtcctttgtgaacctcatcagatggatgatttgcaggtgttttctcccatcctgtggctgtgttttcactctctcgggtggccacaaaagttttaattttgatgaagtctgtttttccattgtttgtcttattgcatgtgcttttggtgtcatagctcagaatccattgccaaatccgaggtcatgcagagccgccccgtctattctaagagttttgtcagtttagctcttacattgagacctttcgtctactttggattaatgtttgtgtgtggcatgaggtagggtctgactgcatttgtttgcaggtagacgtccacctgcacgtttgttgaagagactctcctttcccgatggagtggtctcgacacccttgtctacgtctccagggcagggcacattcttgttcactcttgtgtccctagcacctggcaaattgtctggcatgcacgtggcactcattacattcatcagaaaaggcttatgtgggctgatcgctgtgtgcaaacagacatctccaagaaacaggggctgcaggaaggttgttccgccttgacagcagcttctgggaagaggcccatcccgccgggtaccctgagtcccctggggatcgtagacatcttgcatccttccacctttgtcaccaaatggcttatttctcttcccacttcattttaaatactgttgccaaatgaatattcctcaaacaca

SEQ ID NO: 266720 - DNA, 385 bp, Homo sapiens
tcgtgaagagtcttcatttaatatcggaactttgtttactgtcatttaaagatcattggtcatcttacattataaaaataaaatttaaagattgattcagttttttaagcatgtaagtacatgcttgtttgatggctctcaaatctttcatcatatgttgccagtcctgttagatcttgtgccttcatattgctctggcccacccatctatttactacagattgtagagaatgaattaaagtttgggcccaaatgctatttgacagaggccaattgatgaaaattctaagaaagagattttaggagaataagtcttcagcctatttatagatttagagggaggaattagcatgaagttccgttgagccgtcgggtcctctagccg

SEQ ID NO: 266721 - DNA, 706 bp, Homo sapiens
tcgtgaagagtcttcatttaatatcggaactttgtttactgtcatttaaagatcattggtcatcttacattataaaaataaaatttaaagattgattcagttttttaagcatgtaagtacatgcttgtttgatggctctcaaatctttcatcatatgttgccagtcctgttagatcttgtgccttcatattgctctggcccacccatctatttactacagattgtagagaatgaattaaagtttgggcccaaatgctatttgacagaggccaattgatgaaaattctaagaaagagattttaggagaataagtcttcagcctatttatagatttagagggaggaattagcatgaaagcgaagttgaagatgtaaaagagaaaggaaagatgaaagaaagaaacttttaaaacaaatttggagccaggcacggtggctcatgcctgtaatcccagcactttgggaggccgagacgggtggatcactccctgaggtcgggagttcgagaccagcctgaccaacatggagaaaccctgtctctactaaaaatacaaaattagctggatgtggtggcacatgcctgtaatcccagctacttggaaggctgaggcaggagaatcacttgaacccgggaggcggaggttgtggtgagccgagattgcgccatcgcactccagcctgggcaacaagagtgaaacttaatctca

SEQ ID NO: 266722 - DNA, 886 bp, Homo sapiens
ctccagctctgccagtgcgggccctgtgtgggaggtgaaccctgcctggcgactctccccctgcagtgctcagtaacctgtggcaacggcacccaggagcggccagtgctctgccgcaccgcggacgacagcttcggcatctgccaggaggagcgtcctgagacagcgaggacctgcaggcttggcccctgtccccgaaacatctcagatccctccaagaagagctacgtagttcagtggctgtcccgcccggaccccgactcgcccatccggaagatctcgtcaaagggccactgccaaggcgacaagtcaatattctgtaggatggaagtcttgtcccgctattgctccatcccaggctacaacaagctgtgctgcaagtcctgtaacctgtacaacaacctcaccaacgtggagggcaggatagagccaccgcctgggaagcacaacgacattgacgtgttcatgcctaccctcccagtgcccactgtagccatggaggtgcggccatcaccaagcacccccctggaggtccctctcaatgcctccagcaccaatgccacagaggatcacccagaaaccaatgccgtagatgaaccctacaaaatccatggcctggaagatgaagtccagccacccaacctaatccctcgacgaccgagcccctatgaaaagaccagaaaccaaagaatccaagagctcattgatgagatgcggaagaaagagatgctcggaaagttctaataaaatggaaagatagcaaaaaaagcatttttttcttgcttatagagatattccatgggatagcaaatcctgtgtcatggagatgaagtcaaaattcctgattccaaaaggttttgagaaaacaaagagggggaatgacgta

SEQ ID NO: 266723 - DNA, 549 bp, Homo sapiens
tgggtgattagaggattcggcgttgtagtgtgctgtgctgcaagtcctgtaacctgtacaacaacctcaccaacgtggagggcaggatagagccaccgcctgggaagcacaacgacattgacgtgttcatgcctaccctcccagtgcccactgtagccatggaggtgcggccatcaccaagcacccccctggaggtccctctcaatgcctccagcaccaatgccacagaggatcacccagaaaccaatgccgtagatgaaccctacaaaatccatggcctggaagatgaagtccagccacccaacctaatccctcgacgaccgagcccctatgaaaagaccagaaaccaaagaatccaagagctcattgatgagatgcggaagaaagagatgctcggaaagttctaataaaatggaaagatagcaaaaaaagcatttttttcttgcttatagagatattccatgggatagcaaatcctgtgtcatggagatgaagtcaaaattcctgattccaaaaggttttgagaaaacaaagagggggaatgacgta

SEQ ID NO: 266724 - DNA, 452 bp, Homo sapiens
cactggggcttccaagggggccagcaggagttaaaacgcttaagctactcaaaagccttatataaatctaataagtgtttcacaacacaggaactgggaatcccaacgcattttcggacaacccaaaaggtctgaaaaacaaactcgagcagtcccctccaaagcagctgttggctcagcctccgagcttctcagcccgcagcctgttttcaaacttcaccatccctgacggatgaaagaccccgacctccgccgcccgagctcccagcgcctctcggggtttcgaggtgcccgagcctgcggagaagggaaaggaaacccgggccgggttcggcggaggagaggagccccgcgcgccccgcagcccagacaaagctgcgcccggagagcggcgctcttcccgccctgtctgcggagaagcgcggcgcgggccccgccacacgtgcggccgc

SEQ ID NO: 266725 - DNA, 435 bp, Homo sapiens
gcaattgttgaattcattgatgggagatatatagaaaagaagtgtgttcaaattgtcattaataaaacctcaaaaggccccttcaagcatagaaaggggaacccagactttccacacactccaccctccacacttgtggtgaaccatattgttcttagagaagaatgctaggtacgcacctaccatctcggatgaagcatattctttctggccaatcaccctgaacaaggcctagtttgggttttattaataagaaaggcaagatattaaatagatcacaaggtgcaagctactagtagagggtataaagcaaaatcacaaatcagattgatggactgtggtgactgtttttctctttggcccaaacaaaaatgcggggcctacacaaagcactttattaacctatcaaaaaaaaaatcattaaaaaaaaaactg

SEQ ID NO: 266726 - DNA, 426 bp, Homo sapiens
ctctgcgaaatgggttgtgctgaggattgaatgaattaatgcatggaaagcccatagtacatagaagttgccaataatgatggtgcttctaatgctgctagaatttgcgctggtgacaccctgaaatttctccagctgctggtcagcaggactgaacgggcccagtggttgagaccagtgtagtttggaaagcggagtgggcctgtgctgccccctgctgggcagccgtcccatagcccctgcagccgagactttccagcccagagggactttttcagtgttggccctagggagagttttgggtaactttcaggccaagttggtcatcaaattaacagaaggtgggggtgtatgaaaacccagcccagacagtccctacttttacaatggttcgatttatgatttttcgactttacagcgggttta

SEQ ID NO: 266727 - DNA, 550 bp, Homo sapiens
agaatgctcccctgtgagcaagaccctgtgctagggacagcagaagacctgcccctaaggaggttttggccttgagaagatgcacacataatactgggaagaaagtcatcaatgtcccgagaaagggactctgtgaagggagagtccgtacaattattaggacaatgagaggttttgtagaggagaaagatgacctttgagccaggtcattcattggctcaggaaaaaaatttacttggcccctgttatgtggtaggcactatgctaaaagctggagaaataaaaacaaataagatatagctttgccttcaaggagcttttggtctaatggtagagacatataaacagataattatagcatgaggaatgtggtagttaaaataagcatgaggtgctatcagagtataaggagaagcttctaattcaaactgggtggtgtgaatgaagtagtggagaatcagtgaagaattctttttgtttttttgagcagtgtcgctctgtcatccaggttggagtgcagtggcacaatctcggctcactgcaacctccg

SEQ ID NO: 266728 - DNA, 447 bp, Homo sapiens
tttaatatccttacatgactaacatttttagagaaatagtcctttgaaattaataggaggtgatgtgacagtggaaaaaaatgtaaaaatcaatcagacttgattttcaatactggtgctggcacttaagagctttgggattttggaaattgaattaaataattgatcctcaatttctttgtctgaaatataggaataaaaatacctttaactcagggttattatgaggtttggtacatacgtatatttatatgtaactatatgtatacacacagacatacacatcacacctatagacagagaggaaggggggaagagaggatatgcacgcgtgtgtagtcttggcacatagtaaaaaaactggccgggcgcggtggctcatgcctgtaatcccagcaccttgggagacagaggtgggcggatcacctgaggtcaggagttggaggg

SEQ ID NO: 266729 - DNA, 443 bp, Homo sapiens
gtagttgacacatgagtaagcaatgagtctgggtgaggaaaagaggctgagtctctccccttgttctgtgatggctccatctacaaacctgtatctgggacctgcctcatcccattcccatctaagtaggaccttttttaaaaaatatagaggccaggcgcggtggctcacgcctgtaatcccaacactttgggaggccgaggtgggcaaatcacgaggtcaggagatcgagaccatcctggctagcacggtgaaaccccgtctctactaaaaatacaaaaaattagccaggcttggtggtgggcacctgtggtcccagctgctcgggaggctaaggcaggagaatggtatgaacccgggaggcggagcttgcagttgagccgagatcctgccactgcactccagcctgggcgacagagcaagactccatctcaaaaaaaaaa

SEQ ID NO: 266730 - DNA, 467 bp, Homo sapiens
aacaaagatacatctcctgttccatcttcagtaagacagccacaaaaattgaccacagattaggccacaagagaaatatcaagtttcaatcctgcgaaataatacagaggaaattatgctgtaatgccataaaattagaacttgagagcaaaactagaaaaatgaagtagctaaagttcagaaatgaaaacaaaacaacacaaaacctacctcttctaaagaactcttgaataagagaggaaatcaaagtctagcaaatgatcatgaaaatacagatcagaataactacaagattcagcctcagcactactcagagaaaaagttttagtcttaaatacgttcatagacaagaaagagtacaaataaatggctaaacttctcaaatccaagccaaaaaataaaaaccacaagtgaataattttctaggaaattataatttacaaaaactgatctaagaattaaaaaaa

SEQ ID NO: 266731 - DNA, 409 bp, Homo sapiens
gtttgaggagactcagagtcactgtcaagtcgtcaaggacctgggtcaccctgcatccccatctggggctccttctatatcagttttcctgaagcttagtccaacttcttgaagtgggccaagaaaaggctgtttccagaattggatattgcatctctaaaacacaagcttcactgatgtcgtggagtctatgagacacaaactttatctcatatggtagaatccggaatgatcagccatcgcttcacacccaaggaaagaactgctgtccagtgccaggcccagagcttcatggtttgtggcaagtctttggaaagataacgtctaacttcattcattttagctgaaaataccccatggtggcatttttctggtctccctactaaaaaagtgagcatgacacacaaaa

SEQ ID NO: 266732 - DNA, 1417 bp, Homo sapiens
actgcactccagccgtgtgacagagcaagacccctgtgtctttaaaaaacaaaaatctagaatggtagaaatgataaccgaaaaaagcaagttccaaaattacatgcattacatgccaattgtagctttgcaaagtgtaccgatgatgatctgaacatgaagcaaaagatggtaaagagctgttagggtggcaggcttccgcctttcccttgaaataaattgtttgactttacctttacccaaaaatcttggggagatttttttccccctaggcaacagactgatttttattattaaagaatattcaaaatgataaatggctgtcacagactttcctaatattagagaagcagtgagatgtggttttagcgtgagctgaattttcttgattaatatctgaattgtgtaaagtcctacgaaatatttttggagatcgttattttctgcatctgtaaaatgaaggagttggactagatggtggaaggtttctgcggtgactccaaatactatgaaaagagctaacctgtgctaaaaacccaggatgaatcccagtgctcagaggaatgaatgtgctacctttaagagtatgcaagcagcctgggcaacctagtgagaccccatctcttcagaaaacaattttagccagacatggtgacatgtgctgtagtcctagccactctggaggctgaggtgggaggattgcttgagcctaggaatttgaggctgcggtgagctactccactgcatttgagcctgggcgacagagtgagatcctatctggggggaaaaaaacttactcatggaggttaatgggctgaattgtagcccccaaaattcatttgtctaactcctaacccacagcacctcagaatgtgactgtatttggacaggtaattaaggtaaagtggggtcacatggttggaccctaatccagtgtaagtggtatccttattagagattaggacacagatggggagaagataagacagatggagaagatgagcatccataaatcaaggagagaggccatcagaagaaaccaactgtgctgacaccttgatcttggacttctgcctctggaacagtgaggaagtaaatttctgttgtttaagccacctattctctgatgctttgttgtggcagccttagcaaaagaataccgggggaaaggatgtttctttcagtaaatggtgctgaagcaaatggatcagaatgtatcatagaactaaatgtaagagctaaagctacaaaacttctagaataaatcagaaaatctttgtcaggttagttaaagattcttagatataacaaaagcacagtccataaaaaattgaaaaatcggactttatcaaaattaagattatgttttttcaaaagatgacaccagaaaaaaagtacttgtattcagatatttaaa

SEQ ID NO: 266733 - DNA, 1431 bp, Homo sapiens
taaaaattaatatttgataatacatatgttcttttttatagtccaacaaacgcatttacatatttacatttttatttgaccaccactctgagaataattcatatattttaatacataggctattgattatttctaaatagattataattttagtattgattttattttaaatcaaggaggtttcctttgttgcccttgcctctcaaatgtatttgtaatagtgtttagttcctcaatggatttaagataattttgttatttttaatgcaccaaattttgtaatcttactgttacttcttttattccatttgcttcaaatggtatcacacctctgaatattgttccttaaaatttattagttacatataggcttatgtatatgtgtagtcattatatatgttcttatagggaagagattttatcatttttgttcatcactaaacccacaagttcaagaaaaatactgatagagggtagatccacaaacattggtggaaatgtaaatggttgccaaaaatgaaaaaggaacacaatgcatacaggaggtattccaaatttttaagtgtgtcttggaagtttgtatgagatttcacagaggtaacaccccaaaaaaattttacttctatattatgacttcttttgcatctactttttccaaaatgttatttttttctaacagagttctaaacattgaaaatcatttaacacattgcattcagtatttctgatcatttttatctaaccagttgctaggatcagtttctaaaaaacagcatgagagagaaaacttgttcaaagtaccctcctaaaattattaaggtcttctaaatttatgtgacttattctatcaggtaaatattcttattatcccagatagtgttggcaaagctaatactgcacattctgtctgtacagtttcgaaatttataaaactaaggtttcatttctaatactctcccctgccataacaagatgggcattttccgctgctctttaactcttatagtgctaaacttgtactttttgcagcagtggtgatcagtgagggttttgaatatctctaaaaataaatggctttcttccctgtgctaccagtacatcatacaatactaggcgtatatattttattgaagtattgtttttatgagcttgtttttccaaaagggaataaaatatctacaaagcgttagtgataacatctgagaagtttctgctaactctgaaaatgccgtaactatttacacacaatgttaattttctcctattttagagcctgaggttaatacacctcattcttgtcttacagaatttctataacttgaatgtttatgtctcttctttgagcctctttctctcttttatgtataagttctgagatatgaatagaatgtgaaattaaataattttatttcattatgattcccagtccag

SEQ ID NO: 266734 - DNA, 116 bp, Homo sapiens
gcaatctcccccgacttccctgaacccccttcacttttccaaaatgagcagagattgagagagcaaaagaaagcccctcccttccccctcagagtgatgagtctctggcactgtct

SEQ ID NO: 266735 - DNA, 152 bp, Homo sapiens
tgatccacttgtaggggacctgaaccgggtacttgatgcccaaggcttcccctgtgggtgagaggcagggtcctgcccgtcaggagtgagaggcagcgtggggtgtgtgtacatgggattgcgggggtgtgatggaaagacatgcgtgcagg

SEQ ID NO: 266736 - DNA, 497 bp, Homo sapiens
gaggggtagtttcccataaggagagccctgggagcttagccgctggtttcctaaatctgaatatctcagccttgggaatctctgctgtctgcacaggcttgcaccctgcctggaggagatattttgaatatgttgaataaaaagcaaaaatgatcaccaaaaatgggaaaaaaaccctagcttattgttttaaattagaaaacaatttaagtgttcaaagtaggataaacaagtaaatcataaccttacagtagactattagccactaaaatattcttgagaaatacttagtaatatggaaagcacgcatgatagaattaactgaacaaagttgattgcaaaatggcatgttcaggatgaatccaattttgtttttgtggcaatgtgcaaatatttgccactatgtgataccaaaatagagtggtttgttttccttttgtgtttttctgtatttttacgtttgcctacaataaatattttttgtcatcagaaagaat

SEQ ID NO: 266737 - DNA, 285 bp, Homo sapiens
caatttttaaaaataaagtaagagtcaaaaattacattctattatgcttctaaggatttatatccctactaatcaaagagtttatagcaaacatatgttaagattaatgttttggaaatccaaaatgcatcaagctttccatagttgtagttgtagacatttacatcttatttccttgtctattctagtaattcataaggcctacattatatacaaaatcttcacactaaaatctttcatgatttgaattttcaagaaataaacctaattgagacatagtttata

SEQ ID NO: 266738 - DNA, 431 bp, Homo sapiens
ttttcctgcttcaatgccatcaacaagcaagaaacatatataataccaatacaggaaatacagctagttgctcctagagcatcatttaaaagctgctaattggctaagatgccttttattgagaagtctaagaaacagaaataatgtgttaacccagtttgttaaatgggtttgaggaatcagtttcctccttcctaatacctaaatccatctccataataagtattctctatcaccatttaaaaatcctgatctcttactagtgtttttattgtgcttttcaatctattagagtaaattttttaaaacctcaagagagaacacagaaaactgtcataatttttcaaaggctaaaggagaataaactgaaaatatcagtttgaacacgtgtatgtaaaaagaatggatggtaataaaactaacaactgaaa

SEQ ID NO: 266739 - DNA, 339 bp, Homo sapiens
caaatttcttcaaatctttcaaatcagttttctgataatgaggcactgaagagaatctagtatggccaatgtcaccttggtgacaggatttcttcttatggggttttctaatatccagaagctgcggattttatatggtgtgctcttcctactgatttacctggcagccctaatgagtaaccttctcatcattactctcattaccctggacgtaaagctccaaacacccatgtacttcttcctgaagaacttatcctttttggatgtcttcctggtgtctgttccaatcccaaaattcattgtcaacaacctaacccacaacaattccatttccattct

SEQ ID NO: 266740 - DNA, 347 bp, Homo sapiens
accacacctggccaacaatattcacttgtatctcttcctcctgcattgcttagcatgtgggaagtttgcaaaaatgcttgctgaaccaaactgaatattgtattttaaaatttgcccatgtgttgtcatgatgtagacacattgtagactttgctattgttcaaatgttgtcttatttgatgaatacaaatacaaagggtttggctgagaacttgagctctggtatcaggtaggcctgggtctgagcctcagattctccactaactaactgtggcacaatgtaatctctctaaaaagcaacataattagatttgcatgctcagatgagataaatgcccacctggaat

SEQ ID NO: 266741 - DNA, 337 bp, Homo sapiens
aagatggccagatgtccattttcgctctggtttctgacagcctgagagacacggtgagtgagagagtctgatcccctgaacccaggcctggttcccttccagccacaccactgtcgccttgctatgaatgaagaaacaaggtgtctgcttttgataaattgactgaggaggagttggctaagggaggaaggacaggagctacccataggacatatgggcaggaacacaaggacagggtaaggccgtgatcagcatcaaggacacctgaccagttgtgcacaccattgtgctggcatgggctgccctcacctgcctgctacacgcccatgcccactcc

SEQ ID NO: 266742 - DNA, 431 bp, Homo sapiens
ttttagagacagggtctcactctgttgcccaggccggagtgcagtggcacaattacaactcactgtagccacgacctcactggctcaagtgatcttccagcctcagcctcctgagtagttgagactataggcatgcgccaccatgccttgcaaatttttaaaagaatgttttgtagagacaaggtctcactatgttgccaaggctggtcttgaactcttggactcaaatgatccaccacctcggcctcccaaagtgctgggattacaggcatgagccaccactggggagtagtagaccaatttacaaatacaagatttaaaagataatctttgtcactgagttgcttaagctcacaaaagatgtggaacactacagatgcattctttcaaagtgcagtctgtcattatgttgctattttaaaagtaattat

SEQ ID NO: 266743 - DNA, 436 bp, Homo sapiens
accctccgtggcatttctgtggggtttatagagggtggaaagccaaaagaggaattggaaggaacacgagcagccaggaagctgggttcagcccctgttactgacacctgtgtagcttaggcaagccttttccctttttaagcctacttctcttcatctacaaagtgaaaggttgggtgaatggtggaggcccttctccatgtaattaatatctttggtttctggcttttgatccttctacttcctctcactttttccccccctctccttttcctctaccttacaaaataatgtgtccaagcagctcctaccaagggctcctctcctttcttccttgcagtgctgtctggtccagagaggaaagactccctcccctccctgcatccccttggctcactcagcatttctgagcagattagaaagaatacttatctaa

SEQ ID NO: 266744 - DNA, 604 bp, Homo sapiens
aatatctttgccctcctgctggacattaccatagtacctattcattctggtcactccttcttgaatcacatgctctctttgcctagcatgttagtgatacctcatttttataaccccaaactagtcaccattatattgttttgggatcaatgcctgtttagatttgcctttgtatttaatatttaccagtctctgctcctctttgcttctcacttcctgtgccttctcccagagaaacggagcttttggaattctttcagcagggaactgtgagtagtaatttatttaaatctgtgcttgcttgcctgatgatgtccttattttgctctcagtcttgaattttagtttagctgagaatagaattctagggtgtcagttatttttcctcagcactttgaagttgtctcattacttgtttctattgttgctatgaagaaatcagctggcagtttaatttacagttttacaaactttgtttgattttacattcatataagtaaaaccaactttgtgctcatcctctagaataagtattttacacctaaatttatctatgtattaatgtactaatatgtacataatacaacatatgtaaaaaaaaaaa

SEQ ID NO: 266745 - DNA, 414 bp, Homo sapiens
tcttcatgcatctattataaaatacagcaaaatacactatattttaaattcctatatctttccctctatcatggcagggacttcccaataaattctatactcattgtggccagctgaacgcctgacatttagtagactcctcaaaaatgatttttgaatgaatgatgactgaccaactgaatgaatgaccaatcttaaagcaccagtgaatgtttttactgtcttcacagagctcagaatagatccttggaagccattctggaaaagggcaactttccaaggatgttttcaaaaagaccaacatataagcacgtgtatttggttgaccctctttgccaccctaggatataaattaaatcacatccattttaatacttaaagtaatttctggaaaactttgtatgccaaaaacaa

SEQ ID NO: 266746 - DNA, 225 bp, Homo sapiens
gaagcagaatgaatgatcataagtaaggaatctggaaaccgcaaggaaatccagaaaatgaaattagcagtttgttcagaagaaaaggaaaaagatttaaatgagcaagtagctagtttgtgtcacactgttgtttctatgtctctgtcaactgcaataatagtttacagttgatcatataaaagtagagatgaataaatttttgcaaagttcatgttaaacaat

SEQ ID NO: 266747 - DNA, 1121 bp, Homo sapiens
ctatataatctatatatttttcttataaactcagtattttagtgccattgagaggatatgctgttttcaaataaattgatataattccctgtatttcccttctacctgcaccccttttggagtcagcaccacttgggtggaaaggggaggacagtagtttccgctgagaaagtgtcatccttaaatgctggaacatggaaaactggctacattatgtatcttgcctcctcacatttttatctgaggcctgaccttatgtccccttcgtttcctatgaaaaggcccttcgaacaggcagttctccaattgaactttaaaacaatccagttaatatagtttcattactctagcttctcttactttgaccaaatccattctttatttcacttctcagagaagtgaagaaatgcttttttatgtttcttttcttaatctaataaatcattcttggtaatgcttcattttcccatttaggcctacctgtatgtacattgtattttatctgattgtgcaaataagtctttttaatgtaactcttatgaaagtctcccttgttaatcaaattcatcttttctttcacaaaagttccatgcttcagtattgtccacagctacctgaaggaattagtaatgtgtcatttaagtgtccttcagtatttctaaatacccttataataatgaaggtaaaattaaatttaaataaatgatcaattagattaactttgtaagcatctgacttaattggatgagaacatttccaaaatatttaatatgtaattttaaaattcctgaaggacttatgaaattgcttgttcttaaaacatttaaagaactttaccttggctgggcgcggtggctcacgcctgtaatcccagcactttgggaggccgaggtgggtggatcacgaggtcaagagttcaagaccagcctggccaagatagtgaaaacccatctctactaaaaatacaaaaattagccaggctcggtggcaggcgcctgtaatctcagctactcgggaggctgaggcaggagaatcgcttgaacccgggaggcggaggttgcagtgaaccaatatcgtgccactgcactccagcctgggcaacagagcaagactctatctca

SEQ ID NO: 266748 - DNA, 424 bp, Homo sapiens
gaatgttagtgaggtgaaataatctactggtaccgtctacttgtcaagggtttgaagacccaataatctcatcctgcttttaatgttcccaatacaccatcagaactgtattaagggtccacaagatgttatctgttgaatgcccttctcaccttgccccagccagtatcctggttgaatcattcctggctctgttctcctttttctctcatgtatcctcaacatggcttaaacccatctatcaggaacttctggacttggtcttatgacagcccctgaacatggccagcaagatgcaacacaaactcactccaaattcctcttcctgcctcatggtcctctttgcaccaacaattcagcacccttgacaccagcattttcatgcctacatgccccttgctctttatgctccaaatgccatctc

SEQ ID NO: 266749 - DNA, 249 bp, Homo sapiens
agatagagaaggggaccctggggaacagtcttagaggacgcaaagtctatgcagataaaccagcgtctggtacttggtatcagtcaggtggccagtgaataatgactacgtggaattactgtggacagcattttgagatctgcagattaagccattttgacttcccagaagcattttcttaaatcagcgtagagacagaagatgaaagttaacctgaattgctcgccgcaagcaagctctgcccgggtc

SEQ ID NO: 266750 - DNA, 369 bp, Homo sapiens
ttcaattgctaaatggacctgtggatctacccaggtgccaggtatacatactgcttttctggtgtttattgtattagagggtatctaatgcactgtgtatccttgttattaattatcaaagctatctttaattttggtacttttttgggaaactagtgtattaccatattaaatgtatggaaaatacattcttatctttgaagcttatgctctctgtaagtcatccacttgtttcaagaaaatattgggagtagccaggcacagtagatgacgcgtgtaatcccgggactttaggaggttgaggcggatggatcacttgagcccaggagttcaagactagcctgggcaacatggtgaaaccctgtctct

SEQ ID NO: 266751 - DNA, 121 bp, Homo sapiens
cctgcccataaggggtattttgacatatctttggacccatcaattcattgatgggaccttgtctcctatgagctttgccctggaccatctgcacaaaatagagaacgacttatcactgagc

SEQ ID NO: 266752 - DNA, 422 bp, Homo sapiens
aatgcataacatagtatacattttagaaaaatgttataaaatgtataacattggctagaataaaagtaaattctcagtaaattatatctgtaactattaaggtagtaagcctcataaaaatataatttatttataaccataacaaaagtgaagtttactacagcaaaggtttgtgccaataaattaagaaatgcaatttcctagagttttctcattgggtaattatcagaaaaccacatttctggaaggaaggttctcctgatttctgttttttctttgtctatagaacaggtgactaaattagtacttatgatatttttaatgctaaattttataaatactagacttctgatgatcccaaatcactcatatctatctctttaaacttcaacagtataagctagaaaatgtgttactagtgg

SEQ ID NO: 266753 - DNA, 372 bp, Homo sapiens
tgtcacctggatatacgtcttcaccagcctgggtgacatggccaattgggttgggagggacagcttactggcgggaagaagactacctacacctgcacagttgtcttgaaagttatcaggccatcattgaccttgccatttacaaagcacttttgtagctattgatgttcacagtaaacacatgaagccacgattacaccccctgggaccccacagcccaagggtgaaggaggagattatgatcttggtttatccagcacttaactccgagtttattattcttgccagtgcactacttgcaagtgcttatttagtgggtgataggtgtgcagatggataaacaacaatcaaaaagaaccaaaagtgtcctca

SEQ ID NO: 266754 - DNA, 384 bp, Homo sapiens
cttgagtttcagcttgcttctgacagggaaggtgagtgtaagttttttccagcttctaagatggcagagaacaatcaccagcctgagacttatttccaggtaagtagctgaattagagttttgtcttaaaatttttccttaatgactaaaatttaagattactcaccagctgcttttaatttctcgttaccattagaacactcagtaatcatatgaattgtgcatttgtttgttttgcttaactctttttgtttgtttatgtttggggttttgttgttgttgtttcacttttctcccatctcttcctgacttggtgaaatccaaagaatgctccaaattgtggggaacaaggcttctgaattggctaaaactcatgtggctgca

SEQ ID NO: 266755 - DNA, 521 bp, Homo sapiens
gacctcttaagtataccctataatatgatttttaattcaaaagttattaaaattttgttttgaagatttcataactaaactctaaccgatccccaagatgactagaaaagcctcttggttttacaaaactagtttggatagtgctgttctgaaggtataatagaaattggtgaaattatttgtggcctgtctttgtgttcttgctgtatcaatatttgtatcttatcagatacctttacatatgtctagccttttctttctatctgacattaacttattcaacaaatatatgttgaacacttgctccactatcgttatagctgctaggtgcagctagaagtgacagctgatagagcaatttctttagagtagtttgtgcagtttcagttgaaaaatcagcgcctggtttccattcaggccctgctattgtgcatgggaacttgaatcaccttggaacttttgtattgatttccataaatgggaagttagatgaattgcttaataataccatatgtttgcag

SEQ ID NO: 266756 - DNA, 173 bp, Homo sapiens
gaaagttgaatgactgtcagtgccacggtcccccgggatcagatttacacacgttttgattcctgagccttaggctgccaacaaatctttgtgggctttgaagttttttggtgttttgttttcttttgttgctgtgactaggtgcaaagggtgactctgttgagcttgttttt

SEQ ID NO: 266757 - DNA, 363 bp, Homo sapiens
caatggtattggggcagaggatcgggcagtgcaaacaccagtatgtaaggggaggctgtctgcatttcaggggggctggaatatatggtgcaaggagtatgcatgggacatgaggctggacagtcaggcagagtccagatcatggaggtttgttaatccaggcctgcttagatgtgggtgtcaagataagactgctcatatatggagtttttttttttgtttgtttgtttgtttgttcttgagactgagtttcactcttgttgctgaggcaggagaatcgcttgaacccaagaggcggaggtcgccgtgagcagagaatattccactgcagtccagcctggtgacagaatgagactccatctc

SEQ ID NO: 266758 - DNA, 497 bp, Homo sapiens
cacgaggaaaacaaccatatcctgagtcagaatcagaccccgacttcctgtagacttccatcgcttggcatccaggagtcacttttgatgccctcctgtatagtcaatggactctgtaaaaagatattccgtgagattaataacatcatgtctgttgtgatgaacttcgccgtttctaaaaagaccacgaagccctgagagtaatgaaaaggttcctgaaattgaggtcactgtggaagaaggaaacgtgtcatgtaccagctatccatccaatgactgcccatcagttccatattcacccttcactgcctgatctgcaaacatagaggtgggttccttaaatgcttcttctgtcagctggtacatgattaaatgttgtcagtacatagtactagagggaccttgtaagaggcttttctttctggttgtggtgtgcgaatctccacaggcactgagcttctccagtaccgggctcttgccctgcacggtgctcagca

SEQ ID NO: 266759 - DNA, 295 bp, Homo sapiens
tctctctcttctctctcttccctttctttcttggtagaaggaaacgtgtcatgtaccagctatccatccaatgactgcccatcagttccatattcacccttcactgcctgatctgcaaacatagaggtgggttccttaaatgcttcttctgtcagctggtacatgattaaatgttgtcagtacatagtactagagggaccttgtaagaggcttttctttctggttgtggtgtgcgaatctccacaggcactgagcttctccagtaccgggctcttgccctgcacggtgctcagca

SEQ ID NO: 266760 - DNA, 990 bp, Homo sapiens
tcacgcccgtaatcccaacactttgggaggccgagccaggcggatcacctgtggttgggagtttgagaccagcctggccaacatgtgaaacctcgtctctactaaaaatacaaaaattagcagggcatggtagtacacgtctataatcccacctactcggaaggttggagcacaagtatcacttgaacctgggaggtggtggttccggtgagcgaagatcactgatttttcataagtgtgtttgatctcctccatgcaaatataggattctttatagtcgtcttcatgtcttgttcatttctcttccccagcagccaaggcagtacctggcacttgcaaccaaatgcactctagcctggttgacagagcaagactctgtctcaaacaaacaaacaaacaaacaaactagcatggagagggacacaagagagaaatgtttatggtccttgccttaccctaaattactgtgcaaccttttggcaagtcacttcctctctattctgagtttctttatctattcaattgggttcttagatttggtggtctctaacactctcccagtttttcaatttgatgttacattctacccagtgaccaaattcatattccagaagcatagtatgctatgtcataccgcaaatcttgtaaacgttcctgatatggtttggctgtgtccccacccaaatctcatcttgaattgcagttcccataatccacacatgtaacgggagggaccaggtggagctaattgaaccatgggggcgatctccccccacctgttcttgtgatagtgagttagttctcatgagatctgatggttttataagggtctttccccttcactgggcactcattcttctgcctcctgttgccacatgaggaaggacatgtttgcttccccttctgccatgattgtaagtttcctgaggcctcccagctatgctgaactgagagtcaattaaacttttttcctttataaatttcccagtc

SEQ ID NO: 266761 - DNA, 776 bp, Homo sapiens
tccatcttgagtaaaactgtaaaggttcttcacggttcaaccttacatttggcagatctaacatatttctgttctattcaacattttaaatagatatagctaatctccccatatgctctaatgctgcttcttatgaactatcaaatgccttggcttttgggaaaacccggaagcatgcatttggtttgcctataaataaataagacatgtacagaatattttcctggaaaagtattacttatcctcgtgacaagtcttaacacctggtaagacttgttcacttaacattttttaagtttggttgcttttttcccctgctggctgttgaatttgaatcctgaaacagttgtagtatatcttgcttgcctgcttgcacgcttcctctctttccaccttttgttccatcttaaagctaatttaggaaaagtctggttataaactagtctttatataaaaattatcttttatcactaatgtagttttttttccagaaccatcagctaataggaatataagaccattgctctccataattactggattacttctacatctttcattagtatttaaagagccaaagagctaacaatatattccagattttttacgtggacatgccttccttttggactcatcataaattcataggactgtaaggacagttgagtatgatggttctgggcacctttaggtaataacatcttcttcctacttttctctctatctctgcttatgctccttttcctgaacctgcttttggctttcttcaactgctc

SEQ ID NO: 266762 - DNA, 266 bp, Homo sapiens
aatacttggccaagagaagtgaaagttatattattggtttaaccaatattttatccttcaggactggacacatcaataccctgaatgacatcaagattctgttaacagtgagaaaggggaaatgggccaccaagtgagcagctaattatattggacaaagctacaatatctacttttgcttctgctatagctaacctctctgacctccatcttcactctctggcttttctttctcagagtgccctctaatgaacagctatttctcc

SEQ ID NO: 266763 - DNA, 497 bp, Homo sapiens
atcaaagtgtataatgtgctcacatagataacaaagttaatattcccctttcagaatctggagtttagcaatgcaagaattgaaaaaatgatctggctggtgtttttactccatttttttttttcttgtgtggtggaaatgacccaggtcttatttctgtgtttaaggcatatgatacaggttagagtttaaaattgagaaggttggaccataagagaacataccaaagcatgcctttcttcatactttaaatggtgtatttggaattaaaatgtgactcttttgtaatcccgggttttaaagaattgcattaaaatgatctgttatgactgtagtgatctcaaccaagctttggcatatgtttggtagaaacaatgagttgtagtttgtctctctttgtcttgtaaaactggccatatttgaaattaagctaaaagattttttttccttggagatagaaaaatcatattttgaacttctccctattctggtctctc

SEQ ID NO: 266764 - DNA, 464 bp, Homo sapiens
catcttaaattaatgtaattttcataaaatttacagtttgaatatattctatatgctattttaatttttttctgagaaagaactgtctgctgagaaatagtgaaatgaaactcttcattttgatgactgggaaaagagatgggagtagtgtctccactgccagacagactgcatctctgctgccagacgtcctgggatgttgctgtgggtttttgacaggcttcttgcactattgaagtcaaattctttcctagtagcacacacctttccaacactaatctatgtgaaaaataagaaaacctttcttcctgttgttggctggagcacccctgcatctttgaaactattatttcgtttgttaggcagaagctcctgggcagctgccagccttctctatggtgtttgagcactgacccctgagcacggtatgtgacatattattaaagaattattaaagaccaatg

SEQ ID NO: 266765 - DNA, 408 bp, Homo sapiens
ctccaagtagaggcgtggtcttcagtcacccagaggaggtgttccaaacaccactgtagcaccagcctgcctggggctgcctcctgatcctgctgcatcctagctcagtgaactgcaacagaatgggggaccgatctggccttggattctacatctgtaaaattcatggggttttggtgagaactgagtggtcaatacaaatgaagcctttcacatagagcctggcacgtagaaagacctcaaaaatgatatttgatacagttattcattgcaattgccattgttgttgctttgttaggaagatgatcattcaagaggcctgaaggaagacttgtgttggagcctaaggtagaaatataaaggttttgaatgttattattgttggaaatacaattaattttccccaaa

SEQ ID NO: 266766 - DNA, 430 bp, Homo sapiens
gatgacattttatctttgccaagctgagttttagggtggttatatgaaaaaactaccatgcaaaaatgaatgtgcagaaggaaggatgtccaatgggagtcaaacgtttgaggagtacgtgaaatcagaaaagcaatcctgaaccacacttccttctaaaaatttagaaaaatcaatttcacatgaagagaataaagaatagaacaatatcagacagtgaaagcatgccagaaatgtgcccaggaagcaaatcaaactgcatcctattgcagagtgagctaagtctttaagaaaatgatacaaggctgggcgcggtgtctcaagcctgtaatcccagcactttgggaggccgaggcgggcgcatcatgaggtcagaagatcgagaccatcttggctaacacagtgaaaccccgtctctactaaaaaatac

SEQ ID NO: 266767 - DNA, 470 bp, Homo sapiens
gatggtctagatctcctgacttcgtgatccgcccgcttcggcctcccaaagtgctgggattacaggggtgagccaccgcgcctggccagtgatccagttctattacacctgggtgtggactcatgccacgactgatttgcttctaccctttagcttttctagtgccttagtttccttgcctagaatatcctgcctgccatagctgattcgttttcttaaaacccgtactcgctcattcattcaggaaacctcttcctgaaaattccacaaaaatctaattattctttgtattctagcattacccgagccatagttttcaataggtgtttgcactttttaaaaaattgcattattttctaaaaattattttgtttgtttttgtctgtttacttgatttaaagacaccatttttgtttaccatgtctagtacactgacacagtggatactcaatacttggtttgttgaaagt

SEQ ID NO: 266768 - DNA, 531 bp, Homo sapiens
cccaggacccaggcaaggggcacgagtgtgacccccccaggccttcccctggttccgtttccctccctagcccggtccccacgatgggtggggacagtgggctgtgacaatggatcgcgactgctgtttttacctggcggacgatgcgcccgaattcgctttaaccagatgcccctcttcgcctggagccctgggagcagtccccctctccgctcaacaataattagccttcgatctgattacctaccaggaatggcaagtggcctcgctgaaagtctcggctctttgagaaatgagagatgggagccctcactgccgatgtttcttccacacgctttgctgggttagaggcaagctcatgaccgccttgaaaagccattttagacaaatcttcctttgcattcttgctggagcccttctcttatgcccttccttggacatttgctctttcactccctcccccatgcactcaccccacccatagtgactgcgctcctcctgcctgcgacgctggcaacaggcagcacagtc

SEQ ID NO: 266769 - DNA, 169 bp, Homo sapiens
acaattacaggaaaagtcatagctctgccctggaacatcaagcaggagctttatctgcttatttttcatggaaaattcaagcctttgttaacatcactttgaaaacttctttctttggaaaagttaaaagcctccagcagctttgcaatttaagattattttcccctta

SEQ ID NO: 266770 - DNA, 392 bp, Homo sapiens
catctcactgtcgtccttagccaaaaaaaaaaaaaatcactctgctttccttgcataaacagcatttgatagcatgtttatcagtttgttatgtcagagaatataaatacaagcacttttatataaggttaattcttagcacctatcatcatctgagatatttccatattagagcaaatcaatgaaccatctaattcagtatctggtctttgacagtaaccaatgttgagtgcgttcaaatcagacatcagatcttcgtaaatgtacttaatcaggcagcagtaaagcattgggtttaagttattggcccagtgacttaaaagcctctacaatttgatcctagcatgtgttattgcaaataccaaatcttctcattacatttttgtagaaaa

SEQ ID NO: 266771 - DNA, 430 bp, Homo sapiens
tccatacctcttggtaggtttgctctaaacccaaaaccttgatatccagcttttggaacatcttgttgccttctttcttagagagcttccttcatgttcataatgtgagctcttaaaatgtagcagacttttcttcaaaattctatagctgcatctctacttgtttttctgtatttccatttgtatgtctctccaagacctttcctgaagtctaagctcaaacattttatcttttgactaaaatctgcatctgtctgtatttcagtaatactactgttcattttttttggcaatatgctttatttcagcctcttctccccttatatctggaaccaaggtgcttgtgattattctttcatagtatctgtgtctcacatccattctttcttgtttcatctgccattactcatctcagcacacttaggttaat

SEQ ID NO: 266772 - DNA, 438 bp, Homo sapiens
gcctcctctgcaaggactcaagagagtcgagagcaaaaccgtgccatagttccataaggagggcaaagagctttatccacgctgaggaacaggcggatcatgcggctacagcactggtctttaccttttaactgcttgattcgaaacattccagccaggaacagtggctcacacctgtaatcccagcactttgtggggccaaggcaggtggattgctcgagctcaggagttcgaaaccagcctgggcaacctggcaaaacctcatctctacaaaaaaatacaaaaattagccaggcctggtgtgtgtgcctgtggttccagccactcggcaggctgcggccagaggatcacttgagcccaggaagtggaggctgcagtgagctgagatcgtgccgccacactccagcctgggtgacagagccagacattgtctctaaa

SEQ ID NO: 266773 - DNA, 405 bp, Homo sapiens
ggtcaccaggtgtttagtcagacattattctgggtgtgtgtgtgtgatggtgtttctggatgagattaacctttgagttagtagactgagtaaaactggttgccctccctcatgtgagtgggcctcatccaatcgattgaaggtctgaatagaacaaaagcttgaataagagggaattcttcctgcctaactgccttcaagtgggaatatgggtttttttcctgccttccaactcaaatggaaacattggctctccagggtcttgagcctgctggcctttggactagaaccacaccattggctctcctggatcttccgcttactaactgcagatcttgggactttttggtcttcataattacatgagtcaattccttatgataaatctgtttccatatatgtata

SEQ ID NO: 266774 - DNA, 403 bp, Homo sapiens
ttgcctccacaatcccagcacactcatggccatgacccattcatcacacaggtgacatacaggccgagcacttcacttcctgcaggtttacagcaagaacagaatcccatgagataatgtaagggggaaaggcgtcctggcctgaatgtctcctcccctcagccatagggattggctctgggagagacacgtgagccaagcacggccaatcagagtgggccctggacattttgctgcaatttctgacggaaacagatgggtggtaaggcagggggactgctgaggacttctttgccacctgagggtgagcagaggtggggcaggaggaaggggccgagaattaagttaaacctgagaaaggcagagtctggaaataaagaggggtaaattcctgatgagaaaa

SEQ ID NO: 266775 - DNA, 483 bp, Homo sapiens
ttccccaccctcccagcccccgcccggcccattacctcttcttcttgtctctcttgtccaagccagggtccctgagcatgagaatgagctccactctggggactatgcccctccaggcagctctgtggagatcgccaagatcttccaggcagacgtcgtacccaggctccaggaaggcgctgtcattgtgctcggctccacagcccacgccgtcctcgctgctcctccttattcaattattaaaactagtgaataaattcagcaaagttacagcacaaaatgtcaacacatggtaatctgttgtatttctagacactagcaacaaacatcagaatgtaatgatgaaaacgattccaggcatgaaccaccaaacttggcctaccatttactgttatcagaaattaaaacaagtcaattcttctctctcacttgctgtcactctgaattatttgcttacagaataaacataactttgtgtccaaa

SEQ ID NO: 266776 - DNA, 502 bp, Homo sapiens
cagcggaacaagcaacacaccaatgggacggtagtaaatgcagcacccagggggaggcacctaacacagtgggggattaggggaggcttcttggggagaccagaggatagctgatgagtttcaggcaggacaagaggcttaaaccaaggtctgcgaggtgggagtcggaggatgtcattgtcgcggggtcaggtacaggctgagctaacaagacacacaggaccaaacccctcaaggtcagcctcacagagcaggaactcaggaagaaagcgtttttgtttgtttgtttgtttgtttgtttgtttgtttgaaatggagtttcgctcttgttgcccacgctggagtgcagtggcaacgatctcagctcactgtaccttctacctcccagtttcaagagaaagcgtttttttgtttgtttgtttgtttgtttgtttgtttgtttgaaatggagtttcgctcttgttgcccacgctggagtgcagtggcaacgatctcagctcac

SEQ ID NO: 266777 - DNA, 460 bp, Homo sapiens
agacataatggctgcaagtttctcggagatgaaaaatatccaagcagtacaatatttcccaaacaggataaatataaatgtatgcgtagaaccattgtgaaatggcaaatcaccaaagacagcattttgaaactatccagagaaaagggactaaatgtctataaaggaaagacaccagctcacctctcaattgcaacaatgcacgtagtggaatattaccttcagagtgttggggaaaaaaaggttaacctagaattacataaaaataaaataattttcgtaagaattagggcatataatatgttttaaaaggggaatgcttgctgctttaatggacgttctgaataatgtgcttgaagtaaaaaaatgatcccagaagggtaacacaagataaaaaaaggtttgtgataagtaaaatggcaaacacctaggtaaatctaaataaaccaaagagataaaa

SEQ ID NO: 266778 - DNA, 296 bp, Homo sapiens
aagacccatgggctactttctcactggaaggacatgttctctgcttggctttgcaaagcatccaaatggagccctgtttcaggaaggctaagaactccacaatcaaattattgaaagtcagtcttcaatcccagggttgagaaacagaactcacttccagcaaccaggtgaatcatcagctgaggctgggtctgctgaaaaagcggaaatgacttccaatcagtcagggctggggagaggaagagagggaatggaaaatgagaaaacagtgagcaactactccatggtgaactttg

SEQ ID NO: 266779 - DNA, 501 bp, Homo sapiens
tgggaagcgaagatccccccagactagttcctctaagacctcttctttccatttacttctgcttttccttcctccttttgctttggtcttctttcagttcccttgaattcttgatatgccacctttctcccttccctctccagaacctcaattactggaactttaggtctccggctctcaagatactcagagactcctgaaagtaaccacttgaggctaaaagagagaaagaaaaatactatttggaaacaaaaaatggatgtttgtctacttagatgggctttggaggccgacagccactagatgtctcctcagtcactcacctaaaattagtccatagcctccataagattaacctctgataatagacaaatatgcctccaaaacttgcattctttttctgtgccattgagttgtaaattttctaccctgtcttctttagaacctaatagttacctttgggaaatacaaacttcagggagggaattgtcatcagaaaaa

SEQ ID NO: 266780 - DNA, 381 bp, Homo sapiens
cctcgtctacacaaaaagaaaaaataaccagatgtggtggtgtgcacttgtagtcccagctactcaggaggctgaggcagaaggatcgcttgaacccaggagttcgaggtaacagggatctatgatggcgccactgcatgccagcctaggtgacagagcaaaaccccatctccaaaaaaatagtagttgtgggcacagtattggcaaagctgttgcttattgtataaataaacatcaaggagttggggaatggctgagtgggccgtttgcattctgcatctcccctccccttggataccactctcctcgatctgggggttccatgcctactttaaagacaccagcttctatttcctgcaagtttccagctcttaaaaaaaa

SEQ ID NO: 266781 - DNA, 380 bp, Homo sapiens
tgtaagcagcacctgggctgggggtggggactggcactctgtcaccccctgataaatatttgttggatgaatatacagattttcttacagagctggctgtaatgtgtttgttttagccttggcctttgacagggggcttgatgttacaaaggaaaatagactcttatgactatagcaatagaattccaagtatattttaaataggctcttgagaatgaaaatgcctttttgtaatgtgataaattactgactttcatttgtatttggttagttttatattgcatttctactagtaactgatgaaagcttaaatgttgaaaatcattttatttgccattctgttgatgcgtggaaataaatggtagttcggttgacaatgt

SEQ ID NO: 266782 - DNA, 310 bp, Homo sapiens
ggaagaggcagggcaggaacaggcaggctctgaaagctagcagtgatggggaatgcagctgcgctctgtgccctttagaggaataaaaacccatgagtagaagtggcaggaaggcagctggcagctgtgtgaggacagcttcctccttggaactgtctcagtcaagatgagccactatgagaggcggtaagctccccgtcctcagaagtatgcaagccctggctggaggagatgctactcagaagataggcggggtgctggtgaggcacagtgaaactccagtactcagtgagggcctcccatgatctcc

SEQ ID NO: 266783 - DNA, 487 bp, Homo sapiens
attttcccacctcacactggaaacacaacttcttaatgagaaactggtgaggggatctaagctgagaatgaggaagttgatttagtggcttctgagggttctgctctcttgacagtatgtgaataagattacatgcttctgcatgaacggatcccataacacaggatgctgtgttcttcattccaccataagagtgaacactaggccaggcacagtggctcacgcttgtaatcccagcactttgggaggctgaggcaggcagatcatttgagatcaggagttcaagaccagcctgaccaacatggtgaaaccctgtctctactaaaaatacaaaaattagctgggtgtggtggtggacgcctgtaatcccagctactcaggaggctgaggcagcagaattgtttgaacccaagaggcagaggttgcagtgagccaagattgcgccattgcactccagcctgggcaatagagtgaggctccctctcag

SEQ ID NO: 266784 - DNA, 291 bp, Homo sapiens
gaaagtccaacctttatttggattgttttaggtttctttaagccccttaaaatagaaaaatgtttcatatggggaaaatgtaatgttcacattgtagctatatagttggaactctaatacatgagtgaaaatggtttaagctaactcttttcttgaacatatgcttactggactgacaatctcttgaggactttccacctgtaataccttaggcctcttctgttctctggtttgtttcccttgagaccgttagcagattgctcagcctgacccaccctggtgccagatgtt

SEQ ID NO: 266785 - DNA, 389 bp, Homo sapiens
cagtttatttatacccaggcatgtctgctgtctgcaaattggaagctttttgtgtactttttggagaaaaaaattggattttgagttaaaaaaaaaaatcttgggccgggtgcggtggctcattgcctgtattcccagcactttgggaggctgaggcaggtggatcacctgaggtcaggagttcgagaccagcctggccaacatggtgaaaccctgtctctactaataatacaaaaattagttgggcgtagtggcacatgcctataatcccagctactggggaggctgaggcaggagaatcacttgaactcaggaggcggaggttttagtgagtcaagatcacaccactactctccagcctggatgacgagagtagaactccgtcttag

SEQ ID NO: 266786 - DNA, 505 bp, Homo sapiens
tgtctcaaaaaacaaacaaacaaaaaacaaaaactattgcattaggggagagagattgaacttaattcctttgaaacaaaaggtgggaatattttaagcattaaggcgagctagagaaaaactatgagacaatgttaaaagggacattggtcaatgtgattatgccatctatgtttgctgattggcactttgagaagctgggcttccaccctcccacagagactgatagttagagacctctgagttttgtttgtttgtttgtttgttttcggtgattacacttcacagtaatggctcctaggtcctcaagaaagacatacctggatctttattagatttacatttcaaaggggcagagaaataatttacaattcaaagtcttctaaagtaaatgctctaagaaaaggaaagtcagggacctaagtcaagaagcttatctgaaatttagtcaagctgaggaatgggtaagatcatcttggccactacaaagctttcctatttccct

SEQ ID NO: 266787 - DNA, 377 bp, Homo sapiens
cccaggctggagtgcagtggtgcgatctcagctcactgcaagctccgcctcctgggttcacgccattttcctgcctcagcctcccaagtagctgggactacaggcaccggccaccacgcctggttaactttttgtgttcttagtagagacggggtttcaccgtgttagccaggatggtctcaatctcctgacctcgtgatctgccctccttggtctcccaaagtgctgggattacaggcgtgagtcaccgcgcccagtcttttatttttatttatttatttattttgccttagtgcaatgcatctacgccatggtatacactaagaagtgaaagctcagattgaaaggcaacattgatgagtgcaacccattaaaaa

SEQ ID NO: 266788 - DNA, 1312 bp, Homo sapiens
ctttcttcccatgcaccattccgaaatgtcagccggcagacaagcagacagatgtccttatgtggtaccccagaaaagtcatcctaccgacagttgtccgtgtctgataggtcttctattagggttgaggaaatcatccctgctgctcgagttgcaatacaaacaatggaagtaagtgatttcacttctactgtggcttgcttcatgagattgtcatgggctgcggctgcaggacggcttgatcttgttgggagtagccagccaattaaagaaagtaattccctgtgtcctgctggaattcgaaacagactcagcagttcaggaagcaattgcagctctggaagtgaaggagaaccagtagccctgcatgcgggaatctgtgttcgacaacagtctgtatccaccaaagactcgctgattgcgggagaggctttgtctcttcttgttacgtgcctacagcttcggagccagcaactggcatctttctataacttgccctgtgttgctgatttcatcattgatattctgctcggatcaccaagtgctgagattcgccgggttgcctgtgatcagctgtacactcttagtcagacagacacatcagcgcatccagatgtgcagaagccaaatcagtttcttctaggcgtaatcctcacggctcagctgcctctctggtctccaactagtattatgagaggagtcaatcagagactgttatctcagtgtatggagtattttgatttgagatgccagttattagatgatctgacaacttcagaaatggagcagttaaggatcagcccagctacgatgcttgaagatgagattacttggctggataactttgaacctaatcgtacagctgaatgtgagaccagtgaagcggacaacatcttactggcagggcacttacgcctcatcaagacccttctttcactctgtggggcagaaaaggaaatgcttggttcatcactcattaaaccattgttagatgacttccttttccgagcttctagaattattttaaatagtcattctccagctggcagtgccgccatcagtcaacaggactttcatccaaagtgtagtacagcgaatagccgattggcagcctatgaagtccttgtgatgttggctgatagttcaccttcaaatcttcaaattattataaaagaactgctttctatgcatcaccagcctgaccctgctcttaccaaggagtttgattaccttcccccagtggatagcaggtccagttcagggtttgtggggctgagaaatggtggtgcaacttgttatatgaatgcagtct

SEQ ID NO: 266789 - DNA, 304 bp, Homo sapiens
gcccacctcagcctcccaaagtgctgggattacagatgtgagccagctcgcctggccttaatgatagttttttaaagatctgtaaagtgaaagattggggcttgactttgcttactttaattcaggactttgactccataaagggaaatccttctttctttgtaatggattttttttttccttcttagcttcagaaatggagcagttaaggatcagcccagctacgatgcttgaagatgagattacttggctggataactttgaacctaatcgtacagctgaatgtgagaccagtgaagcggac

SEQ ID NO: 266790 - DNA, 570 bp, Homo sapiens
cagatattttctatgtcaaggccctaaagtagatatattctgtgtttaaagcaaaccatgtattttagaagaaaatgagctcattgtaaggttggcatatcctactgtagaaactcagaggactactgtgagacaaagctagatggtatttttgtttgtatattggtgggcttatttaaaaaatatatttttttaaagttgagtatgttacaacaagaaacgaatggtaagtccctcaatggcctcaaagtttatggccattaataggattttagcctggagagtttttagggcaggctttactagttgcccagtataatcatagaaaaagcacagcattctgaaaggagtcactttgctgattatgaacccaactcgttttgctgcagttgtgaagaaatttgatatatatatcttaacgttgtcagcagttatttgaaatttgcaaggatatcattgaaatttataattacccaagtttccaaggatctggcatttgtatttttaagaatctaaaacttaaagtataataataataataataataataataataatctcaaaaaaaaa

SEQ ID NO: 266791 - DNA, 887 bp, Homo sapiens
  misc_feature (838)..(838): n is a, c, g, or t
  misc_feature (846)..(846): n is a, c, g, or t
ggacaggccaggagggtggccatggaggaggagcgggggtcggcgctggcggccgagtcggcgctggagaagaacgtggccgagctgaccgtcatggacgtgtacgacatcgcgtcgcttgtgggccacgagttcgagcgggtcattgaccagcacggctgcgaggccatcgcgcgcctcatgcccaaggtcgtgcgcgtcctggagatcctggaggtgctggtcagccgccaccacgtcgcgcccgagctggacgagctgcgcctggagctggaccgcctgcgcctggagaggatggaccgcatcgagaaggagcgcaagcaccagaaggagctggagctggtggaggatgtgtggcgaggggaggcgcaggacctcctctcccagatcgcccagctgcaggaggagaacaagcagctcatgaccaacctctcccacaaggatgtcaacttctcagaggaggagttccagaagcatgaaggcatgtcagagcgggagcgacaggtgatgaagaagctgaaggaggtggtggacaaacaacgcgacgagatccgcgccaaggacagggagctgggcctgaaaaatgaggacgttgaggctttacagcagcagcagacacggctgatgaagatcaaccatgaccttcggcaccgggtcacggtggtggaggcccaggggaaagccctgatcgaacagaaggtggagctggaggcagacctgcagaccaaggagcaggagatgggcagcctgcgagcagagctggggaagttgcgagagaggctgcaggggagcacagccagcaatggggaggaggagcctgagacggagccggtggganaggagaancattcgacgcagaacaaagggggccacggacccaaggacca

SEQ ID NO: 266792 - DNA, 781 bp, Homo sapiens
ggacaggccaggagggtggccatggaggaggagcgggggtcggcgctggcggccgagtcggcgctggagaagaacgtggccgagctgaccgtcatggacgtgtacgacatcgcgtcgcttgtgggccacgagttcgagcgggtcattgaccagcacggctgcgaggccatcgcgcgcctcatgcccaaggtcgtgcgcgtcctggagatcctggaggtgctggtcagccgccaccacgtcgcgcccgagctggacgagctgcgcctggagctggaccgcctgcgcctggagaggatggaccgcatcgagaaggagcgcaagcaccagaaggagctggagctggtggaggatgtgtggcgaggggaggcgcaggacctcctctcccagatcgcccagctgcaggaggagaacaagcagctcatgaccaacctctcccacaaggatgtcaacttctcagaggaggagttccagaagcatgaaggccatactgcatgtcgtttgcccactcatctatggatggacctgtgagacgtcaccaccttttggctgttgtgaatcgtgctgctgtgaacatcgtgctcaagcttttgtgtggacctatgttttcagttctttgaggtctctgtctccagcctgggcaacacagcgagactcgcaaaaaaaaaaaaaaaaaacaataacaacaaaattgctgtgccctctctctgggcctttctccgtatgtttgccatattggcttcttggggctgtcataataaatgacccacaaattgggtgacca

SEQ ID NO: 266793 - DNA, 731 bp, Homo sapiens
ggacaggccaggagggtggccatggaggaggagcgggggtcggcgctggcggccgagtcggcgctggagaagaacgtggccgagctgaccgtcatggacgtgtacgacatcgcgtcgcttgtgggccacgagttcgagcgggtcattgaccagcacggctgcgaggccatcgcgcgcctcatgcccaaggtcgtgcgcgtcctggagatcctggaggtgctggtcagccgccaccacgtcgcgcccgagctggacgagctgcgcctggagctggaccgcctgcgcctggagaggatggaccgcatcgagaaggagcgcaagcaccagaaggagctggagctggtggaggatgtgtggcgaggggaggcgcaggacctcctctcccagatcgcccagctgcaggaggagaacaagcagctcatgaccaacctctcccacaaggatgtcaacttctcagaggaggagttccagaagcatgaaggcatgtcagagttgacaactacacaaacactgcaactggctttgctttttgtcctgatggtatctcacaaggcttccctaatgcaggcagtcttgttttctagacaatctaccaaccctagcccacaacacccttctggtgccataataagggaacactttgtaaattaaatgtgagtgaaatcaaaaaggtttcctgcaaggttgttttctgagacttgggaaataataaaattctgtactggaaattc

SEQ ID NO: 266794 - DNA, 486 bp, Homo sapiens
tgttcatggcttccaggcttacccccctgctttgatctgagagctggtgccaatagcagggagaagccaagctgcagaggcaagcacttccgagcctgcaaaagcaggcccccaaaagtgcagggatgcctgagtctgcacccgcacccaggagggtggagatcttgcctgctccaaggctgcagccggaatgatagcaggctgactggagcacctgccaccatcattagttcaagagtttatgcagatttaagttgtatacggtatatgaatgtgtgacagttttccttatggttgtgtggccttctgtaagagcctacgcctgtttgttacaccggtagagtgctgtggaatgtaaactttccctatgtcacttatctcctttatctctccatacagaggagggcaagaaaccttgttacttgaactttagtaatgttaagtgatcaataaatctataaataaatgatagcagaaaaaagttac

SEQ ID NO: 266795 - DNA, 1097 bp, Homo sapiens
caacaaaaggagaaaatatatcttttgaaaacacggccatctacttggaacattccatagtgtgacatagagtaactctgcttaggattatttcattgatccccagggtccaattgcccagtgctcagtcaaagcccaaggtggaagacaagtgcttccctgatgagctgatgagctggcctctctgcagactgctccataccctgtgctgtcctgcctcagatgcagagagagcacaaggctcccgctctcctcgtcctcggtgcgcctgtgttcttgctaccatcacagctgaatgcaatgaaaggcggtcctctgagaggagcagggtggagatgctaaagtggaggccccctcccattgctgatagatcctcatctggcatgcgctccaccctccccattctctgctcccacatatcgtagccccatcacagaagatgcgacatggaaaaaagcactgtgtccaccctagttcttaaatttgggcagggatttggggtgtatgttaagagtttttcaaatttgccagattggatgcctatgttgttaaatacacagtgaatctctggtatgatagcagtttctggataaacattacttgaggtcctaaaatgcagaagggaaaaagcaacttttgtcagatgcctactttgctttcatttcatctctaatattttggatggggaatcagccaaagcttctgactgcatgaaggtcaagtgtgccagtgtgcagctgggtttcttttccagaattaaaagtattttgggtggtggtgagggtcagaggaagaagtaaagattgtgagaaagtggaagaagcatgggcttggggagaacccagaattggggccagaagacctggcactaggctacagcacttagcacctctgatcttgtttttcttcatctgtaaaaggaggttaacaaagcttttctgcccacttcttggggagaagggaataatataattggttaaacacacaaacataaaaaaccgttttgacacaaatacgcacaccctgacctttatgtaacccaaggcattattaattctccaccccatatcctggtagatacctgttattcaactatt

SEQ ID NO: 266796 - DNA, 584 bp, Homo sapiens
ccaagcgtgatagtcactgcgcctgcgtcaggttttccagcctgaagaaattgatgatgcagacctgtttgcttgtcttcctaaggattattcacccctttccgtgggaggggcagcgtcactgagaaagttacgggttgcaagcttgagtgtctaagaaccgcctggcgagcttcttaagcagatcgccaggttccatcttcgcagactctggttcagcaggtagcaggttagcccgagaatctgcatttctaacaagctcctaggcgtgcccacgctgtcagtattggcagcccaaccttttttggggggtgggggggggagtttttctatgttgccggtctcgaactcctagccttaagcgatcttccctacttagtctatctattctttctttatttacatcctactttcttttttttttttatctctctttcaccatacacgtttcttatttatttgttttcgtttaccactttcctctcaccttccttcttcatccaccaccgtccatccgtctctgaggtttcttcttcccttatacctttttctttattctcctatcttctttgtttcctcttctt

SEQ ID NO: 266797 - DNA, 679 bp, Homo sapiens
agtgagatacagcttgggcactggaccctgcactgtacttgtttgtttaagcctccaggcctttgcaccactcgtccccctgctgaaatgccctttcctgcccctcagtggctcagggccttatccttttgggctcaggtgcactctaccatgcagttcatgtgcattcgcctctcctagccctgctcgtgctatcttgaggttttgtgtccctgtcccttaccactctacttggcggaacctctttggggcagggctcaggtctggttcaccgccggtctcccaccacacagttgcacacaggtctggcacacagcaggcttcagagaatggtgaaaggatgaatggaagggcagggcagggtgagatgtgggaggcacccagggtacatagtatctgcaaatgcagcctagtcctggccacgtggaagggtgcatggctactcacggaaacccactggagtaataatagctactatttttttttttaaagactagtcaaatgcagtagtgagaagggggaaaacagtagaacaaggagttcgatctgtaacttactgtgaataatcaattgagatcactcactacatttggaccagccaatagctactctttttttctgttttgagttagtctcactctgtcacccaggctggagtgcagtggtatgatctcagctc

SEQ ID NO: 266798 - DNA, 292 bp, Homo sapiens
tcatttcggaagactgaatgaagcaaagcttatagtgtttgctgtttccatggcagccaagtgaaggtcttgggatgactccctgtgttcctcaagctgtactttggggctctctctgcagtattaacccctttctgcttggtggtactctgtacctgtgtgtgatagtcacttttgcatggcttctgtgtctggcttgtggcatttagggatagggtgttataaagtatatcaaactctttatatgctaaattctaaggaaaatttatcatatgacttcttacataggaca

SEQ ID NO: 266799 - DNA, 307 bp, Homo sapiens
cacctcagcctcccaaagtgctggggttacaggcgtgagccatcatgcctggcctcttgagaccttgtctctaggagaaaaaaaaaaaaaaacccacacacacacaaaaaacaactccatctggcagagtaagagggtgagaggccaggaatgggatgtggccacctctgacccccagagccccagcccttagtgtcttggggggacaaggcatgtctggtacaaggggcaacagccagcagggactggggtgggcactgctggttccgctctcatccctctgatagtgccctgggccctgtaccca

SEQ ID NO: 266800 - DNA, 317 bp, Homo sapiens
cccttaaatacagttgcttctcaagaaaaccacacacaattgatgtttgaatggctttatttacaaacatctcactctgtaagcctctgcaggtatttctagcctccctgggaggccactgtcccgtttcacctgtaatttggatcacaattctgtttgttgtcacacacatcatacgagctgcttttcatgctacttttatccacaaagctttacaaactttaatggcagctctatatatgacaactttaaaaagatctgccaaaaggtatgatgccaagctttggttttattaaactattagctattagcactga

SEQ ID NO: 266801 - DNA, 472 bp, Homo sapiens
  misc_feature (382)..(382): n is a, c, g, or t
  misc_feature (395)..(395): n is a, c, g, or t
  misc_feature (399)..(399): n is a, c, g, or t
  misc_feature (408)..(408): n is a, c, g, or t
acacaccaaaacaaacaaaaaagccaaacttccagaagggttaaagagatacaccgatttttaaactataaaagagcacatggaagaaaaatacatgtaagaggccgggcgcagtggctcacacccgtaatcccagcactttgggaggccatggtggacagatcacgaggtcaagagattgagaccatcctggccaacatggtgaagccctgtctctactaaaaatacaaaaattagctgggcatggtggtcgcacacctgtagtcccagctactcgggaggctgaggcaggagaattgcttgaatccgggaggcggaggttgcagtgagccgagattgcgccactgcactccagcctgggtgacaagttagactctgttcnaaaaacaacgacnaaanacctctgtnacatacagtgtgtaaaagtaacctccaatcagtgagaaaagacattcaaagttacatatacgat

SEQ ID NO: 266802 - DNA, 383 bp, Homo sapiens
acacaccaaaacaaacaaaaaagccaaacttccagaagggttaaagagatacaccgatttttaaactataaaagagcacatggaagaaaaatacatgtaagaggccgggcgcagtggctcacacccgtaatcccagcactttgggaggccatggtggacagatcacgaggtcaagagattgagaccatcctggccaacatggtgaagccctgtctctactaaaaatacaaaaattagctgggcatggtggtcgcacacctgtagtcccagctactcgggaggctgaggcaggagaattgcttgaatccgggaggcggaggttgcagtgagccgagattgcgccactgcactccagcctaccaatagagcaacactccatctca

SEQ ID NO: 266803 - DNA, 464 bp, Homo sapiens
gagtctttctgtgtggcccaggctggactgcagtggcatgatctcagctcactgcaacctctgcctctgaggttcaagcgattctcctgcctcaacctcctgaatagctgagactacaggtgtgcaccaccatgcccagctaatttttgtatttttagtggagactgggtttcaccatgttggccgggctgacctcaagtgatccaactgcctcagcctcccaaagtgctgggattacaggcgtgagccaccatgcatggcctgttcatatatattttaaatttttctttctttttttgaaaaattttagattcagagggtacatgtgtaggtttgttacatggatatattacatgatactctggttagggcctctaataaacctgttgctcaagtagggaacttcgtacctaatagtcttgcaacccttttccccactctctcacaccccattgtaatacccc

SEQ ID NO: 266804 - DNA, 442 bp, Homo sapiens
attaatgtttttttttcttagatgaggaggagctaacaatatagaagtcattataggtaagagggagaggcctgccgttacttcatttgcaaaacagatgattgaactatagtcaatgtttccaaaggttttgttttattttgaaaataattctataagattatctttcttcattgtaatatcttgggtacagtgttaaggaacaaggttatagaggtggagttctccccaaaagtctactctgccagtaaagcgcaggggatctgctaagtcaagagcttaggttagataagagctcgcctatgagttgtgcagttgtaaatctgaccacatgaaatattctattacttgtttaaaagaaaaaaaatgcatttgaaacaaattgtttttgacttttcagtatgcacctatatttaaaataaaaatgccatagtaaaacaat

SEQ ID NO: 266805 - DNA, 399 bp, Homo sapiens
gtcctttcatatgacaattcaagactcaacctcctctcacatggctctgatttattctaaagctttgaagacttatgctcagggaaagagtgtaggaaaataataactgcccctcaaccaaccaagaagataacatttattcttagaaccaatgtcagtattagttgatgcctttatctagcaatcaaatagctaatggcttttatgtgaacaaaatatactaaatatacataaatatactaatccataatggcagatccttgaggtcaagggctttgtgttttgttcacctctgttatcaatcttactgttgcaattttcttctctctatatatccttttatccagtcaagaccttttggccatcctgcctcacataagggaggggagagagagctta

SEQ ID NO: 266806 - DNA, 163 bp, Homo sapiens
ttttcttttgtgtatctatacagatattttcttagtagtgtcttggggattacacaaaacctctaaaagatccaacaatatgtttaaatgaggtaaaaaattaacttcagttgaatgcaaaaattcttcatgattacatctgccttcaactttgttattgatt

SEQ ID NO: 266807 - DNA, 351 bp, Homo sapiens
ttttttttttttaacaaggtcttgctctgtcactcaggctggcaattgtagctcactgcagtctccaactcctggccttacgcgatcctcctgcctcagcctcataaatagctgggactaaaaggtgtgcagcaccatgcctggctaatttatttaaaaattttttttgtagagatagaggctcactaagttgcccaggttggaaggtagggtcttttaagacgtataaatcagattttgcagctggtgtagttaaaagccctcaatgcctccctaagactattcatcttagaataaaacccacagtccttaccatagcctgaagtcagttccccttctgtgcaccgtgac

SEQ ID NO: 266808 - DNA, 454 bp, Homo sapiens
aatgagagcaaaaacagacaaactaaacttcgttgaaattaagaacttttgtgcatcaaaggatactgtcaagaaagcaaaaagacaacttagagaatgggagaaaatagttgcacatcatgtatctgataagggattaatatgcagaatacataaagaacttcgaaaactcaacaacaaaaaacaaacaacccatttcaaggatgggcaaaagactcgaataggcatttctccaaagaagatatacaaatggccaagaagcatatggcaagatgctcaacatcattagtcattagggaaatgcaaatcaaaagcacagtgaggtatcacttcacatctattagggggtctataataaaagaactcagaaaataatgaatgttggcaaaggatgtggagcaactggaacccttgtgcctgactgatggtgacagagtgagacccagtctcaaaa

SEQ ID NO: 266809 - DNA, 317 bp, Homo sapiens
agggagaacctttaggaaggaggtaggcagctgtctggatagtgtttaagcagcagctgtgtggtgctccttgagggaggctgggattccacatctctctcctgttaaaaccattttagtgtgaagtgttctcctgagttggacaaagcatccaatctttccagtgtacagtttttttggggggtggggtcttgctctgttgttcagactggagtgcagtggcatgatctcggctcactgcagcctctgcctcccacgttccagcgattctcttgcctcagcctcccgagtagctgggactacaggcatgcaccacc

SEQ ID NO: 266810 - DNA, 423 bp, Homo sapiens
cacgtgggagaactgcttacttgctcttttgtatgcttccggcttctttttcctccaaacgtaggccttctccgcgctgaagttttccccagcagcgtaatactgtattctgttatagcagcagaaaacagactaagaaaaatgttgtgcttgtaagagattgggacacggacacatacagagggaagaccatgtgaagacacatggagaacgctgccatctacaagccaaggagactgaccttagaagaaatcaatcccaatctcaccttaatgttggacttctagcctccagaactgtgaggatatgggctggatggtttcttagcctcctcatgacctgtggtgcttcagaggtccacggaatgaaggataagatggagaagccaggctaaggaaggattgggatttcctaaaacagtat

SEQ ID NO: 266811 - DNA, 1059 bp, Homo sapiens
agcccatggccagggtagtagaaatactgtgcatctggtccaagttttctatgcttggctcatattctttcataagatgcatattctttcataagatgcatatcatgtagtcaaaagctttctgacaaccaattatttttcatatgtttcacttatagtcgaagaatacaaaggaacaatcagaaatagcagcttttaatgaatattttctatttattggttgctgaactgttaagggatttgctgtgtggtaattttacttataatagaaacttgcttattttagtggttgaggtgcttctgttgtcctaaaactacttctgaggtttttaaaatgtagaaccatgtttttgattagtgtcttaaaagattactgtggtgctcagcaaatcttatcaagtcgtgcaggaacccatatgttaagaaaatgagctttgtagtcaaaagactcatctaatttgagctgagtggagctcagctgtgtttgacccacatcctcccaatttgttctgtatttaggtagttatttatacaagagtctttaagtcattctaaatattttttcttgaaagttttaactaagtgagaaataaggtagtcttcaaaatcttggtcatctgtttggatgagggaaagtacctcatgagttgcacattacttctacaacagggtgtgtgtgtgtgtgtttgtgtgtgtcagtcatcttcaaaggcagattattagattccagcaatctgaaatctattattccagcagtctgaaacctaaatatgttatattggaaatcatgactgtgagactttattgtcctctaggatggatgtatattggagaagggtggttagcacattcatcagacatctgcttatgctgtggtcaaggccagtcatttttaatttatatcagatttatatcagaccctccaaaaagtatttgaaatatattacagttataacgtacaagtacattacatgtatattacaagtatattacatgtaaaacaggacaatttaaaaattttaaattttaaagaattaaaaattttaaaaatttaaatta

SEQ ID NO: 266812 - DNA, 580 bp, Homo sapiens
acatttaagttatcaacgagttgggtgccactctgacggactctcagctcctcaagggcattaagccatttcttattcatctttgcattcttgtgacatgcaaccatatccagctcagagtagacaggcaccagagctgcaatgacagcaggtatcatttacttgtaaattgaaggggttaaggccttatctgaacactataagatgttttaaacacaatatggtgggtgattaaatacgagtcagtgacacagacaaatctgtggtaagggcaattcttcaaggccttcattagaagacttcaagcaggagatcaaacactgaattgagatttgagtgatgcatcacttttggatccttggaagcatacttcagaaaggagtcagagaacagagaaggggagaacatatttagaggcagtaaggaggctattctggctggaggggaagaattttgtgtgtgcgtgtgggtgtgctttttttctcgcgctcacacacacacacacacacacagagtatagggcagaagctgaaaaaaccagtcaaggacagggtgttgagaaacttgaatgccaagaact

SEQ ID NO: 266813 - DNA, 738 bp, Homo sapiens
caatcattttgcgtttcttttctttgggggggtgggaaacaggaaagggataaagaatccaattagtgttaacaaatcttatcaacatgtctccaaatttagactctgccacacatgtggctggaaagcagtggccacccaaaacaactctctaaaaagtaaaacatgtagctctgaaaagtcagataaagcaaacccatgccctcaagaccccgcaggaatgccattagggggcaggaggcctgaatttggctgtaggaatttagagaatttggaggttctcttccattcaaattttttcctccaagtggtatatactttaccataattttcatcataagccaaaagtctgacattagcctgaaggactgtgtgaccattaaagttagtaaattaaactaacttattctttacaaaagagtaaatcattcttttatccaaagagtgactgaggtctacactgcactcagcactgaggggagcgccacggtggaagggaacacacgtgggtcacagtcaccgcacacaaggtacttatggtctagctggggatgcaacacagccacacgccaaccagggagtgaacaagacagcatgatacatagtaaaataatgttccaggttaaccaggaaagaagcaagtgcgactgtgcctttggttactatgtcttttccaactgatgacatgaactatactgtatatttttctgaataaaaatatttttctttaaaatcttc

SEQ ID NO: 266814 - DNA, 506 bp, Homo sapiens
ttaagaaagacagtcattttaacctattgaagtcacagaatgaaatgatgaagtaatcgtatgtgttcccagtttagcatatatgtatatatatgcattgatgaataatatgatttgttgtaaacaaatgaaaaactgcagaaacctgtaatttgtacattattatttcagatcaccgtaacaaatattaccaggtttttaattttctttaaaaaaatgcatttctagggctgggcgtggtggctcacgcctgtaatcccagcactttgggaggccaaggcaggaggatcacgaggtcaggagatcgagaccatcctggccaacatggtgaaaccctgtctctactaaaaagacaaaaattagccgagcgtggtggcacgtgcctgtagtcccagctgctcgggaggctgaggcaggagaattgcttgaaccagggagtcagaggttgcaatgagccaagattgcggctgcactcctgcctggtgacagagcgagaccccgtctga

SEQ ID NO: 266815 - DNA, 489 bp, Homo sapiens
cttttcctgataagcctggtgattcatataaacagggatgtggcagaagtatgccattggtcctagggtacttgcttactcctatcgctgttaaagttctagttatatcaccgttgtgttttttgttgttgttgttttttaagcaacagggtctcactttgtaccccaagctggagtacagtggtgtgattatagctcactgtaccctcaaactcctgggctcaaacaatcctcacacctcagcctactgagtactaggacaacaagtgtgcactaccatacccagttatttttgtgtgtgtgtttgttttggtacagatggggtctcgctatatagtccaggctggcctcaaactgttggcctcaagcagtcctcccacctcagcttcccaaagccctgggattacaggtgtgagccactgcacctggcctgtcactattagttttatttttaatttttcccccccacagattgtaaccaaagaaaat

SEQ ID NO: 266816 - DNA, 705 bp, Homo sapiens
gttttaagacattggcttttgtaattatggaggctggcaagttcagaatctacaagatgcgccagcaggctggagactcaggaaagagccaagcatacagttcaggtccaaagaccatcagctgcaatgtccacctatttaaatgttaatctcatccaaaacaccctcacagaaatatccagaataatgtctgaccacatatttgaacagcatggtccagccaagctgagacataaaattaattatcatagtatatgttcaacttttgtaagtaacactattttccaaagtgactgtactaacatagagtcattatgggtggggatcttcaacttctcattaggatatggttgacactgataagcaccctattttattcctatagaatgagtagccccccaaaactcccagaggagtgggggttctgaaataaggccttgactcctgatgctcagtggctaatataattgtcaagtctttctgtcatcaacaacaggccagctttctactataaaaactgacaggatggggtgcctgtgtctgagtgctggcacttctgcctgtattttccatcagcaaatgatgtcacagtccaccgaatagcacaatcagaaactcaggtctcgtctctgactctaccacctgtttatagctaataactcatcagtttctattgactctgcctcccatgactctgtcaaactc

SEQ ID NO: 266817 - DNA, 429 bp, Homo sapiens
gaaactaaagtgacatgaaatctaaatgcaacactgtgattctaaactagatatattatctgcaacagaacaattgttgaaatgtgaatagggttcgaggattagatatatcaatgttatctaatctcatggttatattgtggttaaatgggagaatatctttgcaagaattacacaaaaaaagtacttgagctgatcagcatcatgtcaaccacttactctcaaatgcttcagggtaaataagttttttataccgctcttgtaagttttctttaaggttgaaatggtttcaaattaaaaagattcagggttgccagacacagtggctcatctgtaatcccaacaatttgggaagctgaggctggaagattgcttgaacccaggagttcaagaccagcctggaaaacgtagtgagaccttgtctctaca

SEQ ID NO: 266818 - DNA, 548 bp, Homo sapiens
  misc_feature (531)..(531): n is a, c, g, or t
cctctgctatgaaatcttcccttggctttgcccttgccctttgagggggccaatgcccttctcgacattcttgcattctccaggccattaccattaatcaataccaagttctccttcatctcagatcataaatcaccaagctctcccagtgttgccaggtaatggctctgatgagctaattcacaccaaggtgtgaatgaataatgatggtttcataagttttccacttgggagtctgtttgggttttaagatgggctataaacacttctccaatgaagtgtgaaatgtggagatttttaagactatttccagctagattaagggagaagtattgtttggtcaagagaaatgtaagcaactttcaaactgtttgatgtgccaaaaaaaaaaaaaaacaataaaaaaaaaaccttgtggcccgcttggcccaatcggattttgaattgggccaggttattcattccgcccgaatttcggcctacttggcccaatcggcctaatggggagcggattacaattcaatggcccgncgtttaacacggtgggg

SEQ ID NO: 266819 - DNA, 536 bp, Homo sapiens
gctataccggagtcccgttgaattgggtatcttattgctacagagagtctgttttgtcagtctaggatctctgtttttattttaatgttggtcagttgtgtctaaattccagagcggggcaggtataatggggcatcccgagccctccttcccattcatggcctgaactggtttttcaggtttctttgggtcccggtggctgcaaggggatgcactcagttggctgggggacttagaattttagttttggtttacagcaggatttgatgggcatgcatatttatcaatgtgaaagtgttgtctgtgggcggcggagggcttgggccgtgtccaggccacgcactgcaagggtgcagcccccacacacggtccctgctcctaaagctgttgcccccactgcaagagtggagtaggttgaggtgtagccatgacattctggaaactacatttttattccaattattcaagtttttgctgcacagtattttcaaatgttttattttcaagtcgacgcggccgcaatttagtagtagtag

SEQ ID NO: 266820 - DNA, 759 bp, Homo sapiens
cagaggatccttcaaacgtatcagaatctaggatctctgtttttattttaatgttggtcagttgtgtctaaattccagagcggggcaggtataatggggcatcccgagccctccttcccattcatggcctgaactggtttttcaggtttctttgggtcccggtggctgcaaggggatgcactcagttggctgggggacttagaattttagttttggtttacagcaggatttgatgggcatgcatatttatcaatgtgaaagtgttgtctgtgggcggcggagggcttgggccgtgtccaggccacgcactgcaagggtgcagcccccacacacggtccctgctcctaaagctgttgcccccactgcaagagtggagtaggttgaggtgtagccatgacattctggaaactacattttttgtaatagtcattttgaaaataaaacatttgaaaatactgtgcagcaaaaacttgaataattggaataaaaatgttcagtttaatgtcattgcttgctgccaccgttttctgattgtaaaactaacgtgattattaggtactattttggtaatgtagaaaactttaaagatgaaaatagatatcacttataactccacatggagaaatagttgcccctccaatttaattgatttacttttgggccacaggggcccagaatttgattcattgtactccttggttcatgccagtgttcctgcacccagcactgaagctgaacattgacagtgatttgcccctg

SEQ ID NO: 266821 - DNA, 524 bp, Homo sapiens
  misc_feature (507)..(507): n is a, c, g, or t
tactactactaaattcgcggccgcgtcgacgtcagtctaggatctctgtttttattttaatgttggtcagttgtgtctaaattccagagcggggcaggtataatggggcatcccgagccctccttcccattcatggcctgaactggtttttcaggtttctttgggtcccggtggctgcaaggggatgcactcagttggctgggggacttagaattttagttttggtttacagcaggatttgatgggcatgcatatttatcaatgtgaaagtgttgtctgtgggcggcggagggcttgggccgtgtccaggccacgcactgcaagggtgcagcccccacacacggtccctgctcctaaagctgttgcccccactgcaagagtggagtaggttgaggtgtagccatgacattctggaaactacattttttgtaatagtcattttgaaaataaaacatttgaaaatactgtgcagcaaaaacttgaacatttttattccaattattcgtngacgcggccgcgatttt

SEQ ID NO: 266822 - DNA, 768 bp, Homo sapiens
tactactactaaattcgcggccgcgtcgacgtcagtctaggatctctgtttttattttaatgttggtcagttgtgtctaaattccagagcggggcaggtataatggggcatcccgagccctccttcccattcatggcctgaactggtttttcaggtttctttgggtcccggtggctgcaaggggatgcactcagttggctgggggacttagaattttagttttggtttacagcaggatttgatgggcatgcatatttatcaatgtgaaagtgttgtctgtgggcggcggagggcttgggccgtgtccaggccacgcactgcaagggtgcagcccccacacacggtccctgctcctaaagctgttgcccccactgcaagagtggagtaggttgaggtgtagccatgacattctggaaactacattttttgtaatagtcattttgaaaataaaacatttgaaaatactgtgcagcaaaaacttgaataattggaataaaaatgttcagtttaatgtcattgcttgctgccaccgttttctgattgtaaaactaacgtgattattaggtactattttggtaatgtagaaaactttaaagatgaaaatagatatcacttataactccacatggagaaatagttgcccctccaatttaattgatttacttttgggccacaggggcccagaatttgattcattgtactccttggttcatgccagtgttcctgcacccagcactgaagctgaacattgacagtgatttgcccctg

SEQ ID NO: 266823 - DNA, 793 bp, Homo sapiens
gctataccggagtcccgttgaattgggtatcttattgctacagagagtctgttttgtcagtctaggatctctgtttttattttaatgttggtcagttgtgtctaaattccagagcggggcaggtataatggggcatcccgagccctccttcccattcatggcctgaactggtttttcaggtttctttgggtcccggtggctgcaaggggatgcactcagttggctgggggacttagaattttagttttggtttacagcaggatttgatgggcatgcatatttatcaatgtgaaagtgttgtctgtgggcggcggagggcttgggccgtgtccaggccacgcactgcaagggtgcagcccccacacacggtccctgctcctaaagctgttgcccccactgcaagagtggagtaggttgaggtgtagccatgacattctggaaactacattttttgtaatagtcattttgaaaataaaacatttgaaaatactgtgcagcaaaaacttgaataattggaataaaaatgttcagtttaatgtcattgcttgctgccaccgttttctgattgtaaaactaacgtgattattaggtactattttggtaatgtagaaaactttaaagatgaaaatagatatcacttataactccacatggagaaatagttgcccctccaatttaattgatttacttttgggccacaggggcccagaatttgattcattgtactccttggttcatgccagtgttcctgcacccagcactgaagctgaacattgacagtgatttgcccctg

SEQ ID NO: 266824 - DNA, 593 bp, Homo sapiens
cttaaaaaacatttactttttctttttcctgtgtgttcatgtcttacttagctccttagaaatgaaaattcaaacttttccctccttcctttccaccagccaaacaaccagcaagcactgtcagcttagctaagtatacgtttgtttataaattaccaaatcttgaaccaaagtaagaatccaccagaattctcctccatagagagattgtctcaagacatcagttaatccacaacctgactctgtccccagtgatgctgggcaggctaacgaatgacccaagactagagataagtcatccatcgagtcatgcagatcctgcacctccacaccccttctgcatggcctgcttccaatatttcttcttaaaaccctgttttcttcgtagaaaacttatatggttcctttagatacgaatccagccctcccacattgctaagctcgggaataaagtgactttctctttttttttttggagacggagtctcgctctgtgccccagtagttgggactacaggcacacgccacggtgctcggctaatttttgtatttttagtacagacagggtttcgccatgttggccaggctggtct

SEQ ID NO: 266825 - DNA, 851 bp, Homo sapiens
  misc_feature (817)..(819): n is a, c, g, or t
  misc_feature (824)..(824): n is a, c, g, or t
tgtcagttttctgttttttctaactatctcattacaattggtgcacaatgaactggaaaatataaaaagtgacactttaggcaaatgtgatggcctccgagctgaaatgaaggaactggcaatctttccaaagtggcagccaaggccccactccctgtcctactcaatctctgcagggaaaaactgtgggataggatagcagccagctggggacacacagaggaacattcaacaggaaggtcccgcctagggaaaaggccacagagcccaggcctcttgccgattcagggatccttggatataagtggattagaggagagggaggaaagctatcatttcagtggtctccaaatcaagtagaaatattactgggaggtatcccacttaagcctgaaccagcagacatccgaaagggtcactctagagtcagaaaggaaagcaggtcccccagaaggcaacacattgataggaagtggaggccacagaaaaagaatgtgcccacttgataattacttaagacttctatttaaccaaaagaacattgaaatactttgtaaatattcatattgttgaacctttcataatcaggaattcactatgtactatactgtaagtcatagttcgcctataatttactagtatatctccctctaggacagatagtaaaatgtgtactatgttgttacagtggtgcaaaaatgttttaaaagtttatcacttgttttgaagactagaactttctttacttttctatattttcttagcaattcacagatatgttctctttggatttagtactttaacatatgtacatttnnncagantaaaaataagggtatttcacaaaaaaa

SEQ ID NO: 266826 - DNA, 340 bp, Homo sapiens
gcttgcagtgaactgagattccgccactgcactccagcctgggcaagagcgagactccatctcaaaaaaaaaaaaaaaaagagagagaaaaaaacttagctggatgtggcacacgcctatagtctagctacatgagaggttgagacacgagaatcacttgaacctgggaggaagaggttgccgtgagctgagatcacgccgctgcactccagcttaggtgacagaaagagactccatctcaaataaataaataaacaaagcatacattcttatgagcatatagtagcatacttacatatttccatactaaattacaagctctgtgaaggtgggaatgttg

SEQ ID NO: 266827 - DNA, 309 bp, Homo sapiens
acgcttgtcaaatatccattgagcatatctgtgtgggcctatttctgggtcctctgttacattccattgatctgtatgtctgaccgtctgccgataccacactctcttgatgactatagttacatggtaagccttaaaatcaaatagattcttcccactttattcttctttgtcaagattgtataactagggcctgtgcatcttcatatgtattttagaataagttttggctatgtctattgtctatgcctgtaaaaaatcgtactgggattttagtaggcattgcattaaatctatagatcaattcta

SEQ ID NO: 266828 - DNA, 377 bp, Homo sapiens
gaagctattataacgccatagctttggcagctgtctaaagccagacacaatctctactccctctctctttcagctgaaattttccaaatatataaagacagttgtgtaagcttcctgaaatagagtacctgatcaataaatgttgtttcctttattcccctagtgttctcttgtccaagtaaaaattccgcattgcaggtcatcttcttccagatgccctctaccaggtgtataaatgcctctgcaaacaaactccccacactgaagagagtttcacagatgtgacgaaatgtgcaataaatacacaagaaccataatccagcttgacctagaaacagtagtttcctaatttggtggatccctttttttcaaatata

SEQ ID NO: 266829 - DNA, 701 bp, Homo sapiens
taggctttttcaaggatggaacaagacaaagttttctacagtgctgccaagaatgggtctctgagtgcagatgatttaattcatcttcagcgtgctaaggccatcctcttctgaaggaagaaatgaggagtaatgtaacatctgaacccctcatcaaaaaagacaggaaaatatcacctctcctgctaaagaactagaaaagttggtattttcaaaagaagaaacacctcaattcaagttaactcaaggacaactaagattgcacttcgtagtaaagaatgggaccttgtcagggcaacaacacactcttacactcttctgtcctgtttaatgtaaacagagttataaaaaccacttcaaagtgaagactcctgcccacgtacagatatttgcttaatgtgtgggctgatagctgtgaactatgtaaggcttttaaaacaatagtttaactttttagattttaaagataacttttctgtttcttttatgtttttttcttttccccaatattcctgcatatgcatttggaatcagtgcagtatcactgttaaaacatgggagtctaacaactcctaaagccactaggagcagtcccagcattgtcaggtatggaagggctctttcttcctacttttaccatggaagctacagttactggcgatcatcaagcaaaagctgccaattaacatttgccattcgta

SEQ ID NO: 266830 - DNA, 257 bp, Homo sapiens
tcgttcttgtttctctggttacttcaggtgtgactttagattgtctgtttgtgctctttcagtctttttgatgtggccatttaatgctgtgaacattcctttaaacatcacttttgctgtgtccttgaggttttgataagtcatgccacagttattcagtttgaagaacttttaaatttccctctggatttcattgtcgacccaaagatcattcagaagcagttatttaatttctacatatttgtgtaatttcatgg

SEQ ID NO: 266831 - DNA, 310 bp, Homo sapiens
aaggcgccaggaatttggggatgggaaggggtaagggggagagaaaggagacacaatctccgtgggatttgggatgggggcaaacaatgctagtgggaggacatggagtgcaggattttttttcccccctcagatttcccactttagttgaaggctaagcctttgcccaggggatgcaaactaatttcagtattagtttaagccagaaataattgggaaggtaaaacttgcaaaagagaaaccacgccacatatttcaaagacaaattgaaacaatttctggattatccccagacctttcttctgtctac

SEQ ID NO: 266832 - DNA, 901 bp, Homo sapiens
agatacaataaaaacatttattacatctcatgttttattttgtggaaagtttgtgataccatgtactaaaatacatcagtcaagggatatggttattatacctaaaggctttatatattttcatgggttttctagttcatgttttaaatattgcaaaatctgtgagatttatgaagactctttcatagggaaaatccactttaaacatctctacagtttcgctaggtatcttcaaatagaatagaatttcagtgtgataaattagactccttagttccatagctgacgtatagctggcatatcccattgatgttctaatatgtgatatgttcaaatatgtgataacacattttgatttcttataatgcttagtcccatatggtcctaaactattacgacctttgtcatgcttgggatttgtggaaatttcacagtggtaagggttgtgacattacacgctgaattactaaaatcacgcagcgcaaagtgacttgcacatgaaaagtgcaccttggtgctgaatttcctatttttttctacttgaaagtgtatggtcttatttataaagtaaagtatttatatgctttacataacaaagtctcttcttttaccacatttataaattagctgagtcatatttaacaaaaagactggtctaactttctaagtttaagtcaattttaaaatctgaaattgtatatgatgaaaatgagacccaattcagtatcaaaaacaggtggccaaagtcacaagggaattatgcggaaagggtagatatgatgtaaagaaagacatgtgttatcttccaaaatactatcactactaataaaaagccattgcacaagccaaaaaaatatattaatctgttttgaagaatgtgtctgataataatgagattcaa

SEQ ID NO: 266833 - DNA, 422 bp, Homo sapiens
aacagccaaagtgcaaatcacattcttcaagagctgccgcttacgatttgttagtagagatggtaaaggggtctgttgagaactacaggctaatacacaactgggttatggcacaacacatgcagtcccatgcaccttataaatgggattactggcctcatgaagatgtccgtgctgaatgtagatttgttggccttactaaccttggagctacttgttacttagcttctactattcagcaactttatatgatacctgaggcaagacaggctgtcttcactgccaaggtagaattttcctcactttaaaaatcaaaattataaaccagattttaatattttgttgataaatttttatttcaatgtagtaaatgtttgaaaaaataatttgtgaataaaagtaaatttgattacaaaaaaaaa

SEQ ID NO: 266834 - DNA, 544 bp, Homo sapiens
atgcgaaatgttattagacacaggcacagcatagcagtagaaacatcttaactgagaacttggaactgaaagagaaagcaaccaacttaaagggcagacaagacacatggttatgtaacacagcagtgggtattcacagtgatgacacaagacaaaacaattacattttcattctaaaagtaatttttaaggaggcaagggcatttataaaacattttagaaactatttaataaaaatggtaaaattaaagtgtttgtttatgtactcaacaaatatttatttggaaagtgcatgcctgggggcacatctcgttaatgaggtgatcctgtgtttagaactgaaggcagtcctcatccattctctcaaaaggtgaccttctttgttcttcttatagcctcaccacatttaattttcagaggttttgatataaattaaaaacattctttggtagattgtattgtatgaaaacaatcttcaaaagtgtaagcattgatatctggaatatctgggaaaatgtacaataaagacatctcttctggtctt

SEQ ID NO: 266835 - DNA, 430 bp, Homo sapiens
ctttctttgcttttaagcccagcccttggggttttttgttttgttttcttttttttttttcctttttctctgttctctacaaatcatttgggtctacatccagcttctcccagcatttactcaatatgaaacttccagttatagattaatttgaattctttgcactaattgtttaaaagaccataggaacctcagaccatccctcttcatggtctcaagagctcccagaatcatcctcttggtaagctaagtagttattagtaaggcccagggacaggactgagaagtaacatcttctattttttatttcagttttcctttaatttggaagcaaacaaacaaaaaacccttcagcttagggttttttcaattgttaaagtaatactgagcttcagttaaggctatgaaagaaaagaaaaaattttaaaaa

SEQ ID NO: 266836 - DNA, 496 bp, Homo sapiens
gattttcatatcaagggatttgaggagacacttcaggattccactgacagtagaatcacattttgtttttaaaataagttttgatttaaaattcaaatcatatttaaaattgttacctatatataaatatgtatttatatatacttaagtatctgatgtttaaatatgttacacatcaacattttaacccgtgagcgccattaacatggcactttatgctgctacgttaacctagtttcgtgcaggccttggaataaggctctcctgccatctctcactgacaagtgtcctgtgctggtaaggttcccctttgcagcaatcacccgcagtcttcttccaacacatctctcactttttacccttatccagtggagttagttcgctatctggcagccagggtcatcgtttaaaaaacagaagacacctgattgtgtcgctaaactgctttttaaaagcctccattccagaagatcacagcagataagcaaaaaataaa

SEQ ID NO: 266837 - DNA, 1650 bp, Homo sapiens
ccgggccgctgccgaggggccctgcccacccctgcccagcccggagcccaggcgagccagcgcggcgagcctcctcccctcccgcctgggtcgtcctgagtccgcgcccgctccagttgctgcagctgctgctgctggcggctgcggggagcgcggggcgcgcgccgaagaggcttgggcggcgaggacggggacgaggaggagtcggaggcggcaaggaggaagagcgagcggaggccgaggggctcagcggcgtggcgacaggactagggggtcccgagaacatgggctagcaggcggccacgggccggcggccggacgcggtgaacctgccgcggccgggcgcgcactggcgcggcgagccggagccgagcgcagccgggggaggagggctggcgcaggggcgcccgggcggagggggccgattatccattattaacgagttaccacctaataagcggagagcggctcgttagccgcgcgggaggcgctcggggaagggggtcaccggccgagcgcagcgcacacccgtggcgcacggcgggcggcgcggcgccgaggacacccgggaccgcgcgcggagccggggcgggcccgggggcggcgcagaccccgggcgcgggcggcccgcggcgccccctggctctcggcgctcggggccagcgcagcccggggcgagcggggcgcgggccggggagggggagctgcccgcgcactccatccccctcccccccgggcgggcggcggcggctcgctgtatatatctcggcgcaccccgccaggtcgcgcacagcgccccgagcccaggcgcctccccgcccccctcccgcgctccgcggcggcggcggcggcggcagcagtagcagcaatatggctgttgatgggtgtttggggtggcgctggcggcgggaggagctcccccgagcccctgcgccggctgcccgttgctagctatggcaaatggtggcggcggcggcggcggcagcagcggcggcggcggcggcggcggaggcagcagtcttagaatgagtagcaatatccacgcgaaccatctcagcctagacgcgtcctcctcctcctcctcctcctcttcctcttcttcttcttcctcctcctcttcctcctcgtcctcggtccacgagcccaagatggatgcgctcatcatcccggtgaccatggaggtgccgtgcgacagccggggccaacgcatgtggtgggctttcctggcctcctccatggtgactttcttcgggggcctcttcatcatcttgctctggcggacgctcaagtacctgtggaccgtgtgctgccactgcgggggcaagacgaaggccacccactttgggtccccggaaatgccaccagcagcgcggagctggagcgggagtccgcctgaggccgcggttttacgcggagcgtcttccctggcgctcgaggtggctagatgtcgtcggctttagctattcctggtgcagacgcccaccggcactgaggctggcgacaccttcgatgtatggttgctaggctcactgcctggtctgtagtcgtgtccctagagatgtcttcccttccccacagccactggctggagtgggggacccgacactgatagaaaactgcagaataaaaaagaaagaactggaaaaaaga

SEQ ID NO: 266838 - DNA, 2399 bp, Homo sapiens
ccgggccgctgccgaggggccctgcccacccctgcccagcccggagcccaggcgagccagcgcggcgagcctcctcccctcccgcctgggtcgtcctgagtccgcgcccgctccagttgctgcagctgctgctgctggcggctgcggggagcgcggggcgcgcgccgaagaggcttgggcggcgaggacggggacgaggaggagtcggaggcggcaaggaggaagagcgagcggaggccgaggggctcagcggcgtggcgacaggactagggggtcccgagaacatgggctagcaggcggccacgggccggcggccggacgcggtgaacctgccgcggccgggcgcgcactggcgcggcgagccggagccgagcgcagccgggggaggagggctggcgcaggggcgcccgggcggagggggccgattatccattattaacgagttaccacctaataagcggagagcggctcgttagccgcgcgggaggcgctcggggaagggggtcaccggccgagcgcagcgcacacccgtggcgcacggcgggcggcgcggcgccgaggacacccgggaccgcgcgcggagccggggcgggcccgggggcggcgcagaccccgggcgcgggcggcccgcggcgccccctggctctcggcgctcggggccagcgcagcccggggcgagcggggcgcgggccggggagggggagctgcccgcgcactccatccccctcccccccgggcgggcggcggcggctcgctgtatatatctcggcgcaccccgccaggtcgcgcacagcgccccgagcccaggcgcctccccgcccccctcccgcgctccgcggcggcggcggcggcggcagcagtagcagcaatatggctgttgatgggtgtttggggtggcgctggcggcgggaggagctcccccgagcccctgcgccggctgcccgttgctagctatggcaaatggtggcggcggcggcggcggcagcagcggcggcggcggcggcggcggaggcagcagtcttagaatgagtagcaatatccacgcgaaccatctcagcctagacgcgtcctcctcctcctcctcctcctcttcctcttcttcttcttcctcctcctcttcctcctcgtcctcggtccacgagcccaagatggatgcgctcatcatcccggtgaccatggaggtgccgtgcgacagccggggccaacgcatgtggtgggctttcctggcctcctccatggtgactttcttcgggggcctcttcatcatcttgctctggcggacgctcaagtacctgtggaccgtgtgctgccactgcgggggcaagacgaaggtaacgcgcgccccgggcgcccgccctctgcgccagccccaccgcttctcggcgtcccctgcagcccacctcctcgctccgcgccgcgccgtgcctccctccatccccgcctgccttcccctcgccgccttcccttccctcggctctcccggtgctctcggatcggggcagcgggcggcgcgccgggggtgaggagttgcccccagccagtgcgctccgggacgcggacgctcaatcctgtcctcttgtttattgtagggttgttggcggctgcggctggggccggggtcggggactcacaggctcgggtgccgtggtgcggggtggggacagccaactcagcggggacggaggaagctgggggcagctgggtgcgtgttttgcaccgctcacctgccggggctcggctcctggcggtgggcgagagggagcacatccgcccatactttaggaacctgttggggagatgagttcgtggggtcagaaagaagggaaaaatcctttgggcaagggagagaataattttgcacaagggaatcccgggggaggagcatggcccgagataacagggggacttcgaggggcgagagaagttggggagatccatcccactattgggggtagcccacggggctgccacttttggaatgtgtcgaggtcgcatatctgatgtaacctcccactccgtcccttaggtgctctagtggaacataccccaagttcttcggcctctgttcctttgcccccaggccacccactttgggtccccggaaatgccaccagcagcgcggagctggagcgggagtccgcctgaggccgcggttttacgcggagcgtcttccctggcgctcgaggtggctagatgtcgtcggctttagctattcctggtgcagacgcccaccggcactgaggctggcgacaccttcgatgtatggttgctaggctcactgcctggtctgtagtcgtgtccctagagatgtcttcccttccccacagccactggctggagtgggggacccgacactgatagaaaactgcagaataaaaaagaaagaactggaaaaaaga

SEQ ID NO: 266839 - DNA, 1704 bp, Homo sapiens
ccgggccgctgccgaggggccctgcccacccctgcccagcccggagcccaggcgagccagcgcggcgagcctcctcccctcccgcctgggtcgtcctgagtccgcgcccgctccagttgctgcagctgctgctgctggcggctgcggggagcgcggggcgcgcgccgaagaggcttgggcggcgaggacggggacgaggaggagtcggaggcggcaaggaggaagagcgagcggaggccgaggggctcagcggcgtggcgacaggactagggggtcccgagaacatgggctagcaggcggccacgggccggcggccggacgcggtgaacctgccgcggccgggcgcgcactggcgcggcgagccggagccgagcgcagccgggggaggagggctggcgcaggggcgcccgggcggagggggccgattatccattattaacgagttaccacctaataagcggagagcggctcgttagccgcgcgggaggcgctcggggaagggggtcaccggccgagcgcagcgcacacccgtggcgcacggcgggcggcgcggcgccgaggacacccgggaccgcgcgcggagccggggcgggcccgggggcggcgcagaccccgggcgcgggcggcccgcggcgccccctggctctcggcgctcggggccagcgcagcccggggcgagcggggcgcgggccggggagggggagctgcccgcgcactccatccccctcccccccgggcgggcggcggcggctcgctgtatatatctcggcgcaccccgccaggtcgcgcacagcgccccgagcccaggcgcctccccgcccccctcccgcgctccgcggcggcggcggcggcggcagcagtagcagcaatatggctgttgatgggtgtttggggtggcgctggcggcgggaggagctcccccgagcccctgcgccggctgcccgttgctagctatggcaaatggtggcggcggcggcggcggcagcagcggcggcggcggcggcggcggaggcagcagtcttagaatgagtagcaatatccacgcgaaccatctcagcctagacgcgtcctcctcctcctcctcctcctcttcctcttcttcttcttcctcctcctcttcctcctcgtcctcggtccacgagcccaagatggatgcgctcatcatcccggtgaccatggaggtgccgtgcgacagccggggccaacgcatgtggtgggctttcctggcctcctccatggtgactttcttcgggggcctcttcatcatcttgctctggcggacgctcaagtacctgtggaccgtgtgctgccactgcgggggcaagacgaaggtgctctagtggaacataccccaagttcttcggcctctgttcctttgcccccaggccacccactttgggtccccggaaatgccaccagcagcgcggagctggagcgggagtccgcctgaggccgcggttttacgcggagcgtcttccctggcgctcgaggtggctagatgtcgtcggctttagctattcctggtgcagacgcccaccggcactgaggctggcgacaccttcgatgtatggttgctaggctcactgcctggtctgtagtcgtgtccctagagatgtcttcccttccccacagccactggctggagtgggggacccgacactgatagaaaactgcagaataaaaaagaaagaactggaaaaaaga

SEQ ID NO: 266840 - DNA, 578 bp, Homo sapiens
tgaagatctgaactacctcggaatctctttattcaggtgttccttaactctaggatgcaggttccgtagtgggcggaccttccagcaaccagagtttggagaagcgaaggggacactggtggatctccaccatgaaaattggcgctttgggaatgtccaaaatttccagggcaaccgtccgtcgcccctccccgaccccgcctccttttaaaggagaaacggagtcccaaagaggcatgcagcaaggtgcagcggtagcccgggtttccttcggcttttgcggccttagcattatgtctaggtttgaactgtgttcagtctcttttacctccccctattcgatacgcagagcgaattcgatttgagatctgagggcagacccgaaccaggaaagcaactcagacgctagggccccgaggggcggagcgaagcggtacccgccccctggcggccggagccaatcagcgcgggcgttgagccggccaattagcgcgtgcagggggcggcctgccaatgagctcggggcccctcgggaggcggagctccgagcgccaccgggagggctacgcggcggccgc

SEQ ID NO: 266841 - DNA, 714 bp, Homo sapiens
cttttctttttgtttgtttttgttttttaaagacagagtcttgctctgttgcccaggcaggaagtcagacttcgtctcaaaaaaaaaaaaaggttataatggtgttctcattagaagaactacagaccccagagctctcaaatcgccggaaggatttctgcggtaggcctgtgcatgatggacagaggacaggtggtaaagaatcacggacacctagtaggacaactaggcatggctttgtcccggtttcagagcaccgacacagcatttagtcaccatttaccttcttgggaggtgggttaggcagcgggcacactagtcctgctttgtgggagcagaagtgaagtctcagagaaaacaggtgacttgcccaagaagccttattaattaccagccaggacagcgtattttctattccgtgtgttttgggataacttagtgccgtcccctccgatgaaccagtgccttcgaaagcccttgagatttgggaaacaggcggcacagatcttggaggttaccttgttcttaatcagtcctcaggcagtcgcctctaacgcgagcgaacaccggcttcccgaggccgtcgctcggcagaggaggggccaggcgcccgatcccagatcccctttccccgccccgccgcgccccgcctgctctggcacagccgcactcccgcaaatccctcccgcggaacccccactcctgcctgcgcgg

SEQ ID NO: 266842 - DNA, 246 bp, Homo sapiens
atttaagaggcctatagaataccaagcaagatacatgacaaaggtttcaaacttggaatacatcaaagtaaaatttcagaattttagattttattggaactttagatgtatttatattgagaaaataacaaaacaagattgtctacaaaagaaagaatcagactggcatccacctcctcaccaattaacattgcatgcaaaaaagattctgcaatgtctaagagaaaataattttggctgggtaca

SEQ ID NO: 266843 - DNA, 337 bp, Homo sapiens
aaaattataagattagtcgtattacaattagtcatgtatcaaacattttaataactttgttcctttaattcactatgttttgattatatgaaaccaaatatgttttacttcaactgaccatctggggtggcaatctaccatctgattacatcattgtaacattacattcagtgttatctttcattgagataattcagctattactagtctctctttgcagatgggaaaactgaggccaaagagtggtttgcctaaaagtcacaactttaaaggggcagagtcactgggttttctggctctcagtaaggtgctatttgcagctctaagactagacaga

SEQ ID NO: 266844 - DNA, 670 bp, Homo sapiens
acccattattataccgcgtatttcctctagtcaatcgctaataacagcttgacattaattttcagattcaacgttaacttacaaaaaaggcatatttccttaaaaacatcagtggacattcttttaaattcacgtatctagctttaagattttaaagtgtgatatacatggtatgctgggggcccaatacctactgcgcgtgaaaattatctctatctttcatgctttaaaagcaattactaagcaattaaattagaggactctttagatgcattaactctcatttcctagaaaacaacacatttttggacctgtttgaaaactcatgaaaacaattaaaatgagtattttaaatctattaaatgcctaagatatgaaagtgtctatttagtttttgaaatgttgttaagaatcctacgatcagcaaatgcaaaattccagaccattcctaaaatgtgatttgtacaatcacaaaaaaaaaaaaaaggcttaagactgtatataccagatttgtaaaaacataatcttgatgactttactgcagatttaaccacaatcctaaagcaccattttattaagaagtactaaatgtcttcctgctccaatataaattacatgcatcgactgtcttgatagtaatagaagtgttttcaatgtcaggcaaagaaat

SEQ ID NO: 266845 - DNA, 255 bp, Homo sapiens
ttccagcaatgatcagcccttgcctaattgcaaatagatgggtcttaggattgtttttttgttttaatgttgcctgcaaaaattacactggttagtgtctctggagccctaaaagataccaccttttacacaaagctgaaagcagtagactttgggctgcagtccagtagtttcttttgtcaccgttttctgtttctttcctctttctctgctccgttttctctccgcccttctgtcgtcttctcgcctgctgtc

SEQ ID NO: 266846 - DNA, 326 bp, Homo sapiens
tatcatataagcaggttaatgtgttacagcacagaagtagtcagccatgtaaaatctcagcattgcagttgataaatcatgaatactgtaaaagtgctgagatccttctttttataacctacttcacgtttctttttattctagcactaacgtgattgaaaatcctccaaattttggcactagagttaaagggataagttgaattagcattctggaaagatatgaagatttaggaaaatcgttaaatataaaaagaacaaggaaaaatttagcttaaaagatgaacccaaagattgaaatggtcagttaagctgctatagttaaac

SEQ ID NO: 266847 - DNA, 147 bp, Homo sapiens
ggccaggctggtcttgaactcctgacctcgtgatccacccgcctcagcctcccaaagtactgggattacaggtgtgagccactgcactcggcccaaatgcttttatatgcattacctggttacccatgaagaaggccctctgatctg

SEQ ID NO: 266848 - DNA, 778 bp, Homo sapiens
tgcttctagggctccgtggggtttggggcttgacattcatccatttacaagcatttcctgtatgcccctcctctgcagggcactgggtgtggggatgcagggaacacagagctgatgcttgcctctttgccttcaatgagatgaccttctagaaggaaagaccatggagtgtgaagctcagtgggcaggttgaaatgataacagtccctttgtgtgtgcggcttcttagggttatcatatttgatcctcagcacacattcaggtagtcaggtcagagacgattgattccttagtctccagaggggaaagctgtggttgagtttcattaattgagggaatagggccagagtgcagtcagggtgtgctgattcctgctccaaggatcttccaggacgccaggctgcttctcactacagaactaagtgctacatcatgtggggctaactgactgtggtggagggggatcgttttgtttgtccccagagatatttgcagactcacttgcagtcagagaggaggctggaatgggggagtctgatagcacattcttcatgaaccgcatgccacctctgtctatgcagctgggccttcatgggcatattgttgggttcgaactcaacctcttcattcttggcttgttataagacaccatggcaacagagaatacgtaggacatgtttctgccctcagggaggttgcagagggtggaggagacaaaacatccacagaggaaacccccagagaccagtaacttacatttgtaaaatgctgagtgtat

SEQ ID NO: 266849 - DNA, 377 bp, Homo sapiens
tggaagatgagtaacagtccatcagggtggtcctgtgtgcacctttatgaaccgaggcatctttatagatctcctttggactgcagatggtaatacagattttgctacaaggagtttgctgaaataggtcccaataatacgttggtaaaattaaatccaaggctgtgctattcccaaggttaaaaatacattcttttttcttttaccgatttcaaattctgttcatacatgttgtcatttgttacagtttgccattggttctgcagtaagaataaatgataagaaaataagcatgatgtgtaacattttaaaaaaataatacatggtaacatggatgcctcaataatgtcgaaattaaactctaaagttatattatc

SEQ ID NO: 266850 - DNA, 509 bp, Homo sapiens
tttttttttccaacgatatgttctttccaaccctttgagttttgacccatttttaggcaggagaatagggtctggagacaggcagccttcacttcagcctctgattggtcatgggccaagtcttcatttgcgtaggatgtaacttcagcctctgattggttgtaggctgagccttcacttcagcctccaattgatcacgggctgagccttcacttcagcctccgattggttgtgggccaagtcttcatttatatagggtgtaaccgataggaaacctctaatgggtacttaaaccccggaagatttgcaactagggctcttgagctgcttgctcaagcctgctcctgatctgtggagtatacttttgcttcaatacatctatgcttttgtcttctattgctttgtttgtgcgttttgtccaattctttgttcaatatgccaagaaactggacaacttgtagtcaagaccctccactggtaacatatcttggcaagtcagccaggaggta

SEQ ID NO: 266851 - DNA, 198 bp, Homo sapiens
ctaccctgccatacacaatgtctggggacttgtttttcaacccacagtgctgtgacattgctgacacttgtttatctctttgcttaacactgtggatggttcatgtgttgcctgctgggtaatattctgccattcttcatgtcctcttctgctgatgggtgtctgggctgtggccaggtttttgttactgagaacagg

SEQ ID NO: 266852 - DNA, 597 bp, Homo sapiens
tttgtcatgaatgttgattttttgaggaaatgctttaaaatgtactgatgcccatgttgtggttgtaaggaaacaaagcagctctgtgaggccaaagcatatttcagttcaatagtgaggctttcttagaaagaatgactcatagtcactcagagttgagtcgcacagaaacaaccgagagcagacagcaaggaacggcagggcccagaaggtccagcctttccctccaggctgaagggttagggaagatcgccaaccttaaagggggtgtgagaggcctgggcccaggtgagattgtactgaattccagtaaacagtgtacagtcattccaggacagaggacaggaacatgtttactaggtgtctggagtgcacctctataatcctcatacacactaatccagataatcctgggatgctggcctcacgcaggattgttgatgagaatgcaaatcccaacattgcaattcaggattttgcttctactgaaagcattttgtcaatgttctcttttggggttagctgggtgacagttctcccttgctggattcccagtacttaatagcgtttctttgactcagtggatatgtggaacat

SEQ ID NO: 266853 - DNA, 812 bp, Homo sapiens
gcttttctgtcttacaagaggtttgtaaaaatgcaccaatcagcgctctgtagctagcaagaggtttgtaaaatgcaccaatcagcgctctgtaaaatggaccaatcagcaggattctaaaagcagccaatcgcagggaggatggaaaaaagggcgttctgatacgacagaaacggacatgggaggggacaaataagagactaaaagctcccaccccagtcagcggaggcaaccggctggagtgctctgccatgctgtggaaggtttgttctttcgctcttcacaataaatcttgctgctactcactctttgggtccgtgccatctttaagagctgtaacacagtgaaggtcggaggctgcattcttgaagtcagcgagaggatgaacccactggaaggaaccaactcaggatacaccacttacttgggaggctgaggtgggaggatcctttgagcccaggaggtaaagactgcagtgagatatgatcgcaccagtgcactccagcctgggtgacagagcaagactctgtctctaaaacaaagtgtcttggttgatgtcaagctgctggtgatttgcaacttgcataaaatgagacgatcgcttgagaccaggagttccaggccagcctgagcaacatagagaggatgtgtctccatataaaaataaaaaattttttttgagagggagtatcgctcgggtcaagcgattctcctatctcagcctcccaagtagctgggattacaggcgcgtgccaccacacccagctaattttttgtatttttagtagagacggggtttcaccatgttagcc

SEQ ID NO: 266854 - DNA, 313 bp, Homo sapiens
gaccaggcttagtgttacttctgccattctctattggcaaaagcagtcaggcagcccagacccacaaggattggaaataaatcccacctcctagtgggagaggtatcaaagaatttgtagccatctttaatctgctgtagcccatcctctagcccctaattatttatattcctgccacattcaaagttcactcaccctctcccacaacccccaagattctcatctcattacagcaacaggctcagactggaggtccaggatcgcattttctaaatcatgtcttggtgcatatgaagctatcaggtatgtttct

SEQ ID NO: 266855 - DNA, 472 bp, Homo sapiens
agaggacatgataaacaagattttcattctccacaaagggaaattagctgaattttcaatgagaagaaaatatttcctgcctttaggagtaaaataaatttattttttgggagtcctcctataggtgctatccttacctaaactcctatataaatgtatcaatagatgtttttgtagttgtgtcttaatatatttattttagatttagttatgattcactggcaaaggcttcgagtgcagaagtctcagattctccatagcttttgctatagtttcagggtttgtggggctgttcccttaaagttgtggggaacccttatttaagttccccaacttaaagtcatttctttctctgctcttaaatgtataaagtcattttactatttttttcctggctcaagttatgtataattggtgtaaacatttaaaacaatataataaaggtaaaaaatttaaaaatgaaatggccttt

SEQ ID NO: 266856 - DNA, 364 bp, Homo sapiens
ggcccccagctcgcctcttcctgcgaccctaaacttgggctttgattccccgccggtcgcggtggtccgggccacccggcggcggctgacagctgagcgcaaaggcgccgcggccaaggtcctcgcggagcagcccgggatgcgcacgccgagggttaaggaggaggccgcccggcctggagctgggatcgcaggctgggggccgggacacccgggcctcgccgggccgggggcagggccgcgggtctgacagctgctgcggctcgcgcggacgcgcgcctcctgcagcccgccctccccatgcctgacttattactctctgctcctcctccctctgctgttccaaaacacccttcgacgccag

SEQ ID NO: 266857 - DNA, 451 bp, Homo sapiens
tcatcaacaaggaagccaaagcggaagactccccaaggaagtggggctctcaaaacacatgtgagacaatgccaagatacccccaggaatacctgaaggagacttgcattgaaggtcctacggatccacgtgggaacacaaaccagtgaaatttgcgtgatctccactgactagacatcatttgaaccctcatgctggcagggtctgaagacatttcgtaatctgtctccacttttgatccctactgtagctcccctacaaaacatttctacagattgctaccaaggtaatcttctaaaattataactccagtggtattctgggctggctcatataggctcctgagagcagactgggaaattttcatcaagattgggaaattttcagcaattttgtgagtcagttgttaaacacataaatcattaaaaattaaaatattaaaaattgaaaa

SEQ ID NO: 266858 - DNA, 187 bp, Homo sapiens
tctctgtcccccattactgacacagagctcctaatcccttagacttgcctaggtgatgggagcatcttttgttccaatgaggcagctcttgctgggctcctgggtagctccaggatgggggctggtcgccagcaagaccaagccacgatgagcagcttgacacttctggcctcacccgccatgctct

SEQ ID NO: 266859 - DNA, 275 bp, Homo sapiens
taactttattttaggttcaggggtacatgtgaaggttttataggtaaactcgtgtaacggggtttgttgtacagattatttattcaaccaggtactaagcgtatacctaatagttattttccgaagtaaataatagcttgtgttccagattaaaaaaacaaacaacaaacaaaaccaaactcttttaatggctaggatgtgtatccttcaaaatacatctgaaatgacctacgaatatttggctattgtcaacaaacacaataactttttttgtc

SEQ ID NO: 266860 - DNA, 185 bp, Homo sapiens
ttcatcaaaattacaagcttctgtacttcaaggacagcatcaagaaaagacaactcacagaatgggagaaaatatttgcaaataatatatctgataagaaacctatatctagaataaagaactattacaactcaataatagacaagtaatccaattaaaatgggcaatgtatttgagtaggcatt

SEQ ID NO: 266861 - DNA, 521 bp, Homo sapiens
gagaatagttttagttctgttgggaaactgtggatgaaacgatgagaggatgatgaaatgatgatggatgaagttttctcaacttaaaaaaaaagttgaaaaaatgtcaaaggcagtattttttccagagaaagagttgtacatggaaataaatattatcattgtatgctgtaggcttatccctgaacaatatttattttatcataataatgtaaacacgttacactccttaaaaaagaataataaagctatattgagattatcagggaagaaaagtgtatgtatgtgggcagaagcagggtatgtacgagcaaactccttattttccacagttgaaaataaatagataatatctaaaactaaaaaatattaagaaaaatcagtataaagatgttattgagaggccgggtgtggtggctcacacctgtaatcccaacaatttgggaggctgaggcgggaggactgcttgagctcatgagtctgagaccagcctgggcagcatggcaaaaccccatctctac

SEQ ID NO: 266862 - DNA, 730 bp, Homo sapiens
taggcgcagaggaggattacaatcagtgcaggacatggcctgggtcaccctggacactgcagccttgctgggcagacagtagctgggtttcgagttcccgtatgtggaagatcaaacagtgagttattgcgggggcgcagtaatcagaggggaggcaaggagctggcagcaggcaggtaaggaagagagagagaaagcacgagaggcagcggggtggagtgagaggcaaaatggactagtcaaaactgtctgcagattcaattattctactaaacacgatgggcaaatagaaaacagctaagacgacacacatgggcaggcagcattcagtggggaaaagggccgttctcatctcagctcccctcctttcagccctgcgtgcactcgagaaaggaacccagcagccgcgtcctgcctttcctgttttgcgcaccatcctcctagtcacccaggcttgagacctgcaagttcccggacacctcccatctagagagccacctggcccaccatcccttcctttcctcatctttgctgctaccacaccctaggttttgaccacataaatgtaggccctgccagcctcccagctcatccttctgctccagacgcctcctcttaacactgtcttgtaccacaccaccagagtgttcttccccagacacccactgctctgttcaaaagtcttcaatcaagcacatattctcaggatctcctgagggctgtgtcaaaa

SEQ ID NO: 266863 - DNA, 415 bp, Homo sapiens
ttccgagcatccagcaaaggagggagaatgcggtggtgcccggtctcatccggagcctgcctggcccatctctgaccgtggtttgtttttttgaatacctcacagttcacgtgatacagaattctagaagtacaggccgggcgcggtggctcacgcttgtaatcccagcactttgggaggccgaggcgggcggatcacaaggtcaggagatcgaaaccatcctggctaatactgtgaaaccccgtctctactaaaaatacaaaaaattaggcactacagtggcgggcccctgtagtcccagctactcgggaggctgaggcaggagaatggtgtgaaccaggaggcggagcttgcagtgagcagagatcgcaccactgcagtccagcctgggtgacagagccagactccgtctcta

SEQ ID NO: 266864 - DNA, 807 bp, Homo sapiens
tgcattctctccggctccagatcatccagtgtgacagagtcttaatccgtggttctgcccatcagcacattcaacggacttaggatttctcaccacgtgcccttattttggaaaactgttcatttcaagaccacaggcaaaggggatactaagaataatcgcagaattaacatcggcaaggtatgatcaggatgaggacgtgagaaacgcagggctaagagttgggagtcctgggatgaacttcccacctcaaagcccagcacgagggtccctggacgctgtcggccccggacgtgggtccccgagactcgactgcagctcagagtggccacatctgccctgccaggctgccgcggagacaacacggaggagcacctgtgagaacacctgctacaccaagctcagggactcgtgcgtctccccgtccggcactccttctccttgtatttgaatcttttgatctctttttggcaaaggccaatcatttaaactttctgattttcagtttctttgtatggaaacgacagtaatttcattgattatatatgtaccataaaacaattttactaatttttagtaaataactagtttactaaccatcaagagctgcacagacaccgtttgctctctgcggccctcagctacatcctctttgtctttctctaaaatcctgcctgggtgtatccttgtttgtatgaatatgaaataatacatgaattttgatttgtactcactaaatcttggaaacaatacatctcattagattagtatatgcaccaaatactaaatacagatgcacactccctc

SEQ ID NO: 266865 - DNA, 350 bp, Homo sapiens
cgccagtttcaaattcagtggcgtttgccctgattcccggggcctggctttcagcgtagcaattctgccggcgaagaaggtgagcgcagtgctgtgtggcagcagaggtccttaggacgaggaacagcgggacgaggaagggcagactggtgaaatcgcaaactgggcgtctgttccggcaccggacccctgtttgcaaaggtccatggctaatgaaacacagaaggttggtgccatccattttccttttcccttcacaccctattccatccaggaagacttcatggcagagctgtaccgggttttggaggctggcaagattgggatatttgagagtccaactggcactg

SEQ ID NO: 266866 - DNA, 370 bp, Homo sapiens
aatggtatgcaaagtctgaatatagaaagatctcacaccttaaacaaaaactaactcaaaatggatcatggacttaatgtaaaactataataaaacctttagggagaataaaactaagaggaaagcttcagcttacagggctaggcaaagagttcttgacaccaaagaattaataccagatgtgcaatgtataaaggaaagatcgatgaatttaaaacttgctctgggccagacgcagtacctcatgcctgtaattctagcactttgggaggccaagggaagaggagccattgagcccaggagtttaattaagaccagcttaggcaacatagtgagaccttgtctctagtaaaataaaaagtaagtaaat

SEQ ID NO: 266867 - DNA, 412 bp, Homo sapiens
cgttggtttgattaatggtagaaaatcagaaaggtaaggaatgaggaaaacaatttatgactgtgatttgtccaggaatcatcacagcgctccattttgaattataggtactcagaaagtgagattcaggccaggcacagtggctcacgcctataataccagcactttgggagggcaagacaggatgattgcttgagcccaggagttcaagatcaatctgggcaacataatgagaccctgtctctacaaaaaataaaaaattagctggatatggtggtgctgtgtgcctgtgatcccagctgagaggttgaggtgggatgatcacttgaccctggggggttgtggctgtagagagctgtgattatgccactgcaccccagcctgggtaacagagcgagagcctgtctcagac

SEQ ID NO: 266868 - DNA, 311 bp, Homo sapiens
taacagtcattgcttttcatctgttaccttccctgtaaaactgagacgtacgaggggatagagtccaggttttcttgatgattgtatttctagcatctagcctagtaattccatagtttttaaaaacccggttctgcatagccccagggttccagaaaggtgtcctaagatcacccggtaggggcaaagagtgggcagggacccaaggaagaccccttccccacaatctgtgctttggtcaggtaggttttgatttgaactcttctatatattgggattcatgtaattcttttaaaaaggattcttctaga

SEQ ID NO: 266869 - DNA, 313 bp, Homo sapiens
atatcttcttgtggccccaggaaaggatttcttcaagctctgtcaccaaagatgggattactggctcttggtatctgtacacttaatttcactgagtctagccagactcagatctcagatggctgcattgttcacactctctccagctgtacgtgtgaattcctctttcaccacatttttttgtcaagatacgatactgcctttctctctgacttttgctagtcaaatggggaataatgtgctacttcatggtgattttaagttattgtcactcaccattagtaattttgaacaaatctttaatatacttagt

SEQ ID NO: 266870 - DNA, 400 bp, Homo sapiens
agagagctcaagtgcttttagaaaagaagttttgaattactactaataaatataaaatctcacatcaagtagtagaaatataaggagtaccttggtgaagaacagaaacatgttataattctgatgagtggaccaattacctatggcagggagagcccctcctttttagacgtgtccctgcaagtcttagttccacgcctgctctgggctgccctactctctccctccagatccttccacagtgtcggtctagaactgggcgtgtaataggcaactgaagtgatccgtggctccatgatataaagctccatggcactgtatgctgcggttgttaagtggagtgttctagaaataacatttaaatcttgttggttgatggttttgtccagttattccatac

SEQ ID NO: 266871 - DNA, 420 bp, Homo sapiens
cagggcacccacttgaacctgcctgcatggctggagcgtagcacttttgaaagcccttcctcaaggcacccccactctccttggggttaccacctcactcgccccagaacatctgggtctgtaaccagagactggacctggaatcaggactcttggctcaaaagggatttaactccccgggcctcagcttcttcatctgcacagtggatggtcagcctttccttttattgtcattgtggtgattctattatagtaattaccttaaaataaagaaatccaagacaaaacctgcctcacctaaacaacctcttctctcatcaaatccatgttgtcatgtgtccacaggactgtctactccttgcctatttgcatattcagtttctacctgtttgcagtcataaactagtttcatgcactgtg

SEQ ID NO: 266872 - DNA, 568 bp, Homo sapiens
cagggcacccacttgaacctgcctgcatggctggagcgtagcacttttgaaagcccttcctcaaggcacccccactctccttggggttaccacctcactcgccccagaacatctgggtctgtaaccagagactggacctggaatcaggactcttggctcaaaagggatttaactccccgggcctcagcttcttcatctgcacagtggatggtcagcctttccttttattgtcattgtggtgattctattatagtaattaccttaaaataaagaaatccaagacaaaacctgcctcacctaaacaacctcttctctcatcaaatccatgttgtcatgtgtccacaggactgtctactccttgcctatttgcatattcagtttctacctgtttgcagtcataaactagtttcatgcactgtgttttcatagcatctgtgttttccattttgcttcagtcttttttcttgctttctagcccccatctcaaatgcccttccagcccttccaaccagataatccggtttgaccccctggagtgtggccttcccatgtccttctccaggttcaa

SEQ ID NO: 266873 - DNA, 254 bp, Homo sapiens
aagtttttttttttaagtttgttgaacacctaccataaaccacatattcgctctatgctaaagataagatgtccttggacaacagtctcagttccttctttctagttatcaatatagagagtgtctcttctttgggtgatagtgggagtgtaaattagacctacccagagaacagggtaattccttaagagaaaggtggtgtcagtccactgcatcgatgacttaagcaagtgaggttattcagggcaagggaa

SEQ ID NO: 266874 - DNA, 180 bp, Homo sapiens
tggttgcctcagacaaacccaacaaaaatagcccaaaaatcagtataaaatattctttaaatctgtttaaggctatcagctaccaaaagaagtctttctgtgaggggcaaagaccttcccccacctcaaaaagaaaagggaagagtttttttcctttgaggcacttggtgattagtatcc

SEQ ID NO: 266875 - DNA, 303 bp, Homo sapiens
tctgttttccttgtcaccagactgtgtctgcttttacgtcgatgtagaagataaaggaagctgacttcaagacaactgcccttcctaataatgatgatgggatttggttgagtcacatgctacactcatattgcctctaactcccccaggatttatattcctcgaaactacatacaccgtcatatgttcatagtgtaattttgtcatttctacactttgtgtccgttcctgttctatatcttaataatttctggaagacactctctactttcttattaaaagtaaatatatttggcccaaaaa

SEQ ID NO: 266876 - DNA, 469 bp, Homo sapiens
acacaataacttaataaatggcatatttactatcatcgttttattcaaaatagttttgggatttaggctaacccggaaggtttaaaaaacccaaaataaaccataataatataaatgcttgggaaagggggcaattcattttatttgcaaagacattattatacctagaaaacccacaaaactgtattagaacatgttttaaaataagagaattaggtaaggtggcaagatataagataaatatacaaatataatgtaatttgtactagctacaactttgttgtgtatcaaaacaatcataccacagtggcttacaagagcaaacgtttatttctcactaactttacatgagggctgatggttggtgttgggaaactctcctccatatgttactctttttcctacacatcttgctgggtgtgctaagcatgcaagggcctaatcatttcctacccagccttttctcagg

SEQ ID NO: 266877 - DNA, 566 bp, Homo sapiens
gaatatatttgatatttttcaatccactgaagttattatacttgtcgatgctcaaattttcccatctttaaccagtgggaacctatttaagttggctcccaaatccttttgacataaccctactggcctttaaaacttccctgctttccgacatgataagatgttccaggctttctttacgtttcctaatccgacccaggcctggggttagccatttttccaaggcagaggttctcaaagtttggcccaggtcctcttaagagtccctgtgatccttttatggggtccgtgatgtcaagattattttcatagtaagagttatcactcagtatccatgtccccaaggatactgagggtcccaggacccctctcagatacccaaatccacagatgctcatctcccttgataaaagaaaaactgtagacaaattaaatttaacaaagtttaattgatcaaggaaaaagcaattcgcaaattgggccctcagaatcacagcaaattcagagagttatttctgcacagttggagagattttaagaatagaaaaaggaaactgaaatacaaa

SEQ ID NO: 266878 - DNA, 154 bp, Homo sapiens
accccttctccaccatcatggtgtgtgctgttgattatttctcccaccatcttctcacaaaatgtccaggatcatgcaattcctggccaagaaacaaaagcaaaatcgtcccattcaccagtggattcagattaaaactggtaatacagggctg

SEQ ID NO: 266879 - DNA, 446 bp, Homo sapiens
ctgacgtgtagaggcatgatcatagctcactgtatcctcaaactcctcctgggttcaagtgattgtcctgccttgacctgctgagtagccaccaccatgcctggctcaaaatggatttgatgtaccttaacctaccatgaacctcatagcttagcctggcctaccttgaatgtgctcaaaacatttattgaacaaattatcatgtatcgaaatatccatattgctttcacgccattgtgaagttgaaaaatcacaagttgaccattgtaagtcagagacctgtatgtctttatttcagctgtgacccagaggattgagataactttatggctgggtgtggtggttcacacatataatcccaacagtttgggaggcctaggcaggagcatcacttgagcccaggagttcaagatcagcccgggcaacatggtgaaacctcatctcta

SEQ ID NO: 266880 - DNA, 464 bp, Homo sapiens
attgtacatacaaaaaaccaggacagtgtgacccatagtccagagaaaaagtagttaatagaaacagcacttagatgatccagaagctggcattagcaaagactttataacagtgttcatactttgttcatgggcaaggacatagaaaaccaccaacagtttcatagtcaaactgctgaaataaaagataaagagaaaattttgaaagcagtcagaactaaggtcacatttcacataggggaatgatgatatgaatgatggttaatttcttatcacgaacaagggaggccacaagatatctttaaagtactgtaagaaataaaaatttcaacctaaaattctatatccagccaacatatacttacaaaatgaaggtaaaataaagacactttcaggcaggaggattgcttgagccaaggagttggagaccatcctgggacacatagtgagacctcatcgctacc

SEQ ID NO: 266881 - DNA, 1374 bp, Homo sapiens
ttttctgttttctcgccgctttgctctctgctttgttgcggtgcttgtgtcttctgtttctttatgttttcttgcgtgccttttctttcttcttttctcttttgtcttttcctcgtcttttgtttttggtttgttttcctttttcctccttctgttgcttgtttgtctctgttctctttcttttttgcttcccgcgcgttctgtatccgcgccccggcgcactgttatcgcgttccctggggctcctcctgttgctacattcccctggttgcccctctcaaccctctctttggaattttttgccacacctgcctcgttctcccccgcggctgtcttttaatgggtgggagatcccggcgcctgtgttctgcccccgcggtctctccttgggtccccctttcccccagtcaccttaccctcgtggcccccgcgccccaaaccaatgtctcttaaaaacctttcttatgcccaaccccccccacaaatttttttctctcttctctctctctttttttttctaggaaaaagaaaagaaattttattaatattgacaaccttggggattacaaatagactggatagacgtggaggcgttcttagtctcttaatgaaggacacatgatttggattgattacactaaattgatgggagggtcctttgatttccaggctataccatgtgctgatcacacttttgatcccgagtagctgggattacaggcagccaccgccaggccggctaatttttatttatttacttattttttcagacggtgtttccctcttgttgcccaggctggagtgcaatggcatgatctcggatcactgcaacctccacctccctggttcaagcgattctcctgcctcagcctcccgagcagctgggattacaggcatgcatcaccacgcccggctaattctttgtatttttagtagagatgggatttctccatgttggtcaggctgatcttgaactcccaaccttaggtgatccacccacctcggcctcccaaagtgctgggattacaggcatgagccattgtgcccggcccatttcatttatttttatgtgtgctgctgaagcaagcacttatgtgtaggaattgttcttcctgtgagcatatgttggccagcctggaccacataccaagatcccatctctttaaaaacacagattacgtggcacctggcacctggtcccagagacttcatttgggttggtcatttgaaacactagcctcccatcaatttagtgtaatcaatccaaatcatgtgtccttcattaagagactaagaacgcctccacgtctatccagtctattttgtaatccccaacggttgtcaatattaataaaatttcttttctttttccta

SEQ ID NO: 266882 - DNA, 987 bp, Homo sapiens
gggacttaaagctcataagggagagtggaatagctaatattgttagataccgaactagagctacagatgctgctgctgcattgtggagggaacagatcatactgggtggaaaaatctctgcttggaagggaaacactgtcaaagtctgtacattgtttatgtggtatgtggaatttttttttttaatggagctttcttgatgaaggtgttagagttggagaaagtggttgtctgcattatgatacattgcagtcttggtgtttttgttttaatatttcagacccgtaattagcatgttgctaacgcacttgttttctgaccacttgatggtgaaccagtgtaggatgtagtgcagtgggatgagtacatgagcagcaagaaatacatcctgtaatctgtatgcattgggaggaatatgctcctgcactcctcccccaggtcaagccagctgctgcagaaactgacatcctccagcaaatcctgaatgaatgaatgaaaacaacgtgatcgccctaataatgaccacaactgaacacacatctttggctgtattttatagaaaaggccaccattttctaacagattaatgccatatgcaactcctttgcacattttctagaactgtatgaaatgagaagtaacagaacgaacagaaaacagttacataaattttttagtgatttcgcttcaacagtgcacaaattgagttttgggattttcttgtagggactaagaggcataaaataagcattgcagattgtgtacagagggtctggtgggtgtgagtaagagaagtttcggcaattgctgcaacaacataatggccatctagtacctcctccccttttgtatataaacactaacatcttacaacggataatagtacaacttgtttttctgcatccttcaaaaggcttaatggcctaggaattacatgctccatcatcaagcagttttaataaaatttgtgatctggcttaaactatt

SEQ ID NO: 266883 - DNA, 441 bp, Homo sapiens
caaaaacaaaaaaaaacctttgttctgtaagacagtatagaaagttgggagaaaggtctactccaggatcaagacctcctgaaagggtctcgaggaccccaatggttcctggaccacactttgaaaactatggatctgaaaataatttaggattgcattttcctgtaatgccgcgtcttagcaatgtgaccttgggaactggaccaacaggacccaagggagagtatcaaaggcaaaacaaaggaaaatgaggacaacccaatactcagaaaaaaaaacgagtaattcatggattcacaacgggcaacaaactagatgactattaggaagagaagagcaaaccttatgatctcaaaatgatttcttgttcatttgcatcctcgcatcaatctagactttaagaaatatgtgatttttaaataaatgggtatatctgcataa

SEQ ID NO: 266884 - DNA, 477 bp, Homo sapiens
tgagaccatcgatcttaacatatagtaattgtcatgcataaaattttattgtatcaggcttgactgatgggactatcaaataatatattaggcagcattctttgtaataacaaaatattgaaaataatctgaatatccagattttctaaataagcaattgggggtgtagataaaatgtcatatttgtatgatggaatattatacaggcagttataagaaataaacttatctgtatagaacaacatagctctttttaaaatgttgagtgaaaaatgaaagatataagacatgcactattttttttaatatatacacttataccagaaacagttatttttttcattcatttttaggagtgggtacgtttgtattcaagtctaaaaagatgctgactaaatccatcaatagaagggaataagataagtgtagtggttaaaagagacattgttttatgaaaaggctagaatgaccaaaaaa

SEQ ID NO: 266885 - DNA, 332 bp, Homo sapiens
atcaaaagtatttatagaatgccactaggtgccaggcactgcatttggccttatcagctactatgattaattcttggttctcctctaaattattgcctcaatctacaaatacagattagagcacatcctatttgtatgctccacaactaacataatgcctggttcttagtggaaacttaatgtcgctgaactgtgttataataaaacatccagaaggcaggccgaatacgaaagcagtagcttcgcattaagaaaactacccctagccaattttcttagtcaaccaggccactacagtattaatgaaatcgaaatctgtcaccaataccaaa

SEQ ID NO: 266886 - DNA, 278 bp, Homo sapiens
aaaagaaaagggaggactacagatgggtatatactactccagcaatcccagagtctctgcttgggggatcagggcccacatcccatcttttgtgacatctacccacttgctgggacatactatggtgtgtggggttggagtgttgctccctgtctgccaagtggcagtcccatctgcacagccaaacactgctatacaaccctagagccttcttccccctgttcccactcccacccccagatcacatggaagagagcaatcgaggccagagctacaga

SEQ ID NO: 266887 - DNA, 428 bp, Homo sapiens
caggcttgagagcctctggcagtcctctggggtctgtctctttttctctcttctcctaacaaacctcgcctatcccatgccccattccattgtctctgatcttatcatatggctctgagacattctctcaggagagatagtttggccgagcattgtttggccatactcaaatctcacataaacctctgacaagtcagagtcaagtctacagtgtattaacttaataaactaatccatgctcatagatggctgggtgtgggggtgagataagaacccatcccagagttcttgtcccacaaagagcaaggtggcagatccttaccgtgaggatgacgtcacccacaagggcattctctaagacccttgtgctatatggatcttgggggaattggggccggtgttcattgacatcagtgatgttgaccatg

SEQ ID NO: 266888 - DNA, 454 bp, Homo sapiens
ctcttaaatagggattgtttctaaattaatctcaaaacagtcattatttactatttatggaattttttttaaaaaaaggagcaaaagtctcatttcagtgggaacttaacttggggctacagtgttttatttaacttttaccccaaagttgcaaagtgttttgaaatttttccctgtaaaataattattttaattcaatttaaataaaacccaccaaggagacttcaagctttaagaagtctagcttcctgtgaaatgtgagaggaagtcagcactcatttcagaaatctgattataacaatagctccatccctaaatgaggtgaatcttggaatctcttccattttattttattttatttttttgagatggagtttctctcttgttgcccaggccgagatcatgccactgcattccagcctgggtgacagagcaagacactctctcgaggata

SEQ ID NO: 266889 - DNA, 452 bp, Homo sapiens
gcctactactactaaattcgcggccgcgtcgacagaagaatcaacaccaattcttctcaaactcttacaaaatgtttaagagaaggaaacatttcctaattcactctgtgaggccagtagtaccccgataacaaaaccagacaaagacactaaaagaaaactaccaaccaatatattttatgaatattgatgcaaaaatcctcagcataacattcagcaacacattaaaaggattacacatcaagggccaggtgcaatggctcacgcctataatcccagcactttgggaggccaaggcgggctgatcacctgaggtcaggagtttgagactagcctcaccaacatggcgaaacccgcgtctctactaaaactacaaaaattagctgggcctggcagcgcgtgcctgaaatcccagctactcatgaggctgaggcaggagaattgctccaacc

SEQ ID NO: 266890 - DNA, 477 bp, Homo sapiens
ctaggggagaatctctgcgtgggaatgtcagaggtgacatgccttctgatgcttctcatctgcccaggtcaaacttactgacttgcttctaacgaatagaatgtggcggaagtgatgacatgtgtcttctgaggctagatagagaagacatctccctgctgccttgctctgtcttggctctcttactgtggcatgccagcggcatgcagtgaagacgcttcagcaggctgcagagaggtctgcagggagaggaaccaaggcctcccaccaacagccagcaccagtgtgccagctgtgtgagtccaccatcttggaagcattttccagccccagtcaagcctccagatggctgcagccccagccagcatatgactgtaacttcatgaaagaccataagccagagccacccagccaaaccactcccaaatttctgttctggtgtgagataataaaacactattgtttgagctgctaaat

SEQ ID NO: 266891 - DNA, 442 bp, Homo sapiens
cctccctccccactcccacgctttacttgctatgctaccccaaaagaaactcgtattagtaagcctcaggagctcaagggaaaggcttatttggtgactttaatttgtcactccttttgcatttatcacaaaatgatctcatcacaaaaaggactgaatttcacgcttttgctggcttgcaaacaagccagtttcttccctattgctgtccaacacagagaaagctctttatgtttctatgatcagataaaatctgtattgacgtttcttttcctgtgggtgtatttcccttctaggtatggagatttaaactatctgggcaatgctgtgtgtttgcagtttctctgtttcagtaaatgaaaagctccttggggaaggagaacatatcttttccagtaatgaagaaatatttattttcattttaaaatgatacatgctcatt

SEQ ID NO: 266892 - DNA, 517 bp, Homo sapiens
cacctagtttttgtaggaaaaaaggttacattacttgccgaagtgatgcagttaaacagtggcaaagacagacagaattagaaccaaaggattctggtctagggttaattccttatcttcatttctttacatagatgacttagcagtttctttttaacattagtgcaggatttggagtcagcctgcctaggtttcaatcttggtttcactatttgctgattttagataaattagcatctctgaacctcagtttcctcatcttcaaaaccaggataattagagcaactacttgcctgagttgtaaggataaagaaactatagaggctggcaaatagttaacacttagcgagtatactattattttctcaacactgcagtttttgcagaacttcaattttttactataatagtataacctaataatagtataacctttacagacactagaaatctgtaataatataaccaaaggtagaatataaaagactggaattctgatgtcaaatggaaataaatt

SEQ ID NO: 266893 - DNA, 162 bp, Homo sapiens
gtgggagggaggacaggtaggaggatgggtgggaggagagatcggagaagagatggaaaaatagatggcaggacaggagtgagggcaggtgggaggatggatgggaggacaggcgggacgatgggttagaggatgggtaagagaatgagtgagaggagagaa

SEQ ID NO: 266894 - DNA, 400 bp, Homo sapiens
ttagcttctctgttgtcagcccctgcagtttagctctgacagcaaacctgcacattttactcagcaaaaccaaggcccgatccctgcctcgccctcttgttggcagtccatgcagtggacctgctctcaaagatctcacccttcctcaggctgcagggcctcacccaaccacgattccttttaacccacagaagactttatgccgaggagtcctggaatatctccttttctccatcttgggacatctgtggggcggtttttccccctctagatgggggcatcaaaaactgccttgctttcctgaccttaacccatctcagtgcccatggggttgcgctaaacatctccagagaaatgtctttaaataaacagatttcatacttgagaggagaccagaaat

SEQ ID NO: 266895 - DNA, 435 bp, Homo sapiens
gaaacccaagacattacctgttgccctaagcctagttactagagcaaacatctattttgtagggagttgaaggcctgtggatcatgaccaactcagcattccactggaggctatatgatcaaacagcaaactgtttatcatgaatgcaggatgtgggcaaacttgcgactgcacctgccaccagaaggtttgctgggggcaatcactccctgacgccgtgctccttgaggttatctgttggaacatctggagactactgttcagagaatgcggtcgtgcagcctgcaccaagtcaagcagctgactgacaaccacctctttctccctatctcctttactcaataaatacgaatggagctagaagtacagggcccttgttcactagaagcaaggagccccctgatcccttctttcaaatatactcttttgtcttta

SEQ ID NO: 266896 - DNA, 139 bp, Homo sapiens
tcagttaaatgcacatgttgaaaatccttatttggatggaaacacaacagacatcagctagtccagagacagaaatgagatgggagcacattagcggtgaattgtgagactctgcatgatcccttcaggagactgcagc

SEQ ID NO: 266897 - DNA, 439 bp, Homo sapiens
agtgcactccagtaggaaaaattagttaatgcttgttgtccccaatattaaaaatccactttggccttcacatgtggtttttatggaaggttcctgccctcctaaatcctgactattaatctcaagctgtgggtatttgtcgatggtgaacacaggctttttttgtgagatagtcctgtatgtggtgagaatggagctttagtgatattaattctaaaccagtgaggcttaggaaaatcacaggcagtttaggatatttgtagcacttatgtaagagttggagctttcaatcagttcaaaatgaggaaaggatgattaacagttagtctactgtaacttttactcagccctgaacctcgattggaccaagaagttttttacatttccactttttgctgtacttttcttttgagaataactattaaagttatcagtttct

SEQ ID NO: 266898 - DNA, 562 bp, Homo sapiens
ctcaaactctctcctgctgtgtctgggagactgtgctgccagcagccagcttctgcatgactgacgatgccctgcccttatgccagggtgcccttgggggctccttgtcttcaccattgcctcacatttgccaaggagaagtcacacaggaagagaaacactggctcaaggtgttgccaatatttctccctcactttaatatgattttaattatgtgttttgaataaagaagacgggaaatgacccaggtagagctagctctgtgggtgggcagtgtgagtaaaaatagccagagtttctacttattgggcacctactatgttcactgcacttggctgcattaacttttcaggactggctgacagcagagcctggcctccattcattgcttagtgttgtgccaacaaattgtttacttaagagaggaatataaatattgaaacgttggggtgccatttagtatactgctcaggcattttggaagaattaatttgtcttccacatcaccctcaaccaaccccacaccaaagtgttgactcagccgttctgaagcccggattcc

SEQ ID NO: 266899 - DNA, 374 bp, Homo sapiens
tgaacccgggaggcggaggttgcagtgagctgagattgagccattgtattccagcctgggcaacaaagtgagattccatctcaaaaaaaaaaaaaaaaaaaaaaaaaagaaagaaaaaaaagaaaaagaaaaggacttcttggagggcaaagtttgagggaagagttagctagctagagaccttccaaactgtgctcaggcatttggattttaccctgtgggtgatagggaactattgaaagttttcatttttttctttttggagacagagtcttgctctgttgcttcaggcaggagtgcagtgagccatagtggctcattgcagcctggaccccctgtgctcaagcaatcctcccacctcagcctccagagta

SEQ ID NO: 266900 - DNA, 463 bp, Homo sapiens
atttaaatgagatcataaaatacatactcttctgctattagctttttaaaaatttaaccatatagtcagcttttcttataagtacatactatttttaatgactgtataatattgatcataatttaacaatcctctaaatgaacatttcagttatttccagctctttaagaaaagtatttaatagggccgggcgcagtggttcacgcctgtaatcccagcactttgggaggccaaggcgggtggatcacttgaggtcagttgaagaccagcgtgaccaacatggtaaaaccctgtctctactaaaaatacaaaattagccgggcatggtggcacatgcctgtaatcccagctacttgggaggctgaggcaggagaattgcttgaacctggtaggcagaggttgcagtgagccgagattgtgccattgcactccagcctagacaacaagagcgaaactccatctc

SEQ ID NO: 266901 - DNA, 372 bp, Homo sapiens
gaggtagctatccctgtggtggtatgagatagtccccaaggcatactgttgattgtatgtatgtgctgggagaagcaagatgtagtaacgggtgtatagaatgcttctgtgtgttgggggcaactcagggagtcatatatacctgcatgatgtatccctcgccctagtctacctctggaaggatatgcaagtaactgataatgtttttgcttttagaaaagggactaggggttaggcgggggaaggagactcttcgttgtatactcctttggacttttagaattttttttaactatatgcatgcatgacctattttttttaaaagacatcttttatgtaataaataaaagagctgcagtgcgacagattatt

SEQ ID NO: 266902 - DNA, 402 bp, Homo sapiens
aaatattgttatgtaaatgaatctaatgtgtctctaaattcattaagtgggttggagggttactagccctggagggccccagcgaaattggcagagacattttcactgtctaggttgtggttgttgaccttttcttctgtcttgcttaccctttcctagggaggaggcaggaactcgaggggcttatcggagtggcagaaggaaagcccccactgaaaatgcctgttatgcgccttctgggaaccgtcctcctctttcacttcctcccagccccagctggaattcccaaatgtagcctaaaccagtaccatacctgctagacaaattgtataaattagacatccctaagagggaggagaattttggatggggagcaaataaaggaaaaggaagctgccaaaa

SEQ ID NO: 266903 - DNA, 573 bp, Homo sapiens
gctgtatccatgaggaaagatggcaagttttactgtcagttgggtgtggatatcactgtcacaatctcacctgtgcgctgaaccccgttaggacatttaatactacccaagatcattgtagactaggaatgagagccacaatttgccccgagacctttatgctgctccctaagcccaggtagaaaagttaatatttctcggattaactgggccagacagaagagtcctcacttgtctatgagctgggtttagaaatgagtcaccatcccaactttggacaggtgtttacatttgacagtcaggaatcaaactgtggattgcatctgcatgtgagacacaagacctcaccaatggtatgagaggaaacacttcctgtatgttgagtctaagtacgtgattcacagtctcaacagtggactggagccacgcgtgaaagcctcaatccgtcccgcagcctgtctccttagcggagtcacagtctcacgagtgtgctgagtcttggtctgagagtcaccaacccacctgtggaccggattcacatatgagagtcaattttccaactttcaactgctt

SEQ ID NO: 266904 - DNA, 553 bp, Homo sapiens
aaaggattcagcaggatgtaggttgagaagcaattcacattctcaaggattggacaacagtatatccttacggtcttgctccagggcaatgtgaatcctgctccgtgttacaatatagcctttctggaaactctggaatacattacattcgtccactggattgatgacagtatgttcatgggcctgataagtgagaaatatagactattctgaatgacttactaaatcacaaacactgcaggtggtgggagagaaacgttacaaagattcagagatatgccatataggtaagctgtcaggggttcaatggtctggagcatgtcagtgtatcccctccaaagctccaagctattgcagctcatacctcctaccacgaagaaactcagagcttggtgggcctcctcaggttaggagaatcaccatggttgacattctgatgaatgtgattctaggctttgtaacgtgtgtgtgtttgggagacagggagtagggaggcagtgggtataccatcttaataaataaaaaatgcttatcaactttttacacttaaaaa

SEQ ID NO: 266905 - DNA, 601 bp, Homo sapiens
acacacgcaccctgttagataaaatttatagaaggtcattggtttggattgagctcctgcactaggttcaacagaccaaaccaaaatggagacactcatgctaaagttccatgcttccaagccaaaactaagttgatatctgatcttctgagatatcaggagagagataatagccaaatccccaaacaacccagttttagcccacctgataaaggaagtcccctctactttaacctttaacttagaaatttaatcaagttaatcaatttaatcaactagctttttgttttccgtttctgattttctcagccctttgtctctgaaaacaacctctgctcagctcatcggaacactcacgctattttccataattagatgttgtttgattgtagattcacgaataaatgccaattaagatcttctcactaaatgtgttgcaattttgtcttttgacaatccttaagtgtcatgatgcctacgatttgttttaatctctttaagtttaaaaaaatacagcaagtatggcaaaaataatcattggtgatttgggtgacaggaattcctgtattcttctctcacttttatatgtgcaaacgaattt

SEQ ID NO: 266906 - DNA, 448 bp, Homo sapiens
cggctcattcccgcggcgaggcatatcccttggcatggtgccactgcagcccagctcccagcccccccgccatctgtcatcagcgctctgcctactgtaagtgtgccgacacagtacacggaggctaacaagtagcaaatggaggggaagaaaaaacaaagccactgcagtcagtgggagaggtggctagggctttgacataaactgacaaaaagctgggaaatttaaactgaaagtttgccctcaagactttcagctgtgagggttggactggggaggagggaagggtgtacggtgagggaggttggcagggagcagtctgcaaaaaagctggtgagatagagttaagtaggccggctttttccagactctatgaataatatgagacattacttaaaatccattctgactgttcatagattgcccaagaaggctttcccttacaaga

SEQ ID NO: 266907 - DNA, 414 bp, Homo sapiens
catcaaggatttgaatggaactgagtctggaatgaattatgccacattgctaaatttaaaccaaacagttgatctttgggagctgtttagctatcagttaataagaccattttaaaatggaatacctatcaatacgtggcccccagacaaatacctatgaacttttagtgcagcatagcagtctttagagcacacatgtcttgagaactgactgaggaaatgaaattctgaaaaaaatgtcactaaagtccagagaacatatactgtgaaaaatacacttcagtaaatcagaaaatagtggaaggacagcttcatggctttcacggaattgtgaacatgagcagttgtgttttttcacaatggttaaagtgttggattaaagctatacgtaattgagaacctgtattacagcta

SEQ ID NO: 266908 - DNA, 306 bp, Homo sapiens
ggaagcaaaggcacagaagagctgaagcgatttgcccacagtcacaagggcactggactttaagggccaagagtgaagaccattttgtcctgttctctggcacacagtaggcactcgacaactatttcaaaactaaaggaataagcaagtggcctcatggctactgaggacagagtctggaactgaatgcagggcactctgaagctggagctcacttctacattattgcctttctcatgctactagcaggcactgaatgtgtcagtgagtgaatgaatgaaaccaagatctcaggatcccagtcaa

SEQ ID NO: 266909 - DNA, 298 bp, Homo sapiens
aaaaaggaaggaaattctgacacatgctacaacatgaatgaaccttgaagacatcatgctgagtgaaataaactagtcacaaaagaacaaatactgcatgagatcccacttgtatgaaatacctggtgtagccggagtcatagagacagaaagaatggtggttgccaagagctggggagttggtgtttagtgggtatggagttcctgttgggtaagatgaagagttctagagatggatggtggcagttgctgtccgtattgcaaacgtgcttaacacgattgaattgcacacttaaag

SEQ ID NO: 266910 - DNA, 496 bp, Homo sapiens
ctccattgcactgactctttcccacaaaatgggctagagatagcagctctccttatgtatttaagaaagaatggtcaaaaaatacaattcacattttattctggtatataccattttgacagtgtttcacaatgtaggtaatatgaatgggagtatttaaacacaatcctgtttaatattcttagccagtacttattaaatgcctaccaagcctggcattgttctagagacctcaaaatacacctttaaaaacatattttattgacagttgtataaatgaagaaaacaagtctcagaaaattaaagtgacttgcacagatacacaagctagaaagtaataaaactgaattttgaacccaggtttgtcagactctaaagtccatgattttctgctccatgtggccaacccagttagaaaggttataaaaaatcttaacagtttttcagcccttctcacacttagctttaggattaaaagtattggtcatgatttgca

SEQ ID NO: 266911 - DNA, 594 bp, Homo sapiens
atctctgtttgtttttaaagactgtttcaaagattaaatctatacaaccacttttatgaccaaaaaagttgttgtgtcccaagtgtcctaattagaaaggcagctggctctcctgcagctcccaggcttgtgtagtcaagtgcagtgaactgggcagtaatcagctcaggaccattggctctttcctcctctttcagctacagacacatgccctggcttttgcattgaccttgctttgttagttctagactaatttatccttttgtcagacactttcccttttttaggatactcacaacagagtccactttcagctattggaatacattttaccataaagcccccaaggctttctacccataacaccaacacaaaaaaccaattaagttgcagaggggggaaataatcacaaacttttggcaacctgcttaatgctagacgctctgttttcactggttattctgagtgtcatatgcagatgcagatccaagggagacagggctaaatggtggtgtcaagaattcctcccacaccccaaaaattctttccaatatttgattattaaaatatctatcatttctccacaaagtgtct

SEQ ID NO: 266912 - DNA, 895 bp, Homo sapiens
tgcaggagggagcggcgggggaggagggggtggccaggcgcgcggggaggtgactccgtcagtcacagctgctgtttcggcgcggggccgggccgctgccgcgacgtgtggaggcaggagagcgatgattgccgcaggagaagtgcgggcgcccttcacctggggcccctcccgaaccgcccccgggcccatgcccctccagggcccaggagcgagccagcgggagggcgagggcgagcgctcctggcgaggacagattaaggcgaacccccagtcagcggacatttgagcggctcctcgccgcgtctctgcccccactccaaaccggactcgacgcctgtcccgggccgtgacgcacgcaccggaggaaaaagtgcttctcggctcgctccctctttggggaagagagctcactccccatgcgggcgcgggacactccatctctgttcctgccggtcgggtccgcaaacaccggggatcccagctgcggcgcccaaagggttaacgcaggcgttcggccagtgcaaaccggcctcgcaggatccgcgcttaaaatccgggtgttttcattttgggtttgtttcttctactatgccaagctggtggctctcttttaattctcttgtaacatctcaaccctgcacccatctttcctgaggggaaaaggaaacgggataacttgcggtatttcgatgctcaaaggtaaccggcggctctgctccaaccttcaagagattttgcaagttgaaaaaaaaaaaaaccatccttcgtaacattctaccttaaaaaaaaaaaagcaagtttcccttcttgtacacgccttttacacagtaaagatgtgtatcttacctaagataccgcgcttcatcttcatctaatctttatttgaactcac

SEQ ID NO: 266913 - DNA, 843 bp, Homo sapiens
tatagcaggctgtactggtcgggattctaggatggccgggccgctgccgcgacgtgtggaggcaggagagcgatgattgccgcaggagaagtgcgggcgcccttcacctggggcccctcccgaaccgcccccgggcccatgcccctccagggcccaggagcgagccagcgggagggcgagggcgagcgctcctggcgaggacagattaaggcgaacccccagtcagcggacatttgagcggctcctcgccgcgtctctgcccccactccaaaccggactcgacgcctgtcccgggccgtgacgcacgcaccggaggaaaaagtgcttctcggctcgctccctctttggggaagagagctcactccccatgcgggcgcgggacactccatctctgttcctgccggtcgggtccgcaaacaccggggatcccagctgcggcgcccaaagggttaacgcaggcgttcggccagtgcaaaccggcctcgcaggatccgcgcttaaaatccgggtgttttcattttgggtttgtttcttctactatgccaagctggtggctctcttttaattctcttgtaacatctcaaccctgcacccatctttcctgaggggaaaaggaaacgggataacttgcggtatttcgatgctcaaaggtaaccggcggctctgctccaaccttcaagagattttgcaagttgaaaaaaaaaaaaaccatccttcgtaacattctaccttaaaaaaaaaaaagcaagtttcccttcttgtacacgccttttacacagtaaagatgtgtatcttacctaagataccgcgcttcatcttcatctaatctttatttgaactcac

SEQ ID NO: 266914 - DNA, 823 bp, Homo sapiens
tatagcaggctgtactggtcgggattctaggatggccgggccgctgccgcgacgtgtggaggcaggagagcgatgattgccgcaggagaagtgcgggcgcccttcacctggggcccctcccgaaccgcccccgggcccatgcccctccagggcccaggagcgagccagcgggagggcgagacagattaaggcgaacccccagtcagcggacatttgagcggctcctcgccgcgtctctgcccccactccaaaccggactcgacgcctgtcccgggccgtgacgcacgcaccggaggaaaaagtgcttctcggctcgctccctctttggggaagagagctcactccccatgcgggcgcgggacactccatctctgttcctgccggtcgggtccgcaaacaccggggatcccagctgcggcgcccaaagggttaacgcaggcgttcggccagtgcaaaccggcctcgcaggatccgcgcttaaaatccgggtgttttcattttgggtttgtttcttctactatgccaagctggtggctctcttttaattctcttgtaacatctcaaccctgcacccatctttcctgaggggaaaaggaaacgggataacttgcggtatttcgatgctcaaaggtaaccggcggctctgctccaaccttcaagagattttgcaagttgaaaaaaaaaaaaaccatccttcgtaacattctaccttaaaaaaaaaaaagcaagtttcccttcttgtacacgccttttacacagtaaagatgtgtatcttacctaagataccgcgcttcatcttcatctaatctttatttgaactcac

SEQ ID NO: 266915 - DNA, 811 bp, Homo sapiens
ccaggcgtggtggcaggcacctgtagtcccagctactcgggaggttgaggcaggagaatggcgtgaacctgggaggtggagcttgcagtgagctgatatcgtgccactgcactccagcttgggtgacagagcaagactccttttcaaaaaaaaaaaaaaaaaaaaaaaaaaaaaagataaaaaacctgtcttcctagaaagtttcttctttgtggctaactagggtgccctgattttgatgcattcttgggtgaataaggggtaaatggagtaagtgccccctaagaggtcaaccaattgaaaatatgtttgagaaaaattacgagagcatttaaaaagagaaaattaacacctatgtcaccaatactttttgtgtggtttgcttttattctctttatacattaatctaacacagttgtacgcagttgagtttataatataatagagttttgtgtcctgctttttaatttacttttcatgagcatcgttccatgctactagaagttctttgttatcattttaatggctctttgtcagtatctggtaccatactatgccataaatctcactggttgcagttgaataaagaagtttatgaaggctcccccctactctggaagaggcttcctcacagcacactcatgtccttaggtatcactgggggcaggtagcatcgatctccttgtcccatttcttcccactcctcttaaaaacacagagtatagtttttctgtatctgtaccatcagatgccactgagatctggccatgatgttccgttacgctggaatggaattggggtaccgagctcg

SEQ ID NO: 266916 - DNA, 467 bp, Homo sapiens
agtcggtaccaattcatccagcgtacaactgtggtttgcttttattctctttatacattaatctaacacagttgtacgcagttgagtttataatataatagagttttgtgtcctgctttttaatttacttttcatgagcatcgttccatgctactagaagttctttgttatcattttaatggctctttgtcagtatctggtaccatactatgccataaatctcactggttgcagttgaataaagaagtttatgaaggctcccccctactctggaagaggcttcctcacagcacactcatgtccttaggtatcactgggggcaggtagcatcgatctccttgtcccatttcttcccactcctcttaaaaacacagagtatagtttttctgtatctgtaccatcagatgccactgagatctggccatgatgttccgttacgctggaatggaattggggtaccgagctcg

SEQ ID NO: 266917 - DNA, 444 bp, Homo sapiens
ccagccaaaattaaattttaaccagttagcagtttcctggcactttgcccataacaattttaaaagttgtggttgagcactgcatgctagtggtatattacaaaactccatgctgccaccatagatgaacccaggagaagttctccttaatcaagtttccattttcccctcctaagtcctcgaaagagcaagacgactccatgctttgctccttcgtagtctagtagtgactctggaactccaggaacacagcttatagactttagccccagctccccacataagggtctggaggctgagtataagaagggccaggatccatgctgggaaactgcttggtccatgatggtgatcctcaaggcaataaacaggactgagacctgcagaggagctggcctgactgcagaggacaaaagcaggggtgtgagcaggtaaagtggaggt

SEQ ID NO: 266918 - DNA, 407 bp, Homo sapiens
atcatcacttcatgcaggaaattagcctcctgtccgtggtgcatgtgccattaggaccatgtgtcactgagtggactggcatgggggtggcggatcaagttaagagtgtggatggaggccgggtgcggtggctcactcctgtaatcccagcactttgggaggctgaggcgggcggatcacttgaggttgggagttcaagaccagcctgaccaacatggagaaacctcatctctactaaaaatacaaaattagccaggtgtggtggtgcgcgcctgtaatcccagctactcgggaagctgaggcaggagaatttcttgaacccgggaggcggaggttgcggtgaaccaagatcgtgccattgcactactccagcctgggcaacaagagcgaaactccgtctcaaaaaa

SEQ ID NO: 266919 - DNA, 417 bp, Homo sapiens
aatgttggtctttctttctatctggaaaacttggtgtctttggaacacagtattttcattatagagaccaacaacaatacaaaactctttaaagtttaaaagcagggagatttattataaaaggaaacagggaagctcaggaagccctgtcacaagctgtgccttccaggaatctcaaagttgtcactcaagcacacactcccacttctcttccaacccacatagtgtctcatccttgttttgcttttctatctgcttcattctcaaccctcgagggaagtagggcaagtattattacaccagtttacaaatgtctaaggtcagataactgctaaatttagaacttagatgttgttaattgaaactttatgctcctattttgaccccatagcagtgttcaaaatgtgatggagaatg

SEQ ID NO: 266920 - DNA, 363 bp, Homo sapiens
tacatgccaccacactcagctaatttttgtatttctttgagagatagggtatcgtcacgttgcccaggctggtctcaaactcctgagctcaactgatctacctgcctcagcctcccaaagtgctgggattataggtgtgagccaccgtgcccggcctaagttcattagctttctacgctcaagtcttttggagaagtttgagatgtgacagcagcaggcatcagaggctagcagctctcccccaccatgaagaatttttcccattcagattccagcttccccctctcacaccaccccagagggcatggagaagctggctttgctcaggaaccacaataaagtgtagtttgttatgtgtgaatg

SEQ ID NO: 266921 - DNA, 176 bp, Homo sapiens
ccaaacacgacatttcctactcttgtttttgaagagttctaacacttcatcagttttcaagtgtcagtagagagtgggcataaaaccacaatttcaggagctgcattctctgggtccagatttcatctttgctacttattagttgtataacttttggcaacttaacattatatgcc

SEQ ID NO: 266922 - DNA, 295 bp, Homo sapiens
gtgggtccatatgcacatggtcttattcctagcctcgtgctttctcctcatcgtggttatcgcccttgacactggggcaggaaagatcttgtgtgtggagagaatgatgtaccgaatcacaaaggtgacggagccaggccaacagctctgaatgcatgcactctagagggctgccacaggtccagcccgtgcagcttaaatccaaagggtgtcctcaagcatgcaaggtcatttccaaggctaggcccgccgaacagcaaatgggggatgaaaggtggatcgctggaaagtggaa

SEQ ID NO: 266923 - DNA, 385 bp, Homo sapiens
ttttgtattttttgtactttgtatttttgtaattttttgtattttgtatttttagtagagacggtgtttcaccgtgttagccagagtggtcttgatctcctgaccttgtgagccacccgcctcggccttccaaagggttgggattacagacatgagccaccacacccagccatatttggcacctttctaaggtatacccatacattttaatcctcacaactacccaccctaaatctgcatttaactggtgaaaattgaggtacagagtaccagagcaatcaaacagcatacccaagattatatatctagcagtctagttccagagtttgtgcttttagccacaaccctaaactatgattataaaaattagaggtgaacaaattgc

SEQ ID NO: 266924 - DNA, 385 bp, Homo sapiens
ataaataatactaatagctgctagctgtagtaatagtagtccatttgtcttagaactcttttatgcacttgtatttttccaagtgaatcaagctagaataaagtttgtagcgtctctattatacttgtggtctagagatgtgttagaaaaaaagtaagtaattttcttgtctattataatgtactataaggagttatcaagcattaatccagctatgatgctcttaaaattcccaaatctctatgttcaaacttgtttaatttagaggaatgactttggtgggcagggtggctcatgccagctacttgggaggttgaggtgggaagatcacttgaggccaggatttcgagaccagcctggggaatatagtgatatttcatctcta

SEQ ID NO: 266925 - DNA, 345 bp, Homo sapiens
acagtatttttgtaaagttactgtttggaaacttatcttgttatcttgtatgtgtattgcatagaccaagaatctgattgaaataacatggcaacaatattgccaccaagaacatgcattttaaccacagcacccttctattgcatagtgcacatgtccaggaattgagctggcttttactaaatgaatattttgttcacttgtatccagatcacttgggactgtgggcacattgggaatttcacctcagtctttgtctccttgtcctctgagatggtacaagtatcatctaaaaggatgtataaaacaggtatatgagagctgctttaccccctcccacccaaa

SEQ ID NO: 266926 - DNA, 291 bp, Homo sapiens
ctcaccctcagcaggaccccacatcccacattactggcaaagtgaagaggattcaaggctctcctgacaccagttcttgaactataaatgtgtttggattcccagaggtttttacactctactaacatttatgatttgtgagagatacccgttccctgaggggcatgcatcatgcacaggaaaaccacaggatctgcgaaatgcaagatgacccaacttccaacagtgttaatcaatggagtagtcatgaattactatgtactcaattaaactttgttgcaaaaatcatga

SEQ ID NO: 266927 - DNA, 501 bp, Homo sapiens
  misc_feature (498)..(498): n is a, c, g, or t
gtcttagaaatcccactggcacccgagcaccccactggctgcaattaacctgttcaataataggtcagcaactttgtagaggatgtttgcggatagcattctactgggtgcactagtactattgactttggtctatagaaagcctgatgtgtccccagtggcagaaaaaagctaggagcaaattctgctgcatcacagaatccttaggctagtgtgacatttagaggtcacctggcccttccatttgcctgcaggcaggcctggacataaaccagcctagacaggtaagaatcttctctttctctgccttcaaaaacttttgttcacagaaggacatttcatatatacccttagtgtctactattcctcaaccctgagacagttctcccttagagctcatctatattcctcttgttcccagaggttctctgatttgtacttccatgaagatggcaggaagaaccctcatgtgttgtactcaatggcgttctcgatccngac

SEQ ID NO: 266928 - DNA, 481 bp, Homo sapiens
aatagtttctccatgttgtgtgacacagcagcccctgtcttatcatagttgtcttccctccaccacctgtaccagagatgttggatatgttggaggtgaaggtgtgcaaggtttttaactaactgttctaattaaaggattctgcaggaaagaacatgggtttacaaaagagaagcttttgtattattagtaattttttttctttgatgaatttatgtgcttagtttggagaatcgagagttggctgggaaaagatttctgaggagttaagggactctggtgctgtttgggaaaacatttgctgtaactaggtttagggtattcagtctctgccagtgcttaggagctatatttgccaggtgatttccctgtcgcagggattagccagtgatgtgaaacatttgattaagggactaatagaaatctttcctggggtacatgagtggtggctgttactggggtgccccctcctcaactcttt

SEQ ID NO: 266929 - DNA, 453 bp, Homo sapiens
atcatctaggaggggtttgcttctagttaaatacatttagctcctatccgagacctaccaaaataattgatggggggccaggacactgagggtggcattatttgtcattgtttacactactcaggtgattttcagatgaaattactagatttgttagccaggcatgatggcgcatgcctatagtctcagctacttggggggctgaagcaggaggatcacttgagccccagagatggaggctgcagtgagtcaagatcacgccactgcactccagcctgggtgacaaagtgagaccttgtctcaaaaaaaagaaattactagatttgtggccaggagcggtggtcatgcctgtaatcccaacactttgggaggctgaggcaggcagaggtttacttgaggcagatcacgccaccgcactccagtctgggggacagagcaagactccatctcaaa

SEQ ID NO: 266930 - DNA, 351 bp, Homo sapiens
gttaactccattgtaccctcatggccacccttaattctcctcaaacagctgagttcaaggactgctggaaacaggaggagatggggctctagatctaggcacaagttaagagactcagttcctgaaaactaaagaggaaagttgtgttaggggatcactgttcctgtgccagagatgacaggaaggagccaatcgacacagttaatgatagacaatctacataattgttccctggtcactacatggaattgaaagataggggaaaaaagcaggtaagtgacgattccctcagctattccagcagcattctcagtttcttctgaaactcaatcagggccaagtagatgcgtc

SEQ ID NO: 266931 - DNA, 405 bp, Homo sapiens
caggcaccccctttaggctagctgggtttctctggcttagccccatcactgtttctggccctgtaggaatcttcttcactggcttacattgctgtttgtcaggaactgaccccatttcagcagagtggatcgtattattggagtcaaagctgtatgcaaagccatgacatctctgctctattatgaagttattcattactatttcacattcatctctgtcaaccgctctacagtcactttcagaagccatgcctctagcattttcaagcagcaagctggccaggactattaacctcattctgtagatatttaaataaaagcccaaatttggttaaattgatcttcatgtggtcttttttgggtcaagcagccgctctccaatttcattttttaagtcagagggag

SEQ ID NO: 266932 - DNA, 399 bp, Homo sapiens
tgccttgaaaatagaatgtatttcttatttattttggtacccccacagatctcagaacattacctgacatataacagatgctgaataaaggtttccagggttggattgcatctgattaaaattaagttgaactgaacaacatattaccttgaatttcagaattttgcatttctgatgatatctggggctcagatgccatttacctcatgccagatgacacatggcctcagttttcttcacaggtgtccatgtctagccctgtaccaatttcatcctaaacaactgcccatattcccattaatgtgacataatcattagcatatataagttcctagagaactgctttctatctcatgtctttattgtagtcaatggagtatactcagtcttttaggaata

SEQ ID NO: 266933 - DNA, 433 bp, Homo sapiens
tgttgctccttggctcctgaacactgtattactatgcagaatattgtagacagttgtaacacaatgataaatatttatgtatctagacgtataaatagtataataaaagtacaacataaaggattttaaaatggtgcacctgtggccaggcacagtggctcatggctgtcatcccagcactttgggaggctgaggtgggaggatcacaaggtcaggagttcaagaccagcctgaccaacatggtgaaaccccgtctcttctaaaaatacaaaaattagccgggaatggtggtgcgcatctgtaatctcagctactcaggaggctgcggcaggagaatcgcttgaacctgggaggcggagattgcagtgagccagaatcatgccactgcactccagcttgggtgacagagcaagactccatctcaaaaaaaaaa

SEQ ID NO: 266934 - DNA, 502 bp, Homo sapiens
tcttcctacctcttcttcccttagatttctttccttttttccattcttcgccttaaaaaaaaaatctacttcctaccttcatgtatctttcctaatcatgatattgaattaaagcacacttaaagtacattgctcatttatgtctttaattctcatagaatttatttttgaatacagtatggcattaggattctaactttttaaatagataattaaccagagcactatttcttaatatgccattgttttcttcttcatttgtagtgacaataatgattattattgagagcttgctatgggcaaagcagtgttttgagaggtttgcctgtatttaaattcctggttgtgtttcttgaataaaggtcttcctcattttggccaggcacagtagctcgtgcctgtaatcccagcactttgaaaatgccaaggcagaaggatcacttgaggccaggagcttgagaacagccttggcaaggtagcaagaccccggtctctaaaaaaa

SEQ ID NO: 266935 - DNA, 468 bp, Homo sapiens
agccccagtctcattttagaagatcagttgatcaaaaatattttctggtgtcattatctttagcattaagggattggggcagaggagggaaggggtgacaagtaaaagagaaaatagtttgaaaatataaattacttctacaaagtttagtgaaactgatttatggtgggtaagaaaagcaaaaatgggccgggcacagcggttcatgcctgtaatcccagcactttgggaggccaaggtgggcggatcacgaggtcagcaattcaagaccagcctggccaacatggtgaaaccccatctctactaaaaatacaaaaattagccaggcatgatggcgggcccctgtaatcccagctactccggaggctgaggcaggagaatcgcttgaacctggaaggcggaggttgcagtgagccgagaccgcaccattgcactccagcctgggcgacagagcgagactccgtctca

SEQ ID NO: 266936 - DNA, 399 bp, Homo sapiens
ctctcccttattttcttaatcatattttttctctagcttacgtaagagtacagtatctaatacatacacaaaatatgtgttaattgactatattattggtaaggctcctagtcaaacgtaggttattagtagttaagtttttgaggtcaaaagttatacaatgattctttattgtgtaaggggtcagttctcctaacccccgaattgttcaaaggtcaactgtactatcagttttcatttaaaatatttggtattgttacaataataaaagcatacaacgagacatagtccaaaagacactaacatgcatgatcatcggatttatcataaatgttcaactgcaaaacaagggagagagaggaagatggccttttcaataaatgatgttgaacaaattgc

SEQ ID NO: 266937 - DNA, 1413 bp, Homo sapiens
cctacatattctacttggtatattgaatttttgcagctagcagatttatcgtatctgaggccatagtgaatagaagagctgcaaaagagctttagagactgcaaaaccagctcactaataaatgaggaactttattctaatttactaccaggggctgaagtagcagccaaagaaggagacaaattctaacttcatgatctctagttaggtgtctattttcctgcatttgctaaaggtaaaaatcgctacttatggggcttttgtcatacttcttaaccaaacttccctaacttctgaggataaaaaccataagggcaatcttattcttccaaagcagttccctggtgccactttcagaaacagagtattgaactatgggtctgacccagtgtggcactgagtgtgtgtgtgtttgtgtgtttgtgtgtgtgtgtacactgaataagccaaaacgtgtgccatattctaggtttctgctttacttaactggcaaaatttggtgctgtaagggaggcagccacaaaaccagtgatagcatttgttagtatcatcttagttctcttccctcccctaggtagtttataaagggtgatttctgaaacccttcacaaaagaaaagctcaagggtttacattcaactgtgacagcactatgaattcattaagaagcatgtttcaggttgcactgtaatttccctatgtaatacaaacccatggaatctgacataagctgattgctcatgctggttgttttatttacatttctgaatggaaaggatttcaatactcataaaatatctaactggcttatttttcatctgttctcccagagaagctattataagataggcatagagacagaagtctcaacttgtataactggttaagcaaccagggaaatgttattgctcaaaatgcaattttaaaaaattcaatatggaacttgaggccaaaaaaacagaaggttactctcaatgccatccaaaagataaaagttaaaaaaaaaaaaaaaaaaaaaaggtaactatgctcattattttcaaccaagttctatggaggtggtaccttcacaggagctcagtggaactggggtttacttacatcttttttctgggaacctaatgttagcagacacagttgctagtttgaacaggaatgcagatgaatggatgaaagtgggctccctaccacccagaaatatgaatgtgcctccttaccaatatgctacaaatcagacctctgaattagaagatgccatcatgcaactaacttactatctggagatgtgtattttgttaacctaggcaaagaataacaatttctgcttattccagtaggtgtgacaagctcagagaagtgagcgacaagctagagaagtaataattaccaataaagtaaattccaaagccgaaaa

SEQ ID NO: 266938 - DNA, 410 bp, Homo sapiens
ttacagtcttaggtaatatcttatggaaattcatgcttttgttcaccagaatttgtgtacaagaatgttcatagcagcactataatgtctataaactggaaaaattcaaacatccattagaagtagaatggataattatatggcagtgtactcatatactgaaatattgtacagtaataaaaataacatgctaaacatgatagcatgaacaaatgtcacaaacatagacacaagggaacttataaagtgtttttccatttatctggacttcaagtaacaggcaaagctaaaatagagtgtttacagatgcgtaaaatggagtgtttatgaatgcatgcttgggtggttaaagtgtaaagaagagatagaatataattagcataaaaatatagtgtttatctttggacctg

SEQ ID NO: 266939 - DNA, 245 bp, Homo sapiens
aaaaattcacgtggaatctcatggggccttgaatagtcaaaacattattattgaaaaagaagaaatttggaagcttcagacttcctgcttgttacagtaatcaaaaccttgtggtactgtcataaagacagacatacggaccaattgaatagacagtccagaaataaacccttaagtatatggttaaatgatttttttttcttttttgagacagagtttcgctcttgttgcccaggctagagtgc

SEQ ID NO: 266940 - DNA, 359 bp, Homo sapiens
atagttttcttgccaaatatatttaaacttaacctaattatgacagagcaatcaaacaaatccagaatgttaggcattctacaagacaaatattctggacccttcaactcttaaaaaatgtcatgaaatacaaaaacaggctgggggaatgctgttctagattaaagaaattaaaaagataggcccacctactgtaatgtgtgaccttaattggttagccgggcatggtgacaggtgcctctaatcccagctacttgggaggctgagacaggagaactgcctgacccgggaggtggaggttgcagtgagccgagccgagatcatgccactgtactgcagtcttggcgatagagcgagac

SEQ ID NO: 266941 - DNA, 460 bp, Homo sapiens
aagatattaaaataattttaacaagtagaaattctgaagctgtaaaattcaactaaactgaaaaatgcatcattgtcttccaacagcaaagttaatcaaaagatgaaataattactgagctgtaagatgggctgtatgaaaatgcacagaaagaaaagaaaaatggaaatagaaagaataaagcatgcctacaagatctagaaaaagcccaaatgggaaaaattaagagctattggccttaaagaggatatggagaatggatgggggtagaaactttattcaaataaataataacagagaaattcccaaagctagagaaacgtatgaagacccagataccagaaagtcaagaaacaccaagaagattcaacacaaataagactaactcaagactatatcaaatgttcaatgtaataatcaagctctcaaagataaaataactaattctaaaagcagcaaa

SEQ ID NO: 266942 - DNA, 443 bp, Homo sapiens
tgggaatacaggcgtgcgccactgtgcccgttcaagtgcagttttttgtatataaattatttttcaataaagttaatttaaaaagaaaaagctaattcctgcacagcagaagcccagctcatgccaaagagatagagccagttcctctggcaccattttagaaaagaccacccaggccagagcggtggcccatgcctgcagtcccagcactttggaaggccgaggcaggcagattgcttgaggccaagaatttcagaccagcctggccaacatggctctactaaaaatacaaaaacttagctgggtgtggtggtgcatgcctgtaatcccagctactcaggagactgaggcacgagaatcactggaacctggaaggcaaaagttgcagtgagccaagatcacaccacagcactccagcctgggggacagagtgagactccatc

SEQ ID NO: 266943 - DNA, 519 bp, Homo sapiens
aatcaaaagcaaaaactacatgatcatctcaatagatacacaaaaagcctataatataatccaacatcccttaatgacaaaagccctcaacagattaagcattaaagtagcatacctaaaaatagtaaaagccatctacgacaaacccacagccaacgtaatactgaatgagcaaaaactggaacggttccccttgggaactggaacaagacaagtatgcccactttcaccactcctattcaatatagtactggatgtgctagccagcgcaatgaagaaagggaataaataaaaggcacccaaataaaaagagagaaaatcaaactctctctctttactgatatgattcaatacctagaaaaccctaaagactctgctaagtctcctggaactgataaatgaattcactaaaattttaatatactaaaccaatgtacaaaaatcctaacatttttatacaccaatattgttctaggtgagaatcaaatgaagaacagaattccatttacaatagccaca

SEQ ID NO: 266944 - DNA, 593 bp, Homo sapiens
ttattaggttttatttattgattcaagaaaaatttattgactacttaccaggttatgtttcttaattagggtaatgtagtcatggatgtttgcaacatttttctctatgcctttttgtgtgtctgaaatatctcataaaaaggaagagttttccagttgaaatggtttatccgtgtttcagtgaaagctgggagaagctagtcaacctcctgggtctttctcgttcttattgaaagatgccctcttacaggacggtctgatggtcaggaagcagtcaacgagttaagatgagtgaggccttcaacctgaagagttagtgattcttagtgtaccacagttttaacaaaaattgctcttgtcgatgccaaagagatatcttttcttcccagctaaaaaattttaggtcaggaccctcaaatattcctatttacagagggagagaagaaagaacttagttttactgagtaccaacaatgggcaattagaatcataattatgcttgttcttcattgagggtgcttgtttctcatcaaattcaatattcatagaacatttttatttcaagtcatctcactctgcaagagcttagttga

SEQ ID NO: 266945 - DNA, 412 bp, Homo sapiens
actgtttgttcctcgactacagttataatcctctatttgtgacatcataattagttgccactggagaagacgatcgtgtcacaaaaggattaggacctaagtcttggagtccagccactatgctgtggggaagcaaagaaagctgtggagaggccacgtggggaggaatgccatccttagcatgggctgagctcccaggcagcacccatctccagacatgcgagtgaacaggacttccggcaattccagccccagccactgagtcacttccagtttctcagtgtttccaggggaggcctcagacactatggagcaaagaaaatctgacccagctgtgccctgtccaaattcctgacccatagagaatacaagagagaataaaacgatgttgtttaaaccattaaattttgaa

SEQ ID NO: 266946 - DNA, 519 bp, Homo sapiens
gtcaacatggaaaggtttcttaaccaattgaatgacatgatacagatgtttcgctcactttctgtatatgcctctttcctttcttctattttccttttttctgagagctgctttgcagaagactttgtcatgaaataccacatgccataagaaaaattagcctacatcttttcaagattgtcttagtccattcagactgctataacaaaataactcagactgagtaatttataaacaatagaaatttattgctcaccattttggagaccagaagtgcaagatcaaggcagcagcagattcggtgtctgatgagggcttgctctcggcttcgtagataatgctgcttcactgcatcttcacactgcagaagggcaaacgggctccctcgggcctttttccaagtataatggatacatttatttatttactcatccatttatttattcattcatttatttactcatccatttacttattcattcatttgcaataatcctttgaacaactactgtttgcaaa

SEQ ID NO: 266947 - DNA, 511 bp, Homo sapiens
agtagaaaaacttggttcttccttagatgaatttatgtgtgactagaaatgctatgaaatgttctcaggtaggaaagtacttgcggcacagaagaaaatccctgttctctaggattttgggggagaaactttatcttaaattattctaggtatgaaatcatttacaaatgtaatttttattttaacatggtgggagtgagaaatacagaccactaaagatgctcacatccttatccctggaacaaaaagatacttttcagatgtgactaagttaaaggccttgagatagggaggttttatgctggatcattggctttgaagaaagaggaagggtccatgagcagtggaagcttctggaagctggaaaagtcaaggaaactgattcttccctggatcctgaagaaagaattacagccctgctaacactttgatttttgcctagcaaggactcacatcagatttctgacctctagaattataagataataaatttggattattctgagtcaca

SEQ ID NO: 266948 - DNA, 457 bp, Homo sapiens
gtcagtggagatgagaacattaatttatttgagtgtatgtatgtcaacgctgcttgaagaaaacgtgccagtgtggtctcaacatgtgaaacattttaggtcattctattctcacatttgccccctaaagcgctgttcaagttatgtattcaacatactgatgagaaacacattctgctatttaataatgaagaagaagagtgaaacagagaagcactgagctgaagaggaggacacaggtgtcccaatccaatttgaccattagctagctcttagatctctgaaaaatacatgcaacctctcagtctttcaatatctttagatgctaaaggcagactatgtcttcagttgtacctgaggtcatttctatttgcaaagtgttatgattacaacctgattttaaatgtaagtccagacctccttacaataacagcaataaacatatggtgcttacaat

SEQ ID NO: 266949 - DNA, 686 bp, Homo sapiens
tataaaataacaaaattgatccaaaaagaaatgggaaaactgaataggagctgcttccagagtatagtagcatagatatcttgaccaacactgaaactgcttgagaaaaacaaattctttaattatatttattagttcacaagaaaataaagaatacttaggtcaaaaactgagtaaaggcaagaacctaaagaaataaggtgaacactgaagccagctttttccttgaaggcatttaataaactgaataagtgtgaatttgataaaacaacctgaacaggacaatagaagaaaacaaaagttatagacaaatatctttcatactaagttgccacttttgtatgaaagacatacaaaacaaaacatatgcaagctgaatctggcaattcaggaatgagtcaatggctcagcatttaaaaagctttccacataactcacccattaacagattaagaaaaatatcatatcatttcaatagatacaaaaaaagcattcaataaaattagatacttatttagaaaggcaatatacgttttgattaggaacatacattctcagcagggcgcagtggctcacgcctgtaatcccagcactttgggaggttgcagcgggcagattgcttgatcccaggagttagagaccagcctgggcaacatttcaagactttgtctttacaaaaaaaaaaa

SEQ ID NO: 266950 - DNA, 141 bp, Homo sapiens
ttagtgcgactgagaagctgaatttaaaattttatggaatcttaattggtctacatttaaattaaaacaaccgcatggaccagcagctaccttattatacagcataagtctacaggctggcaggcctgttaggaaaagaaa

SEQ ID NO: 266951 - DNA, 268 bp, Homo sapiens
ttaactttccatttttattatcttacttgtaatctacacagatttgccagtgacctgaaaattatattaatttatgaaaagagcatgaatggccgtgtgtggtggctcacgcctgtaatcccagcactttgggaggctgagatgggcggatcacctgaggtcaggagttcgagaccaacctgaccaacatggagaaaccccgtctctactgaggctgaggcagcagaatcacttgaacccagggggcggaggttgctggtgagccgag

SEQ ID NO: 266952 - DNA, 296 bp, Homo sapiens
cgtggagacagtgtctccagaggggcgtggcgaaaagcgtccgcggcccgacagggaagaaactctggtgacgcaaatagatgagcctccctcgtacgaggaggcactaaagcaaggcctgcccaccacccgtcccatcgcgcccatggctaccggagtgctgggccagcacacacctgtaacgctggacctgcctccccccgctgacacccagcagaaacctgtgctgccagggccgtccgccgttgttgtaacccgccctagccgcgcgtcctgcgcgtgccgccagcggtccg

SEQ ID NO: 266953 - DNA, 881 bp, Homo sapiens
agcattgatgttcacaggcccaggctctgtaaaaaacatgtgttttatctaaggaaatgagacaattgcttaaaaatattttctttagcttgtagtgtcaagtgatgaattaaacagctctttgagtcatcagagatgccccaaagaaaatccgacagtctccccctcaaaaaatattttcctgtttttaatcagacctcagctctttgtcctctattttttcaggccattgtattgacctgccttgggagtgttaaaagctggtaaacgctcccttgccaatgctagctcaatgggcagtaatttattgagtaagacagattttcattttagaaatgaggctttccacgttatgacattaccaatattggttggttatgtattattatagaaagcagtgatattcatttcatggctggaaggctgcgtgctggtgtttaaccagcagtttgcaaagatttgctacatgatttactacacatgctgctttgtcctcaagtgattcctggtaaaatgtgtgcttctccttgcttctctttgtctggggaatgtgtttcctgtcattactaagacaataccatggccatatggtgcatgtggatggttcctgtagatatcttacaacaaagagtaagttgggagcatggtagaacccagtgccgtggggaggtgggagttcgccacccaggaactgcaaacatcgccccttcacccctagaagtggtgaggaaaactgttttcctctactcacacaattttccccacccagaaggaaaggcttggggtttctcttctgtatctgctaacaagatcttctcattgtgagtggagcacagtgtgaaagtaagttgtgggtagactttccaccaccagtgttagaa

SEQ ID NO: 266954 - DNA, 442 bp, Homo sapiens
gcccaggatttgcaaatgcagaggttatgcgggggcctaagaccagtttacaccagtgctccagagtcctgtctggttagtgcctatcacacccagagtgacttgtcttgtatatcttgttcaccaccacattgcatggagtacagtggaccttcagaaaataactccgcagcatgaacgtcgtggacagtgataatgggacaagaaaacacaaggtctccaccacagctatgccccatcacaattacagcacaagtttggaaataacttggcctgacattcaactcccgatgacaggctccaacttttctgcatcttgtcttaggcatcataaaggaaatgtgagctatcactcttcctgaaacatgagctgttctgcagcaacatcaatagatagctttgtcattttaaaaataaattggaaatctttgtattgctttaa

SEQ ID NO: 266955 - DNA, 482 bp, Homo sapiens
tcacagtgagccgagatcacaccactgcactccagcctgggcaatagagccaggccttgtctcataaatgaaatataaaatataaaataaaataaaataaaacgttgttggcaaagatgtattcaaaatagtatgtagaacttacctggaaggtaattttgcaatatttaccaaaatatactttttcatctagtaaggtctccttctcagaatcagtcttaaagccattcaaatacagatttatgattaaagatttaagtccaaaaatgctcattatagcaatatttataataggaaaaattggggaaaaacaattatacatccaacagtagtaagagtgtgactacattatagtattagtatgtaatggattgtcacagagcaacacacatgtttttgaagaatatttaaggcgtgataaatattaaatgtaaatgtaaattgaaaaaatgatatctgtagattttcattatgcatttctt

SEQ ID NO: 266956 - DNA, 255 bp, Homo sapiens
caccctcgttcttgtgagtgctgctcctcacaaggttggctactggaccagccagtcacaaaatatacatcaccttttatctttgtagtttttacattactgtttaccatttcaatgccacacactaatactgcagagatttatacttttcatttaatcattgatcattactgaaaactaagcaaaatttaaaaatagactctcagtaaatgagtaagcaagtgggtaaatcaagtatttccagagtttaagcta

SEQ ID NO: 266957 - DNA, 397 bp, Homo sapiens
tattattcagtcataaaaaggaatgaagtactgaggcatgttacaacatgaaggaactttgaggacagtttgttaatacgctatatactgtgtaattctatttatatgaaatatccagaataggtaaatcattagagactagagacagcagattagtggatgccaggagtttggggaaggaaggggtgggaagaatgggaagtgactgcttaatggatacagggtttctttttggggtgatgaaaaatttctggaactagattgtagtgatggttgcacaacaccgtaagtgtaataatgtcactgaattatacactttaaagtgatttaaatggtaaattgtattatttatgtattttaccacaataaagaagtcacctatcaccaaccctttaga

SEQ ID NO: 266958 - DNA, 483 bp, Homo sapiens
agaataaatacttgaggagatggatgccctattctctttgatgtgattacttgacattgcatgcctgtttcaaaacatctcatttatcccataaacatatatacctactatgtactcacaaaaattaaaaataaaaaaaaattcaaaaatgtgaaaccaaatcaccatggttttgtggtattttgtttttattcttaagatttagaggctgggtgtaatggctcacacctatattaccccagtttgtgtggccgaggctgaaggattacttgaggccaggggttgaagaccagcctgggcaacatggtaagaccccatctctacaaaaaataaaaaattagccaggcctggtttgaagcactggtaatcccagctactcggaagtataagatgggaggatctctagagcccaggtgttcaaagttacagtgagctatgattgtgccatttcacttcagtatgggctataccctgtctcgaaaa

SEQ ID NO: 266959 - DNA, 294 bp, Homo sapiens
tcagccactcatacacaggcccacctcactttactgcacttcactttactgcatgtttgacaaattgaaggttgtggtaaacctgtacccagcaagtctgttggcattatttttccaaaagtgtgtactcacttcatgtcttggggttagattttggtaatttttgcaggatttcaaactttttcattattatccgttattgttatcaaacttttttttttctttttttttgtattttttttttaattttttttttcagtcactctgttgcccaggctggagtgcagtggtgca

SEQ ID NO: 266960 - DNA, 202 bp, Homo sapiens
cagagtttcaccatgttggccaggctggtctcaaactcccgacctgaggcgatccacgcacctcggcctcccaaagtgctgggattccaggcgtgagccaccgcccctggcccatcttcactatttttaagtggacagcacagtagtattaactatatgcacatctctggaactttttcaccttgcaatactgaaaccctac

SEQ ID NO: 266961 - DNA, 1062 bp, Homo sapiens
cgtcggtattttgcgggcaactagctcttccagctgctgtaaattgctgctgcgggagaaactggagccgctgtagccggcgcgcccttcttcccttactgcgaggagccaccgcctctttcgcgctccttatacacctatcactgggagcggtggcagcaacattccctggaccaaccgccgcctcttcaggcggccgctttgccggtcattcccgaagcccggcaactgagggcggccccctttccttaacagtctcctcgctacagatcgtctgctccctcagcctcgcccgagacccacttccccagtctcgcccgggtggaggtcgacgaggaggagacaagagtcacccttcctccaggcggcgccggccccctcacccgcgggtgtgtcctataaatggcgtcggaaagcgacaccgaggaattctatgatgcccctgaagatgtgcacctagggggcggctaccccgtggggtctccaggaaaagttgggctttcaacattcaaggaaacagagaacactgcatacaaagttggaaatgagtcccctgtacaagaattgaaacaagatgtgtctaaaaagattattgaaagtattattgaggagagtcagaaagtactacagcttgaagatgactctttggattccaaaggaaaagaactctctgatcaagctactgccagtcctattgtggctagaacagatctgagcaatatacccggactgttagccatagatcaagtactaccggaagaatcccaaaaggcagagagtcagaatacatttgaagagactgaattagaattaaaaaaatgctttccttctgatgaaacctgtgagaaaccagtagatgaaaccacgaagttaactcaaacaagttcaactgagcagcttaatgtgcttgaaactgaaacagaagtattgaacaaggaagcagtggaagtcaaaggaggtggtgatgttttagagcctgtgtcctcagactccttatctactaaagattttgccgctgtggaagaagtggcccctgccaaacccccaagacaccttactcca

SEQ ID NO: 266962 - DNA, 295 bp, Homo sapiens
gcggtagctcatgcctataatcccagcactgtgagaggccaaggcgcatggatcacttaaggtcaacagttcgagactagcccaataaacatggtgaaaccccacctctactaaaaatacaaaaattagccaggcatggtggcgggcgcctgtaatcccagctactcgggaggctgaggcaggagaattgcttgaacctgggaggtggaggttgcagtgagccaagatcacagggaagagtcttccctgtccctgggcaacagggaagactccgtctcaaaaaagaaaaaaaaaa

SEQ ID NO: 266963 - DNA, 735 bp, Homo sapiens
cctaatcaacaatgcaaacaaataatactgtgaatacaggtttcccagaattaaaaagtgatgtttacagctatcttggtagtgaaaagtaaaagacttgactggaaggacccagccctcccatatctaacacaaaatttgccaagacttaaaaatgtgctacaacttacagagagcctctttcctgtctccatcactaccctcgtggcaacatcctcttcttttccttccctcccttctgccttcctcttttctgtacccccttccactgagcattcacacacaacatgatataggaattgtttttcttgttaaatgaaaccactatacagattcctattattttgcagaacatctggtttgcaaatgaaaagatctcaggggcacaacagcactagtgaacaattctgaagaagcttttaacaaaacttgaaattgcttatccaaaaaaaaaaatcatcccccgttgctgctgttctgtagcacacaatctcttcactcacaggggaggtgactttaacaaggaagagagctttatcctgtctctcctactttggccttttagttttcattctgttcctatccacttctcccatccctaagaacagggaatttgattaaaacataacatagatggaaagaaatttagccaggaaaccaggagaaataaattccagagtctcattttccagcagttatttttgttttcgatcgagttcaataaacctgaaagag

SEQ ID NO: 266964 - DNA, 341 bp, Homo sapiens
tctagggaaggagctttaacttacctttcagatgggtcaccattccacatcaaagaagaaaagcttttatctagagtgcactgaagttaaaggtcatgcttgatttctgaacatttaccatccatcccaccagaatattttccactgtcccataactccagggcctaggagagtggctaatgcatagtaagaccttacattagttgaatccaaagtcagggctgtggagacagacaaagcattgatcattttaatggggctatgaggtgtgtggtagtgccacaggaggaagcaatcagctggtgaggaggaacccataataaaaattactttgagaagca

SEQ ID NO: 266965 - DNA, 395 bp, Homo sapiens
ccatctcagttgtgtcctgtggctctcaagagagggtgcagcatgttctgatatgaaggctgcagaagtctcacaggatggaggtttggtgacaagtactttggaaaatgctcaactagaggatggttggtccttgaaagtcctttctgctttatgttcactagtttctctgtatgaagatgaaatcagcgattccaaagcacagctagctgccatcaccttgatcattggcacttttgaaaggatgaagtgcttcagtgaagagaatcatgaacctctgaggactcagtgtgcccttgctgcatccaaacttctaaagaaacctgatcagggccgagctgtgagcacctgtgcacatctcttctggtctggcagaaacacggacaaaaatgggg

SEQ ID NO: 266966 - DNA, 976 bp, Homo sapiens
actacgaggtccacaacaggcatgagttgtattgtgcttggtaatgttctgcattataacactgaagacttgtctatcaacgatcatgtggattccatagtgaatctggtatccatcttgttacacgctcagcccgttcatcctgctctagacccttgagctaaaaaatgggggtgttgatcacagccttgtgggccgcttcattcatctgctgcgctctgaggaccctgaccagcagtacttgattttgaacacagcacgaaaacattttggagctggtggaaatcagcggattcgcttcacactgccacctttggtatttgcagcttaccagctggcttttcgatataaagagaattctaaagtggatgacaaatgggaaaagaaatgccagaagattttttcatttgcccaccagactatcagtgctttgatcaaagcagagctggcagaattgcccttaagactttttcttcaaggagcactagctgctggggaaattggttttgaaaatcatgagacagtcgcatatgaattcatgtcccaggcattcattcctggggagtactaacccaaaagcgtctgtctcttgttttctagtccagtttgagattaatttagaagaaaggaatactgtatgtgaaattcatcttgggctttcccctaaattgcaagataaggccatgtgtaagattttccctaaaactagaatatattaatgcatgtttgagaattttaaagcaccatggtcaaaaccagaagctatattttgcatatttggactcagccatccattaagaacccatgttgtcctctggacatatttatcaatataattgggttttaaatagtataaaagaaaacttgtgatctatataatttatgtatcaccttcattgtaaatttagcaggaaatgcatcacaattatgattttttttttgcaccagtgaaacaataaagatgctattaacaatt

SEQ ID NO: 266967 - DNA, 782 bp, Homo sapiens
actacgaggtccacaacaggcatgagttgtattgtgcttggtaatgttctgcattataacactgaagacttgtctatcaacgatcatgtggattccatagtgaatctggtatccatcttgttacacgctcagcccgttcatcctgctctagacccttgagctaaaaaatgggggtgttgatcacagccttgtgggccgcttcattcatctgctgcgctctgaggaccctgaccagcagtacttgattttgaacacagcacgaaaacattttggagctggtggaaatcagcggattcgcttcacactgccacctttggtatttgcagcttaccagctggcttttcgatataaagagaattctaaagtggatgacaaatgggaaaagaaatgccagaagattttttcatttgcccaccagactatcagtgctttgatcaaagcagagctggcagaattgcccttaagactttttcttcaaggagcactagctgctggggaaattggttttgaaaatcatgagacagtcgcatatgaattcatgtcccaggcattttctctgtatgaagatgaaatcagcgattccaaagcacagctagctgccatcaccttgatcattggcacttttgaaaggatgaagtgcttcagtgaagagaatcatgaacctctgaggactcagtgtgcccttgctgcatccaaacttctaaagaaacctgatcagggccgagctgtgagcacctgtgcacatctcttctggtctggcagaaacacggacaaaaatgggg

SEQ ID NO: 266968 - DNA, 767 bp, Homo sapiens
gagtccaggcgtggtggctcttgcctgtaaccctagcactttgggaggctgaggcgggaggatatcttgaccccaggagttcgagaccagcctgggcaacatagtgagaccccgtttctttcaaacaaaagaaggaaaactaagttgaaagtgttatttttgcttcaatttttatttctttacataaaaggtttcttgtcataccttggtaaaaatttgatgagctggtttcattttgaaagcctttattttaaaaataagtatgtatctttgtatgatttataagtgtaccagtaggtagaaatacatgtgttcttggccagatgtggtggctcacgcctgtaatcccagcattttgggaggctaaggcgagtggatcacctgaggtcaggagttcaagaccagactggccaacgtggagaaaccctgtctctactaaaaatacaaaaatcagccgggcatggtggcgggcgcctgtaatcccagctacttgggaggctaaggcagggagaattgcttgaacccaggaggcacaggttgcagtgagccaagattgcgccattgcactccagcctgggtggctgtataaaagcctgtataaaaatttcttttatacagagtgagactgtataaaagaaaaaaaaaggctgtacaaaaatttcttttatacagagactgtataaaagaaaaaaaaaagaaatacatgtgttcttaaaaccatttgtatattttcatttctagaccacactgtagctaattattgttat

SEQ ID NO: 266969 - DNA, 466 bp, Homo sapiens
gctgctgcttttggacaacttgctgggctctgcctccacaagacaaagttgaagtttaaagtaacagtccagactcatttgaatctaaatatgaggctgatgttttacttagatactgatttcctcagactacgttattccagcagaataaaataacctgggtgctgaaatgaatctatgtacagtaaggccatagagagatttccaaatagaccaaaatccaaccctagaaccattttaccctggctacttgcctttcaaaacagcacttctcaatctgtttgaacgtcaaaatcatttgggaagcttttgaagacatcaaaaaatgtcccaatgcccaggcccatccctttggatggggctttaaattgatctgcagtgggaactgggcatcattcttgttttaaaagcagctcaggtgattctcataaactggtagataataaaatgagagtcaataaccaaa

SEQ ID NO: 266970 - DNA, 248 bp, Homo sapiens
cgcagctctaagcctcagtttccccagcagtaaatgggctggttcggggattccatgagttgacacctgttgtcagcaccgcactgggcaccaagggaagagcccagaaagggactctggactcagagggagccagggcccaagcctgcttctcctgctgcctgctggtctgtcttggggtctgccttctgctctgtcatgtcccccgctgagcctcagtttccccaaatataaatgtaattgaggtt

SEQ ID NO: 266971 - DNA, 290 bp, Homo sapiens
tgcggcactgccatccatcacccacaccaccttcagcatcacctccccactaggccctaccccaccaccccaaggcagtggggagccaggccagggctcagcacaagagagcctggcctcttgtcctttgattctattatcagcaaatgaccttgggaaagtcagttgacctctctaagctttcgttttctcatatgcaaagagagaacaacacttaggcagtgcaatcatatatacagaaagtactttggaacaagcaaaaaataaataaataaataaaaacactgatt

SEQ ID NO: 266972 - DNA, 396 bp, Homo sapiens
attcatgactaatatgtgacttctattcattttcttaagggcttgagaattatataaaactaatataaaaggctagattgagagcaaaagctgataattactaaatgctgcctaaaacttggcttcaatccatatcatagaaaagctgcagtgagacctggcaccaggctacctgcgttcatattttggctctacccacagtacataagtgatcctgaacatggtgctaaccccgcagtatgcctcatttttctatgtattaaatggatctcattgttacccatcctcatcaaattattgtgtggattaaatgagatgctaaaagtcaagtatttggaaagagttggcataatgcacattcactaaataaatgttagctattattataataaaaat

SEQ ID NO: 266973 - DNA, 385 bp, Homo sapiens
agccccactttagggaaacaaggaaactttgtgtatctttcagttccagaaaaggggagccttgttcctgagttaaagagcaagtttcatcttagccttcaagaatgatgccttttcatgtcttcatggggtactggaagccctgccaaaactcatgagtggaaaaccagacccaaattaccctgggcagtctgcactactagtctctgccaaatatgaggctccctcaggggtgttagtacacctttgtccttgggccttcatacctgtgttattcttcacgttacgtgcatgttatatagagccttttaggtgtatggaacatttcataatacatttcaaaatgcatacttaaaaatataaacaagaaagtaggaccaatatt

SEQ ID NO: 266974 - DNA, 401 bp, Homo sapiens
agatgatgaacttcactagtaaacacctccagctctttagatagagcctaaagtatttttcaaattagaagagatggatttataattcactgatgcatgtcctacttgactggctaaagagctccttctgtaacaaattacctcttctgtatttccagaaaatactacagacctaaaaatggatcaaaagaactatcccaattcatcccattgataaagatggatgagagtaaagaaaatgcactctttagccaggcatggtggctcacgcctgtaatcccagctactcaggaggctgaggcaggagaatcacttgaaccagggagttggaggttgcagtgagccgagatcacgccactgtactccagcctggcgacagagtgagactccatctcaaaaaa

SEQ ID NO: 266975 - DNA, 416 bp, Homo sapiens
tgtaaatgaaatacatttttccatttctttgttagatcaaacctattgacttctgtgtgtgtgtgtgtgtttatgcatgtgtgtgtgtgcatttatgcatgtatgtatatgctgtatatcctagccattttactaatttttgaatttattctagtggtttattgagtttccctagttttcaagcacataactagtattttcttgtctcacttaatttcctttaccttatcaagacaatgttaaattcaaaataataccaagggctgggcatggtggctcacgcctgtaatctcagcactttgggaggctgaggcaggcagatcacctgaggtcaggagttcgagaccagcctagccaacacagtgaaaccctgtctctacaaacataaaacaagagcgaaactccatctcaaaaaa

SEQ ID NO: 266976 - DNA, 499 bp, Homo sapiens
atttttgaagataatttatctggtgagatctataatatgtataaaacctctacaactcaataatacaaagacaaaccaatttatggaaaatgaagcaaggatcagaatagacatttctggaaagaaggtacacaaatggctagtagcacatgaaaacacactcaagatcattagccatcagggaaatgcaaatcaaatctgcaggaaataccacttcacaatcactagactggctataataaaaaaaaatagacaatatagagtgattcaaagccattatttagctttggcattattcaatcccaaagtggaaacccaaatgtccatccatcgacgacagtaaaagctacaatatagaaaaagttatgctaagtgaaagatgctagacacaaaaagaccctatattgtatgaccccatttatgtgtaatctatatagacacagtgtagactggggatggggaggaggcaccaaggtgaggtagaaatatgacgagtgtt

SEQ ID NO: 266977 - DNA, 442 bp, Homo sapiens
ttacccaaactcactaagctgtgaaggggtgtatttatccacagtcttgtttgtcacatcctcttagtagactgtgggttccattagggcgagccctgggtctgtcttcttcatggctgtatccccagcaccaagaagaatattcagtgactacttattgatgacaaattgaatgagctggcatcagaaaccacattttatgaccaatgctctaacacatttctgtacaccctgacctccccgtgccaatccctgttttggtctgatttgggcctctggctagtctactggattactagggggtcagagccagagcccccttacccttgtatcccagtagctggcctgagagccccactcctgccctgtgtctacatctaaagcagacttctcgtctgcctgcccttccttttttaaattttattttagtaggccggttgca

SEQ ID NO: 266978 - DNA, 230 bp, Homo sapiens
agtgccaatcctacccattcaccagtgttcattcacttgctttgtgaatgttcagggaccatggcaatggtggcagtgacacagaggcagtcctaatccttggatcatagctatgaccttgtgttttgtattcgacaattccagcttcagcctgagagttctgtagtgttctgttagtcattactggaaggccctgcagagcctattctttcagccattccagggatgcc

SEQ ID NO: 266979 - DNA, 336 bp, Homo sapiens
atcaactggtctatgcactgtcttttatatatgaagaaacaggcccagatatatgaatgacttgttcaaattgcactggagaaccaggtctcctcattctcagtctgattcttggctccctgtggacattggtgggcttcactggattctgaaagccattctccctgcccaacactgatcagttagtcggacttccatctatggaccctagagcttttcctgccagtggttgctcctgtaacctactgtggccattgtgggctgacagccatattgtgagggattaggtagctctctaggcattgacaagaacctttgaattttagaaaatatcca

SEQ ID NO: 266980 - DNA, 451 bp, Homo sapiens
gggccaaggtttttacttggaaaagaaaccgcacacttcgaatcacagaagtgtttacatagggcaggctggaggggacgagagagaccttggttgatggtgactcagttcataaacacagcatcaatattgatagactccaaaagatgcatatgcaggacatctctcgggatttgcagggaccgactgttcaggtgaacatcccgtactgttcgttcgagcaggacacggcagatgcttctttcttgttttatggagggtggtggtggattactcttcccatcttgtgcttttgaggatgctccaaaaactttaaaaatttatccatgttccctttcacacagtgggtgtttctttcctcaggcagaaggaaaacttaccaatggtttttgaatatgataggaaagaccacctgcagggagagagtgggacccctgctctctgcctctgg

SEQ ID NO: 266981 - DNA, 478 bp, Homo sapiens
gtgccgccacacccagttaatttgatctagtgattcacttctgagtacaaaccccaaagtattgaaaacagggactcaagcagatattcgtagtaacattattcacaatacccaaaaggtgggagtgacgcaaatgtccactgaggaatgaatgaacaaaatatggtatagacacgcaattaaacattattcaggccatgagtggtggctcatgactcaatcccagcactttgggaggccaaggcaggaggatcgtttgagactaggagtctgagatcagcctgggcaaaatagaaagacctcatctctacttaaaaaaaaaaaattagctgggtaaagtggcatgcacctgtagtcccagttactcaaggaggctgaggcaggaggatcacttgagctcaggagatcaaggctgcagtgagctgtggttgtgccactgcactccagcctgggtgacagagcaagaccctgtctcaaa

SEQ ID NO: 266982 - DNA, 288 bp, Homo sapiens
aaatgttaatccagagtctgacttttggctgagacatgactgtgcttgtctgtgtcgggcaacttgagttctagatccttcattcatttggacctggccatactctttaatctttcctggctgactagttatcttatgtgtttgagaatgatggtggcagtgtattgtcccctaatgctgcatgataaactctgttgttcctagcctatattttggtagatttattatatcaaacattcctggaaataaagccaaaaaaagcaagaatagaaaatgagcaaaggatac

SEQ ID NO: 266983 - DNA, 383 bp, Homo sapiens
aggccttgaccactatgctacatcctaaacctcccttgatggcgatgaggaggggctggtcaccaggagtcacgttcccatgacaaagtctcattggtgccccccagagcaatgggtctgagccctgctgcaaaccacctgtgtcagaatgggatgcaggcagcttcctagaaagcccattcagacctgctgtggctacatttttcacatgatgctactggattctgaagcgcacactggagtttaagaaccactggcttagaggcaattctgacctagacagaactagcgctttatttgtcaggacgatagacctcgagaagagctgcctatgtgggatctggaggtgacaataaaaacggctgttgattggtcactgagta

SEQ ID NO: 266984 - DNA, 332 bp, Homo sapiens
gggttttgacatgttgtccaggctggtctcgaattcctgacctcaagcaatgtgcctgcttcagtctcccaaaatgccgagattacaggcgtgagccaccacacctggccaaatgagtattgtcttcgttcgttttgtgttgctgtaatagaatacatgaggctgagtaatttagaaagaaagaggtttatttagctcacagttctgcagcctgggaagtaggagaagcatgttaccagcatcagccaggcttctggggagggccactacactaggtcaaaacaaggcagagaaggtcaaaggggaagcagacacatacaaagagaaaaaaa

SEQ ID NO: 266985 - DNA, 463 bp, Homo sapiens
agagttgcagaaccaggactacagcccttgcatcttgactgccagtacgatgcaggttaaactctgtgtttgatgcttgttgatgtggacgtctggaacttgaatagaagacatttcttatttcagatgcatccattagcaggtcttagccaggagccaggcccttgcaagtatatattgcaagtaattgatgacattggagccagaaatcgaatgaaccgggcccagttcaatccacttactggacaagctcctcaagcactctaagccccaatttcctcctctgtaaagtgggcataaattacatttaccttgagggttgctgtgaaggctagaaataatatatgtaatgtcccctgatacacagaaggtgctcaagaaatagtaagctcttctaatgattgttattgatggcaaagatgatgaaaaaacaaatgctctgacttctcaaaggagagagaat

SEQ ID NO: 266986 - DNA, 707 bp, Homo sapiens
cttcttccaagtgggaccaacttttcataattataggttcttaatgccttctttaaatataaacacatctgaagaaaagacagtgtagtagtgaaaagtaagagatttagagaagaacaagaaaaaaaaaaaacctgggcttgaattccagctctgcccagatttgtgtaaccttgaacattaaacctcagctttactcttctggaacttggagatatacatttaaagctttgaaatcttgcgccagaatattattactagtaggtcattcgtaataaacatttgaaaataagtatatatctatatttctttgggcacaataacaaatccttgttctttattgctaggcattgtactaggagtatttatatctattaagtcattcacacaagatactaaaataattataaatacacagatagttgactttattcaaaatttttttatttattggccttaaatatgcattttttttacaaaaagatgctcattttatttaatttttaaatcacctgagggttccaatatgatgctgatgatgatgatgatgatgacgactattattattattcttatcatcttatatctttctcatgtttaacaattctacattcagggcacacactgcatgtttgttactcgggcatcttgcctaatggtgctcatctgcttttcagtgtatccaccacccaaatctaaatatacac

SEQ ID NO: 266987 - DNA, 214 bp, Homo sapiens
ctaccacaataaagaggtaagtataaaatctctcaataacgaagctttcagaaattctagttttcctttttttaaaaaataacttccagccaggtgcggaggctcacgcctgtaatctcagcactttgggaagccgaggcaggcagatcacaaggtcaggagatcgagaccgtcttggctaacatggtgaaaccccatctctacttaaagcaca

SEQ ID NO: 266988 - DNA, 333 bp, Homo sapiens
ggttaaccttgagacagatcaaacctggagacccagctgcaaaatttcaaatatcaccttaaagccgttcgtccacaacctggtcattgttgtggttatgccagtccacgctccaggaggactgtgacccgagatagccactgaaaaaagagacacagatgtcacacccccatcactcgcttaccattacaatgtgaaatgcctcccatatcaagctttccttcttaaacccctgccctcagccaaccttcaaagcagtttctctaggtgtaaacctggccacttccccctgtggctatggaaataaagtggctttccattcactgcacttgc

SEQ ID NO: 266989 - DNA, 477 bp, Homo sapiens
tatctgattgaaaacttgaaaacttctgctacttgaaagacatcattaagaaagtgaaaaggcaagccacaaactgggaaaaacattcatgaaacatatatctgacaaagagtttatatccagagtatataaatcagtaataaaaaaagagaactaaaaatatatgaacagcaggcttaaaagaaaaaatttagaggctgggagcagtggctcacgcctgtaatcctagcactttgggaggccgaggtgggcggattgcctgagctcaggagttcaagaccagcctgggcaacacggtgaaaccctgtctctactaaaatacaaaaattagccaggcgtggtggtgtgcacctgtaatcccagctactcaggaggctgagacaggagaataatttgaatccgggaggtggaggttgcagtgagccaagatcgtgccactgctctccagcctgggtgacagagcaagactccatctca

SEQ ID NO: 266990 - DNA, 216 bp, Homo sapiens
acgagccccaaaggtaatgagcccagaatgctgctaactggagtgctccgcctgggatcactggagaaaggagctccggcagttctgtgctgagggaaactgaagcttccttaatgacttttttcctttatactgacacatcactcctcggcccaagagcagagcaaccagggctagcaggaagacagatgcctctccctgggtctgcttcctggc

SEQ ID NO: 266991 - DNA, 296 bp, Homo sapiens
gttcctgcaggtagggggccctatcactgcagggttctattccagcatcttgccccacttcctagctcctcctgtatactttaaatcatttctagattacttgtttacttaattcaaaggacatgctgtataaatacttgttatgctgtattgcttagggaataatggcaagaaaaattttatacgtgttcagtacagatgcaaccattttttttttttttggtccaaattgttttaatctgtagtcggttaaatccacagatacagaacccacagatactgaggatcaactatag

SEQ ID NO: 266992 - DNA, 362 bp, Homo sapiens
atttgatatatttttggagggatttcagggatctacattggttaagttgaatctgtaatttggttatacataaaattaaagttaatctaagtggacagaatcaatactcttgtgagtttaattagatggccagcttccaagcaagagattattctttttactatcctcctatcctctttccttaggcagcaaaaactcatagctatgctgttagcaatgtgagacagaagggagggatatgtgggtgaggaggccattgtattctagagatagtaataagcctgccttatctccagatcatagcccagccaaagggatagtgtcccatttgcagaggatctgcagtcactgtttctaaacca

SEQ ID NO: 266993 - DNA, 257 bp, Homo sapiens
ctcttccacacaggcaacccgtgctttccagacaaatctcacaacatcaaactagaagtattcatgccaccccctacccctgccaactagaactggctgtctgtgtcaggtcgtcatcttatcttagaacacatccattgatacatacactgtttcttcttccctatactccctctacatatttaccacaacacaatggggctcattcacccaccacacttaacaacataaaaccttcattcacacgagaaaacacc

SEQ ID NO: 266994 - DNA, 369 bp, Homo sapiens
tgagatggagtctctcgctatcccccaggctggagtgtagtggcatgatctccgctcactgcaacctccacctctgggcttcaagcaattctcctgcctcagcctcctgagtagcagggattacaggctcccacaaccacgcccggctaatttttgtatttttagtagagacggtgtttcaccatgttggccaggctggtcttaaacttctgacctcaagtgatccacctgcctcagcctcccaaggtgttaagattacaggcgtgagccactgcaactggccccttagagacatttcttagtccaggcaggatcttgcataggctgaatctagacattaaattcagagaccccttctgtcgtcttctc

SEQ ID NO: 266995 - DNA, 299 bp, Homo sapiens
tgaagtcctgagctcaagcaatccatttgcctgagcctcccaaagtgctggggttaccggagtgagccactgcgcctggctaggtttctcatttttttttaaaggtgaaattcacataacataaaattaacgattttaatgtgaacaattcagtggcatgtagtccattcacattgttgtgcatccaccacttctatctagtattaaagcattccatctccccaaaataaaactctgtacctgatgagtagttaatttcctattccctctttcccctagcccctagtaactaccaatca

SEQ ID NO: 266996 - DNA, 479 bp, Homo sapiens
tatatgagtttcaggtcctaggggaccacagacccaggtccaagttgcatcctcaagcttctgaataagactggggcaacaacgtcctcatctatacagttccagaacagtctcccagacctcactttacatgtcagctgacttaaaccaattagaagattaaggcatcatgtaatgtgctaactctgatgtgcgctgatggcctgggagggacgggggtggggacaggcaaaggcgaaaccttctcacgagcagatgacaactgccagctctagcatttgagagcggatgcgtccctggccattcccgcaggacctccctccagggacaaagctttggtttcctccccactgaggaccaggggcttggaatgggagttgtcacttggcaatcagcaggcagggtttaattcacacagtcctgggagggagacatttccttgcttttactgtttttctgataaaaatgtcccctatata

SEQ ID NO: 266997 - DNA, 98 bp, Homo sapiens
gggtgctcggtccctgcccacctgagagttcgactccatcagcctccctgggcacccttttatctgccgccttggtggcactgcctgtccgtttctga

SEQ ID NO: 266998 - DNA, 933 bp, Homo sapiens
ttgtaaatggaaacattgatagcatattgattctcccatacaataataaatatatgaattccaaaattgttgctcatagatgaaaactggtaataattcccatacttcctaatgtaaaaatatgtatttctgttaatgaaaaagtaagatcccacatcaagctgaataatatcaataggatacttttgtaaatatatttttgatagctcaaaatcatattataacattaatacaaacaaaattttgaagcaaccagctacttgatagcttttccattatcagtgttaactttttctgcagttgttcagaggctgtggaagttaatgcagatttgtagaaaccttaatatgtttgtaagtgaattttgcacaatgtacgattatattttgttgcaaaacaattttgatgccaaaatacgaaatatggagaacagacttcttgaaacattaaaaaaaaatttgtttctgaaatgtcaacacactcatcttcttttctaccttgatcttttttactgtgtatcactgtggccactcttcagtctttctggaatattaccctttctaaaaatactggcattccctgtttggttctaggctcttttttccaacctttcttaatttgcttatcctttggatgtctcacctttggatgtgtggctttagatatcatctataatacccaaatttcttgttgttagttcagctctcttgaggaattccacttgaatgtctctcaaaattttcaaatttgccacatctaaaatggaacagttcatcccctactctttagtctcccctttcttatcttatccctacagctgcttaaatcacccaggcaggagaatcacttgaacccaggaggtggaggttgcagtgagccgagatcacaccactgcactccagcctgggcgacagagggagactctgtctaaaa

SEQ ID NO: 266999 - DNA, 1040 bp, Homo sapiens
ttgtaaatggaaacattgatagcatattgattctcccatacaataataaatatatgaattccaaaattgttgctcatagatgaaaactggtaataattcccatacttcctaatgtaaaaatatgtatttctgttaatgaaaaagtaagatcccacatcaagctgaataatatcaataggatacttttgtaaatatatttttgatagctcaaaatcatattataacattaatacaaacaaaattttgaagcaaccagctacttgatagcttttccattatcagtgttaactttttctgcagttgttcagaggctgtggaagttaatgcagatttgtagaaaccttaatatgtttgtaagtgaattttgcacaatgtacgattatattttgttgcaaaacaattttgatgccaaaatacgaaatatggagaacagacttcttgaaacattaaaaaaaaatttgtttctgaaatgtcaacacactcatcttcttttctaccttgatcttttttactgtgtatcactgtggccactcttcagtctttctggaatattaccctttctaaaaatactggcattccctgtttggttctaggctcttttttccaacctttcttaatttgcttatcctttggatgtctcacctttggatgtgtggctttagatatcatctataatacccaaatttcttgttgttagttcagctctcttgaggaattccacttgaatgtctctcaaaattttcaaatttgccacatctaaaatggaacagttcatcccctactctttagtctcccctttcttatcttatccctacagctgcttaaatcacccaggctggagtgaggtggtatgatctcagctcactgcaacctctgcctcctgggttcaagcgattctcctgcctcagccccccaaatagctgggattacaggtgcctgccaccatgcctggctaatctttgtatttttagtagagacagggtttcaccatgttggccaggttggtcttgaactcctgacctcaggtgattggcctgcct

SEQ ID NO: 267000 - DNA, 682 bp, Homo sapiens
cagagtaatactcttctgcattattatgaaagaaaaatattcttaattttagttaaaattaggttagtaatgttattttattaattgcacttttatggaatactatacggcatatttttaagttataaattatttgtgaaattaacttttcaattccacatttttaacatgttaaatactatcatgaatccattgaaatgttattgtgccactaactttaacctattccatcttacacaagggtgtaggtaacaatacattatttggtaagataatggactgacatcgctagtaatcttttttgccagtaactttaaatggccaataagttaaaaaatattgttcctataggttatatttttattcttattttcacatttaaatgtatttttcttaatttctgtggatatatgtttatatgtttatgccatatatggcatattttaatacaggaatacaaaatatgataatcacattagaggaaatgagatgtccattacctctagcatttattctttgtattacaagcaattcaattctacagtttaagttatttttaatgtacaattaaattgttattgactacagggtcatttttatcatcataatacaaattatatacaaacatgtaaaatccatacatttctgagtccttaataaatatttttataaattttaatat

SEQ ID NO: 267001 - DNA, 141 bp, Homo sapiens
ttgaatgatcagccttcgtggcccccctcttttgtcccccagcttgagatgtatgaaggcttttggtctccctgggagtgggtacaggcagccagggcttacctgtacactgacttgagaccagttgaataaaagtgcaca

SEQ ID NO: 267002 - DNA, 365 bp, Homo sapiens
aaaaaaaaaaaaagaaaaaaaaatcagtcccaaaaggttgcatactttacaattccatctatataacattcttgaaatgacaaaattatagaaataggaaataaattaggggtggccgaaggttaaggaaggagtggggcagaaggaagtgggtatggctataaaaaagcaacacatggctataaaacagcacgagggtcattgtggtgatgaaaatgttctgtatcttaactaaaacagtataaaaattctggttgtactgtggttttgcaagatattattgggaggaaatgggtaagagatacatgggatttctttgttatattccttgcaataacatttgaatttacaattatctcaaaatt

SEQ ID NO: 267003 - DNA, 152 bp, Homo sapiens
ctgtaatttgtggtattctattgggatacctcccttacttgacccacaacacatatgttttctagtggcagaagccatctttatttctgctacttgggagtgcctccagcatatccagatttctctaaatacagaggagaaggtccagaggg

SEQ ID NO: 267004 - DNA, 155 bp, Homo sapiens
tgggtcggccgcccaaatctttcctggcgaaggggagggaaggggtgttctggtggagtgggaagggaggcttgggtaggattgtgggataagatcgccctggtgacgaggagcggatctcgaacggaacttaataaaggttgcctagataaaga

SEQ ID NO: 267005 - DNA, 304 bp, Homo sapiens
acccgggaggctgaggcacgagaattgcttgaacctgagaggtataggctgaagtaagccaggatcaaaccactgcactccagcctgggtgacagagtgagactctatctctgtctcaaaaaaaaaaaaaaaaagaaatttatgagaccatttttccaccttcaggaaagatgaggtcagagccttgctcagattatagagaacagttcataccagacccactgaatcatctcttccccttagaattatcaaattagtagttaagggaaacatagcagatagacatacactctatatttagact

SEQ ID NO: 267006 - DNA, 418 bp, Homo sapiens
ccacaagccagtgaatgccaaacgtcaccagcaaaccaccaggaactaaggcaaagggactactgcagtttccgtcaaccaagttgacacttcagggatacttttgtgaccaccaggcattacaaggatcctcaaagttccccaggagaatcctgttgaaaatgaagccactatcatggttaagaggatttgaaatctaagatcaggagtgactgctttcggtgaatacaagtttctaagactagaagatggacattctaaagttcagaaaaagtcacttctcaaatcactaagttatgttgcttccttcacaatgttgaccaagaatcccttcaccccttttcttgttaacattgcagtcaaacattgattatcatgcactttaataaaataatagccaaattgttatctcatttct

SEQ ID NO: 267007 - DNA, 474 bp, Homo sapiens
agtgaattcatcaactctatgactattgcctttcaccttacactacactgatatgttttgcatcaagagtaggacaatacacagtaatgaaaaagaatgaaattgtgtgctttgcagcaacatggatgcagctggaggccattatcctaagtgaattaatgcagaaacacagaatcaaataccgcatgttctcacttataagtgggagctaaacattgtgtactcatggacataaagatgagaacaatagacactgaggattccaaaaattgggaggaaaggagggggcaagggctaaaacattacctactgggtatatgttcactgtttgggcaatgagttccatagaagcccaaaactcagcatcacgcaatatatccatgtagcaaacctgcacatgtacctctgactctaaaataaaatgaaaatctctataatactttaaaaataaaataaaagggatactcattcttt

SEQ ID NO: 267008 - DNA, 332 bp, Homo sapiens
agctgcccattaagattttgcctaaggatggaaatagctgtgaacagcgtttgggaaaacgtttcctgcctgcagaagaggcctcttcagaactacagactcttggcttttttccctctctaggttcctattcactaagttacttagcatctcgtttaaaaagtactttggagaattaactcaggcttggaggttgggctgtaaaacgttcccaccaatggaaacccagaggatcttggtggcgtggtcacaggaacacacctacgtggcttgcttcccttctggcagcgttcactttcatctagcattaaaaaaaatctgcaccacagtgt

SEQ ID NO: 267009 - DNA, 266 bp, Homo sapiens
tagctttagctatggctggtgtaatcagacaccacgtaccaggcaaacctaacccttgaggccctgattacttaaaaacaataggagtgaaacctccctccaccaaatagaaaggaggtggctgcattcaagcattattcctcgttctctagaaaggtagcggcaagggctactactcaaagggaagattctggaaatggttcttgtgggaaaagaaggaaaatacattagtcttttcagctaacctagaaaaaaaattcttggca

SEQ ID NO: 267010 - DNA, 96 bp, Homo sapiens
ttataactgtaaattagtgtatagtgtttcactccagagacttcaataatatagtgttatcaaaggacctgtacagatttcagagaaagacacatt

SEQ ID NO: 267011 - DNA, 455 bp, Homo sapiens
gaagcggagaaggactacgtctttgacaaaaggctcagatacagtgtccgccagaatgaaagcaactgtcggtttcgagacatcgttgtgcggaaggaagaagggttcacgcacatcctgctgtccagtcagacctcggataacaatgccctgacacctgagggagctgaggatggtaactagcgtgcataaaaacttgactgcagcgcgcaatttgctcatcattttacatacattatcccatttgatctttatgaccgtgtaatgataccctctcatcttatggatgaagaccatggggagagggactcactgaactgatcgtggacacagacttagccaaggggcagacccagaatccaaacatcacatcttgggcttttccagctaaactttgttgtcatcagcatgtcatatttgttggccgcagatataattcactcagttaatgtatc

SEQ ID NO: 267012 - DNA, 482 bp, Homo sapiens
acaaagtaggaaacacaaatgactaataagctgaaaaaaccgtctaacttcacaggtaatgaaaatgcaaattgaaccaataatgcagttctatttttgtctatcaaatcatcacaaattaaaaaagataatactcagtgctcttcaggtgaggtgaagttgacactcttccagtcttttgctgtgaaacaaccattctggaaagcagtttgctggccactgaacagcccagtgcctccctgtcccgaggacatagaaggtgatgtgtgtgaaggctgagcacggggctccctgtggaggcaaatgtttgcatgagttgaggcttgaaccagcccagatgcccaccgatagaggaagtttaaagccattgggtacattgatttctgtgtcgccctaaacatgatttcataaaaacctttttcagtatgtgaaaatgatcagggtataaataaaaacaataggacataaaacttcatatttag

SEQ ID NO: 267013 - DNA, 323 bp, Homo sapiens
actctctggactctgtgatggaaagtgagggggtgtgtgactgaatgacctgttttggaaggtgattcaggggcacctgggaaaggtagcagattccctataaggcccccatgctggtccagagctggccttcacccttaactgcctaatgatatctccatgaaaaagttggaaagacataataggctgttaactggaatcatttacctgcctgtagttgaaatatttggctgaattgcattccttttgattgtctttttgaatagctatgcagtaagagaatgtctaaatatctgtaataataaaatagcagagaaaatcct

SEQ ID NO: 267014 - DNA, 291 bp, Homo sapiens
gctgttagttggcatcaagaatcttttaatctggaaagaaaatgttacctccttcatttgcaaaacagagtgtttctggcaccgtatcccaaagtgtcttctggttgttccgtttttcagaagttactgtgggcttctaattaccctcatttagacatccaggacagaaattgccacttcaacaagaaaattttgtaatgagccggaggaaatggtctcatcattactacgttatacgcagtctgagagtctgcgtggatttttatttcacaagaatgtgactgtttaatt

SEQ ID NO: 267015 - DNA, 425 bp, Homo sapiens
caccaggcagcactccaggctgtccatctatccgcccccagggggagaagggctcaggcagcttactgagaagggggctctggagacactcaccaggggcagaccatgaaaaccagactggccctgggaaagggagagtgccagaagcttccgaagaaagcacttcccatccccaggctcctttcctgtaacaaggttcctgggagtttccttactgcacagatgagaatggcttgtcattaacattcacatcaatagacgcttcttgaagacttgaaaatggctattgcctgtggggataagcatgtgacccctcctgccatccaccctcagccaccctagtgccaaggaaaggaagcatgaatacagattctaccagcagtagacacattctgaacaaatgaagttcaaattaaaatctcaaa

SEQ ID NO: 267016 - DNA, 185 bp, Homo sapiens
cagggattgattaatgtcccgctcctgaatacatgtaaaatttgtacaaaaatatcttctatgaaaatgatttgtaatctgtagacttattacctgggagatgtcttgatgtaaaatcccatcctttgggttgtgggttttttgttttctccaaataaatctgatctttaaagttcaaaaaaaaa

SEQ ID NO: 267017 - DNA, 395 bp, Homo sapiens
agaatttagctctgaaatccttataatgttagaatgcattgagttccaggacatgacattggtttctatgtggtaaatttgttacatcttactaagtagggggatttgggcataatcaagaacatagacataataaccatcacaatttgaagaaattagtgtgaggtcaaagctaagactgaacaaaaggaaatggagagcagtgtgccctgtgtgggtgcccacgtgtgcctggtcttgcccacttacagatggacttagccctggcttggggaagccttttcctctagaaccatatttgctcacgtgtgtctcctaattttactattcttctgccttgagattgcttattcctttaatattacaacttacagcagagtttccaaagtgtgact

SEQ ID NO: 267018 - DNA, 444 bp, Homo sapiens
ctttcaccccaaaagcagcgctgacctctgcaataataataatataataataataataatgatagcaaccacaagaagaacaataatgaccagtcttcccggtatccttcagtacttttactcctggcaaaaccaagcagcacgccgcctgattttccggatcttcactgatctaacaaacaactctgccaagatgataaatgctgcggtgaggttatcatcggttattatcgtcggcacaacgtttgcacagacaactgggccgtatagtttatgctggtctaaaaaacaatcaatatttaaatctacactctatagcctgatttttttttaaaacatggttaaaaaatactttgtcctttgacatgcattatacgtcttttctgataggctaataataataataataataataataataaagttagccagtgctgttcatta

SEQ ID NO: 267019 - DNA, 421 bp, Homo sapiens
cctgttaaataaggggaccctaatgtggcccgcgatcaaactcacttcctcattaagagcacaagcctaagaaaaatcaacttgcaaaaaaaaagaaatgtattagtccattctcatgctactgacaaagacatgcctgagactgggttcctttgtaaattcatcatttgaggggagtcctgacgcaaggagtgggaactgagaaaagagaaaacaggaaatacacgccaacaataaaaagcaggctttcaaatgaagaacagaacatccaaaatttcagcaatgagagatgtaaaattcatggaaacactgactcacgaggtcagttagccatagtttaatgtctttagttcactctttctttcccttcctcaaaaggaagaataaggagaaaataaaaacttttatccatagtatataa

SEQ ID NO: 267020 - DNA, 452 bp, Homo sapiens
cagctaattttttgtatttttagtagagacggggtttcaccatgttagccaggatggcctcaatctcctgacctcgtgatccgcccaccttggcctcccaaaatgctggtattacaggcgtgagccaccgcgcctggccaaggaaactttcttaatgaaataaaggctatctattatatactaacagtaaatgaaacagtgagacactaaaggcattcttcactttagagtcagaaacaaaataagggcaagcccatcatcactgcaattcaaaattgttctggaagttctagcacgacaagaaagtaaagaagtataaatattagaaagttattactatttgtagattatatgataacctgcctagaaaatccagacatcaatggaaaaactatcagaaccagaaagaaagtttggtaatgtggctagataaaaatgtgttgcaaaaaaaa

SEQ ID NO: 267021 - DNA, 485 bp, Homo sapiens
ctgcatcctgaggactatgggtctagtatggacaataaagatggaggaggagaagatgtgcagagttccaggctaatttttcttcacccatttgcaatgcagaggacagacagagggttattagctataatataaaaagtgcttttataaattgacaaaaaaaaggacaaaagataaacaataggaaaacggacaagagatgtggagaatccatggacagaaaagcaaatccaagtagccaatgaatatatgaaaaaaatagtttagaaacactagtactaggaactaggaaattataaattaaaactaataatgtaaacatcaggtaggcaagcatttaaaaagaaaactaagatatcattggtgaagttgtgggggaaaaggtactattatactttttggaggaactgtaaattgttacagtgtctttagaaagcaaacttgttgctttctaaagcagccattaaaatgaaaaatacatatat

SEQ ID NO: 267022 - DNA, 557 bp, Homo sapiens
aatcgcttgaacctgggaggcagaggttgcagtgagccgaggtcgtgccattgcactccagcttgggcaacaagagcaaaactccatctcaaaaaattttttaaaataaaataaagaaatagcctggactttagtcaggtcctggcggcaccttctgtaagctctgtgattttgcatgcctctcagagcctgtttctgcatctataaaatgagactaatacttcctacctcatatagttacaataaggcttaaatgacaaggcctgcaaacagccagcacagtgcctgacaagtgctacccactctaccaatgccagtgcccttcccgctctaacacagagggaaatgaaaatgaagctagtgtggttttgcctatggttgcaaatcacatgaaaccttaaagttgtgactgtgatgtgttgaaagggcactttatgaggatgttgaccccttatctgcaggaggtcaggatgctccccaccctcaagggtgggaaatgagcattttcatcatcacaaatgacataacagaaaaatgttaagaatatgtgggattct

SEQ ID NO: 267023 - DNA, 477 bp, Homo sapiens
aggcccacgcaggtgctgggtctggttggagtgctgctcccacgccgacttccccttggcgcactcttatggtctttcccttgcaaggaaatgcatcctcgggtggatctggaggtcacgtgaaccttttttcccttgtgggtttgcccattcactgcttctgtctcatttaggactgaaaaactttgattcgaggtctgcataggattgctttagggggtttcacttattcaggtgtttcttgctttaaggctatttcacttgttgttgttgttgttgttgttcttagtctccatatcttcaaccttagattctgatctgaaaatataaaagaaatttgtgaaccggtccccatcttgggggagaacaggatgaatcaagtgaaacaaaagtgtagtaagcttgagggttggtaaaggtgtgcaagggatcactgccaaaaactgaaggaaggggacagagcgagaatctgtctca

SEQ ID NO: 267024 - DNA, 256 bp, Homo sapiens
ctcaggtgatccacccttcttggcctcccatagagctgggattacaggcgtgagccatcccacccggctgaagttttttagcctgagtttctatcttcatattagcctagatttttcattaaattaaaacattgttctggatctttggttaactttagtcttcagaatattctatgatggtagtcacaaaggcaaaaattaagtagcttaagttacattctaataaaagaaataataaagaaatctgattgtacca

SEQ ID NO: 267025 - DNA, 609 bp, Homo sapiens
caccattcagtggattcctaagggacattttgcaaacatcttagttctgttctctcttcctctcccctccttcacttcttcacatctgggttcccaaaagcaaatggtcagcttactagacaatggtatggtttgagatggaaacactgctctaaaagagtggctcctagatgccagtgtatgaactccagttgtgtggtaacagagttttcactggtgcaagaatcataataatgaagttctttttcttaagtgctaaatgtattcagttgtttcattatgaaattacattgttctctctcatcttttggtgttaaagtgtccctttgtaaaatgatgtttattatagatgattgttctgtcattattgtattttaatatttttagtaggcaataaaaagaagccaaatctaatactctccaaaatatttttggaaatattaatggttgatcacagccagtggtctgggaattcgtgctttagaagatgtatgtttggctttgtgtttatatatatatgagtacctgtgaacgatatttgtatctagaaatacactagtcactgattgaatgtttattgactccctcctgaacaccaagacattgtac

SEQ ID NO: 267026 - DNA, 324 bp, Homo sapiens
taagagacacaggttttgttatgtttgttgcccaggctagtatccagctcctaggcttaagcatactcccacttcagcttcccaagtagctgggactactggcgcaaatcactgggtccagttctcagttcttaattcctacctttgtgtttgcaatttaggatatgctggctgtacagtgtttccatgttgtagcctcttgaataaggaaaaatctcagccaccaggtctgaccaaaaaggtcaattctaagttgtaatgttcatttcatgtccgcaactcccaagagttatttggagttcccactgggaaccacatgcattc

SEQ ID NO: 267027 - DNA, 643 bp, Homo sapiens
taaaagtagtatgactgagaagatattttcctcacttattaaaaagatgaacatatgtgatggaatctaaaatccattcatctggaggaaaaaatggtagagaatagtcagaaaatcctttaaaagaaagaatgataggggtaggagctaatctgccttatcatctatataattgagtcttcacaattattgtatttgacactgaggaaactgagacttagaaaatataactagctcagtgtggtagatattattatttgcttacagttcttcattttctctaagtccctgacatgccttccccgtggagacaatgcattttcctttcgcattcacttagggttgattgtgtgatcttcagaccaatgcagtgtacgtggaaaaaacaatgtgttggagttgaggtttaagagtgtggcaagtttcagccagccttcttgtactcttaccatccattataagaagaatttattccagggagctgttgttatcacagcctgaaaaaacagaaatgtgtagcactcaaatctgacctgtagcttggagcaaagtccatttgtgtccagaagaacactgcagtgtcacagctgacccagatacccacgaaagagaaataaatattttttgttgtacgccactgaga

SEQ ID NO: 267028 - DNA, 499 bp, Homo sapiens
ggacttcatgtctaaaacaccaaaagcaatggcaacaaaagccaaaattgacaaatggaatctaattaaactaaagagcttctgcacagcaaaagaaactaccatcagagtgaacaggcaacctacaaaatgggagaaaattttcgcaacctactcatctgacaaaggactaatatccagaatctttaatgtcttgatttctttacctgttaattcctaactgacactttagtgtgtattaaaaactcccgccgtgatggtggaactgtcattttcttattgtagttccatcaaagatatataaattatatatacatatatacaaaaattatatatatgtacacacatatacatgtatgactgtttaagctatttacatttattgtgatgtctatattgctgttatcttctaccatctcactttatgtttctagttgtccaactgttttaatgccccttttctgacttcctctgaataaaatgataagctttcgcttaa

SEQ ID NO: 267029 - DNA, 178 bp, Homo sapiens
tccagggataaagttttatcaaataaacataagcacccagtgtctcatgggagacaggtaacaaatgtagattaatttggtgttctgacattttaaaattttgtacatcttaaaatatattagggccacttcaggaaaataatgaattaaaatataccattaaaactattttaagagg

SEQ ID NO: 267030 - DNA, 427 bp, Homo sapiens
atttttcaccaccttagcggaagtaggagcccaacagaagagatgtaaaacatactgagaattaaagagctacaactggccttaaaaatcttataaattctatagtaccaatatgtatctggaaagagatggaagtactccttcagggacttaaaattctttctgcaactctctttccctgcttttctaataaatgcaagataccctgtggaccagagaggtattctgagtatggaccacttgtctggatggttcagaaagaagctttttattaactctggaaccattttgtagtaagactcaagctaggtaagtatataacaagcccagagttttatttcgtaaggaataaggttcaggacattagtaatagaaaaacacaaatttaatttaaaactaaaggtgctccttgggagaaatttatccc

SEQ ID NO: 267031 - DNA, 359 bp, Homo sapiens
tcatggctcactgcagacttgacctcccaggctcaagtaatcctcccaactcaacctcccaagtagctgggacaacagtgaggaccagatgctggttgaagagctccccagagtcttgttgggataactgcagtctctgctttctgtagaggatgtgacaagggtgaacaccagtgtggagccaggagaagccgttcacctgtgaatgataacagggccagcaccaactcctactgactgagcatttctgtgtcagaccaaggggtctgtgctttacacactcacttcatacctcaagatgactgtgtgagctttattgaggcataatgaacaaataaaaattatatctgcttaaggta

SEQ ID NO: 267032 - DNA, 658 bp, Homo sapiens
tgtcagcctcccaaagtgttggtattataggtgtgagccactgcacttagcctgtaatatcttttaaatagtttttttttttaatagactgtaggaactagagtgttatgctcctcttctgtgtttatgtggtttttccaaaaatgaatgttttttaggcaggttttcttaacagaggcaccattaaccttttgggactaataattatttgtcatgggaagctattctgtgcactgtaagaatgcctgatggcgtctctggcctctaccccctaaatgccagtaggaccttccctcaccctagttgagacaacaaaatttttccagactttattatatgtgcccttttgggggttggggtaaggtcaaaataatccccaaggctgggagcagcggttcacacctgtaatctcagcactttgggaggccgaggtgggcgaatcatttgaggccgggagttcgagaccagcctggccaacatggcgaaatcctgtctctactaaaaatagaaaaattagctgggcatggtcgcacacgcctgtagtcccagctacttgggaagttgaggcaggagaatcgcttgaacccgggaggtggaggttgctgtgagccgagatggcaacactacagcctgggcaatagagcaagactccatctca

SEQ ID NO: 267033 - DNA, 630 bp, Homo sapiens
tgtcagcctcccaaagtgttggtattataggtgtgagccactgcacttagcctgtaatatcttttaaatagtttttttttttaatagactgtaggaactagagtgttatgctcctcttctgtgtttatgtggtttttccaaaaatgaatgttttttaggcaggttttcttaacagaggcaccattaaccttttgggactaataattatttgtcatgggaagctattctgtgcactgtaagaatgcctgatggcgtctctggcctctaccccctaaatgccagtaggaccttccctcaccctagttgagacaacaaaatttttccagactttattatatgtgcccttttgggggttggggtaaggtcaaaataatccccaaggctgggagcagcggttcacacctgtaatctcagcactttgggaggccgaggtgggcgaatcatttgaggccgggagttcgagaccagcctggccaacatggcgaaatcctgtctctactaaaaatagaaaaattagctgggcatggtcgcacacgcctgtagtcccagctacttgggaagttgaggctgtagtgttgccatctcggctcacagcaacctcgacctcctgggttcaagcgattctcctgc

SEQ ID NO: 267034 - DNA, 354 bp, Homo sapiens
tttctcctcctctttctaaattaaaaagaaatattgtgataagaagctcctcctaccttttttccccatgtttgaagaaactgggttgctaagggaagaaaagacttgcctaataggagtttggggtcctgacccctggaagggagctggggatagactaggagaggaaggagaggtggaaaggcatccaagcccagaccagcctggctgcccaggtcatctaagtcagttccctgcctccgtaccagaaaaacccaaaccggaggctcttggatgtgaggctccaggttcatcctgccagtttctagtgaacttggtgatcacataggtttaaatgaataaatccacttttgt

SEQ ID NO: 267035 - DNA, 364 bp, Homo sapiens
tccagtcataggatacaagatcaatatgaaaaattcaattgctttcctatatgtcagaaatgagcaattggcattttatatttttaaaaaactaccacttacaatagtaccaaaagcaacaaaatggtataaatctgattaaatatgtacagaacaggtatatggaaaactataaaaagtagaagaaatgtaaaaagctaaaaattagtggagaatattgcatgttcatgaatttaagactcattattgttaatatgtgaacttttcccatcttcatctatagattgaaggcaattgcatttaaaatactatcaagaagctgggtgcagtggctctcacctaagtttacagcgagctatgacca

SEQ ID NO: 267036 - DNA, 472 bp, Homo sapiens
catcttgtaatagacatcctataaagcccctgtgatttccatatgctatctgtctcatgtacatctcagaatttcagtgctttgagatgattgactccagcctcttcattatcagcaagggtaacagacctggtgaggtaatgttgattgtccacattttacagtaaatttgtgccggagacctgtgcgaggtcttaaaagtgcctacaaaatcatacctcaggatagaactacttcttagaagggcaagaatattatttttgaaagaaagtttttcatcagtagatgttaagaattgggttatcttatcatttgttctaaaatgttccatatgtatagaaagtaaatctacctctgctttttgattctctgtgaacttaaaatatgaattacagtttaaataatattggataataaggaagtccagttattaaaacctattttactctaaaatgagtaactgaaacctatt

SEQ ID NO: 267037 - DNA, 249 bp, Homo sapiens
aagaacaaaaaacaaaaaaccttgagttacagtacaaatcacaggtatgaaacaacttgtttcaaagaagtttaaaagatgagtaatctttagaaattaggttaacaaagaaaatgacagacatggtaaaacccgtctctactaaaaatacaaaaattagccaggcatggtggcacgcctatactcccagctacttgggaggctgaggcagaatagcttgaacccgggaggtggaggttgcagtgagcc

SEQ ID NO: 267038 - DNA, 1456 bp, Homo sapiens
caggtgcggcgctgtggcaggaagccaccccctcggtcggccggtgcgcggggctgttgcgccatccgctccggctttcgtaaccgcaccctgggacggcccagagacgctccagcgcgagttcctcaaatgttttcctgcgttgccaggaccgtccgccgctctgagtcatgtgcgagtgggaagtcgcactgacactgagccgggccagagggagaggagccgagcgcggcgcggggccgagggactcgcagtgtgtgtagagagccgggctcctgcggatgggggctgcccccggggcctgagcccgcctgcccgcccaccgccccgccccgcccctgccacccctgccgcccggttcccattagcctgtccgcctctgcgggaccatggagtggtagccgaggaggaagcatgctggccgtcggctgcgcgctgctggctgccctgctggccgcgccgggagcggcgctggccccaaggcgctgccctgcgcaggaggtggcgagaggcgtgctgaccagtctgccaggagacagcgtgactctgacctgcccgggggtagagccggaagacaatgccactgttcactgggtgctcaggaagccggctgcaggctcccaccccagcagatgggctggcatgggaaggaggctgctgctgaggtcggtgcagctccacgactctggaaactattcatgctaccgggccggccgcccagctgggactgtgcacttgctggtggatgttccccccgaggagccccagctctcctgcttccggaagagccccctcagcaatgttgtttgtgagtggggtcctcggagcaccccatccctgacgacaaaggctgtgctcttggtgaggaagtttcagaacagtccggccgaagacttccaggagccgtgccagtattcccaggagtcccagaagttctcctgccagttagcagtcccggagggagacagctctttctacatagtgtccatgtgcgtcgccagtagtgtcgggagcaagttcagcaaaactcaaacctttcagggttgtggaatcttgcagcctgatccgcctgccaacatcacagtcactgccgtggccagaaacccccgctggctcagtgtcacctggcaagacccccactcctggaactcatctttctacagactacggtttgagctcagatatcgggctgaacggtcaaagacattcacaacatggatggtcaaggacctccagcatcactgtgtcatccacgacgcctggagcggcctgaggcacgtggtgcagcttcgtgcccaggaggagttcgggcaaggcgagtggagcgagtggagcccggaggccatgggcacgccttggacagacaggctttctcctcgttgcccaggatggagtacagcagtgcaatcacagctcacggcaacttctgcctcctgggttcaagcaatcctcccgc

SEQ ID NO: 267039 - DNA, 514 bp, Homo sapiens
taatagatttatgaatagtatctgttctaataatttccatatattaaaaattacttgaaatcaatgtgtttcagcaagaaatattagcatgaaattacatttttttaaagagaaccattcaaaaataagcagaatgcttatcagaatcaagattatgaaatattgcaattttgaaatataaatttgaaaattccaactatagaaaatttcccaatataatgactaccacttgtacttttaaatatatgcatttatttagattacttagcctgttcatgaggacatccatagattcaaaaaattactttctaccctttatttataatgcaatttgtcatattgttaaaattatgcaaaaattttatttgtaattagtagaattgagaaactatttttggttagtgtaaatttagctttatggtcatctagcttttacatatacatataaacatataatatgtgtatacttcagttgtaatatttaatgatctttaagagcctcacattttaaata

SEQ ID NO: 267040 - DNA, 352 bp, Homo sapiens
tcgcccaggctggagtctctaaaaacattttcttttcatttaaaaaaaaattttagaaagaaaatggaaggtagtgcttactatctctttcagcaaaagaaactactccaacagctgctgttttccttgcccatagtcatagcaaattactgaccaagttggaaacttagaaccagagcctgtatcttttcaaattctttccttaggcaagcaaatcagactccttcacattatttaaaacaaacaacaatggaatgttggattggcaagagataggcacagctcctgtttcattttgctagttttctttgctgattttttaaattaaaaacaaacaaaaatcctttcccta

SEQ ID NO: 267041 - DNA, 275 bp, Homo sapiens
gacaagttcacaggattttgtttttaattattttagtcaagatcatggagaaatgaaaaagtgttttaaaattacatgcaaaatagtagtggatatatattaggttaaattattaatacaatgaatcatgtttccttttaccactaaagaatataagattacatttatagcatacattatatttctattggacagtgctgctctgaatttaaaaagttatctacaaaatataaggtgtgactttggatcctgactcaaaccaaccagctgtttaa

SEQ ID NO: 267042 - DNA, 358 bp, Homo sapiens
tcattattttgtgatgtaagcatgttttaacccagaatcaattgactgttcaatacgattggagtccgactgcagtaattttagaaactttattacggtagtaaattgtggtttcaaatcacatgtcattcgtgaccatgcttataaaagagaagacgacagtacaactcccacactggtactagcaattttcttctctccagtggtcttggcttccggcaactgaagtttgtccacttacggctggggctccagggacagagaatgctttgattatttttccagcttggccagcctccctgttcttggggctcctgtctctctatgtatggtttatattaaaaagtagagcgccaaa

SEQ ID NO: 267043 - DNA, 1460 bp, Homo sapiens
cgacttcacgcagggtccgtggggtccccgcggcgcgcagcggctgaaggaggccccagggccttggcgaccgcagcggcggctttagcgtcagtgactaggcagcagggggtcaggatgcggcgaagctcccgcccgggctcggcctcgtcctcgcgcaagcacacgcccaactttttcagcgagaacagctcaatgagcatcacctcggaggacagcaaagggctccggtcagcggagcccgggcctggggagcccgagggcagaagagcccggggcccgagctgcggtgagcccgccttgagcgcgggagtgcccggaggaaccacatgggcaggaagctctcagcagaagccagcgcctcggagccacaactggcagacagcctgtggcgcggcaaccgtgaggggcggggcctcggaaccgactgggtctccagtagtctctgaggagccgctcgaccttctcccgaccctggatctgaggcaggagatgcctcccccgcgggtgttcaagagctttctgagcctgctcttccaggggctgagcgtgttgttatccctggcaggagacgtgctggtcagcatgtacagggaggtctgttccatccgcttcctgttcacggctgtgtcgctgctgagcctctttctgtcagcattctggctggggcttctgtacctggtctctcctttggagaatgaacctaaggagatgctgactctaagtgagtaccacgagcgcgtgcgctcccaggggcagcagctgcagcagctccaggccgagctggataaactccacaaggaggtgtccactgttcgggcagccaacagcgagagagtggccaagctcgtgttccagaggctgaatgaggattttgtgcggaagcccgactatgctttgagctctgtgggagcctccatcgacctgcagaagacatcccacgattacgcagacaggaacactgcctacttctggaatcgcttcagcttctggaactacgcacggccgcccacggttatcctggagccccacgtgttccctgggaattgctgggcttttgaaggcgaccaaggccaggtggtgatccaactgccgggccgagtgcagctgagcgacatcactctgcagcatccaccgcccagcgtggagcacaccggaggagccaacagcgccccccgcgatttcgcggtctttggcctccaggtttatgatgaaactgaagtttccttggggaaattcaccttcgatgttgagaaatcggagattcagactttccacctgcagaatgaccccccagctgcctttcccaaggtgaagatccagattctaagcaactggggccacccccgtttcacgtgcttgtatcgagtccgtgcccacggtgtgcgaacctcagagggggcagagggcagtgcacaggggccccattaaacatgctgatttttggagtagaaaagagt

SEQ ID NO: 267044 - DNA, 911 bp, Homo sapiens
tcggcctcccaaatcgctgggattacaggcgtgagccaccgcgcccggccaggagaccaactcttgacggagcctccctgaggggcggggcttcagagggcggagctggagccgggatagggctgcggtgggaccaaagcctgtgagagacttcccagctgtctggcttgtggactgagcaatctgcggcccggtctcgaggggaaaataggtctgtggtccgcaaggccccagtggagcccttgggttcccgcagaaccgactgggtctccagtagtctctgaggagccgctcgaccttctcccgaccctggatctgaggcaggagatgcctcccccgcgggtgttcaagagctttctgagagcctccatcgacctgcagaagacatcccacgattacgcagacaggaacactgcctacttctggaatcgcttcagcttctggaactacgcacggccgcccacggttatcctggagccccacgtgttccctgggaattgctgggcttttgaaggcgaccaaggccaggtggtgatccaactgccgggccgagtgcagctgagcgacatcactctgcagcatccaccgcccagcgtggagcacaccggaggagccaacagcgccccccgcgatttcgcggtctttggcctccaggtttatgatgaaactgaagtttccttggggaaattcaccttcgatgttgagaaatcggagattcagactttccacctgcagaatgaccccccagctgcctttcccaaggtgaagatccagattctaagcaactggggccacccccgtttcacgtgcttgtatcgagtccgtgcccacggtgtgcgaacctcagagggggcagagggcagtgcacaggggccccattaaacatgctgatttttggagtagaaaagagt

SEQ ID NO: 267045 - DNA, 508 bp, Homo sapiens
tcggcctcccaaatcgctgggattacaggcgtgagccaccgcgcccggccaggagaccaactcttgacggagcctccctgaggggcggggcttcagagggcggagctggagccgggatagggctgcggtgggaccaaagcctgtgagagacttcccagctgtctggcttgtggactgagcaatctgcggcccggtctcgaggggaaaataggtctgtggtccgcaaggccccagtggagcccttgggttcccgcagaaccgactgggtctccagtagtctctgaggagccgctcgaccttctcccgaccctggatctgaggcaggagatgcctcccccgcgggtgttcaagagctttctgagcctgctcttccaggggctgagcgtgttgttatccctggcaggagacgtgctggtcagcatgtacagctgagacttaagctccgcccagagccctgcgggatttctcccggtgcccacgaagtccatcccaaagcaaccagctccca

SEQ ID NO: 267046 - DNA, 1295 bp, Homo sapiens
tcggcctcccaaatcgctgggattacaggcgtgagccaccgcgcccggccaggagaccaactcttgacggagcctccctgaggggcggggcttcagagggcggagctggagccgggatagggctgcggtgggaccaaagcctgtgagagacttcccagctgtctggcttgtggactgagcaatctgcggcccggtctcgaggggaaaataggtctgtggtccgcaaggccccagtggagcccttgggttcccgcagaaccgactgggtctccagtagtctctgaggagccgctcgaccttctcccgaccctggatctgaggcaggagatgcctcccccgcgggtgttcaagagctttctgagcctgctcttccaggggctgagcgtgttgttatccctggcaggagacgtgctggtcagcatgtacagggaggtctgttccatccgcttcctgttcacggctgtgtcgctgctgagcctctttctgtcagcattctggctggggcttctgtacctggtctctcctttggagaatgaacctaaggagatgctgactctaagtgagtaccacgagcgcgtgcgctcccaggggcagcagctgcagcagctccaggccgagctggataaactccacaaggaggtgtccactgttcgggcagccaacagcgagagagtggccaagctcgtgttccagaggctgaatgaggattttgtgcggaagcccgactatgctttgagctctgtgggagcctccatcgacctgcagaagacatcccacgattacgcagacaggaacactgcctacttctggaatcgcttcagcttctggaactacgcacggccgcccacggttatcctggagccccacgtgttccctgggaattgctgggcttttgaaggcgaccaaggccaggtggtgatccaactgccgggccgagtgcagctgagcgacatcactctgcagcatccaccgcccagcgtggagcacaccggaggagccaacagcgccccccgcgatttcgcggtctttggcctccaggtttatgatgaaactgaagtttccttggggaaattcaccttcgatgttgagaaatcggagattcagactttccacctgcagaatgaccccccagctgcctttcccaaggtgaagatccagattctaagcaactggggccacccccgtttcacgtgcttgtatcgagtccgtgcccacggtgtgcgaacctcagagggggcagagggcagtgcacaggggccccattaaacatgctgatttttggagtagaaaagagt

SEQ ID NO: 267047 - DNA, 1499 bp, Homo sapiens
cgacttcacgcagggtccgtggggtccccgcggcgcgcagcggctgaaggaggccccagggccttggcgaccgcagcggcggctttagcgtcagtgactaggcagcagggggtcaggatgcggcgaagctcccgcccgggctcggcctcgtcctcgcgcaagcacacgcccaactttttcagcgagaacagctcaatgagcatcacctcggaggacagcaaagggctccggtcagcggagcccgggcctggggagcccgagggcagaagagcccggggcccgagctgcggtgagcccgccttgagcgcgggagtgcccggaggaaccacatgggcaggaagctctcagcagaagccagcgcctcggagccacaactggcagacagcctgtggcgcggcaaccgtgaggggcggggcctcggaaccgactgggtctccagtagtctctgaggagccgctcgaccttctcccgaccctggatctgaggcaggagatgcctcccccgcgggtgttcaagagctttctgagcctgctcttccaggggctgagcgtgttgttatccctggcaggagacgtgctggtcagcatgtacaggtcagaggaagggacgctggcgccccaggaacagctctttggagggggtggggagcagggccggaaccttgctggcgcttgagccgattcagatctgattgagtcatgttggcaagagctgggtctaggaccctggggtggggactggagggttgagcaggtcggggcctcagcctccctccggttccccagggaggtctgttccatccgcttcctgttcacggctgtgtcgctgctgagcctctttctgtcaggaacctaaggagatgctgactctaagagagtggccaagctcgtgttccagaggctgaatgaggattttgtgcggaagcccgactatgctttgagctctgtgggagcctccatcgacctgcagaagacatcccacgattacgcagacaggaacactgcctacttctggaatcgcttcagcttctggaactacgcacggccgcccacggttatcctggagccccacgtgttccctgggaattgctgggcttttgaaggcgaccaaggccaggtggtgatccaactgccgggccgagtgcagctgagcgacatcactctgcagcatccaccgcccagcgtggagcacaccggaggagccaacagcgccccccgcgatttcgcggtctttggcctccaggtttatgatgaaactgaagtttccttggggaaattcaccttcgatgttgagaaatcggagattcagactttccacctgcagaatgaccccccagctgcctttcccaaggtgaagatccagattctaagcaactggggccacccccgtttcacgtgcttgtatcgagtccgtgcccacggtgtgcgaacctcagagggggcagagggcagtgcacaggggccccattaaacatgctgatttttggagtagaaaagagt

SEQ ID NO: 267048 - DNA, 1623 bp, Homo sapiens
tcggcctcccaaatcgctgggattacaggcgtgagccaccgcgcccggccaggagaccaactcttgacggagcctccctgaggggcggggcttcagagggcggagctggagccgggatagggctgcggtgggaccaaagcctgtgagagacttcccagctgtctggcttgtggactgagcaatctgcggcccggtctcgaggggaaaataggtctgtggtccgcaaggccccagtggagcccttgggttcccgcagaaccgactgggtctccagtagtctctgaggagccgctcgaccttctcccgaccctggatctgaggcaggagatgcctcccccgcgggtgttcaagagctttctgagcctgctcttccaggggctgagcgtgttgttatccctggcaggagacgtgctggtcagcatgtacaggtcagaggaagggacgctggcgccccaggaacagctctttggagggggtggggagcagggccggaaccttgctggcgcttgagccgattcagatctgattgagtcatgttggcaagagctgggtctaggaccctggggtggggactggagggttgagcaggtcggggcctcagcctccctccggttccccagggaggtctgttccatccgcttcctgttcacggctgtgtcgctgctgagcctctttctgtcagcattctggctggggcttctgtacctggtctctcctttggagaatgaacctaaggagatgctgactctaaggtgaaagagggcacctagggtgggaaattggggggctcaaagttgcttctttgagaaccttgaaggcgtgggggcctttgggaggtgtccagggggacagggagccaaccccacggcgcccacctcccacctccagtgagtaccacgagcgcgtgcgctcccaggggcagcagctgcagcagctccaggccgagctggataaactccacaaggaggtgtccactgttcgggcagccaacagcgagagagtggccaagctcgtgttccagaggctgaatgaggattttgtgcggaagcccgactatgctttgagctctgtgggagcctccatcgacctgcagaagacatcccacgattacgcagacaggaacactgcctacttctggaatcgcttcagcttctggaactacgcacggccgcccacggttatcctggagccccacgtgttccctgggaattgctgggcttttgaaggcgaccaaggccaggtggtgatccaactgccgggccgagtgcagctgagcgacatcactctgcagcatccaccgcccagcgtggagcacaccggaggagccaacagcgccccccgcgatttcgcggtctttggcctccaggtttatgatgaaactgaagtttccttggggaaattcaccttcgatgttgagaaatcggagattcagactttccacctgcagaatgaccccccagctgcctttcccaaggtgaagatccagattctaagcaactggggccacccccgtttcacgtgcttgtatcgagtccgtgcccacggtgtgcgaacctcagagggggcagagggcagtgcacaggggccccattaaacatgctgatttttggagtagaaaagagt

SEQ ID NO: 267049 - DNA, 1322 bp, Homo sapiens
tcggcctcccaaatcgctgggattacaggcgtgagccaccgcgcccggccaggagaccaactcttgacggagcctccctgaggggcggggcttcagagggcggagctggagccgggatagggctgcggtgggaccaaagcctgtgagagacttcccagctgtctggcttgtggactgagcaatctgcggcccggtctcgaggggaaaataggtctgtggtccgcaaggccccagtggagcccttgggttcccgcagaaccgactgggtctccagtagtctctgaggagccgctcgaccttctcccgaccctggatctgaggcaggagatgcctcccccgcgggtgttcaagagctttctgagcctgctcttccaggggctgagcgtgttgttatccctggcaggagacgtgctggtcagcatgtacagggaggtctgttccatccgcttcctgttcacggctgtgtcgctgctgagcctctttctgtcagcattctggctggggcttctgtacctggtctctcctttggagaatgaacctaaggagatgctgactctaagtgagtaccacgagcgcgtgcgctcccaggggcagcagctgcagcagctccaggccgagctggataaactccacaaggaggtgtccactgttcgggcagccaacagcgagagagtggccaagctcgtgttccagaggctgaatgaggattttgtgcggaagcccgactatgctttgagctctgtgggagcctccatcgacctgcagaagacatcccacgattacgcagacaggaacactgcctacttctggaatcgcttcagcttctggaactacgcacggccgcccacggttatcctggagccccacgtgttccctgggaattgctgggcttttgaaggcgaccaaggccaggtggtgatccaactgccgggccgagtgcagctgagcgacatcactctgcagcatccaccgcccagcgtggagcacaccggaggagccaacagcgccccccgcgatttcgcggtctttttcctcctttcattcttcacccaccagggcctccaggtttatgatgaaactgaagtttccttggggaaattcaccttcgatgttgagaaatcggagattcagactttccacctgcagaatgaccccccagctgcctttcccaaggtgaagatccagattctaagcaactggggccacccccgtttcacgtgcttgtatcgagtccgtgcccacggtgtgcgaacctcagagggggcagagggcagtgcacaggggccccattaaacatgctgatttttggagtagaaaagagt

SEQ ID NO: 267050 - DNA, 937 bp, Homo sapiens
tcggcctcccaaatcgctgggattacaggcgtgagccaccgcgcccggccaggagaccaactcttgacggagcctccctgaggggcggggcttcagagggcggagctggagccgggatagggctgcggtgggaccaaagcctgtgagagacttcccagctgtctggcttgtggactgagcaatctgcggcccggtctcgaggggaaaataggtctgtggtccgcaaggccccagtggagcccttgggttcccgcagaaccgactgggtctccagtagtctctgaggagccgctcgaccttctcccgaccctggatctgaggcaggagatgcctcccccgcgggtgttcaagagctttctgagcctgctcttccaggggctgagcgtgttgttatccctggcaggagacgtgctggtcagcatgtacagggaggtctgttccatccgcttcctgttcacggctgtgtcgctgctgagcctctttctgtcagcattctggctggggcttctgtacctggtctctcctttggagaatgaacctaaggagatgctgactctaaggtgaaagagggcacctagggtgggaaattggggggctcaaagttgcttctttgagaaccttgaaggcgtgggggcctttgggaggtgtccagggggacagggagccaaccccacggcgcccacctcccacctccagtgagtaccacgagcgcgtgcgctcccaggggcagcagctgcagcagctccaggccgagctggataaactccacaaggaggtgtccactgttcgggcagccaacagcgaggtgagccccggcccaccttggaaacccctgatggatccctgctcccagggtcctgagacttaagctccgcccagagccctgcgggatttctcccggtgcccacgaagtccatcccaaagcaaccagctccca

SEQ ID NO: 267051 - DNA, 397 bp, Homo sapiens
ccgtttccaggctgaggtaggagcaaggacgacgggagctgagcggctctgtgttttgtcccttcatccaacaggaacctaaggagatgctgactctaaggtgaaagagggcacctagggtgggaaattggggggctcaaagttgcttctttgagaaccttgaaggcgtgggggcctttgggaggtgtccagggggacagggagccaaccccacggcgcccacctcccacctccagtgagtaccacgagcgcgtgcgctcccaggggcagcagctgcagcagctccaggccgagctggataaactccacaaggaggtgtccactgttcgggcagccaacagcgaggtgagccccggcccaccttggaaacccctgatggatccctgctcccagggtc

SEQ ID NO: 267052 - DNA, 259 bp, Homo sapiens
cacgaggcctaatgctgaatcctgcttagaggatctattttgtagagccgctttggtcccaatctttgttttcctctgggtcagcaggaaacagatgtcattctcaattttagaataagaatagtttaatattacgggactatttttaaaggtgtgggcaaagcttagggaaaccataagaaataggaaaatacccaaaagctagtaataagggttttttttttgtttgtttgctttttaatccttaggcctgaaaagc

SEQ ID NO: 267053 - DNA, 852 bp, Homo sapiens
aacccacacgccatcaacctccagaccctctcgccgtggcttagaggtgtctctgacaacgtggcacactgggaaggccttctttcctgctaccaatacaaatgcattctgaatttgatatgtcattaaatgtaaaaatacagccaatttgaaacaagcaaatggaaattcccaggaaccaaaaacagaaagaaaaatcagagctaccgcagtgctgtccctgcagacagaatttgggagaggtactcagagtcacctcctgtgagcctatgcaagccagctcctgcacaaccctggttttagtccagccttctgcagaattccacattaaacaggatgaagaataggttgttagcagactgaggtacttggggcaacatttcgtacacaacaggagggagaaacgactccagaaaaacaatcagattttggtgaaactgatgtttgcaagtgtgagtgagccccatgtgctgaagcttcaggaacccctgagatggcacaagttctgccgtactgggcaacggatggtcttgaagcacacaagacactggaagacatgagggcaattgctacacgccaagcccggtgccaagcacgttgtgcaggttgtttcgttgattccgggcctggcctttgagatctgtggaggataccatgaactggctggctctgcatcctgcttgcaggcgctggcaagctggaacctgcttttctacgccacactgcagagggccctgaatgtgatctatgattgcaacaagcagccctgatgcggatccggagggcagggatgacgtgggggctgcctttctggttgacctgctggtaagcatggcctcatggatctatcac

SEQ ID NO: 267054 - DNA, 530 bp, Homo sapiens
cagtccctgcagggtcagcagggccccagatgtcgaagcgtcagagtacagaaatcaaagatgtttggtgcagtgtgtgtgtctgctggtgtgacaggaagacagaccagcagcaagggagccttctgcagaattccacattaaacaggatgaagaataggttgttagcagactgaggtacttggggcaacatttcgtacacaacaggagggagaaacgactccaggttgtcttgtggtagaggagattttgccttgcaattttacatacttatgctacgtggaaggctgggtggcgtgacttcagaaaaatgtttcctcaggaaagagacacacagagagagagagaaagagagaaagagagaacccacctacctgttttgcaaaagtctcatgaatcatcccttcctgtggtcctgctccctgagatcctttcaccgctcacagtgggctacttctaagagcgtgcctggcacagggtcactgagagcatagtcttaataaaacaatgatggatgcttgtctctctca

SEQ ID NO: 267055 - DNA, 717 bp, Homo sapiens
aacccacacgccatcaacctccagaccctctcgccgtggcttagaggtgtctctgacaacgtggcacactgggaaggccttctttcctgctaccaatacaaatgcattctgaatttgatatgtcattaaatgtaaaaatacagccaatttgaaacaagcaaatggaaattcccaggaaccaaaaacagaaagaaaaatcagagctaccgcagtgctgtccctgcagacagaatttgggagaggtactcagagtcacctcctgtgagcctatgcaagccagctcctgcacaaccctggttttagtccagccttctgcagaattccacattaaacaggatgaagaataggttgttagcagactgaggtacttggggcaacatttcgtacacaacaggagggagaaacgactccaggttgtcttgtggtagaggagattttgccttgcaattttacatacttatgctacgtggaaggctgggtggcgtgacttcagaaaaatgtttcctcaggaaagagacacacagagagagagagaaagagagaaagagagaacccacctacctgttttgcaaaagtctcatgaatcatcccttcctgtggtcctgctccctgagatcctttcaccgctcacagtgggctacttctaagagcgtgcctggcacagggtcactgagagcatagtcttaataaaacaatgatggatgcttgtctctctca

SEQ ID NO: 267056 - DNA, 698 bp, Homo sapiens
aacccacacgccatcaacctccagaccctctcgccgtggcttagaggtgtctctgacaacgtggcacactgggaaggccttctttcctgctaccaatacaaatgcattctgaatttgatatgtcattaaatgtaaaaatacagccaatttgaaacaagcaaatggaaattcccaggaaccaaaaacagaaagaaaaatcagagctaccgcagtgctgtccctgcagacagaatttgggagaggtactcagagtcacctcctgtgagcctatgcaagccagctcctgcacaaccctggttttagtccaggtaaaggcccgcccaggtgtttgaatatggactcctcacatacttctgcagactccagctttgggttgacccatcggggagagggaacttagcatgaacccttgtataaaaatgaaaatctctttcattggaagggaagatcactgactgggctagtctcccaagacctaggaaagagcttggctgtcagagggtgagctagggaacgaactgtgcttgttgatatccacatccaagactgatggccggaggaggcagttaagagcaaaaggcaatggaccaaactacatcaaagatgggattataacaaaactttaaaagtttgtttacaatgcagaaaattcattcttctggaaacagacttgaaaaaaataaaatatttactctaaa

SEQ ID NO: 267057 - DNA, 647 bp, Homo sapiens
aacccacacgccatcaacctccagaccctctcgccgtggcttagaggtgtctctgacaacgtggcacactgggaaggccttctttcctgctaccaatacaaatgcattctgaatttgatatgtcattaaatgtaaaaatacagccaatttgaaacaagcaaatggaaattcccaggaaccaaaaacagaaagaaaaatcagagctaccgcagtgctgtccctgcagacagaatttgggagaggtactcagagtcacctcctgtgagcctatgcaagccagctcctgcacaaccctggttttagtccagccttctgcagaattccacattaaacaggatgaagaataggttgttagcagactgaggtacttggggcaacatttcgtacacaacaggagggagaaacgactccaggttgtcttgtggtagaggagattttgccttgcaattttacatacttatgctacgtggaaggctgggtggcgtgacttcaggttttgcaaaagtctcatgaatcatcccttcctgtggtcctgctccctgagatcctttcaccgctcacagtgggctacttctaagagcgtgcctggcacagggtcactgagagcatagtcttaataaaacaatgatggatgcttgtctctctca

SEQ ID NO: 267058 - DNA, 412 bp, Homo sapiens
gcactggaagggccaattgcccaccatccatcttgcaaggtagtggacacatagggttacctggcacacctctgccagacagggctgctacataatttgtagggcccagtgcaaactgaaattagggggtcccttgctcaaatggcaggaaaaacatttcttccttctttctgggtctctctcttgtcatggtgttttttacttgctatttaatgtcacatcccttggacacaggaatactcatggggagattgcagacactcacaggtacccagggccctgttcacaactgtgtaggcccaaccattcccatgcacaggctcaggtcccctcccagcagatggcagtggttgctgggggttgcttgggcaggtagctgagaacccatccctgggagggggaggcacctgga

SEQ ID NO: 267059 - DNA, 758 bp, Homo sapiens
tgcctggcccaaatctccagtactttttctgctcataaaaatctgattatttgctaatcctttagaatgtatggtttctattgacagttggaaaaggatcacttcattcacgctgcctagtcaagtgaccctagcctctttaggtaagtgattcaatatattattaataaaagttacctttggttcaagctttgaaaataaattatattgtttatgtaggtaaaacacaaagatcagaaatcaatgacatttgaaacagcaagacgaaagggagtttaacatccagcatatatgaataactacaaccctacagaaaaaaaatccagttcaaaactcggcaaaggatttgagtagacattttttccaagaagatatacaaatgtccaaggagtacgtgaaaagcttctcagcatcattaatcattaggaaaatgcaaatcagaatcacaatgagccattacctcatacccattaggatggctatttttttaaagcaaaaaaaaaaaaaaggtgtagctgctatggaaaataatatgctggttcctcaacaaaataaatatagaattaccatatgatccagtaattccacatttaggtgtatacacaaaaaagctaaaagcagaacctcaaagaggtcttgtataccaatgttcataaaatcattatttacagtagcaaaacggtagaaaaatctctaatgactatcagtggatgaatggataaacaaagtatggtctatctacacaatgaaacataccc

SEQ ID NO: 267060 - DNA, 403 bp, Homo sapiens
ctgtgtgtgtagagtagacagtgttgatttctgttttcaggagcctaacctgcagggagagctgtaagaccttctcagacaacaatgatgtggggagatgtggacaaaatcagtctgtgttcaaatctttctgaacactgcgcagttatgattttgggcagtaacatttactgagtcacacaaaccatacagaacctgttctaggcactaaatggggcagggtgggaaaaaaatacaaaagataagatataatccctgactttcttgttagagcctcacaacgtgagaaacagaatagagaagtgaattattctgggtcacacagtatgttaatatcacaggagcaaaataaagattccttgactcttaatctaagagtctaagggtgattttccaagccact

SEQ ID NO: 267061 - DNA, 441 bp, Homo sapiens
ctctctaaccatttgttttactattctgccttatgagagtagaatgaagtataaacatatatggtaattgattcagacactctcagaaatggagaatactgcatagtttccaatgaatatctcatttaaaaataatgacattaagacattcttgggcagattaagtgacttactaagacaacatatacaatagctaggtatcaaatatacatctttcggcatgagtttaagaaaccaaatttgaaacagttgcaaaaaagtaggccacatttcaccagtagagattcctttcaggcagtgtgtgctagtaaatgtttcacaactaactctctgggaaaacaaagtggatttatagcatttgctgattttcataatgtaaatactcccaccatgcccaatttcaaactaatgaggagatgacaagcagctcacaaaattcca

SEQ ID NO: 267062 - DNA, 266 bp, Homo sapiens
gccgggtgaggaacagccagctctgtacccccagggactgcagaccctgttcttggaaatgctgttcaagctgctgggccggggctttgtgccctccaagttggcacggggggtgatgaggtgggcacaaccataccagctcctgggcccacaatgggaggagcaaaccctgccccccgcagggacccctgatattcctgccctagagacgggagccctgaattctgagtctgtttcctgggccccaagtcgccccaggacaaaga

SEQ ID NO: 267063 - DNA, 447 bp, Homo sapiens
gacaaatgactcaaacacttctccagagaagacacacaaccaaccaaaaagtacatgggaaggtgctcaacatagtaactagagaaatgcaaatcaaaccacaatgagaaattaccttgtaccaggccaggcacagtggggaggtagagataagagaagttgatgaatgggtacaaatacatgatttgacagaataagacttactgtttcagagagcagtagggtgactgtactttacaataatcaattgtacatttccaaatagctataagagagtaattcaaatgtttctagcataaaggcaaatcgtgcagatgatgaagacaccccaagtatactggtttgatctctacaacttgtatgaatgtattaaattataacatgtaccccaaaaatatgcatcaactgaaaaaaaaaggatcacaggcttaaatggaaaatataaaa

SEQ ID NO: 267064 - DNA, 818 bp, Homo sapiens
gtactctctactttatgagtaatgcttaattatcagactttatactgttacacagatccagaaatgagttacatagattaaacatactggctttgttttacctgtctttaggttttaacacattttattttggatctgtatgagagatcctttctttgttttaagctgtggcagttatccatgttttttgagcttttttttttgagcacaagatgaggatataaaaggccagtggaaacatttaataaaaaaaggaacttcatggtagagtaactacagatgtttttggaagactttgtgtggattagaatagtttgaaaaactaacatttgttatgaaaactgagtgcctgtcttcagtaatgtttattatgctgaacgtgcagtccacaacttgattacctgtttttctgctggtttgttacgcaaccttgcgtgactcatttaagaactattttatctagtttctttcctaatgtagaggtaatgctagcttgagagcttcaataatttataaataaattaacttcagaatgtagctaattatttgaggattattgggtgttttaataatgtattgtatcttgtatataacttatttttgcctaagaagtaatttctgtattccattcatttccatggaacacagaagtcaaaattctattccaggaaagtccacacttctttgaagtgccacttgaatttcctgaaggaatgtttgcttcaaaaagccttgtctgctttatcactttgaggttgttcactaagtcaactgtgaaggcccataaacttggagattcgacaacttccaaaaaaatt

SEQ ID NO: 267065 - DNA, 502 bp, Homo sapiens
  misc_feature (483)..(483): n is a, c, g, or t
gtactctctactttatgagtaatgcttaattatcagactttatactgttacacagatccagaaatgagttacatagattaaacatactggctttgttttacctgtctttaggttttaacacattttattttggatctgtatgagagatcctttctttgttttaagctgtggcagttatccatgttttttgagcttttttttttgagcacaagatgaggatataaaaggccagtggaaacatttaataaaaaaaggaacttcatggtagagtaactacagatgtttttggaagacttggagggatggaggactcccatggagggagtaactgcagatgtggaggaaatggtaagagaatcagatctccaagggggagtctaaagatgggactgattggctgcaatctcatgttaaacctttatgggatgaggagtccttagggatgaccaaagaaagtggttcctggatggaatctcctacggntgtagaaatggacggggtc

SEQ ID NO: 267066 - DNA, 435 bp, Homo sapiens
tggtgaaaccccatctctactaaaaatacaaaaaaaaaattagctgggcatggtggcacgcatctgttgtcccaactactcgggaggctgaggcaggagaatcacttgaacccgggaggcggaggttgcagtgagccaagatcgtgctattgcactccagcctgggcaacagagcaagactctgtctcacaacaacaaaaaaaaaaaaaaaaagaaaagaaaagaaaaaatacttcacagggctcacagggattctaatctgcaggcctgggctatctgggaggcagtgatctctaggctcctccccagcctgcaccatcaagtcctaggtactaggtactaagttaaaataaccagcaggtgggctgggcacaggggctcatacctgtaattccagcactcagcactttgcgaggccaggacaggaggattgct

SEQ ID NO: 267067 - DNA, 409 bp, Homo sapiens
gttgggcaggagcatagatatccactggggtggacaggagcatagatatccactgggctggacaggagcaagaggaaacaagggcatgcatgatgcagtgctttgtgggtcttaacaatcgggagccattactatcttagacctgaagaggcaaagaaggaggtggtagccagggcccagggagtggagctgtagagagagcctctctctggctaccacaggccaagtctgacaggaagccaaaggccataggagcccttgggtgcaattggtaatggtgtggaggagggcagggaagagtagagacgagacctggagaggcagtgatgtccagcactgcttgcaccctgacatagactgagagcccccagtggctgcttacctcatgtggagtagacctcagtgtcag

SEQ ID NO: 267068 - DNA, 526 bp, Homo sapiens
ccgtctgtgaaatggtgttgattctcaatgcctctttgagttccttcttggtctgctattctctccgtctgtgggtaccccccatgtctactggtgggctggggtgttttaggctccatccctggctgcacaactgattcttggtatgaccttaggcaagcagctcttctttcctgaggctgtttcctcatctgtaaaatggggctaaaagaccctaatgctgtaacgatttaatgaagttgctttggtaaatccctttagtgcctgacacatatagtagaccctcatggaacagtagcatttgtaaaacccagatgccattttcactggtgcctcagagtcacatgtgtttgttgaaagggtggagtgaatggtctcctctctattctgccaagcagaagaggctcaggcaatgggctctattggactgggaaaaaacttatccctcctacccctctggctcaagtttgtgttttccctgggatgtttcccagaggaagagctgggtttcggggcatcttggaca

SEQ ID NO: 267069 - DNA, 328 bp, Homo sapiens
gacacagtcattaaaatgcagttctacctaacaatacggcaaaaaggtcctcactacgccgcgctaatagcggtcggagtcgcagcgccaggcgccacgagcctcaagcccatcacaataaccgctgggcaagagcctaggagcgcccgcccgcgtgcggtcgcctttgccacgcaacgtttcacagctccgtgccccgctctaggcccaggttcttatccgcctgccctgggaatataccccagagccggcggggctttctgaaagccggtcgctgctgcccgccactggcccgtccctctaggcaggcattgtctggcggccgcgc

SEQ ID NO: 267070 - DNA, 443 bp, Homo sapiens
atactagagagagcataggtgaggttaggctctgctctttgtcctttgagtgacacaagtacactgactctgagccatcgccagacagagacatttcttgcaagttatagtcaaatagctttgatcgttccccaaattcttgcagctctcatactgccccgcaatgtggatgtagcccactgcatggtactccacccggaaatcctccatgctccagtgcctcttcttacttttacgccagacttcctgttcctgagtagatcagtgtcagatgggtgttaggaagaaagtaatctagctgaagtaatttaggctcatcaaggtgtgaacaaacttcttaatattcatacagccgtctgcatttttaaaagagcatttgtttaccgggctactctctctctaattggagacaggttggttgggcacttcaactaatagattaa

SEQ ID NO: 267071 - DNA, 505 bp, Homo sapiens
tttaacgggtcttgtctttattcccacaatttacagcttaggtccctctcacttctcatctggatgactgcaactgcctccaaatgtgagctatctgcctccagatttgtcaccttcacgtacccactatgatcagaacgagctctcttggcaaacgtgctcatgtccctttcctatctaagatccttccatcactccccgctgtcttgttaagtgaaatacaaacttcaaacattctacattaggttgacgttcatcttgttattctcttcgccctcctctccaatcctttcagacacacacgcacacacgtgtgtacatgcaaagcacacaagagtcccgtgttctttagcttttgaatatgctgtttcttctgattctttatccttggttaggttaaactttaaatttttcaagacataagctcaagcttcatgtcttctgagatgttttctttgatcccatttcccctactctcagacatagttagaaatcacctaagtcc

SEQ ID NO: 267072 - DNA, 221 bp, Homo sapiens
cacctgttcatcataacagccaagaatggaagcaattaggggactgacttcttggatttaggcagtaattttttgttattttggtcttgattgtgcatttgatgaatttctcaaccttctacccacaactttattctacagctccttttacctcaagtgggaagcaagtgttcttgcttcttacttgatttcagctttagcatcctcatctgaaaggtgac

SEQ ID NO: 267073 - DNA, 411 bp, Homo sapiens
ggctgggcttcggttttctgctggtctccttcatggacttgcagtgggttggtaggacaactgagggatggctgatctagagtggcctcagctttgataaatcagatattttccatgtggtctctcatcttctaatgagctaacccatgcttgtattcacagcaatgtcaggaagctgaaaaagaggaagtgcacaaggcgttttgaggtccagactcctattctgtcacattctattggttgaagcaactcagaagttcggcccagattcagtaagtggagaaatagatgccacttgatgggaagagctgcaaaattaagagctagtttaaaggagggggaaaactggggccatttttattagcactccactacatagactttttgacttggcccagttcctatctgctt

SEQ ID NO: 267074 - DNA, 343 bp, Homo sapiens
taatggcgactgggccgcccctgacgaagtgactcccgggccggggagcggggccagacctgcgccagagagaactgcagggagccgcagctcggggggtggcttgccctgagggaggggaggcagcctttccgccttgtcttccttcccagcggaccggcggatccccggagccggtgcgaggagggcacccggtgcgtccccggagcggggaggccaggccgggcagccctggggccggtcggggcggcgtcactgcaccctccgccaggctccgcgggatgcaccgtggtagccgagggcggaggcgacactctcaggtgagctcctgtaggacctggct

SEQ ID NO: 267075 - DNA, 377 bp, Homo sapiens
tattcctcagtaattctttatgactagtttggtttctacttgttgcataagtataaattagggaaatcagtggataattaaagtgttctttggatttttctcttttagtatctatttagatacattgatccggtttctttaatgctgagtttctcagccttggtgctattgacattttgggccggtgaattctcttttattgtgaattgttttggatatttagcagcacagttggcctcttcccacaagatgccagtagttccatttatatgtttgtgtttgggattaaggagaccaggaccttgtaatagcaacacctttattaatggagacactgtagtccttaagtcatagcagaaaatacatctgacatatgc

SEQ ID NO: 267076 - DNA, 262 bp, Homo sapiens
ccgggtgtggtggcgagcacctgtagtcccagctactcgggaggctgaggctgaagaatggcgtgaacctgggaggtggagcttgcagtgagcggagatcacaccactgcactccagcctgggcgacagagcgagactctgtctcaaaaaaataaataataataataataataatcttcttttctgaatatgtgtatgtaaaatatatctggaaagatacaagagaatctaattacatagttcctccagggaaggaaactga

SEQ ID NO: 267077 - DNA, 693 bp, Homo sapiens
  misc_feature (587)..(587): n is a, c, g, or t
  misc_feature (594)..(594): n is a, c, g, or t
gatggtctccatctcctgacctcgtgatccacccgcctcagcctcccaaagtgctgggattacaggcgtgagccaccgcacccagcctgtgtttttcacttcttacaggaaatccatattcttagcaacatggagaggttttcattctcttattactgcagttaccagtgcaatttctttggggcaaatgaggaacttggtttccttctcaatctctggctctgggccagcactggcaccccaaaccacatgttgaaagaaaagattggatcatgaggatgaaagcactcgtcttcacccttctcactagtttgacctgacttcagcaccatgtgaggaagaacatttgctcttttgattcttaaacataaagcttaaagatgtcagctgctagaatggaaggccgagagaacaaaagttcccacctacaaccacctccagagccccagcatgaaggtagtctacaggagaactaggaggcggtggaaccacgccaagcttttgattcctgtgttttcttcggaaggtggtttaaaaaaaaaaaaaaaaaactctagggggggccccgtacccaattcaccctatantgaatcntattacaattcacttgccatccgtttacaacatccttacttgtactatcgtaatacctataagccctcaccgatcaccctttcccacagtttcgcaact

SEQ ID NO: 267078 - DNA, 685 bp, Homo sapiens
tggtgtcatatttacagaaaaactgcaaaggtactacagagaacgctcatgcactcgttcgctagctagttctaatgtcaatatcttgcatattactgtatatttgtcaaaactaagaaaatattatcagcactttactatgagcaaactccagactttattcaaatttcactcctttttctatgaatgtcctctttctgtttcaagatcccatccaggaccccacactgcatttagttattgtgtctcagactcctcccatcggtgacaggtcctcaggttttgtttttcatgatcttgaaaattttgaggcgtcgtggtcaggtattttgcagagtttccctcaatatgggtttgtccaatatttttgtcatgattagctgggattaagacactttgggaaggccaggcatggtggctcacgcttgtaatcccagcactttgggaggctaaggtgggtggatcacttgaggtcaggagtttgagaccagcctggccaacatggcaaaaccccatctgtactaaaaatacaaaagttagccaggtatggtggcgcatgcctgtaatcccagctacttgggaggctaaggcacaataattgcttgaacctgggatgtggaggttgcagcgagccaagattacaccactgcactccagcctgggtgacagagcgagactctatctc

SEQ ID NO: 267079 - DNA, 425 bp, Homo sapiens
tgctttttgtgaagcctcagaatctcctctgttctacttggcaccccaagctatgcctggtattgtatttctgacttggctcgatagttcggtggtctggcagtttttatctaccttcattattaaaaggccctctggagctgggcgtggtggctcacgcctgtaatcccagcactgtgggaggctgaggtgggcagatcacgaggtcaggagatcgagaccatcctggctaacacggtgaaaccccgtctttactaaaaatacaaaaaattagccgggcgtggtggcgggtgcctgtagtcccagctactcgggaggctgaggcaggagaatggcgtgaacctgggaggcagagcttgcagtgagccaagatcgtgccactacactccagcctgggcgacagagcgagactccatctcaaaaaa

SEQ ID NO: 267080 - DNA, 547 bp, Homo sapiens
tggatacattaaaattgaggggagaacagcaacattccgcatccgaggccacggaaactaccagctccaatggttcacagattctgcatttggtctctctacatttcctgggctgacacaatgtctctgtgaagctgaggtgtcagtgcttgctgtgaagaaaagcaatcccccagtgaaaatcagtgagaatgaggagtgagggtggcatggccccatctgattcgaaagttcgagaaattgcacggtgcccagcagacacacatatcccattattcaataattgtcattgttgaaaaatcgaaaaaatagattttaagagaaagaaggaaccaccacacattattaacatggctattatccataaaacagaatataacaagtgttggcaggctatggaaaaataagaagccttccgccctgttgttgggaatgtgatgtggtacaggggctttggaagtgagatggtttccgttaaattcttaataaagttaccagatgatccacctgtgtcctcatctgggtatatacccccaaaaattgaaaa

SEQ ID NO: 267081 - DNA, 605 bp, Homo sapiens
gaaaagctgagtaatgttagtgtcatttctgtatcaagaaaaagaagagcatacacttagacgcaaaataaaaataaagtcccaaaatagagccttgaaaataacgagaattccctttaaatatatatttgtggatctgtttatttagcatctttgttatttcttatgttttgagctccaaataattcttccatgcatgaacagtttgaatatgacttactttcagtttgggggcttggtttcttcatattttttttacatctgaatcattgtagtaattcagaaagttgcttaactttcactgccccaatttcttccccacttaaagggagagttatcctaaatcatctcgaaagccttcctacactaatgttttatgagtttatgattcacccatgctacacattgtataatgtgtctcagccaaaatatgtttaagtagagaaccccgattgaagtcaaaagtgaaatatgataaatatgtcatctttaaaaagtttaaatttttaaaggtggtctggccttggataaaatgggatctgccatatactaatgcttttttaagcctggagacatctaagaaggcgcctatgatggtataatgc

SEQ ID NO: 267082 - DNA, 362 bp, Homo sapiens
ctgcgggcctagaggccagagtgctggcggatgggcaggtcctgaccacgccgtcctccctgggagcttactggtgagacgctcgtctgcctcagggggcccaataatggtcacttgacataaagggacagaggtggtctgtccagggtgacggtgaccactgtcctggcatgtgacggagcccaggccctgggcaagcgccatgctgagaggggctggccgcccgctgccggtggcctgactcaggaaacctcgctcccctgagcggcagctggaggagaggcagcggcagtggaccttggagcctcccagctccggaggcctccttgtgagagcaataaaatgtctttgaaaggaggctg

SEQ ID NO: 267083 - DNA, 458 bp, Homo sapiens
gtcagcatcccagaacacggctccagctgacgattgcacttggcacccatatcctccgtgcgacaacctggtgtcagcagtctcggagcagaggtctcctctgcaccctctttaatccagcagcgttcctcagagctcaggagccactctggacttttctgggcaacatgagggcagctttctcaaagccccttcaccagggcccgcagcagcagcggagagcagacctacagtcttcatttgcaggaggtcatgacccagagaaaataacttcagaagactgagacatcctccgtgaaggaagaaggggttatgaaattattctcctgcttcctcgctctgaccctgatgatcaggatttgtctaaagttatggaagtcttcctgaacttttcttattaatttgaaaaaaaaaaaactttctgtcattaaacaaatacacagaaaacaccaggccca

SEQ ID NO: 267084 - DNA, 740 bp, Homo sapiens
ctcccgagtgttggagtgactgtttgcacacatctgttgtgttttgcctgtgtgcattcctcctcctggtcagagagcccgtctcttccgccctctcccttaccctaggagggctgagtcaggcctccctacccaggcccaagggcagatgcacctgagccattgtgtcccatggttgatacgggacggggctgatttcctgacctggacccctgagacccagtgctcttagctgtgagcctctgggaagaggttctggcaggtggaggggatggacgttacagtgctgtggccacctagaaaagccgtcccggaactgagaccaactgctgagggaggaagggccaccagatcgggggccgggccggggtgagcacctgaagccggctccacctgctcttctcagctgtgcgcctccaggaatttgcactcgcttcagctgatttgggttggatttctagcgtttcacatacaggatctagactcgcacacaactgcattaatatgttggtgtttgataaactagggttgaaggagttccatcagtgaagagagaagccacgtgacctgaggatgcagggcactgttcacgtggacatgagccgtttcttagcatcatgagattttagaaacatgttcttactctgccaggacccagggataggtgaggctctcctattgggataccatttcaccagcagagagattaattggagaatgtgtaattttttcccctttgg

SEQ ID NO: 267085 - DNA, 682 bp, Homo sapiens
cgtctcattgcagcctcaacctcccgggctcaagcgattctcccaactcagcctcctggacagctgggaccacaggtgcatggcaccacatccagctaatttttctgtattttgtagagatggtgttgcactattttgcccaggctggccattttttaaaagtcagcttcctaatcagggctctttgagtaaatacttccgctttcatagtaccgcccacttccctatttctgctggaaatcttacttggtcaaggcagggatttcatctgcgttattgatctccagatcctcatcaatctagaacagtgtctggcaaaccgttgatgtttaatacatatcacggattatgtaatgcttactatgtatctgtgtgagagagaagaggatatctacattggtatctgtggaattttctacttcagtgtctaatttctgatgtattcctgagtcacctgttgagacttattctgtctttcggagtgatgtgcatgaacccattattggaggagatcgcggtattggacatctgtctcaaagtctctatacactgagaactgcttgtcccaaccataggcctctataggtccaccagtctcttagcaatttctttatatatatctatatatgctggagtgcaatggcaccatcttgacttgctgcaacctccgcctccctggttc

SEQ ID NO: 267086 - DNA, 437 bp, Homo sapiens
caacttgaaaaaaattttgaggatctaatttagaaaaatttgcccaattttgttagacaggtcaacatgcagataaaagaaattcagagaactcctgtgatatactatataagaagaccatccccaagacacatagtcattatactatccagggtcaatgccaaaaaaaaaaattgaagtcaaactattgctctttgctgatggtataattctatccatagaaaaccctaacaactccacccaaagactgctggaactgaaaaacaaattcagtaaagtttcagaatataaaattgatatataacaattggtaacatttctatacatcagtagtgttctagctgagaacaaaatcaagaatacaatctcaagaaaataaaatatctaggaattcatacaacaaagagatgaaagatttctacatgaagaaccacaaa

SEQ ID NO: 267087 - DNA, 364 bp, Homo sapiens
tttttcctggccattattattactcagttcattaatcagttcagtataaatggggaaaatatttttaaaaaacaacccccctaggctgggcgcagtggctcacgcctgtaatcccagcactttgggaggccgaggcgggcggatcacgaggtcaggagatcgagaccatcctggctaacacggtgaaaccccgtctctactaaaaatacaaaaaattagccgggcgcggtggtgggcgcctgtagtgccagctactcgggaggctgaggcaggagaatggcgtgaacccgggaggcggagcttgcagtgagccgagatagcaccactgcactccagcctgggcgacagagcgagactccgtctc

SEQ ID NO: 267088 - DNA, 755 bp, Homo sapiens
gagcaaagtatggttgagaaattgtggcagaaagaattttaaatgttagtcgaagttgtctgtagtttctttattaagctctgaaaacacttccaatgccagtttgattctgagggcttgggaagtgggatctcccttgtggagcagctggagctggctgggagggagcctctccatgggtaatttattatgcctgccctgcttcccccagggagctgcttcagtgtgaaatgatgtgattgtcgggggtggggtgggaggagggccaccttcagtcggggagttgctcacatattacacaggtagcatcaggtggacttcagcgctgaactgtactagtagtgagtccctgtagtcaatgtgcaatttctctaattctgagaaactctgtagactctgcctgggttttactgggtcagcatagaatgctatcagtttacctctgtgaaatattcagtcagttgaaggaaacttggattcctagtcagaggtgactaaaagttaccctgaccaaaaggatctctgcggggggaagagaatggagcttcctgattttaatgtgttgcgtcagtggccctcttcgactcccgttttgggtagatgcgtagctcttcactttcttacctcaaggctctgtctagccatgttaaatctttagactcagtctgatgccgtttttctgttttgccattctcattattcacagctttcagaacaagtgtgctaaaactccggggcctttgacagttgttctg

SEQ ID NO: 267089 - DNA, 371 bp, Homo sapiens
cctgacaactctttgccttcattttcctatctgtgaaacagttttgctcattttgctacccttagaataaattctacaatgtctatgaatcgatttaagccccttcctagaatgacaactacaggaggctgcttcaagggtgttcgtgtagcccaaacctcccttttctgaaagaaatgcctccccctgcacaggactggacaccaggagccagatcactcaaatgatgctagcccctggccatagttagctgagtcaaaggtggatcaaggaagccaatctctaattaagctggacctactagtgtctgtctctcttgggacaggtcagttggttgggagcctgagactggggaacgatgcagagacaag

SEQ ID NO: 267090 - DNA, 327 bp, Homo sapiens
acaggaagtcccttgccatcctaaaagccaccccacttctctctaaggagaatggcccagtcctctcccaagtccacacaggggaggtgatagcattgctttcgtgtaaattatgtaatgcaaaatttttttaatcttcgccttaatacttttttattttgttttattttgaatgatgagccttcgtgcccccccttcccccttttttgtcccccaacttgagatgtatgaaggcttttggtctccctgggagtgggtggaggcagccagggcttacctgtacactgacttgagaccagttgaataaaagtgcacaccttaaaaatg

SEQ ID NO: 267091 - DNA, 286 bp, Homo sapiens
aaaatcagaaagaactcaaatgttcatcaacatttcttcaatggatggatcaattaagtcaactcagataatgaaatactgtacaacagtgaaaaggaatgaaacacagcatatacagtaacacatatgaatctcaaaaacatgctgaatgaaaaaggcaagttagccgggcatagtggcccatgcatgtaatcccagcactttgcaagtgcaaggcaggaggatcgtttcagcccagaagttggagaccagcctgggcaacataatgagaccctgtctttactaa

SEQ ID NO: 267092 - DNA, 499 bp, Homo sapiens
tgggtgtcacttagctctgaaaacataggcatcggagtgtagcagactgactcagagtcctcccaagatgcagattctactgaaatccaaacccaaggggtctacaaaatggatggagtcttactctgttgcccaggctggagttcagtggcacgatctcggctcagtgcaacctctgccacctgggttcaagcgattctcctgcttcagcctcctgagtagctgggattccagattgtactttcggtgtcatgactaagaactctttgctgacccctggatcctgaagattttcttttatttttttcctaagattttatagttttattttttcatttaagttacattcatttgaattaatttttatctgaaaaatactgtttttctttcactgtaggcttgtctctgtataaattcaatttgaaaatatggcaatatgtatctttgattttcaaatgaacaagctcataaatacaaaaattaaaggcataacaagaaa

SEQ ID NO: 267093 - DNA, 411 bp, Homo sapiens
gcccagggcgccgtggggtcccggggcagctggtggggccgccaaagggtggccgtgtgtgtggcggtggcagctggggctctggcagtgggggagggtgggcgggaggcagcagctggtggctggccccaggccagctggagcctgtgcagagggagggcgctgggtcggctcacgctgcctctgggtccccttctgagtccccctcagcctttctcggttggtctccatctctgtctttgtctctctgtctctgtctctttctgtctgtttctctctgtcttctttctctgtgctctctctgtgtcagcctccctgtctctgtctctttctcttccccatctctgtctgtctttttgtctctgtctctgtttctttctgtctctgcgtatctctttctgtccctctgtc

SEQ ID NO: 267094 - DNA, 331 bp, Homo sapiens
cttcaggcttggtatttccctgcctcctctgtgtatttccaattctttgacgtcacgaattttctgttttggacagctttgccttttccaggaggtgaatggtacggggatgactcacagaagtcttcagataagaggaggacaaaagagacccttgttcagtggcagaagtacctgtaaagccttagctttgcctgagatatgacctataactgctctgatttttggaccccagaaaacccttgaaagctcagcttccttattgctgcgtggtcaccttatcacagcactgcagagcctaggaaataaaggcacagactctctttagaaa

SEQ ID NO: 267095 - DNA, 362 bp, Homo sapiens
gtgacaatttttttttatcacagccctaactctgtgttaagtactatgctggcttctggggtacaagcatgagtggtaacagaccccaatgctgcctgtagtgcatccagcatagactgtcaggcagtgagatgcagcaggccccttgcaatagctgagatttggagctagggatgctgtgtcaatgtggatcaggcaatggtactttgaaaggtcatcattataattttattaagctgtgatgagagtgagaagataaatatagaaatgtgtttagtattggatacatattatctcacagaacaattatgaattgtgtttcttgtgtacattaaaatttggatatatgtgtaagagcaaaa

SEQ ID NO: 267096 - DNA, 438 bp, Homo sapiens
atcagttcagcccaggagttcaagaccagccagccccgaaaacatagtaagaccccatctctacaaaaaatttttttaaatagctggatattatgatgcatgcctgtagtctcagctactcaagaagctgaggtgggaggattgcttgagcctaggagctcaaggatacagtgagccgtggttggaccactgtactctatcctggatgacagagccagaccctgtctccaaaagcaaaacaaaaccaaaccattatttagcaaggcattgtacaacctaagtttaactctatcaggtaggtatgatgagccttgtttgacagatagaaagattgaggaatctatggaaggttgcacaaaggacacaattagtccaagtcagcctagtctcagaaccagtcaatttacccatgacacacacttcattctaattgggttt

SEQ ID NO: 267097 - DNA, 456 bp, Homo sapiens
ctctttagtttgactacattcattccaaatttaagagtgagtcctaagttaggcttgtttccttgaactatgtgaggagaaaaagctttaactagcaaaagaacgtattaaacaagatttggagaaaaattccttttccaccttaaaaaaacccaatgtacaactctggattactcttagcttccttatttcaaatactttccagtttatgtacttgaaataaatacaacaacttctagaacagcttgcagttcagatctggcttttactaattgtaatcaaacataattctggaggaggaaagaaagaaaggggcaatgaaggaatgggagagaagaaagagtaatgcaggaatacattctaacggttccccttcaaggggcagcatggcagagggggctggggtggaaagtgggttgcaaaatctacgaagagttgcgatagggaagaaaccag

SEQ ID NO: 267098 - DNA, 125 bp, Homo sapiens
aaactataaacattaaaggtagatctttaagggggaaaaagaaataaatttttaaaaatatcaaggttgaataaaaaataaactcaaaaataattataagaattagtctacctaaatgagaaaaa

SEQ ID NO: 267099 - DNA, 340 bp, Homo sapiens
cttccttgtcagctgagaggataaactgaagcagtataaaacttctctcacacagccacttcctgttactaaagaaattcttcagcagaagaatttgctggcactttccactttaaagtgtccaggcagctgtgactacaagaaggtgaggagatcatgctactagaaagaatgtttaatgcagggacaactctttcctgggaagaagtaacccatttaaattgggttaccaagatcagcacaactcatgtcgatgattttttgtagttgtttttgtttcgttttgtatttttgtaagaaaaagcaaggtttcattgattaaaggagttgtttgactttg

SEQ ID NO: 267100 - DNA, 457 bp, Homo sapiens
gttcaaacctctattgccataatcttcgataccaggtttaatggttgacagtagataaaagtatttaagaattctttaatgagtttagaaaattggattttagaagatggcaagcattattggtagttaggatatttgtgtcctgttcaccttttatgtcaggtgatattttctgcatctgtcacagactagctttagagttaaaaagaacaagtgccagaagcagtcggtgtcctcaggcattagtctctgctgtttcctcattgatgctttcataattgtgtaattttttagcttacaatgatataacaagtccttgttgttttcgccaagccataaaacatttcccagttccagctctgtaggatatcagtgtgctccttagatggatggtattaggctgtgtctgctgccctctgcactacatagacaccctgatatagtttggctgtgtccc

SEQ ID NO: 267101 - DNA, 416 bp, Homo sapiens
ggggtctcaagagatctttgtctactccaaggttgggaaaaccttcttctttgttttcttctagaggttttataattttagctgttatatataggtctgtgatctatttcaacttaattttgggtatggtgtgaggtgaagttggaggtgtcccccactccatattcatatccagttgtgtaccatttattgagagatctctccctatggaatcaccttgttcatttgtcctttaacaatgttctttaaacaacatttcttaaaaaaattagcggtgcttggtggctcgcacctgtaatcccagctactcaggaggctaagcaggagaatcgcttgaacctgggaggcagaggttgcagtgagtgaagattgtgccactgcactccagcctgggcgacagagtgagattccgtctc

SEQ ID NO: 267102 - DNA, 190 bp, Homo sapiens
atggagcaaagatggcatgagatttcatcgcgctactcagaactgtgtggaatttcaaacttatcaattgtttatttctggaattttcccttcagtgaaaccaaggaaagcaatatcacagataaaggggatttccgaatatataaacaaaaagcatttactgaatacaagaataaactatttctgctcc

SEQ ID NO: 267103 - DNA, 645 bp, Homo sapiens
attcaaattgtttgatgttgtatctgcttgataattcttcaaaataatagagctatgatctcagcactgtacttcagcctagacgacagagtgaaacccccatctctaaatattaaaaataataaaaaataaaatgcaaatattataatatcttgcaaaccagcattagtgaatttggattatataggatcttatcactcctaccactttgatattttttaagttagtattttcactagactatcacaatcattttacactgttagacctaggttttggggtttttttttctttttgtttgttttttaattcttaaaggatgttggactttttgaaatatttttttctatgtcttgttgagatgatcatgtgggttttgtctttatctaacctacatctataaacatttaaaataatggtgatttatttgtagagatagtagagagtaaaacaagcctaatttattatactaaaactagataaattaaactctcagacataatgaattgagactgtcttaaataaacatcaagcatcaacatcgcatctttagtatcagtgtagagccatgtcatgagttattgtttatttgtaacaccagccttgtctatccacaataggatatcacttttataacctccccct

SEQ ID NO: 267104 - DNA, 1047 bp, Homo sapiens
gtggaaggatcacttgaggccaggagtttgagactagcctgggcaacagagtgagactctgtctctacaaaaaataataataataaaaaaagctgcatatggtggcacacacctgtagtcccagctactcagaaggctgaggcaggagaattgcttaagcctaggagtaagccatgattgcatcactgcactccagcctgggcatggagtgagacactgactcttaaaaagagacgaaaaagagtatcagagacagaaatagatccacgcaaagatgcccaattgatttttgaaaaaggtgcaaaaccaattcaaaggaagaggcagagttttttcaacaagtggtgttgaagcaactggacatacatggcggagggggggaaagaaagaaaaagaaaaatgagccttgacttaaatctcaaactttaactcaaaatggaacatagtgtgaaatgtaaaaatgtaaaacttttcaaaaaaacacaagagaaaatcttcagacataagattaggtgaggagttcttacatttggcatcaaaagcatgacccataaaagtaaaaattgaaaattatacctcatcaaatttaaaaactttgctctgtgaaaaactctttcaaggagatgaaaaaagacaaattacaaactgagagaaaaatttgcaaattatatatcccacaaaggacttatatctggaatatataaagaactctcaaaactcaacattaaaaaaaaaatccaattagaaaagaggcaaaagacatttaactgaaaaggatacacagatgccaaataagcacatgaaaagatgttcaatatcattagccctcaggaaaatgcaaattaaaaccacaatgagatattgctagaaacctatcaaagtggctaaaataaaacactgtgacaacaccaaatgctaatgaagatgtggagcaaatggatcactgacatcgctggtcaaaatgtaaaactgcacaatcactctggaaaatagtttggcagtttctttttttaaaaaaaaaattagtattattatttattatacttt

SEQ ID NO: 267105 - DNA, 419 bp, Homo sapiens
caataccccttccgctctcattggcactcaaaattcggagcaggtcgagttggcagggggctggtgtatcagcaaccccctgagcatgtgcacatctggccaggttgtgacagtatccaggcttggccacaactttcctcacccctggagtgggcactgagagcagagagaggccagggagtgggatcaggcactttcaagcctgtgggggcaggagacttcctgggcccccaagagcgcagggatgccatggtctgaagctgcggctgggaggctgctgctacacctgggagcatgggcccctgacccaccaactcagtaagtggtggggctcttgcctgttctcagttcccccaggctctgcagagcgcacatccccacacctcaactgctgcagtcggcatcctcgcagcggccgc

SEQ ID NO: 267106 - DNA, 216 bp, Homo sapiens
tgtaaccacattattatgaagaacaaaattacagctgaattaaattttgaaggctgtccttgagaatatgcatagaaagttttgtgttacctaatagataatttgtgagcctgatgtcattcaaaagccagagaagaaatattcaggctaaaacaaaacttcctactttcttagaacaaagagaatgtacttcttgttgggaagctaaatcctagg

SEQ ID NO: 267107 - DNA, 206 bp, Homo sapiens
aaccagtctctactgcctgaagacgccccatagatgtgacaaacagaacaactgatgcagaagcaaagaaaaaggtctgggctcagaattaggaatcctgtgttctagtcctacttacttctggtgctgattcaccacgtgacattgattaagtcacctaatctctctctcagtctgaggtttgaccagttcatctttagttctga

SEQ ID NO: 267108 - DNA, 373 bp, Homo sapiens
gagcagtcagcatgttctctcagcatgatgtttgagctctgagaatggacagactgcctcctcaagtgggtccctgaccaccgtgtagtctaactgggagacacctcccagcaggggccaacagacacctcatatgggtggaggcccctctgggacaaagcttccggaggaaggatcaggcagcaatatttgctgtactgcaaaatttgctgttctgcagcctttgctggtgatacccaggaaaacagcatccagagtggacctccagcaaaccccaacagatctgcagctgagggacctgactgttagaaggaaaactaacaaacagaaaagaatagcatcaacatcaacaaaaaggccatctacaccagca

SEQ ID NO: 267109 - DNA, 407 bp, Homo sapiens
agccaaaacataaaagattgtttaatagttataaaatgaacatttaacacaaaatttctgggagcaaatatgagaaaattctgctaatatataaaagataactatagaaaagggccgggtgtggtggctcatgcctgttaatcccagtgctttgggaagctgaagtgggagagtcactagaggctaggagttccagatcagcctgggcaacatagcgaggcctggtctctacaataaataacacttttttaaaaaaagtagctgggtgtggtggcgtgtgtctgtagtcttagctactggagaggctgagatgggaggattgtttaagcccagaggtttgaggttgcagtgagccatgattgcaccactacactccaagcctgaatggcagagaaagaccctatctc

SEQ ID NO: 267110 - DNA, 238 bp, Homo sapiens
tttcaggcatctatagtagaatcttatactatctggaaaaatccaagtgttagaaagtggtttggtataagaagcctagaggaaatttaataaaataccaaaggaaatttacaaatggcctcccttatatttccaataacctttttctatttttgtgtgggttagctcctgtccaagaaacaaataggaggaagaaaagaaattcgtgtgttgttactaatcagctttcataatcatg

SEQ ID NO: 267111 - DNA, 387 bp, Homo sapiens
tcagcttttgagacaggagtcttgctgatgccccctgcagaataaaccccttccttccttaactcagtgtctgaagagttttgtatacggctcgtcctgctacagtaagagactgaaactgaaagttaattcttccaattctattactttctcatgccattgaggagactctaaaatattttttcacaacaagtagtattttatttaataataggtctttgtgaatttcccaattttaagtagaattatatatctgcaatattttctactgaaatatgactttgaaaaaatcaatataacacttgccgtcatgttatttggttagagcaggagaaataaattattattgtagaaatgaaatacagcatgtttctggcatttctttta

SEQ ID NO: 267112 - DNA, 273 bp, Homo sapiens
gtgaatgcccaaaataatggatcagtaaatagttgcatggattcaacaagaaataagcatcaaataaaaataaataatgacagaaatagattataacctgtttaataaaaggactctatgagcccaggttatacgttactgtgcaatgtcaattgatagaatgtagaagaaatggtggaattagaatattgctatttcataatgataactataataattcattcaagaaatattaatgcccggcactttgggaggctgaggtgggagaattgc

SEQ ID NO: 267113 - DNA, 459 bp, Homo sapiens
catttttcatcacccttctggtaaatacttcctaattttctctaggggatgtgctttccccatgtttgatctgtttttttctgagaggtgtttggttcatcctggttgtagggttgggtttgtgatataggcatagcctctcagaggcatttggccataagtcttatctgggtatgggctcatgaccccaggtcaatctagtcagatctgctgatgttaattctgaggctcttttctttccttacttttgtatttggaggtgtaaggatgtaatcccacgttcttggtcataatcttgtcatactatagaaagggactttttcaaaatgtagttaattcaaggaagaccagagttgagagaccttatatcatttgtgctcctggatgaagctgtacctgaagctaggttgtcccagaattctgttagtaaactattaaatttcttttttggttatacta

SEQ ID NO: 267114 - DNA, 295 bp, Homo sapiens
tttggagctatgacttactgatttacagccagtgaccccgttgattccacagtagccacccagaaaggaggggtctggaagacagcttttttcccctgaccagtgcctcctaagacaaaggagccagttcagcctacagataggttttctccattcctactggagagttctatttgtgcgtataggtttggtctgagctatgaaatcaagtgggttcctagggtttatcgggggagcacactatatatttacagttggaataggcggtagacacacgagcatatttcacctccgc

SEQ ID NO: 267115 - DNA, 330 bp, Homo sapiens
gcccatctgaaaacttgtacacaaatggtcacagcagcattattcaaaacagccgaagagtggctctttgttagttgatgaacattagtgatttctagggattgttggggcaggggtaagaagaaaaatggaggtgattcctgaagggtacaggctttccgagttgaaaaaatgttctaaatggattgtggtgatggttgcacggctctatgaatatactaaaaaccaacaaattatacatttaaaatgggtgaatcatatggtatgtaaattatatttcaatgaaacttttagaaaaaaaggcaacactccagcctgggtgacaggaaa

SEQ ID NO: 267116 - DNA, 423 bp, Homo sapiens
agaactcaactttttaaagacagagatcagctttaaatattgctaagaaagaacttggagagagaagttggtgataccggagacagcaggcaacagacagagtgagaggcccgaagaacaagaggaggagggagtctcttctgggagcagaaggagtgtcgacttaaatattagggagccaaagatgaacctcgcagagaacctgcaaaacccagttgcagaaatacctgcccacacctaaaaactcagtcactgaaagtctgaagtcaaatgattatgtgaaatcttagtagtgggtacatgtggtttcattagattattctttgtatctatatttgtactatcttataagcactataagttttaaaaccatacaagaggctctatggaaaataaattggacttcattaaaattcaaaacgt

SEQ ID NO: 267117 - DNA, 641 bp, Homo sapiens
ccggactccacggacaggacggggcttgggttgctcttaaaggcgacataaccagattttcttgaagtaaggtctaggatactcacagaaatgtgagggacctatgatatcggattgtgaagcacagcaagttctcaacggctacaccgccaaagggacacactataccacaaaggcactctgtctctactcatgcctctcagccatatgttgcttttcaaatacacatacagttaaactttgacttctatttattaagcttcaatatggttggtccaagagaacaaagaaagactacatggctgggaatttgcacaaaagaagacaggagataccgacgtagattgaaagggtgacgctgtgcctctggatccagaagaaaacatcattactgtctgtagagtcagtgattgtgttcctaccaagagtgcaatgcttttattctaataatacttattacttcatgtctgaaatattttacatttattttaaaagtctcaatcctgtctgaaaatgagagtgactgatacatgccatttcctgacaggacattttgtgccattccatagttggagtatatgtacacagggaacgtattatccccaataaaaactgtgaactttcatgatcttaaatccttc

SEQ ID NO: 267118 - DNA, 547 bp, Homo sapiens
aagtatttttgtgggtgtatgttttcatttcccttgggtatacatacttaggagtaaaattgctgggtcatatggtaagtctttaactttttgaggaaccccaaactatttcctgtagatgttgcaccattttacatttccaccagcaatgcgtgaagatacatattacctcttaatcctcacaatagccttaagagttattatcttaattttttaagtggggaaactgactcccagagagattcagtaccttttccaaaaatcacagagctaagaagtgacagaatcaggatttaaaatctggcagtgtggctctacaatctgctttgaactttaacataatatgtacaaagcctgaagcaacttctcagtactgtatttaagagggcatagcaatgtaagtcttcctaaatcaatactttataaatgaagcagcttaaaagacttccaagtttcaatcttacgatatttatttatcacacaaatcaatatacctaaactcatctgtataaataatgtcctgtagtaagaagaaaacgaggaaaga

SEQ ID NO: 267119 - DNA, 330 bp, Homo sapiens
accctttactaaaagattaatagatgcatccatcattactaaaagagtggcgactttgagactgtgtttaatcacgaactccttcattcatccaactgatacgtattgagctcctacttcaaagtatgaatcttctacagaattctagtaggtgaaaccaaggatcagcacacattttctgtaaaggaccagatagtaagtgttttgagcttcatgggacctacaggtctccttttcaactacttaactctgctattgtagttcagtcttacagtctttaaacaaatgggtgtggctgtttcaataaaactttgtgtacaaaaacatgaa

SEQ ID NO: 267120 - DNA, 439 bp, Homo sapiens
gggtgtgtgtgtgttggggggggagctgaagttaatggtttatctatggtttaggaagtgccatactgatatagtaaaccacccccattcacctaatcctccttttaattaaaaatggattttccaggaaaaaaaaaaaggcccttatatttgtcacacttaagtgcctgcttagggaaggtattgtgaaaaagtattagaaatcttgagatcagtatctattttatgatcagaaaaaaatactcttttgtacatttctgacagttactcagaagatcgttcaagcaagctaatcacagcattgtaactagaggacagttgtttgcagtgagtttttccttaagtaggtacgattttttaaaatattctgtgattctactctagcgtggttgttgagagagtttcaaattcagtgatacaggttctaagactgaaaggt

SEQ ID NO: 267121 - DNA, 831 bp, Homo sapiens
taaccattttagcaatataaatatatataaagaaaaatatcaagtcttatccctatcatggactgtgatctcactcttcctcaatatactataattatcactcagcaacttttcccccttactttaatcaaggaattcccactaggacaataatatagagctaacttattcttcaataactgcataatagtccacagtgtagtaataccaaaatttattcaatcaatgccctattgatggataattgtttctagttttttgccattacaactaatgatgcaataaacatccttatacatttatcctttcacactaacgcttttatttataagaaacagattccttctcgggattgtttgatcaaaggaaatcctccttttttactataataggtagcatcccatactaaaaatgttgtcacaatttacactcactggtagtgtatgagagtgcccattttccccaaacgttatctcagctcttgatgttattataggctgactgatactttttgataaagcttatttgcatttgtctctactgaaagtggaaacattcactgtttcaatttagttgattgctgactaataggaagtttgcaatcttaggtctggtggatttaccaacttatgacaaggtccatctgacctagtaatagagagagagcccaagggaaacacagcatatgaaaatctattgtttcagttcctgaatcagacacaggattcaaatgccacagataggttaaggaatttggttccaaatctattgctctcagattagtaagacagactctggaaaggaccagagcttaaaattacaacttaccat

SEQ ID NO: 267122 - DNA, 165 bp, Homo sapiens
gagattacaggcatgagccaccgcgcccagccagtggtgcatattcacaaaagaaaataagataactatggtttagaatataacaattattatttgtagaagcatgttactatcttccttctatcatccaagaatgacagagataattaaaagtctgttaaaatg

SEQ ID NO: 267123 - DNA, 438 bp, Homo sapiens
gtagagactgggtaggtaggtagggagctctgagggagccaggcaggagggtgacaagaggacagctgtgagtgccacatcaggttaaaagagattaggaaagaactctggagtgtaccggggggttcacaccaggactctttttactgtgggacactaagggacacttctcagtcttagatgtttacctttcaattagaaattaaccccgtgtatatgtgtgtattttatcagtaatgcatcattatgagtgatgactttcttttgtaatagaaaacctgcaaatagtcactacaccatgtacacccttacagatgtattaattactctgtaatttttttttagcaacctaattaaactggtagtcaatttaaagctgaagttaatgaagatttcctttgttgtgagatagcaccttcccccaactccattaaaaaa

SEQ ID NO: 267124 - DNA, 253 bp, Homo sapiens
taccagggactagtgtgggtgagaagttattgtttaatgggtacagagcttctatatgggatgattaaagagttctggaaatggacagtggtaaaggttgtgcaacttggtgaatgtaatgccctctgaactgttcatttaaaattcattaaagtgacaaattttacagtatgtgtattttaccataatttaaaaaagaaaaataaagaaaaaatatgtattcccaattgcactgtatttttggttattaagc

SEQ ID NO: 267125 - DNA, 399 bp, Homo sapiens
aaatatagcgggaagaggagcacatgacacttctatggagatgctataaccaaaattcagaccacaggaaactacagaacaaacaagccagtttcttcaacaaataaattgcaaaggaagaaaaagacaagggaagagaacctacaggttaggagagatacaaaagcaatcccaaccgatggcaacattcgaactttatttggatcctgattttaactagctaaagaaaccctttagctgggcgcggtggctcacacctgtaatcccagcactttgggaggccaagccgggtggatcacaaggtcaggagttcaagaccagcctggccaagatggtgaaaccccgtctctactaaaaatacaaaaattagccaggtgcagtggcgtgcacctgtaatct

SEQ ID NO: 267126 - DNA, 364 bp, Homo sapiens
agaggatgtcactcccccagacacaaaggatgctttatccagaaaccatggatagcgcctggcctgagagagagagactccaggtcctgccaccaatgcactatgaacaggcatcccacccagaaaacgttcctgctgacactggtagggcctatgtcatcatcatccattcattcactagataacatcaagcaccttctctgtgtcgagcaaggtactgaggttaaatggtgacgaatgctgtgttcccgtggtcaccaaggcaattttgatgaggaagctgataaaaaagcagacaatggcaacccggtgtgatttaaataataataataataataataataaaataaaaaccatgagagca

SEQ ID NO: 267127 - DNA, 399 bp, Homo sapiens
atagtactgaggctttatgaggtccttgggtccagtggccactggtcccacatggttcaggagtgaccttagggaagaatggaacttacacactttggaggaataattgtggggctggtctggaacccctaggctcaaatgatgtgcccaactcggcctcccaaagtgctgggattacaggcatgaaccgccatgcctggcccttgatttttctttttaagaaaaaaatatctaggagtttcttagaccctatgtagattattaatgaacaaaagattaaactccaaatattaaatagtaagcctgaaggaatctgaaacacttgtacttccaattttctttaaataatcccaaatagaccagaattggcccataccatagaagaaagaattagcagtc

SEQ ID NO: 267128 - DNA, 119 bp, Homo sapiens
aaacacctgacagttttagaatcttttcttggtttctctgagaactttgttgtgaatctccctcaagttacttaaatgattttaaatttttgggaaaggtgaaaaatacagaaaattac

SEQ ID NO: 267129 - DNA, 437 bp, Homo sapiens
tccaggaaacacctctggctttgtctgcctcttcctacctcaggtggcaagtaggggacaatccccagcgaaggaaggtacagtgggattgatggctcaacctgtggtcagctgtcgctgcaatcgcggcttcactccctgcccacaggggcacggtgggcaaactgactcctctgcatttcagtaacctcggctgtgaaataggaggcctctcaaaagtgactgcaaggactacgggaaatgatataaatgtgtgcatctatgtatatagttaatatttcctctttaatatattttatacatatacagcatgtattttataaatctataaagggaacgggatggagggaagtgggcttagcaagcctcgattggttatttttgctgggggggaggggatgtgacaattaaaattttggaaactgagtcggctgcaa

SEQ ID NO: 267130 - DNA, 494 bp, Homo sapiens
cttccttcctccctttcttttctttttcagaaatatgtactctatttctgaataacctattttggaaatcataggttaactcttctaggtcaatcaaggagcagacaatagattagtgctttaataaatcaagggcctccacagagaataaacatacatttataaaattatttttactctctgatttcgctttcatcctccatttttgactggccatcttttgtcttccaaatcttcctagtaatttctttagacttttataagttttgctgaagactagtctttcctgtcaatgtgtcagctcattttttattctgttcttatcctcagtccattgtttatatttcctaaaattgtgtgccctgtgtttctgaattattttgtcataatttcagagaaactttttagagaaaagttatgattttataatgcctattaagagaagtctatcagtttgggcacacagtaaataagagattaaatgaatacatgta

SEQ ID NO: 267131 - DNA, 604 bp, Homo sapiens
ctagctacttgattctcagttcagactctaatgtttttaacctttcctcataggtccattttttcatccctttaatcattcccgttgctctccttggaccatctctagtttctccatatcgttcttgaattgtggagccccaaactggatattgttctccaataagggcccgactaatgccaagtatagtgggaggattatttcccagttcttgcatgttttacatctataacatggagtccaagaaaatctgaaataatatggagttgttttataattgattgcaatttgctcactctgtaagtcgctttcaagtagaatactgacatattcttttaaattttattttgttcatttgtatttgagagttaactggtatttataatatctagtcaaatatttaaataaaacaagcttttaaaccaaaattgttaataattaatccaatatcaaattaaatttttaagcacctacgcatgacatggattactgttgatttcccttgtattattttgtatgttgagttattaatcagtaaatgaaaatttagttcttcattgttaccctggatactaattttttgaagtacgctttcatagcatta

SEQ ID NO: 267132 - DNA, 415 bp, Homo sapiens
gctatataaatgcaaagtggtactggtaccaaaatgacgttcagaactaaatgtggtggtggtgtttcattcaacactgaggaggaaattcttggcttggtcaggaatggtgggacctgtgagttgggatttgtaaatggcccttgaggccgggcgcagtggctcacgcttgtaatcccagcactttgggaggccgaggcaggtggattacgaggtcaggagatcgagaccatcctggctaacacggtgaaaccctgtctctactaaaaatacaaaaattagccgggtgtggtggcaggcgcctgtagtcccagctactcaggaggctgaagtaggagaatggcgtgaacccaggaggcagagcttgcagtgagctgagatcgcaccactgcactccagcctgggccacagagtg

SEQ ID NO: 267133 - DNA, 324 bp, Homo sapiens
catctcacgctttcctccctcctcatgcccccttgtcccctcatcctcccaactgccatggctttgtgaggcgccctgggttccatggctaccgtgtcgaccagggcagcccacccacttctcactttggtctggagttagcgagagcgacgctgcttttctcttgctcttcagcctggacctgtgatgtgataggcgtgagaaggaactgtgggttctggcggtaaggaaagtggggccttactttcccatgttcccaaaaggcagatgcaatccctgcactcctgaaggagtcaagcagtaaaggcaacacagcaagactgt

SEQ ID NO: 267134 - DNA, 423 bp, Homo sapiens
gttctaagggcatgatctgggtgaaattaagaggagaatttgagatattctttcagaggatttaaaatcaaggaatgaatttagggaaaattaaagaggttggcagctttaaacttttgaggaaaataagggtttgggtaaaattatcgagataatttgaaaaaaaaaaagaatttggttaaagcaaagagaaattggggtagattaagaggagaccttgaaagcaaaattgaagagtttgggggcttcttcccattggccacacccctcgactttcttactctcctcttcaaagctcatgctttttttacccttctcggttcaggggtgtccaatcttttggcttccctgggccacgctgttcgaagaagaagaattgtcttgggccacacataaaatacactaaccataactgatgagcca

SEQ ID NO: 267135 - DNA, 383 bp, Homo sapiens
aagattaatgtttagaataggcttagtgctagaagttcagcctggacagcataagcagacctcacctatacaaaacatgtaaaaaaaaaaaaaaaaaattagccaggtgtgatgttgcatgcctgtggtcctagctacttgggagactgaagggggaggatcactggagcccctcatggtcaaggctgcagtgagccctgatcatactccagcttggataacagagcaagagaccctgtctcaaaacaaaacaaaacacacacacatacacacacaaacaaacaaaaaaagaaacaaaataggaagctgaagaagataatgaaagcgatttgaaatagaggaacatagaattatgaaatgaatagtttatgggtgatacatgg

SEQ ID NO: 267136 - DNA, 423 bp, Homo sapiens
acaatgaataaaatacatgtcagtcgtcttaaatatatcagttaaaagagactgtcagagtgggtgccaaagaagccaagacccaactatttatgttgtctacaggagacccactttaaatgtgaagacacagattaaaagtaaaggggtggagaaagatataccatgctcacactaatcagagaaagctggaataactatattaatatcagatggagctaacatcagagcagggaaaattatcaggggtacaggggacattacatagcagaacctgcaaggccacagtgaggagttggcccaaatcatgaactagagcagggttgtccaatcttttgcatcccaagggccacattggaaaaagaattatcttgggccacacataaaatacactaacactaataatagctaatgaccttaaaa

SEQ ID NO: 267137 - DNA, 488 bp, Homo sapiens
atttcatgtagtagggatatagttagaatgcccattttatggttatgagaagcaagcctaaaacttagtttcccagttaagtgagaagaagtgttaaacataggctagttacctcaaattcctctggagtatcttggcttagctctgagatagacattggattaaaagattagttttcctcttacccagcttgaaactttattttacctaagaaaccaccaccacctctgtataaaaatgcttgtgcattatactttttttttttttttctctaacctttcattctcctgctttagccctcaggattagctacttcaaaaatgaaccttgtggcaggagaaagttatagagcaaaaaaaacgtgttaagttttaacaactcatatatgtattttctttcctttgaggaagtgattagtaagagatctattaagggtagcacagaacaacatttctttccttttttttttttttttttttttgagatga

SEQ ID NO: 267138 - DNA, 451 bp, Homo sapiens
tggtgcctatgacaccagggccctgggtttcaagcacaaaactgggaggccgtttgggcagacaccaaactagctgcaagagttttttctttttttttccccataccccagtatagtgcccagaaggccagtgagacagaaccattcactcccctggaaagaaggctgaagccagggagtcaagtggcctggctcagtgggtcccacaccatggagcccagcaaactaggacccactggcttgaaattctggctgcaagcacagcagtctaagcttgacctgggaagctcgagcttggtgggggaagggcgtctgccattgctgaggcttgagtaggcagctttaccctataaagccacccagaagattgaactgggtggagcccaccgcagctagcaagaccagactgtatctccaggttcctcctctttgggcagggcatctttgaaaa

SEQ ID NO: 267139 - DNA, 491 bp, Homo sapiens
ttcccaatatattttcactagagatgagatgctttgccccaaggtaagtctttcaaccatttacaatactgacaaaacacttggccttcagactttatgaaggattttgttcattcttcttaaaggcaatcatttgatttgtggctgatattctactacttttgttcctctgcttctgtgtagtccagtgaagtccctcaatgctgcacaactacctgtatgcagaaacatcttggcttcgagtgatacagatgcaattccttgatgaagttgataagacagtataaccttaaccttgctataacttagcccaactatttaatctcaacgtggagaaaatggatacccaagtagatgaagcgactatttggattacactaatagtcacagaatccaggacttttgactaataatttaataattttggctaataatgtgactaataatctacattttccaacgctccctgctgcttcccaaggggcagcatt

SEQ ID NO: 267140 - DNA, 309 bp, Homo sapiens
atttactttttaatctcatttattctaaattttctatttaagaaaatagctcatttagagctgcaattttataatcagaataaattagattgttttaaaaagcaaagactctaggaattcagcctcatgtttatgtctctgagatactctaccacatcaattagatttaaattgacatttttttttcctataataaaagacatctaggcttcagagggtcaattaaatagtccctccaaaaacaccctctgaaatggattttattgcctttttctgtctacaacttaataaagctactcaataatgcta

SEQ ID NO: 267141 - DNA, 154 bp, Homo sapiens
gttaatattttctttagccaactaatattcaatgtattttttatgggtcctttttcaaaggtagtatcagtaggcatagtcattttctgtatcttttcacctcacagttcacgaacatttcccatgtccttataacacttttgtgttataaaat

SEQ ID NO: 267142 - DNA, 405 bp, Homo sapiens
tggtaactgcagtctcattccacaaataatttctgaaagtgctaattaagatgcatcttaatttttgctatttttcttgctgttaatccaaaagtataaatcctccctccctaaactgtaaaattaagcttgttgaatggagggtgcaactactgtcactaactgtaagccacctaaaactcaacaaatttaacagaaatagaatcttcatataccagtgattatccaacagtattttattctactgaaaaaaaatctcttgggcctttctaaaagagtttcacattggccggacttggtggctcaggcctgcaatcccagcactttgggaggccaaggcgggtggaccacgaggtcaggagatcgagaccatcctggctaacatggtgaaaccccgtctctact

SEQ ID NO: 267143 - DNA, 592 bp, Homo sapiens
atatgttggaagatgatctgtttcaggttaaaaggcttcaagcattacaaattgagagaacaagttcttgtctcttcttcatcatatttatttttaaagattgatgtcatattgctcctcaacttttgtcttacaaacttgaaatgatgtgtattaaacaaatgtgacatacttgctatgtgaaaaatattatgaaaaaatattatataattcattctagtagggtaaatagctaaaattcagaaaatataaaattaagaagttaaatggtaaaggcttcagaggttatggctgtgtccaaagtcagaaaagagaccccacaaaatgaggcaccaaagttagtctagaatttgaatagatatgtttatccatataaatgtgttaaacaaaggggtcatccgtttttctaattcccactcgatagaaactatcgaaataaattggctttactctatgctgacaataatatgccttcgccaacattgtttactcaaaaaatggaaaccagcattccctatgcccagagtgttgcaggcatttttcaataaatagaaggccttttggccaagttttccaagtttttgggacaagt

SEQ ID NO: 267144 - DNA, 379 bp, Homo sapiens
ttgtttagcgtcttaggtcactccctcctctttttccttttggaaaagaaaaatcaagcagactgcccaaatagccaagatcatcaggttcagcaagagaatacccctctctgtgtaaccctttaagatgagaatcactgcaaatagagtccaagtcagacactgactcagattttgcgaaaacctctaatagtccatggcttggtggtgatgggtagttttgctttagggatcttccgcttggggtggtcttctccatgtttggaaagatattgtttgaacgtgactgatcttgcagttgaaggttccagtttctataccacagcaagcctgggaaaatgagaagggggttattaaaatgaatttgagaagcgttttc

SEQ ID NO: 267145 - DNA, 545 bp, Homo sapiens
catgagccaaggagagtgggtggcctctagaagatggaaaagacaaggaaatggattcttccccagagcctccagaaggaatagagtcttgacacctttatgttagcccagtgagacccacatctgactccctgatctaccgagctgtaaaataaggagtttgtattatttcaactgactaaacttttggtaaattattaaacaaccataagaaactactacaagggataattgatatcttcacaatattgaatctttcaatctgtgaaaatggtatggctctccatttatttagattttctttctctcaccaatgttttatagtcgtcagtctagcaaacatgtgtatctgtcattaaatttattcctaggtattttatgtttcttgattgctactatccatcatttaaaaaatgttatcttccagttgtttgttgctgacttcgcttgtgagacctagaagagttttgtagattcttttgcattttctaggtatataatcatatcatttgtgaataaagagttttacttattcgttcccaata

SEQ ID NO: 267146 - DNA, 359 bp, Homo sapiens
ggttcacttctttctgtattggtggattttatattttaggaacaattaacccccacccccaatgaaaaaccctggaaattttatgggtaggggaactgttatatcaacattttattctataataaatgaagtattttttatacttcctcatagagacagtttatattattttctgaaaaggaaaaaattagaaaatacagaaagttcataattaacaccttaattattaaattaaattaaattaaagtgcttattggagctgggcatggtggctcatgcctgtaatcccagtactttgggaggctgaggcaggaggattgcttgagcccaggagtttaagaccagtctgtggtacccca

SEQ ID NO: 267147 - DNA, 555 bp, Homo sapiens
taccaacctgtgattggttccatgcaaagaaccctctcatggtacagcagaccctccgcccagtggacagtgccacctgccctggggagaatgcaagccaccaggcaataaatttcagctcttgttaccacctctccattctcctccatcgctccctcttgatctcccctctctgctgacaacaagatatggctggcatttagttgaggatttaaaatcaggaaagcttctccctaccttcaggctggaagctcgctcccctggctctctgaggcctcttgaagccgggcgtttgctgagtgccaggagaccagctcctgaaaccggaaggggcctgcattgttggactaaaatagcaaatgtgcaacatgagtctcttcaggggccttcagcgggctggcagcttccggtgggtactctacacaggccacagggaagcaaactggagtggccctccctgccacttgagagagcccttctatgtacatgactgttctgtcccttagctagattagttcatccaactgaaaatggactttagctgtgcctagcaaa

SEQ ID NO: 267148 - DNA, 365 bp, Homo sapiens
gagaataggggactctcctggtcggtagctgcccttcttagaagacacttgctattgtaaatagaacttggttggtttgcccttaataatgcctcatgcttggtgatcttctgcacacagagctcttttgcatgcaacatctcttggaagcttttcagaagcctgcaaggagacgttaagcatcttattccaagtgcaacagctaagtgggaacaggaaacctattccctctggccaggtgcagtggctcatgcctgtaatcctggtactttgggaggctggggcggaggatcacttggggcccagagtttgaaaccagcctaggcaacattttttgtgtgtctacaacatttttttgtctctac

SEQ ID NO: 267149 - DNA, 551 bp, Homo sapiens
attctgagatactaaagattgggactttaacatacaaattttggaggaaaactggttagcccataacaatgaattcatcaatagactgatatgatcaaggaaagaatcagtgagcttaaagaattttaaatagcaacttccaaaacttaaaagcaaagaaaaaagaattaaaaagaacagaatatttaataagtgtaggccaattagaaaaggaaaaatatatgtgtaatgaagtatcaggaggaggagaaagaaaggaacagaagaaatatttgaagaaattctgactgagattttcccaaaattgaaaataaacaaaatctacatatctaggaagctgagagaataccaagcaagataaatacaaaaaatttaaacataggcatattatattgaaactgccaaaaatcaaagacgaaaagaaaatcttaaaagaagccaggaggggaaaaaatctttatctatggacaaccaaggataagaattacatcagacttctcttaaaccacataagcaaaaagagaggaaagtgaaatatttaaaatgttaaa

SEQ ID NO: 267150 - DNA, 451 bp, Homo sapiens
tgttgttctgcccactcctctttcttccctcctgcccagtgcccttcatctaggtgtcatctctccttctattgtctggaaagacgatttgcaagaccctagtttggaagtaataacacaagaagcagatatggtttcgttctctttgtgttactgctaaccctcatctggagacgtttggatgcctatgtctaaaagaagaaggccaggtagtgtgggagatggcaaaaaaggaaagctccaagattactatttcaaagttttatctcatcacatatgtgtcatttggatgtcaatctggaagtgacttattcagccatcaggagctaggatttagcaaaatgacccccatcatcagaatatgagcaggaccaagagaaaaccaggtggatactcagccctcaaatgggagggaaacaggatcactcagccctcagattggagggaacta

SEQ ID NO: 267151 - DNA, 453 bp, Homo sapiens
cagattggagttgtggtttggtaagggtgctaatgaatgaggatctactctctacctaacagcttagccaaaactcaccctttcttataaccagtaacaaaggagcctcaaataaaatacatttttcagaacaaagaaatgtgactagcataatagactgattgcaatgttatttttcttgttaacaatttacagtgtaacaaactgttattgctggtaagggtgcaaattggttacaaccactttggaaaactgatgtgcagtattcattatagctgaacttatcctaccctgtaattcagcagtttcattcctgagtgtatacgcaagagaaattaatgtatgtggctactaaaagtttcgtgtaacaatgttcatagcagtttgattcattatagccccaaactggaacaaagtgaagcatattcataaaatggaatattatctggtaat

SEQ ID NO: 267152 - DNA, 509 bp, Homo sapiens
aatgtcctgtggaacttagacattggacttagggtaaacgtttccagtataaattcatggaagcatttttcttatgttttttttcttagagtaaatcctcaatgtaagcaaaaggcataaggtttaaatataactcagtgagtgttttctcagagtagttttagtgaaagtagtgtcaaagtagtttaagaatctaggtttttggtatttttaaacataatccaactacatagagaacaaatgtctgttagactatattccttgactcctagttgcatcagctgggctttgtgaaagctaggtaagagttttcacggaaatagcaaaagatgaaatttgcctcaagatgctgatttcgagtaaatacccacacaccttttacatctttgatgaggcaacaaaatgtgtttaatatgttttatgattcttgttcttttcttaaatcaaaatagttattaattcaaagaaactactgtttattcagctgcagatgcctactggttcttgga

SEQ ID NO: 267153 - DNA, 496 bp, Homo sapiens
tggcttaaagaatcaagaattcttttatgaagttcattttccaaggggccacctctgacctgttttttttgtccttccatattcttcaaatttggaggttttccttaaaagagagagaacagtgaccttagccccagggataaagaccagcaggggtaaatgttcccagaaacctccaaaaaccatagaaaagaaaggccatgttcccttgggtttcctgcagagacactgggataaatctgttctcaggatttaagcagtcattctgccaggccagggcctcattttcggtgagtggagtgatatatttattcattagcaagtgttgacattaggtagcaaaatgtgtgtaaacagagaagccacaaagacaggaatgtgccatttccaagggggagaaaagttctccagatcagccaataggaagtgattaacctgccaatcggaaactaagacagctggttactcacccaaaacgttttgttgaaaatagaac

SEQ ID NO: 267154 - DNA, 257 bp, Homo sapiens
attttttgtatgtttagtagagacggggtttcaccatgttagccaggatggtctcgatctcctgacctcgtgatccacccgccttggactcccaaagtgctgagattataggcgggagccaccacgcccagccggaaatgagaatttcttaaggaagaggagtgggattgctttatcattgggcatactaatattgaatatgatgaggtataagcacattattttccagattggctgtgtcactctacggtccctgg

SEQ ID NO: 267155 - DNA, 318 bp, Homo sapiens
gcaccatcacatccaatttgtgaagatataaacacaaattggaagtaagctataaacaaatgtctagggataagagactcagcattgagtagttgtgattaacattatggtactcatagctatgtaaatctgcgaaacaattgccattaactaaagaagtcatgactgttgggtgccctagagtctagtcagcactaatacagtaacacagaaatcactaagtttagcaagttgggagaagtattgaaagggccaggagtggcctaagcttcctggttcatttgttgccaattatattagtccattttcacactgcta

SEQ ID NO: 267156 - DNA, 531 bp, Homo sapiens
gactgaagattggcaaaaactaaaataaattaaaactgcttacaccagaagccttttagagaagcatgagactgtttgactagtcctacctgggttccggaaatacatgcatcatctgtacttgaagaggccagtgggagaggagaggagggggaggtcatttatctgagtctctccagaagtttttaaggctacattttggaatcattaaacttggccttctcaaactcaatagcagatctctgagattctccttttattattttccataggcaatgggaggaaaggtggatctttttaaataatagaagttttaaacagtccttaacgtgcttttgttgaggcatcttccagaatgtaaggtacagcagctccggtttctattattgtgacttgaatgtcaggattcaagggctcagtgtcaaagataattggctttgactttttgtaatctaggagcagcagtttgtgagatgtttattcaaagtgttagcctgtttttctaccaacaataagctagaaaagacaaaa

SEQ ID NO: 267157 - DNA, 579 bp, Homo sapiens
ataaacaaggaaataagtgtatgtaacaatgtacagctagaaacgctgggaaagaaacgaacgtgagagacacttattggaatttaaatgcaagccactccactatatctactaggtgtgtgtgttacaaaatacaaaaaaagaaaagcctcctgggagggtagcaggagttaaattactcaaaattaagccacagtttaagacagcaaaacataacagaacccagagatgccccaaggcaatacaaagttaattatctaagtagtagtaacaagaataactgctggccaggcacagtggctcacgcctgtaatcccagcagtttgggaggctgaggcaggtggatcaccctgtcaaaactctcaggagttcgagaccagcctggcaaacatggtgaaaccccgtctctactaaaaatacaaaaattagccgggcatggtggcagaagcctgtaatcctagctactcgggaggctgaggcaggagaatcatttgaaccggggtggcagaggttgcagtgagctgagatggagccactgcactccagcctgggcgacagagtgagactctgtctcaaaaa

SEQ ID NO: 267158 - DNA, 451 bp, Homo sapiens
tgggggtttatcttccacccagtgctcctgccactgtcaactctttgccattgccaaaccttgcaccgtgaaatttcaggttttgctgaaaggaactgtacctccgacatggcaggagggcatgtttagcctcattcctgggatgaacacgatgcaccgtgtggccatagccaaggccaaggccgttcctcacctcctctccgtgcctccgtttccgcaaatgcaacacaggggcagtagccgcaccctctccatcccccatgatagactcagtgggttaatcacgggagccagccctggcatgtagtaagtgctcagtgaaaagaacaaagaggctgggctcggaggcttccgtctgtgatccctcctaaaggaggctgaggcaggaggatcgcttgaccccatgagttggagaccagcctgggcaacatagtgagaccccatctctaaa

SEQ ID NO: 267159 - DNA, 381 bp, Homo sapiens
cataaaaaagtgaacattagtgtaagcataatggacagggttgctttgaagactaattgatgtttaaagcaatttatagccctggatcaccatgcacatataaagatgtttctcataactactatgcagtaattgtctgtatgtgtaataaagatagcagaatagttccacaaatgggggcaaagtgtaaaaaaatagactgtaggttatgggtcacccccatgacctagtcacctctgaccaggcccaacctccaacattggggattacaattcaacatgagattcggccaggacatatattcaaactatatcaatatcatcaccagatgaatagctaaacaaattgttatatccatacaatggaatactgcttgattat

SEQ ID NO: 267160 - DNA, 531 bp, Homo sapiens
caataacagtctaatatacatgtgattccagcctcagaaggtgaagagagagagaatgaggcagaataaatctttgaagagatgatagttacatgaatgaggtgtggcggcaaggctagagagaagtggatatgggagcatttgcaaggagaaccactgaggcttggtcactgagtggagggaagtgtggcacctgagtgtctgtcttgggagctgcaggctctcagcaggtagtagtgggtggttagcaggtggtggtgccaggatggagagccaagcctagctctccagtgcctgtgctctctgctggtaccccacaccacctcctacaggccaaagtggaacagtagtgggcctttgctcctcgattccctagcctccagccccagcctttcctaagccctcaatgtactattcctattagtcaatgtgtggcagagagatgttcatctccccccattctctccacctcctctgtcccaagtgttgtgtcacacattgctctaaagtaaaggttttcttttcccaaac

SEQ ID NO: 267161 - DNA, 362 bp, Homo sapiens
catagaggacatttttgcaagtggacctgctgggtcaaatgtcttcaaattttaaaggctttacacatatatatctgatcaaacggccctataacttgtatgaatgcgtacacctggtagcagtataagagtactcattttccatcatcatcatcatcatcatcatcatcatcattgctaatatttaatgagcacttagtatgggtctggcaaatatccaagcattttattcagaacaattcatttaattgtcacaactctgcggtagataccatggttattcaacatgtacaatagggaaactgcagtacataattatatttagaaaacagaaatgtaaggccgggcacaatgactcacgc

SEQ ID NO: 267162 - DNA, 345 bp, Homo sapiens
tgccaagttacgcagaaggggctgctacttcatcagtcttcctgtcaaacattctgtgtctacatgaaatgaaactgcaggcagatgagttaagggaagatggataaagataataacgcatctgacataacgcagtaatgtgctcaccgcagtacctggatcttcaactacaaggtttgccacttgggaaaatgcagtggaagtattgttctcaggggcgcctgcaccgaagaagcagagggcgtcctgctctcagtcgcggtctataaaataggttctgattcctaaaactggaggcatcattgaacttttggagagtgttgccttaaagtaattgtgtttaac

SEQ ID NO: 267163 - DNA, 558 bp, Homo sapiens
gggtgctctacaaatgttgaaagactgcatgaaggagtggaagccagtgccgaatcctctgctatatctgtgccagcacatccttgtccctaacagcaaactcgttttctcctttgcatgaattgtattttcagtaagctgagataattggaatttaaggtaggactttccaaaattaagtttatcatttgtaacttaatttatttcttaatattttaaataatcccaaataatcatcagtacattgcatgacactcagggggtaagaaaatgaaacatatataccaaaggtaaaatttcatggtttttagaagtcgtcctcccatgtataccctcttctgctctacccttatagcacgcaaggatctgtatagtccaaattttaaacattcaatttgcaactcatttttaggaacacatttcgtaaaggagaggttgaggaacggatgtgttcatatctccctctcctctccacttctttctatgcacacaaagacacacacatgagatagatgtgctgtcggtgtatatatctttggataatttttcccctgaggg

SEQ ID NO: 267164 - DNA, 289 bp, Homo sapiens
caagctcaggtgatcctcccacctcagcctcccgagtagctgggaccacaggcacatgccaccacgcctgggtaatttttgtattttttcatagagatggagtcttgccatgttgcccaggctggtctcacactcctggtttcaagcaatcggcctactttggcctcccagtgctgagattacaggtgtgagccactgtgcctggccaccagctctatctttaccatcaacattggagtaaacatttacatcaggggtcaggggtatccaatcttttggcttccctggg

SEQ ID NO: 267165 - DNA, 399 bp, Homo sapiens
ttactaaaagtttaacattaattttgtaatagtatctatcagtttttaaaaagaagcctaaaaaggcttgaaaaagtggcaaaaatagaaaaagtgattcccccatgtagttagtagttggcaatacataagtgaaagatgtcactgatttttcttaccaagtagaatttaaaagtgtatgttgcatagtaataccctttagttttctttaatggtaattattaaagtgaatatgaaacaaaaaatatgataattgccggttaaacttttgccttatatagaaaaaaagcctgttctttgaaacaatttttaaaatgaaataaatttatgagctaatatttttccattgaaggttttttagtgaccatttgtaaatttgctttaaaattgcttttaaca

SEQ ID NO: 267166 - DNA, 443 bp, Homo sapiens
ctcaaggtgaggggtggcaagcgtggtaggaacaggcacacagtgtgcagccgaggctggtccccacttcggcagttggaggcaaggtccaaggcacaagtgagcctgtgtctgagaccctgggatgcaagtaacgcccctcctgcagcccgaggtcctgctgctggtaacctggagctctgcgtttctgcaggacatcgtcacaaataggatgtccaactgagcagctgtcatgagacagtgatttttgcaaacattgaagaagtgtgatgctcataacagagcggactcttctgctgttgattgattgagacagggtctcattccatcgcccaggcttgagtgcagtggtaccatcacagctcaccgcagcctggacctctggggctcaagtgatcctcccacctcagcctcctgagtagctgagacaacagacacacacc

SEQ ID NO: 267167 - DNA, 350 bp, Homo sapiens
ctcaaggtgaggggtggcaagcgtggtaggaacaggcacacagtgtgcagccgaggctggtccccacttcggcagttggaggcaaggtccaaggcacaagtgagcctgtgtctgagaccctgggatgcaagtaacgcccctcctgcagcccgaggtcctgctgctggtaacctggagctctgcgtttctgcaggacatcgtcacaaataggatgtccaactgagcagctgtcatgagacagtgatttttgcaaacattgaagaagtgtgatgctcataacagagcggactcttctgctgtgatcgtgccactgcactccagcctaggtgacagagccagagcctgtcgca

SEQ ID NO: 267168 - DNA, 307 bp, Homo sapiens
gaggaccagggctcccaccctgagaggcttggagcagaggacgatgtgcctcacccagtttctgagggacccctgtggctgcggactgttcccagcaagcccaggagagatggtgggggccaggtggtgggaggtgacatggggcacatgtccagggaccagctgtggcctgagaggctgggtgcctgtcctggcatggagggggcgtctggtggaggcatttaggatgggtttggattgcactgagcagcggggtgtgagggtctcacacgatccatagggggttggatgtccctgttgctggccc

SEQ ID NO: 267169 - DNA, 521 bp, Homo sapiens
aattttctttgtgaagggacctttctttctcagtcctgtggctcacacgggatgctaatgtcattttgttcatagcctttcagagctggatgcataagtcaagcagcatcaatgccaatgacctgtgaggaaacatttaagaaggagacactacctctcttttctgaagaatcaaatcagtgactcattctaattctcttgggtgtgtggaaggaggatgagagctttgaacctacagctactgtttagtaactacgaggcgatgtcctgagatttcctactaggtctctgtctgaggatgtagtcagtatttgaaaaaagaacagagggataaggagaaaaatcatctgtagcatgactcaagttgctggatctagcctcacctgaagagatacatcttggacttttctgttacatgacctgacatcttctctttaaatattttttgtagacacaattcttcatgtggacttatgtattaaattttagctgaatccatgaaataaatttttataaatggc

SEQ ID NO: 267170 - DNA, 375 bp, Homo sapiens
ccatttcttaattctgattggtcttcatttaacaagaggcatgcatgagaattgttagatgcttgccttctattaccaccacactgctggcatagcacctgtcatgctgcctacccccaggttcctacccacttctaggatgtgagtttgtgatgggcagggttcacatcctttctgttctatctctctaagagcaggctagacccagagtagcaattcagttaactatttgctgaatgaagtatgtgaattccaagatactctcagagtacttttttttttttttttaatacaggtactataatttgctggagtggccatgacttgttttacaaacacatatacccttcttctttgataacgactcccctcaaa

SEQ ID NO: 267171 - DNA, 314 bp, Homo sapiens
gatatcatctcactgacttctgagaaggaacatagacaagtacaagcatgttgtcttactcagcactcagccgcacacatcacgatgggcagaagtcactatcagtgagttctgttgcccttgtacaaagaggagttccacttcattataaagaaatggagcgagtatatttttaataggcccaactctttagctatgtttttctttttatcaggctttacttatttagtttttctagtgccttgaagtatattacttatatttctttttaatcttttcagcctcagtaataaaattaatataaatgagtcaaa

SEQ ID NO: 267172 - DNA, 415 bp, Homo sapiens
gtgtaaagtatagcctttctgtaaagcagttggcaatatagcgtgtatctagctttaagaatgtacttgtactttggcccttcattccacagccaggcatgcattttaaaatgttcatcatctgcatcattgtgacggtttgtttcttccatatttggagataaatttatgtgtagactttttttttgtaagacatagttgataatgaaaatttatttaaatggtcttgcaatgatttaagtattcaaatgcttaaagaaagcattgctggtacaaatatttctatttttagaaagggtttttatggatcaatgccccaagtgtcatcagagccattggtgttttcatttttaaaatgtcacctgtaaaatgggcattatttatgtgtatatggctttttttggcattcctgata

SEQ ID NO: 267173 - DNA, 404 bp, Homo sapiens
cggctcatctctagccccagttcattctgcccaccaccagctccaaatgagcagctctcccactgtggctttaaatcaggggcacctctaagactccacttccccctctctccctccacggtagggtcagcagggagccagtggcctggtattgatggctttgtcattaagcttggaggattggaggacgggggctgctgttgatttaactccaggcactgcctccacaatcttctttcaaattaggccattttgcccatcttatttggatgccttcacactagtaaaagcctcatatctcccaaagtagtcagcattttttttatgagggacagatttttattttcagccctgcagcttcttagttcagcattagagactctacttggtttattttattttgt

SEQ ID NO: 267174 - DNA, 408 bp, Homo sapiens
ggacaccctatgaaagatacaggctaaatagtattatattcaattcattttattcctgatttttaaatgtgcacacagagatgacttaaattatatcatgatgtccataatcacacatgatagccctagtcacatatctgaaagcagtgttgcagacaagaaagcttttgtggtacaaaggtgttgttgggtagttgctatagagactgcaagccccacaaagcctgtaatgttggttagctggtccttcacagaaaacatttgcccaccctacactagatgcctggcaaggtagtcttctgaaactttgcttgccctctcttctcctttttccttcctctcttctctctttactttctttatttctcctgcaactcttgagaaatacttaaaaatacttaaaaaaaa

SEQ ID NO: 267175 - DNA, 473 bp, Homo sapiens
cccgctcctggaggacggcgccatcttgtcttgtggctttgtgaacatgaatccctggcctgaactggggaagtcactttcaggattaaaggcagccaacagaacatcagcacccagagccctggagaacagcatctgtgtttgagtgggtatagggagagagaggctgcatttctaaaatatctctgagaacaagctgcttttcagaattcaaatcaacatgtgatcttcttcactttaggggtatatgcaggaagccattagacacaaccagagtaacaggaggagggaagagagagtcttcaggaaatgaagaagaaagaggagaagtgggctgagctggaagcctcattttccacaaggacactgaaacattgttaagccaaggagaactgttagctctgacaatagctcctcttcttatgagtcctttggtgttttaattatttttaaaataaagattgaagaacaac

SEQ ID NO: 267176 - DNA, 165 bp, Homo sapiens
gggtttaagtaacaccaacatgccacactctggagcagcaggatctttatttttggtgccaactcctcatcttgcaacaagtgagccacttcttccatgtactcagctgcaaagttcccagcaggtggtcctcctgtaaaacaagcatttgcatttccagaagta

SEQ ID NO: 267177 - DNA, 484 bp, Homo sapiens
agctgcctgtctgtgaaatgggtccatgtgtccccatgccttggcccgtctcctcttccctacaacaggctgctgtgcagcctggggccctttccaggccaccttctccatctgctcactgaggagggacccctgagtcagcgaggctccagcttggctgcacccagctgaaaggttatcctgctgataccccaccacttatggaatgatggaccttttccccactggattagaatgtcctttttgtgtatcatcgaccctgaacaacccaagtttgagccgtgtgggtgcacttctacgtggattttcttcctcctctgtcacccgagacagtaagagccacccctcctcctccccagctgactcaacgtgaagatgacgaggatgaagacctttacaatgatctgcttatgctgaatgaatatcttttctcttccttactttactttattgtaatacatgaagcatacaaaatgtgttaatt

SEQ ID NO: 267178 - DNA, 772 bp, Homo sapiens
gacatctcacccaccatagcagggaatgagtccctctaaactattccctcaggaatagtaagagccagcccctcttccccccctggctcttaggacccccatcgcaggggggtgaggcaccccccgcgatgcggggagtacgagtcagcccttctcctcccctggctcttagggcacctatcgcaggggggtgaggcaccccccgcaatgcggggagggctgagactggggtctgggctgttccggacttcaacactcaccccttgtccccccgcagggctatggcgtgtgcttggtggggctggagcggctggcttacctcctcatggcttacagcctaggcacctcagccgcctcactcctgggcctgctgggcctgtggctgccacgcccggtgcccctcgtggctggagcaggggtgcacctgctgctcaccttcatcctctttttctgggcccctgtgcctcgggtcctgcaacacagctggatcctctgtgtggcagctgccctttggggtgtgggcagcgccctgaacaatactggactcagcacactcctgggaatcttgtacaaagacaaggagagacaggacttcatcttcaccatctaccactggtggcaggctgtggccatcttcaccgtgtacctgggctcaagcctgcacatgaaggctaagctggcgatgctgctggtgacgctggtggcggccgcggtctcctacctgcggatggagcagaagctgcggcggggcgtggccccgcctcagccccgc

SEQ ID NO: 267179 - DNA, 668 bp, Homo sapiens
caagccttctataataactccttgcccaaggtgttgtcctataaacttccacaaacccattctccccactgcaaatatttcctctcgatacatctacctatgtatcctgcttagtgctgtatatgtttagaagccagagttaaaaaaagaaaactactatttttcccatcctcaactccaaattctggtttaactgctgtcaccttttttaaccaacatatttattaaatctgaaaaaggtatacagcaaaatgaatgtgtcatttaactgagtgtcaaaagtaacaaaaactatctgtaacacaattacttgtggaatgacctgctgatggctggttaaggtttaccaggattaaacaggattcttaactaggaattttattttattttctgatctgaagattaaataaaccagctccagctttgccctaggaatgcatgggactttaagaaattaattttgctttctgtaacatagcctgcttatctctaaaaagaattaataataactgcacactcaaaggcattgtgaccccaccagaaaggctcggtacaagcataagctattaaatctcaaatcggcagatctcacagtaaaagcagacatattaacaacacagtgttgaggcaaaattttgaaaaggcaggagttttaaacatacacacac

SEQ ID NO: 267180 - DNA, 478 bp, Homo sapiens
atttcaaaatagctggattagaagatttataatgttcccatagaaagaaaattataagaggtaaaacctacctcaattaccctgatttgatcctgacacatcttacacaggtatcaaaatatgacatgtattccaagaatacatacaactattgtatatcaaagaaagtttttaaaaataaaaataaatttaaaatactattgcctaataataaaaccaaatattgaattttgctgtgaaatcaaaagcatatcttgaatatggaaggaaaatacatgtcaaaattatttttaatgtatttttactttcaaagccaatgtactcttgcttatagccttccacatatgatgaggttcttatggtccacaaaaaataaacagtgacatcaaatgttttaagaaatatagcagagtctatttgtcatgatacagtatatcaattttatttaatagtgatacaaaatactttaaattgtgtt

SEQ ID NO: 267181 - DNA, 446 bp, Homo sapiens
tagaatgtaatggtgacctcattaaaagaaatccactgatataatatatcacaggagtaggtcaaaggaaacaagcagaaacaagagtctctcataaaaaaaaatttttttaagatgaaaatcaacatttattttttattttttaaactcccctagtaaggaaagaaagggccaggcacagtggcatacatctgtgatcccagcgctttgggaggctgaggtgggcggatcacttaagcccagggattcgagaccagcctgggcaacatagtgaaaccctgtctctacaaaaaactagccaggcattggtgcatgcctgtggtcctagctacccagtaagctgaggtgggaggatcacctgagcccagggaggtcaaggctatagtgagctgtgatagcgccactgcactccagcctggacgagggtgagagaggccttgactcaa

SEQ ID NO: 267182 - DNA, 332 bp, Homo sapiens
attggtggtggattcaaagcacagcatctggggtcctgtgtcaattacgctctcctcaacagaagatctgagtggtggtgcatcttcatggctgctggcaggccccgctgtgtaattacgtctggaattggtgggttcttggtctcaccgacttcaagaatgaagccgtggatcctcgtgctgacagaatcaagttttaaagatccagttaaatgcctggctatcaacttgccaagagctgatccagatggaagccatcatcctaagagtcagacaactcattaactctaaagggactgccatgtattaaaaattctctttatggattgtga

SEQ ID NO: 267183 - DNA, 468 bp, Homo sapiens
gaatgctggatcatatggtaattctatttgtaatgtttttaaggaactgccatattgtttttcacagcagctgcactgctttacgttatcaccagtcgtgcacaaggattccaatttctccacatctttgccaacacttactattttgctttttcgatagtagccatcctaatgggtatgcgtcccagcattgtcttttaaatgtgtttgtccaattcctgtttgccccaatggtaactattcctcaggcactttcacagtgatctctataccatagtgcagcaatcttcaagtatcacatatcctctaaaagaattttaagaacaagtgtaaaggagataatatatttttaaattggcatctaatttttatcataagaaatataaatagctgcagaggatctaatttcaagcatgttgtaaaattttcacttaaaagcaaacctaaaaatacagatggcttttcaaa

SEQ ID NO: 267184 - DNA, 718 bp, Homo sapiens
aagtgtaatgaatgtgggaaagcttttaatcaacaatcacatctttcacgtcatcgtagacttcatactggagagaaaccttacaaatgtgaagcatgtgacaaagtttttggtcagaaatcagctcttgagtcacataagagaattcatactggagagaaaccatacagatgtcaggtttgtgacacagctttcacgtggaattcacagctggcacgacatacaagaattcacactggagaaaaaacttacaagtgtaatgagtgtgggaagaccttcagttacaagtcatcacttgtatggcatcgtagacttcatggtggagagaaatcttacaaatgtaaggtttgtgacaaggctttcgtgtgtcgttcctatgtggcaaaacatactagaattcacagtggaatgaaaccttacaagtgtaatgagtgcagcaagaccttcagtaacaggtcatcccttgtatgccatcgtagaattcatagtggtgagaaaccttacaagtgtagtgagtgcagcaagacgttcagtcagaaggcaacccttctatgccatcgtagacttcatagtggtgagaaaccttacaagtgtaacgactgtggcaataccttccgtcactggtcatcccttgtataccatcgtagacttcatactggagagaaatcttacaaatgtacggtttgtgacaaggctttcgtgcgtaattcatacctgg

SEQ ID NO: 267185 - DNA, 488 bp, Homo sapiens
agaagctgttttcagagattcagaggcaggcagatgaccacagcaagaagaacagacagaaatccgtaaggataattcgtctaagctaattatagttaaagcattactgacttataaaaactcaggattatgctctcaaaggcaatcacatttatattatttttatttaaaatatatattacatgtaatataaactatacacacaatatattgaactatatggaaattgaaactgtgaaatcccgtactgggctgcacctcttttattgactactattttcttaccacatttggtgacacagcatacgtgctcccaatcacattcaatgattcttaatcagttctcctaccactctcctccacacactgacatatgcatcaattattcatggctattatcctttattggcaaaacctgattcagacaagaagcagcacatagtttcttctatgtggaaaaaataaactatttttttaatatcaataaa

SEQ ID NO: 267186 - DNA, 406 bp, Homo sapiens
cagagaagttaagtgacttgccaaaaggtaacaattgtaaatggtagagctaagatttgaacccagggtgtctgactcccaggtccatgctccagagtcagatatagaaggctggagcacagtgtaaaccattctggagtaacaagcctcaaatggtgaataattctttccctaactctggtccacctgcaacctaggagttaaaataagtatcttgctatgttaagagtaaagcaatagttacaggcatcatatattagctgtcttgctcccaaaatggtgacattacaaacttttccactattccctttgaaaacatgcttgcagccagttaccatttcttagcttatgatgtagagctattaagggagtattttcacttgtgccaaagagggtaagcgtttat

SEQ ID NO: 267187 - DNA, 441 bp, Homo sapiens
aatgaatgctctgtggagtttatcacaaaaagctttctggttccgtgggctgctcttcattgctaattaaattttcgaaggtgattctctacccctcccttccaatacacacaaggaagaaaaaagattgttcaggattctgtggggatttatgtgggccgtgaaaatgtatcacgcctgtaatcccagcaatttgggaggccgaggtcagtggatcacctgaggtcaggcgttcaagaccagcgcggccaacatggtgaaaccccgtctctactaaaaatacaaaagtaagccgggtgtggttgcaggcacctgtaatcccagctacttgggaggctgagacaggaagatcgcttgaaccagagggggggaggttgcagtgagccaagatagcaccactgccactccaatctgggtgacaaagcaagactctgtttcaaa

SEQ ID NO: 267188 - DNA, 203 bp, Homo sapiens
tgagctgggaataggcattggcagaaataacgactctcagatcacagccagaggagccagtgaaatacatataacaatgcctcactaacctcaagtaccattttttgatcaatgggataagttcaaagtatctaactcactagaacacagcagtatccacaaaactgaagcacaaaagctgccccaaaaccccagagtagtgc

SEQ ID NO: 267189 - DNA, 458 bp, Homo sapiens
acaaaccctgaggggacagccatgttccagtgtggctaggagggtctggagctgggcacgtcccccatgtctgcttgattcccctctggccgagttctactcaggtgagttgtgctcattcttgcttccccagggcctggatcacagttcctcaagctttgggatacaaacgaatcacctgggatttggataaaatgcagattcgtgttcagcagccctgacattctgcatttctcatgagctccagggagacgctggtgctgctggggcaggaccacactttgggtggcaagggcttggcaggcaattccaggtgtcaccctagagatggcctgctattgcactgtcagtaggtagctgccacagtgacggccgctccagatcaaggggaggaccttttgaaaagggtccttgaatcatttgggaaataaatcaagccatatgagtaaaaagtaatc

SEQ ID NO: 267190 - DNA, 479 bp, Homo sapiens
gaatggtgagaaattatctaagattaagacttgaatgagtaaaaagggggaaaacaaatctagttgatattaaaacagtcaaagtgaaacttaagggtcagtaaaatacacataaaggatttgagttttccagtgtatattttgcttacatatttgtggcttttataactcctttagtattaataaactactgaagtcacatgcaaaaaaaaaacagactcatttgcaaattccctgtgggctctatccattgaccaagtcatgtttacttctgtgcttaaagacagtaatgttcaagatgtgctttcatcatgtatgcctctcccatatcagactacgaaattatgtgactattcatagtctctttcgcatcttcagttaagcatataaaaggcacttttggtggaatagtcttttgaagagtattaatgaaattgaatttaagtattattattaaatttaatatttctattattaaa

SEQ ID NO: 267191 - DNA, 550 bp, Homo sapiens
cagggctgatcagttggtgttacatgtgactactatgcttaatgctatctggcttctaactttaagcactgaaaaaaagtccttcgtatttctcagtgtgtgattgaactgagatgaccatcctaagcctcctcattacataaatccttaccttctccagaagcaacgaatggtgttgagaatagcatatgttactactcagccatattccatagccttttctccaagatatttttccaaagttgccccttttctgaatcccttgcaagcaaacaaacaacaaaacaatgggtaataaaataattgtttaactttcatttatatgctctgagattgatgtgattttgataaataactatattaaaagacaaatgggagtggtgattttgtgaaaagcccatgcctctgcccatggaatatgtggcttggcctggagctcttattttacttatatatttctaagcagaattattcaagaatgtctcttattacaggtcttgaaacttggacagccaacagaaaggaagctaataaataaatttgtcagaaa

SEQ ID NO: 267192 - DNA, 470 bp, Homo sapiens
tcgcttgaacccagtaggtggaggttgcagtgagccgagatcatgccactgcactccagcctgggcagatgacacaggacttcatctcaaaataaataaaaaaatagattttaaaagagaaaagattttttaaaaattatagaaccagtccaggaagcctaatatctgaacaacaaaagttcagagcagaagcctaggagcagtgaccatccgtgtgacactgaggaccaataaagccagattgttgccttgaatttatttccctctaaaaggaacaagggctccttagaaaaatggctttttccaaatctagggcagaaaatctgcaaagtgacttggaacattttgttataccaagtagcaaggaagctaccaaagattagggttttatctaaaggactccaaagccaacttaaagacggtcccactcactggtgctctggtaaatgtttaacagctggttctcaaaa

SEQ ID NO: 267193 - DNA, 171 bp, Homo sapiens
ttcacagaagaggaaatgtacatagctcgaacatgtaaaaagatgctcacgatggccgggcgtggtggctcacgcctgtaatcccagcactttgggaggccgagatgggtggatcacgaggtcaggagatcaagaccatcctggctaacacagtgaaaccccgtctctact

SEQ ID NO: 267194 - DNA, 426 bp, Homo sapiens
tgtacagttaacgcaatcatcacagtggtccttaggtgatgtacatcctcagcttacgaagataacaggattaagagattaaaataaagacaggcataagaaattatgaaagtattattagggaagtgataaatgtccatgaaatcttcacaatttatgttcctctgctgaggctccagccggtccctccattcagggtccctgacttcccgcgacaccccaggtttttaaagagccacaggaagtccctatccagagatgaagtgacatgcagttagtgtgatcaatgcagtgcaaagccgctgttaataaccatccatgacatctccccttcctgatttgccacctgacaaaatgccctgtggagggctggaaatggaggatgaatccaatctcagcatttttctgagaaggaaaatgaaactc

SEQ ID NO: 267195 - DNA, 487 bp, Homo sapiens
agtgaccagtttcttaaaatccctttaaattgttttcaaaacattgtgtgttcgccccataccttcttctttggtatgtttgttgctattgccacactttccccatacctgccaacctaccctgttaccacctctttgtccatttctccccagcctcagacaggtaagacagaattgtttctgaaatggaataaagaacagtcttggccgggcgccgtggctcatgcctgtaatcccagcactttgggaggctgagatgggcggatcacatgaggtcaggagtttgagagtagtctggccaacatggtgaaaccccatctctactaaaagtacaaaaattagccgggcgtggtggtgcacacctgtagtcccagctacttggacggctgaggtgggagaattgcttcaacctgggaggcggagattgcagtgagctgagattgcaccattgcactccagcctaggtgacagagcaagactccgtctc

SEQ ID NO: 267196 - DNA, 718 bp, Homo sapiens
ctgaggaattcgtttgagcctcttataaatagtgggaacactgccaaaaatagtcaaatacaacttttttagaactctggaaatcaaccaaagagaagtatttatttacaacaacaacaacaacaaaaaaggtgatctcagtaagcacagtgaactttgtggaattttaatttgtcctattcctattcctccttagctcagcagaggctggagaacaaacagacccccagtcatggtgaaaaccagcagcctagcagccactggagggggcaaaatgggctgggaactcccaaaaacattcttctcagagagctgtcattttttgacaaatctggcagttccctggaaaattctgttctaaagccttgtctttatttgacctgactcagaacagccttttcccgagggccatttgtcaaaagcaatcaatagcaattgtttaacattacaactgcttgaagcagccataacagttgagacaaacaagaagtggaccaaaaaacacttaaaaggaaaagcttgggaatgaaatattcatagggggctttgcaaagcttccacatatttctagaaatctagaaggatgcaaatgataaggctctgcaagagcccagggaagacttaaataaatggaaagacatcgtgtgtttatggattggaaggtttaatatggacaagatggcaatactctcccaaatggatcaacagattcaatgca

SEQ ID NO: 267197 - DNA, 1264 bp, Homo sapiens
ggaagtctgtcaactgggagggggagaggggggtgatgggccaggaatggggtccccgggcatggtgctgggcctcctggtgcagatctgggccctgcaagaagcctcaagcctgagcgtgcagcaggggcccaacttgctgcaggtgaggcagggcagtcaggcgaccctggtctgccaggtggaccaggccacagcctgggaacggctccgtgttaagtggacaaaggatggggccatcctgtgtcaaccgtacatcaccaacggcagcctcagcctgggggtctgcgggccccagggacggctctcctggcaggcacccagccatctcaccctgcagctggaccctgtgagcctcaaccacagcggggcgtacgtgtgctgggcggccgtagagattcctgagttggaggaggctgagggcaacataacaaggctctttgtggacccagatgaccccacacagaacagaaaccggatcgcaagcttcccaggattcctcttcgtgctgctgggggtgggaagcatgggtgtggctgcgatcgtgtggggtgcctggttctggggccgccgcagctgccagcaaagggactcaggtaacagcccaggaaatgcattctacagcaacgtcctataccggccccggggggccccaaagaagagtgaggactgctctggagaggggaaggaccagaggggccagagcatttattcaacctccttcccgcaaccggccccccgccagccgcacctggcgtcaagaccctgccccagcccgagaccctgccccagccccaggcccggccaccccgtctctatggtcagggtctctcctagaccaagccccacccagcagccgaggccaaaagggttccccaaagtgggagaggagtgagagatcccaggagacctcaacaggaccccacccataggtacacacaaaaaaggggggatcgaggccagacacggtggctcacgcctgtaatcccagcagtttgggaagccgaggcgggtggaacacttgaggtcaggggtttgagaccagcctggcttgaacctgggaggcggaggttgcagtgagccgagattgcgccactgcactccagcctgggcgacagagtgagactccgtctcaaaaaaaacaaaaagcaggaggattgggagcctgtcagccccatcctgagaccccgtcctcatttctgtaatgatggatctcgctcccactttcccccaagaacctaataaaggcttgtgaagaaaaagc

SEQ ID NO: 267198 - DNA, 730 bp, Homo sapiens
aggggagtgagtcacacagcctcacatgcgcacagtcagaaaggtcgcctctacctcttctgtcctccagccctgcaagaagcctcaagcctgagcgtgcagcaggggcccaacttgctgcaggtgaggcagggcagtcaggcgaccctggtctgccaggtggaccaggccacagcctgggaacggctccgtgttaagtggacaaaggatggggccatcctgtgtcaaccgtacatcaccaacggcagcctcagcctgggggtctgcgggccccagggacggctctcctggcaggcacccagccatctcaccctgcagctggaccctgtgagcctcaaccacagcggggcgtacgtgtgctgggcggccgtagagattcctgagttggaggaggctgagggcaacataacaaggctctttgtggacccaggtacgggagccagcggggagagggaggggcagtggggaggatcctagaatcttaagacttttgagtcttaaactcctagaaacaaaaaactctaaattcttcatatcaaacttttttttttttttttaagagacagagtcttgctctgtcgtccaggccttggagtgcaggggcgcgatctcggctcactgcaacctccgcctcctaggttcaagcgattctcccgcctcagcctcccaagtagctgggattacaggcacgtgccagcacgcccagctaatttttgtatttttagtagag

SEQ ID NO: 267199 - DNA, 586 bp, Homo sapiens
caggagaatggtttgagaagtggtatagagtaatgaggtggaaaagggggaagagagtgagagcaccacacaaaggacaggaaaaacaccagcaatacatcagctttacacagcaggcaagtttcctgctctctacaagtacagatggaacttgtcttgtgaattaacatcctgactacttttgttgatcatcacattttttcctcatgagagaaataatagtgttttataggctcctgagaataggtttactaaagtcatcgagatctgggttcaaatgacactgcttagggaggcattcactgatcaagttacctaaaatagcaacaatctatcatccaaaatatcatttgccagctttgattttgcatataacacttactttatatatgtacatatatgtgtatatatatatttgtgtgtgtgtgtgtgtatacatgtatatatatatgcagtctgcaataaaatgtatgcttctcaggggagaaatttttttctaatacattcagtgctctatacccagaacctggaacaataccttgtacataataggtgatcaataaatacttactgaatattgaatgga

SEQ ID NO: 267200 - DNA, 440 bp, Homo sapiens
ttttttttaaaggcaagtagaccgaaggcagctttggtgactccacttctttttaaagtcaccctcctctgccctctgactttaagtgacaggcagttccctcccctctctttcaattctgtaaaatggggataatccggacctcatgcccccagagccttgtaaggaccggctaatgagggcaggcgagtgggaaacgaatcgtctgaacaatgatcagtcattctttcgggcttgcaaagagggtaaaaaaggttgggtctttagcggggtccgtagaaggctttgaagacgaaaagtgctgtagaggtgctaagcagcagccaacggaccgggcccgctgccagggggtcagggctgggccgaggcggccgcggtctcaggctctggccaattttgcagccgcgggtaaagttcacgctgcccgctcccctcggtac

SEQ ID NO: 267201 - DNA, 432 bp, Homo sapiens
gcggatctccccagttgctaatcccggctctgccactcaatcctatccctagttcccgagcgcgggtcccccgccttgcagtctccagccgtgcggggccgggagcaggcctccggcctcccagacttctagagcccgccgggcccatctttgtactcatccaccccagccggcttgggactcagacaccgaagtctttttttttttctctccgatccttggacacctcctctgtctgccatttattagccatgtgaacttggccacatcacttcacctccctgagcctcagtttcctcatctgtcaaatgggggtttataaacacctacctcgcagggttgttgtgaggatttaatgcgataatgtatgtaaagcgccttgcacactgcctggcacacagtaggcgctcaataaatctaagcttcccttta

SEQ ID NO: 267202 - DNA, 444 bp, Homo sapiens
aagtttctttaacatgctttgccttgactgtgagcttcttgagtacgaagaacatcctttattcacttttatatcccttattgtcttcaaagtacttagcacatggtgagtgttaaataatggctattgagtgaaggaaggaatatgaatgtgaatgagccacagtttaattatccttctattgtatggcctggacagagatgccttaatctcagcttcagacagtaactattctgtattcattttgtgtttttttaattcttcaaaagtcattaaaaaaaattatgatgacttggcaactagttgaataattagttatactttattaattatactatattatgcacactaaagattaatcttcaaaaggtgacatttctgccctccaggaacttaatgttctgtgaagacagtgtaacaatggtaaataaatacaaatattga

SEQ ID NO: 267203 - DNA, 494 bp, Homo sapiens
ttttcatttaaaaaaattatttctagtcagtctgtgcttatccaggggacttttaatgtttatttattccttgtaccccatccttacatgcttttcttggaggaaaatagtgtaattgttaccctggattctagtgtatgttcaggctggagtaagagaaaatgtgatggttcagtttttgtgaccagctttttaactttcaggccataaacgccacagaggggctcaatacttggaataagcagttctaaaatagtacattaagaaacagttggggagatatatacagtttgtttgtttgaatatgtaacatgaaataagaaagaaccatagcaaatttgagtttggtaaactcttgaaaggggtacgttgaaagaaatggggatagtgaaaaatgtttattctccacaaacaggttaccagcttagtaggaatgctgctcctaagttaaggtagtgtacttcctgctgtcagtgcaacattaaaaaaaaaaa

SEQ ID NO: 267204 - DNA, 518 bp, Homo sapiens
gttttcaaaattcacagtcccctgtgtactccagccttgtgtcctatcacagtgtcctgctcatggtaggtaggataatgattattgcatcttagaagagatggtgtagtcagctttcatatccatggaaatccagtattgacagttagacttgcctaactcatttaatctcactttttctgtagatagaagaaaatatttgatttagaaattaagagcggggaataaaagaatagttggaaaagaaatatttattagtcgaatctagtgattttctttctctggtttcttattcctccctagcctaccacaaaaatttaacagagaatttgatagtgtaattaagaatgtgcaggaattccaatatatcactggtctttcgtgattgcaaatgaaactgaaataaaaaaccctgaggctcatgctcttaaaaatatccttgagaattcttctgcctgggaagcacacagcagggagccattctctttcctgcatccttattttcttgtatttgtacc

SEQ ID NO: 267205 - DNA, 435 bp, Homo sapiens
caaagtgctagaattacaggcgtgagccactgcatccgtcctgtcctatcagcatttcttatacacacatatatttattttaaatcaacgcatatttattgagaatttattatggatacactgagaagactaagaaaggaaaatgaggtacaatctctactctccaggagcttaaaagtaatgggaaccaggcacagtggctcatgcctataatcccagcactttgggaggctgaggcaggagggttgcttgaagcccaggagtttgagaccagcctgggcaacagagggagaccccatctctacaaaagattaaaaaaattaggtaggcatggtggtgcatgcctgtagtcccagctactcaggaggcagaggcaggggaatcacttgagcctacatgctgccagtgagcagtgatcatgacactgcactccag

SEQ ID NO: 267206 - DNA, 453 bp, Homo sapiens
tctaaataaaaaaaaaaactcttgaaagtagccagaaaacacacacacacacacacacacacactttcacacacaaagtacatacagtaaaacattatggttagatagagtgaattccaaagtatgttcccaactagaagattaaaggtaatactttcttcattacaaatgaaaaattgacacttggagtaatccctcatgatgagaaacagcagtttacattaccaaacatttcccatgaagggaatgactttctttcctcaaaaaagcaacgcctgcaggcaaaattcagcctgccacctgtttatataaatgaagtattactggcacaccaccatgcccatttgtttacctattgtctatggctgctttcaaactacaatagcagaattgaatagttgcaacagagactgtatggcatgcatagccaaaaacacttactggccctttaga

SEQ ID NO: 267207 - DNA, 424 bp, Homo sapiens
gaaggtctgatctttaaaagccaaaacttgattttaacctaacctttttttattggtcttcgtgaatctgcgtaaattgctgcatctctcttggcctcagttttcttagccacacagacaggactgaactaaatgatctctaaagtacttctcaagtctataattctatgattctctttcatacttatttccctgcctccttatgttataagcaaccatttagcataagagtcaattcaggaaagcaaaatctgttagagagagtttctaaattcaaaatgaaaatgcctttgagtcattcccttgggaatgttttcttacagtttatatttcctactgtattgactagataaatattaataaggaaagtgggactactttaaaaccatcaaaaaatgagtgttgaggtatatttgagcaacat

SEQ ID NO: 267208 - DNA, 474 bp, Homo sapiens
ccttaggagagcgaatgtgaagcccagcagagcttggaatcttcaggggtgtcttgaacacaccagagagtggccccttcaaaatccaggcccctggggagcccaggccatgagtagggaggaaggtagtgctggaaccccttgcaggcctgactaaaagttgcagtggagaagtcgggtctgcaggaggcttggctggtgtgcgccgggtttcccagggtgggtcggggtgcccggggcgtagaccctgcggccctgcagcacgcagccacgctctccgcgttccaggggcggcgcgggagtggcgcgcggctgggagggcacccgggcgtccttcgcgcccagcgctgcatactcactgtgactcaccggctgctccgagatgcctcccggttttctcatcgcagtctggctgctctgagccccgagggcgtttttcattagggtgattaccctgccgtcattaaaagccgg

SEQ ID NO: 267209 - DNA, 138 bp, Homo sapiens
ccctgcccaacctggcccagaagactgttcatgccaagcccttgcctgcttcacaacctttgcatgggctgttcccttgtcctgcagagttctacctactctttgagccacctagcaaactcctattcaaccttcaaa

SEQ ID NO: 267210 - DNA, 432 bp, Homo sapiens
caaggccgacagtacacacgccctaaggtgttcttcactagtatttctttttaaattacaatctatatatatcttattcatattattgaagttgaaaacacattctaaatgaaaataacactaagaatgtctgtaaaataacggggaaacattttcaaactacatctcagatgttggattagtatccataatttatagggcaaactcagtaacaaaacagttggcaactaattttgacatagaattccaatagatatagacatgaacaaggaacttgttgattatgctaaaactataagaactaataagatgctaatataaatcctcagaagaatattaagtggaaaagacagcttgtgaacatggtcatgtgcacctcatccacagaaacatgtctggaaagtgtgcaccattctatggacaacagacctt

SEQ ID NO: 267211 - DNA, 435 bp, Homo sapiens
gttttgttttttctgaaattgcccagatttcatttaatgactgtatcatcctacctgtttcattggcatctctgtaaatattaaatcttagatgagaacagatgagttgagaatttccaggtatgatttttatatttgtgggtcttgagtttcctttttttttccagcctacatagatacaaattgttagaacacacttacctaggtagctggctaattcttaggagaactttttgtggagaaatgaagatcgagccagcttttgcccagcctttttatttatttattttttttcccgtcttctttttaaatgtcatctatgttattgtaattagaaatccccttttggaaaagatctccatttgcttctgccatgcaagggcaagggagatactggaaagccagagctccaaccttgaggagggcacaaatctc

SEQ ID NO: 267212 - DNA, 668 bp, Homo sapiens
gttagataaaatgactaaaaacgtgaaaaacaggaagaaggtttctagtaggaaacaggcctccctgtgctgtaggagaggttattcctcgtgggccatatttccatttcataaacttgactgtagacttccctccaaagaacctaaggaaaccatacaacctccccttataatctacatagtcataagtaacatgcaaccgtaaatttgattcccttcatttaccattttactaaatgtcactattcgcttataatgtcagtgactggtgaaatctgcagaaaagacaaagcttttctccttaggtgaaaaaccccaatcccaaatctttactattttttttgtattattatttttcttttctattcttgaagcagcaaatgttttggcctgttttgtgcctgtctttgcactttgcttatcaagtcatcagttgtgcagagcttgctttctaatttttcaattgttgctggtgtaggaactagagctgcaccaaaagatcagagcctgtttctgtagctgctgcttcctccagtaacaattctattagcattttagagacaaagccttgcaacacatcgatacagggaaaggaataaaagaacacagaataaaggtgaagcatgttaacatcactaccaagaaccaactcatttacgatactgatg

SEQ ID NO: 267213 - DNA, 504 bp, Homo sapiens
tgtgttggtgttcaaacatgaagatgtgcttacagtgggaatgcgatactatcttcaatagacaatcttttggcaatgtctagagactgtactttctctacataaatgttttcttttgcttttaggcaagaaagcatgcaaactctggaacacagtgtaaaacacttgaagagatacgagaggaaaactttgtgaatctgaattctgcgtgctattgaagcatggttctttccaaactcatggcaactatacctcagaattaaactctataattaaggaagaaaccctcattctccctgtaataactgaatacctaagcacattaaaatgcctaaataatctggtattttcccataagcattctgtaaagtttttcttaagctatgcggcagttataccctttgcttcctttaaaacaatatgaatgagcattttaaagagataaatggaatttataagctatcaacttctcgtcattaaaaaataattaaagctgatttaaaa

SEQ ID NO: 267214 - DNA, 506 bp, Homo sapiens
ttgagatgcagtcttgctctgtcgctcaggctggagtgcaatggtgcaatcttggctcactgcaacctctgcctccctggttcaagggattctcctgcctcagcctcccaagtagctgggactacaggcaagaaagcatgcaaactctggaacacagtgtaaaacacttgaagagatacgagaggaaaactttgtgaatctgaattctgcgtgctattgaagcatggttctttccaaactcatggcaactatacctcagaattaaactctataattaaggaagaaaccctcattctccctgtaataactgaatacctaagcacattaaaatgcctaaataatctggtattttcccataagcattctgtaaagtttttcttaagctatgcggcagttataccctttgcttcctttaaaacaatatgaatgagcattttaaagagataaatggaatttataagctatcaacttctcgtcattaaaaaataattaaagctgatttaaaa

SEQ ID NO: 267215 - DNA, 355 bp, Homo sapiens
tgtgttggtgttcaaacatgaagatgtgcttacagtgggaatgcgatactatcttcaatagacaatcttttggcaatgtctagagactgtactttctctacataaatgttttcttttgcttttaggcaagaaagcatgcaaactctggaacacagtgtaaaacacttgaagagatacgagaggaaaactttgtgaatctgaattctgcgtgctattgaagcatggttctttccaaactcatggcaactatacctcagaattaaactctataattaaggaagaaaccctcattctccctgtaataactgaatacctaagcacattaaaatgcctaaataatctggtattttcccat

SEQ ID NO: 267216 - DNA, 451 bp, Homo sapiens
aaaataagataaaaacagagtgggcaatacaaaccccccaacacacaacaaacaagcctaaaacagaaaccaggcgagacctgtctaactgtgcagacacagtgtaaaacacttgaagagatacgagaggaaaactttgtgaatctgaattctgcgtgctattgaagcatggttctttccaaactcatggcaactatacctcagaattaaactctataattaaggaagaaaccctcattctccctgtaataactgaatacctaagcacattaaaatgcctaaataatctggtattttcccataagcattctgtaaagtttttcttaagctatgcggcagttataccctttgcttcctttaaaacaatatgaatgagcattttaaagagataaatggaatttataagctatcaacttctcgtcattaaaaaataattaaagctgatttaaaa

SEQ ID NO: 267217 - DNA, 547 bp, Homo sapiens
ctcaatattcttaataggtggtagggctatttccctttttcacttttgagactgacagatttgcagatattctatgtacattttaggttttgtttcattttgaaattttgattaggattggttgtatagatcgatttgggaaacttatatattttctaattgtatgcctctgcattcacttgtaggaaatctggctatttttaatacacagggatttaatatagggaattggtgctttacaaagtttgaaggactggaggagtgggctttagcctgggctgtcagaagtgagtcctaagataatacagatttagtatccctaatccaaaaattttaaatcccaaatgctccaaaatcccaagctttttgaacacaagcatcatgctcaaaggaaatgctcattgagcatttcagatgacagattttcagattagggctgctcaaccagtatgtacataatgcaaatattccaaaaaaaaatcccaagtctgaactgggctgtcataggacctgctgcaactgttttcacccattaggaggatagaga

SEQ ID NO: 267218 - DNA, 233 bp, Homo sapiens
tcataacctccttccttcgatttgttaggggccgtacacaaaaatcaaatattaaaagctatcttcactatgccaaggatcattaaatttatcccattagacaatgattctcaagcttaatagatgtatttcaagtgactatattactattcacttgaaatgttttaagtttatttaaacttatataaggaaaaattttaaaatagctacaacagtactgtgaatgtaaacct

SEQ ID NO: 267219 - DNA, 394 bp, Homo sapiens
gttaacgacgtcacacagcaactgctggcagctggacctgaggccagcttttggaccaagcccctctcctctgctctgtgctgcctggtcaggccatctgtcttagtccctttgggctgctatgacagaatcccttagactgagtaatttatcaacagcagaagtttattttctcagtcaggaggctggaagtcctagatcaagatgcctgcagatttggtgttggtgagggctgctctctgcttcaaagatggagccttggctggagctggtggctcatacctgtaatcttagcactttgggaggctgaggtgggaggatcacttgagccaaggagctagagaccagcctgggtaacacagtgagatgccgtctatattttaaaagaaacaaa

SEQ ID NO: 267220 - DNA, 526 bp, Homo sapiens
catattacagaataggaaactgagtcacagagtgcttcccccccccacccccatacatgctggcttccaaggctggtaagggggctggaactggaacgcaggtcttgggactgacctggcttcattgcaagtctgccagagaaacgcaaaaggacaagcagcattcccaagcatctggcatggtcatcggtgcaaacaccccgttcatgtaacacgggcctgaggtcagcagtagaggaccagtattggttttggccccagcctctgcgtggatggattgaacgcctgcatccctgcttttctctcaactctgctgtctcaaaggagaggtgggggtgggcctgagggattctctccctgcatggaacctacgggcttgatcatcgaggatatggggctagatatgtcccgaacctcagctcgtcctttcttccccgggaatggtcacggggagtcctgcgtgcatgtctggctttgttaataataaagaataaataataagatggtgagactcatcagctcacga

SEQ ID NO: 267221 - DNA, 347 bp, Homo sapiens
attcatttagcttacaaattcattgtgactcataataaggaaaatgcagattaaaaccacaatgagatgctatgttacactcagcagactagcaacaattaaaaagtttgacaataatacacagcattagaaaagatatgacgcaatggaaacctcatacactgttggtgggagtataaattggcataagcattttgaactgctaggatcctgaaatctcactgaaaaatatatcctcaaaaaatcatggacatatgtgtaccaggagatatgttaacaaaatgttcatagcctcattgtttgtaatatcaaaactgtggaagcaatccagatgttcctcagcagga

SEQ ID NO: 267222 - DNA, 345 bp, Homo sapiens
ctcctgcctcagcctctcaaagtgctggtataagccacccagctggtctggaattcctagactcaagtgatcctcctgcctcacctctcaaagtgcaggtataagccaccatgcccagccttcacagcagttatatccataaattaacctagtttcaccaaataatccaccaaaataaaccgttctggaaaacctgtttaaagtcacacaaagtcacacaatctataaaaagctaaaaaaaaaaaaaggaacaaatacacaattgtacaaacatattatcaaactaaggaacttcacaaaaatcctatctcacataccaaatcttcatacatacttctaggggac

SEQ ID NO: 267223 - DNA, 1042 bp, Homo sapiens
tagatttctaaaatgagatttctgagtcaaacagtaaacgcacatgtagctttgtaaagtaatgtcaaatttcacttttaaaaggttgtaccagcttgacatcctaccagaaatgcatgtaacagaatgtgttgtaaaatttattaatttttgccagcctgacaggcaagaaatcgtatctcagtgttgttttaattgtattcctctaattatgagtgagtgtgaacaagtttcatgtttaagggccatttctatttcatttgctgtgaattgtctgctcacgaaagcaaagccagcaacagaaatggacaggaaactttcacatctggctcccaggataggccctgccccctggattgagctccatggagaccttagacttgcctgctttctcagccctattcatacacccagcacccagggcagacagaattctattcctcccagaggtggtccgtgacctcagtactgcagtttggttgctgtcttaaccaagctcaatggtctgagtattcagggttacggttatttttaggtttcctgtgacaataaaaaacattttctgcagatgcttaaaagtaagccctgtgtttggtgtagaaatcacaaagttaacaattaacatgggccctgggtatcttcacatttgagtgtcaggcattggtcctcatgtttcatactgggaaaagtcaatcaactcaccatttggcaaaggtcaaagcaggggactgaccttatgactgatgattctgtgttccagaccactgtgaattcctctacctgtttgcaaaagaaaaagggaattttcctgagtttcagttgaattaatcacatttaacagctcttcagaggaaaaaaaaaatcaatcttgtaaattacaagtactgccaggggagccttacattaggcatcacttccatgtatatagtcagaccagaatgaagctggatttgatcccttgaggttgaactgtcaccaaaggcagcatttccgctactctctatcttttcaataatgtaaataaagaactggatcaatttga

SEQ ID NO: 267224 - DNA, 431 bp, Homo sapiens
tttctggaaaatctatggaaggcaggttgggaacacttcttttttgtagaacctatgaagagacactttggagcccattgaggcctgtagtaaaaatacaaatgtcccatgatgaaaactagaaaaagttttatgtgaaaatgctttgcaatgagtggattcatctcacaagtttaaagctgtgttttgatttagcagattggaagcactatttatggagaatctacgaagggacattttggagcccattgaggcctcttttaagaaatcaaatgtcccacaatgaaaactagaaataagttgtctgtgaaaatgctttgtgatgtatggatgcatctcccagagttaaacctttgtttttattcagcaggttgcagacagtctaattctggaatgtattaaaagacatttcagggcccattgagaactat

SEQ ID NO: 267225 - DNA, 544 bp, Homo sapiens
tatgctaatatttgtttctaggtcccttattatatactaaatcatggctctacaaaaagcacaagatgaactcaaagtagatttaattatatactttgctacatttttggcactttaagaatacacttgataggatgccttcagctctaattcacctggtcatatgaatattagaaagttttcagaatactctacttttgaaaagatatacaaatacttgcaaattacacatccaacaaaggtctaatatctagaatctataaggaatgtaaacaattaaattagcaaaaaaacaaacaatctattaaaaaatggccaaaagctgatcatgaggtcaggagatcaagacaatcctggctaacatggtgaaacctcgtctctactaaaaatacaaaaaattagccaggcgtggtggcacatgcttgtagtcccagctactcaggaggctgaggcaggagaatcccttcaacccaggaggcagaggttgcagtgagccgagattgcactactgcacttgagcctgggcgacagagtgagacttgct

SEQ ID NO: 267226 - DNA, 168 bp, Homo sapiens
ccacataaatcatccgctctgttaacatcaggtcactgtctccactccccgcttcccagctattgaaatatctatttagggtttttgtttgtttgtttgttttttgagacagagtctctgttgcccatccagcctgggcaacaagaccgaaactcctccgtctcaaaa

SEQ ID NO: 267227 - DNA, 567 bp, Homo sapiens
aggcagtagctccctttgcaataactctttaaccttacttagaataaaatcgacagactatccccttttctcaccaagttttagtttagaacttttgaggtctttggaaatttactctgctcaacttctcctttcatattttacatctagtgttccccacatgaatgattctaattacaaagacagttgtaatctcttctggaggcagccacactgctgggatgcatgattaggtgaagcattttagctgacctgggcttggattggctatccaaagaagaaagtcaaaggctgacaactcagcctgggcaacatagcgagaccacatctctcaaaagctaattttttgtatttttagtagagatggggtttcaccgtgttggccaggatggtctcaatctcctgacctcgtgatccgcccgcctcagcctcccaaaatgctgggattacaggcgtgagccaccacgcccagctgaggcaagacttctgtaagtattcttcaagcagtagtacaagagttaaatatgtattcttcttttttaagctggtaaataaaaaaaaaaaatg

SEQ ID NO: 267228 - DNA, 460 bp, Homo sapiens
tatataatataatatgtaatataataaaagtatatgtaatacaacatttatccaggaagttgtgatataaatatatgtgtgtgggtataacattatacatgtactgttaatacattgattttaaatgaaaagataaaccatacatatttttaaaaattatctcatataaggggatgaagagatatgacagagagaaaaaggaacaggtcaaatacctcaaaatatgcttcggtttgtagatttgattttgaaaccacataaatatttttacataattatgaaacaaattgaaatattaaaaaaatcagttcctaaacatcaaaaccaaaatggaataaacataactattgatttgtggcatgtccacaaagaaagagacaatttcatgtgacttaaaaacattaatttcattgtacatccttagtgagacatgccctaaaaacaaaaagaacataaaaaa

SEQ ID NO: 267229 - DNA, 513 bp, Homo sapiens
atttacagaaataaatatgcttttttgaacctggccgttcatacaacctagaggaaacgtaacacaggaaaagcagcattgaaactcagaatccagatttaagtctcaattaactcactggttttggttttagccctgaaaaccaatcatcttggtgttagcactgaaagtcatgtgttccaggaaacccctaagttccaggacttgacctcttgcccaccagataactcttgttaaaacagatttcaagtcataatctctcctgaagactcttggttcattgtcatgcatcccctggtactattatacacatccattataagaagaaagctaacagaaaatatgcttccttgccagagtatactactaagttggaatcacagcagtattttcttctatgaactctatagcttagcttattaatatgctgatgaagtcattagcagtttcaacatttgcaatgaaatcaatttggttatactcataataaattaaaattaaaatatttcaaaa

SEQ ID NO: 267230 - DNA, 1698 bp, Homo sapiens
gtagacctggttctggtttcctcagtcagaatcttccagttgtccacaacctcacaaggccagagaagcgagagatttctattctggaaaggagtgagtggatggcacaactggtttggaaacacgacacacggcgcctgcatttacagaagcaacgcacacagggaacgtcctagcgccatctggtctcgcacacatacttaggactcacgttggggatcccgggcctctgccagccctagttgttggtgcccagcctgggaggcctgggcggaagttatgcaggcctggatcttccggtccagcgccaccaggaagcgcctccaggtggcgctgtcgggatttgctctcctcagggcctatctttagggaacgcactttatcttccaggttttgatcctctctctgccgcctccatcttctcagagacacagtcgcactctgactcacggcctcttcctctgctccgcactggccgtcgactcctgcagcgccgtgggcagccggaagtcggtctcccgccgggtctgcagctccatctcccacctcttcccgtgggcagctctgcgtcgaggccgccttcagcttgtggttcccagactgcaggtgcgtgtcggctgcagcggcctgagaggcctttcatcgtccgtcccgttgacactggatgccggagtagaagatggggctccacgccctgattctcaggatgattactcgagggctccatgttctcctgggtcttgtctttggctgtcttggccgcttcttccacctcctggaatttctctgcaaactttgtcagctgctgctcagaggaaaaccccaaaccaaacaccgtgttggctctgctgtcggcccactgcccagacgtctgtgacgtgttggtgaaggtcatattctgtgtaattgtgttgtttatggtcaccttggcgctgtccacactgatgatcccatagctgttccttgtgacatcatagaaacaggaaatggtgaccgcctgttgctcgcaggcatccagttcttcttggtgttggggtcaatctggaagacccgcgctcggggggtgaagatgggctgttctcccattctgacgctgctccagcggccgctccgacccggcctctggcgctggctctccgcccgctgggcatccgctccccgcgcggcacgtgcggcggcccctgcgcgcctggctcagccctggcgccgctccattccgccaggcgcgggcgggcaggagctctggaaaaaattattctaagagacaaattaaaagaataatctgtaataaggagacgtcaacattccatctcagaaaaaaactgaaaacatgtaatacatacaaagtcctgagaagaaacctcgaagcacaggaagggtctcatgtatagtagcatgttgagaaaactgaagagccctgtaatcctgaggagggggcctaatccaaggagagagaggctccgggtcctgtggacacacacgggttgcctgcttcaccccatctaggagctgcttcctgaagccttcaggaggcaggaagctgaatttgtttctcaggacaatctaatcacatccggacagggagaaaaacattcatgacctaggacagataaaatatgtataattaaaatttcattgaaaattgagaaattttggttgtatgtatttatagtgaataaagctatgttatgatttaaa

SEQ ID NO: 267231 - DNA, 1724 bp, Homo sapiens
gtagacctggttctggtttcctcagtcagaatcttccagttgtccacaacctcacaaggccagagaagcgagagatttctattctggaaaggagtgagtggatggcacaactggtttggaaacacgacacacggcgcctgcatttacagaagcaacgcacacagggaacgtcctagcgccatctggtctcgcacacatacttaggactcacgttggggatcccgggcctctgccagccctagttgttggtgcccagcctgggaggcctgggcggaagttatgcaggcctggatcttccggtccagcgccaccaggaagcgcctccaggtggcgctgtcgggatttgctctcctcagggcctatctttagggaacgcactttatcttccaggttttgatcctctctctgccgcctccatcttctcagagacacagtcgcactctgactcacggcctcttcctctgctccgcactggccgtcgactcctgcagcgccgtgggcagccggaagtcggtctcccgccgggtctgcagctccatctcccacctcttcccgtgggcagctctgcgtcgaggccgccttcagcttgtggttcccagactgcaggtgcgtgtcggctgcagcggcctgagaggcctttcatcgtccgtcccgttgacactggatgccggagtagaagatggggctccacgccctgattctcaggatgattactcgagggctccatgttctcctgggtcttgtctttggctgtcttggccgcttcttccacctcctggaatttctctgcaaactttgtcagctgctgctcagaggaaaaccccaaaccaaacaccgtgttggctctgctgtcggcccactgcccagacgtctgtgacgtgttggtgaaggtcatattctgtgtaattgtgttgtttatggtcaccttggcgctgtccacactgatgatcccatagctgttccttgtgacatcatagaaacaggaaatggtgaccgcctgttgctcgcaggcatccagttcttcttggtgttggggtcaatctggaagacccgcgctcggggggtgaagatgggctgttctcccattctgacgctgctccagcggccgctccgacccggcctctggcgctggctctccgcccgctgggcatccgctccccgcgcggcacgtgcggcggcccctgcgcgcctggctcagccctggcgccgctccattccgccaggcgcgggcgggcaggagctctggaaaaaattattctaagagacaaattaaaagaataatctgtaataaggagacgtcaacattccatctcagaaaaaaactgaaaacatgtaatacatacaaagtcctgagaagaaacctcgaagcacaggaagggtctcatgtatagtagtgttttgtgcttctctggtataacagcatgttgagaaaactgaagagccctgtaatcctgaggagggggcctaatccaaggagagagaggctccgggtcctgtggacacacacgggttgcctgcttcaccccatctaggagctgcttcctgaagccttcaggaggcaggaagctgaatttgtttctcaggacaatctaatcacatccggacagggagaaaaacattcatgacctaggacagataaaatatgtataattaaaatttcattgaaaattgagaaattttggttgtatgtatttatagtgaataaagctatgttatgatttaaa

SEQ ID NO: 267232 - DNA, 1803 bp, Homo sapiens
gtagacctggttctggtttcctcagtcagaatcttccagttgtccacaacctcacaaggccagagaagcgagagatttctattctggaaaggagtgagtggatggcacaactggtttggaaacacgacacacggcgcctgcatttacagaagcaacgcacacagggaacgtcctagcgccatctggtctcgcacacatacttaggactcacgttggggatcccgggcctctgccagccctagttgttggtgcccagcctgggaggcctgggcggaagttatgcaggcctggatcttccggtccagcgccaccaggaagcgcctccaggtggcgctgtcgggatttgctctcctcagggcctatctttagggaacgcactttatcttccaggttttgatcctctctctgccgcctccatcttctcagagacacagtcgcactctgactcacggcctcttcctctgctccgcactggccgtcgactcctgcagcgccgtgggcagccggaagtcggtctcccgccgggtctgcagctccatctcccacctcttcccgtgggcagctctgcgtcgaggccgccttcagcttgtggttcccagactgcaggtgcgtgtcggctgcagcggcctgagaggcctttcatcgtccgtcccgttgacactggatgccggagtagaagatggggctccacgccctgattctcaggatgattactcgagggctccatgttctcctgggtcttgtctttggctgtcttggccgcttcttccacctcctggaatttctctgcaaactttgtcagctgctgctcagaggaaaaccccaaaccaaacaccgtgttggctctgctgtcggcccactgcccagacgtctgtgacgtgttggtgaaggtcatattctgtgtaattgtgttgtttatggtcaccttggcgctgtccacactgatgatcccatagctgttccttgtgacatcatagaaacaggaaatggtgaccgcctgttgctcgcaggcatccagttcttcttggtgttggggtcaatctggaagacccgcgctcggggggtgaagatgggctgttctcccattctgacgctgctccagcggccgctccgacccggcctctggcgctggctctccgcccgctgggcatccgctccccgcgcggcacgtgcggcggcccctgcgcgcctggctcagccctggcgccgctccattccgccaggcgcgggcgggcaggagctctggaaaaaattattctaagagacaaattaaaagaataatctgtaataaggagacgtcaacattccatctcagaaaaaaactgaaaacatgtaatacatacaaagtcctgagaagaaacctcgaagcacaggaagggtctcatgtatagtagaggttgtaatatgtttattgttaaaattattacctttgtgttgttttgaaaaattgaagaaaaatataatgaaattaagtgttttgtgcttctctggtataacagcatgttgagaaaactgaagagccctgtaatcctgaggagggggcctaatccaaggagagagaggctccgggtcctgtggacacacacgggttgcctgcttcaccccatctaggagctgcttcctgaagccttcaggaggcaggaagctgaatttgtttctcaggacaatctaatcacatccggacagggagaaaaacattcatgacctaggacagataaaatatgtataattaaaatttcattgaaaattgagaaattttggttgtatgtatttatagtgaataaagctatgttatgatttaaa

SEQ ID NO: 267233 - DNA, 342 bp, Homo sapiens
gagctgccttggtgctgtaaaggtaagaaaatggaggctcccagagatttgacaacctgcccgcagcaatgaccaaatcagacttggtgctaagtctgcacctccccaaagtcagtgtgtttgtatgctctgctgccactgccccccgctggccctgcacatgatgtgaaccatcaggcagacctggagttctgtctcctgggtgggctgcttgccaacaccagggtggctggcccctgcctgtgtcaggtcctgcagtgttgactctcttcgtgtgatgttgggcaggtggagctggttgtgctgagcctgaggaaacatccaatgtgccaaactttaaag

SEQ ID NO: 267234 - DNA, 165 bp, Homo sapiens
gaaacttagcaggatcagctctacgtgacccagacgcttaagcacattgagagctgcaacaataaagtgcttaagaaagtcccaggtagaggagtttgtaaaggagggttctttagcactgtcattcgtcttggatgagagtggagcacttcttcttaggaacac

SEQ ID NO: 267235 - DNA, 449 bp, Homo sapiens
gcaggaggccctgtggcaagtggagccccaaccgcagagcaccatctccagccgtgtgctctcgggtgcagagctgacctcccaagtctcaggcttcttgtctctcaagttgggggtaacaatggctatgtacataagattaggagaacacacagaaggtggtgctggctaaagccattatcacaggctggtgcctatagtcccagcactttgggaggccaggcgttagagaccagcctgggcagtataacgagactctgtctctaccaaaaaaaaaaaaaaaaaaagagccatacaaggtggtgcgtgcctgtggtcccagctgtttgggggctgagatgggaggatcgcctgagcctgggaggtcaagagtgcagtgagccatgatgactgtgattgacgtgttgaccaggcactcaaaaacaaacaaacaaacaaaaaaaaaaaaa

SEQ ID NO: 267236 - DNA, 417 bp, Homo sapiens
cacgaggccgggccgcccgctgcttcccacccctgcagcctgcgctgcggagtacaaagagcggagggcgcgcttgacctggggctggggtccagccctgcccgccggtgccgtctgctcaactagttaggtggctgctgcgcaggattccgggaaacgtcagtctgccatgagccggcaggactgagcctgcgactcggagcagagcgagtgaggggcagagcggtgctcaggagtgcggcccggggccgccggagctgggggtcgggccgggcgatgatccggggcttcgaggcgcccatggcggagaacccgccgccgccgccgccgcccgtcatcttctgccacgactccccgaagcgggtgctggtgtcggtcatcaggacgaccccgatcaagccaacgtgcggcggtgga

SEQ ID NO: 267237 - DNA, 567 bp, Homo sapiens
aacagaacagtcccactccgccggggagggtctggcggtaaccgtagctcacacctccctgtggcccgtcgtcccctcctcttgcctgccctgagcctgcagtgtcattgcccccatttcatacgtgaggaaactgaggacacagaacaagcatccaggccttgtgcagtcaggtggtctgacctgagcccagtgagggaacactgggaccgggcctgggaggccaggtaagagatggtggcctcttgccgtcctgaattggcacagagccagtgctcagtggttggactgactcggagtcacgggcaggaagaacttcctcatggtcaggttcctggccaagaactaggacagacatgtgcctcctgcagggctgggcacagcagggtcactgcacccctggatggatgcccatcaggtgcgctggcatcacctggctgattgtctttgtaggcttagtgaccctctgcccctcctgacacccagagacgggatcccttctcaggaactggagtcattttgcttatttctattaacatctcttatttctttcaaaattcaaagtca

SEQ ID NO: 267238 - DNA, 240 bp, Homo sapiens
ctatttgttggagtgccagattatttaagggcctttgcatgtttcaagtcctcttcttaaagtaagaatactctccacatttataacagcaacaaaaacaccaatgtcagcacaaaatgcaaaaacggaggcacttctatgtcataatgatacatcagagttctgctcaactcttttttagaaaaagaagctcagacttacacacatccactttcttaaataaataattgttcaatgaaa

SEQ ID NO: 267239 - DNA, 380 bp, Homo sapiens
  misc_feature (327)..(327): n is a, c, g, or t
  misc_feature (335)..(335): n is a, c, g, or t
ggtctgggtttgtgtaaatgcactctggaatgtctgcacaatgatgaaattgccttatgatgcttctcagaatgtgtccccattgtgaagtggcacatgactgtataattgttgtcttttctcttcttttattgaataccacagcagatggtgttgtaatgtttactgcagacatcaaatacgattttgaaaactcaggaggaaaaggataatctcttcttctcatacctgtttttacccattctggtgttcttctttcccttctgatgttcccatctatcttctgtaatcctagtctttgggaggccaaggcgggaggattgcttnagtttagnagttcaagaccagcctgggcaacatagcaagacctcatctctacc

SEQ ID NO: 267240 - DNA, 460 bp, Homo sapiens
aatgataggatacatagaaatagatcatcaataaaaaggaatgcagtactgatacatgctacatggatgaacctcaaaaacattatgctaagtgaaagaaattactcacaaaagaccgcatatgatatgattctattaatgtgaaagttccagaatggataaatctatagagacagaaactagattagtggttgcatagggcttagaaagggcatagacagaatcttttgggggtgataaatatattctaaaattaggttacagcgatgattgcacaactctgtaaatacatgaaaaaccactaaatcgtgcattttaaatggatgaattttatggtacataaattatatctcaagctgctttttaaaaaagagatatagtttcattactttcagaaataatacaaagtttaaaatgacatgctaagcctgggcaacatggcaaaaccccttctctacag

SEQ ID NO: 267241 - DNA, 279 bp, Homo sapiens
atcaggcaaggtttggaaatacagcatattagaacaaatgtgagctttgggttagagagtaacatcaagtcataagtctgccatttacttgctgaatgattttggcaagtttcttagccactctgtctccaaattacttagcctgcttgtgacagtttcatcaaatgcctttcacaagattgttgtaagcatgaatcctctaaacaaacggcttagtataatgttggctccctctcctccccttaccctcccctcccctgaagttccagctccaattct

SEQ ID NO: 267242 - DNA, 470 bp, Homo sapiens
gttgtcagcaaagaaaaggtggtttcaaaagagcagcagaggactctgtgctagttgctactggccagctttgactccgattggaagcttgaaaaacatagattggaagctatgcagaatatccagtgacagaaataaatcagagattgccaggggctgagggtgagaggaaggagattgacttcaaaggggcacagataatttctcagggtgtcggaaatattctgtcttgattgaggtggtgattactcgactgtatatgcttgtaaaaatttgtagaactgtgtgcctgaaaagggtgaattctactgtatgtaaattataactcgataaacctgatttttaaaaacactgtagtttgggaggccatataaaaccaaataacattttgagtcattaatgcctctttaagaatattttggattgattttttttattagattaaaaaaattcttcatggtaaatattaa

SEQ ID NO: 267243 - DNA, 371 bp, Homo sapiens
tgctctttttagtcatccctggaatcttctgggatttatgtctcctttatgccatctacattcttgtaaactcccaatcttggctctcttgccaaacccattagagctcaccgttagtaatcctgcctcaacagtacctttccttggcattcaggataaattaaccctcctctatgctttcctggtgctgctatacacctccatcaggtataaattgcataatatcgcgttatatttatggcttcctcactgcaaagttttcatgtatatgttttcctcatctttacattttcagcggctagctggggaaaaatgcgaagaaagaaagagggagagagatagataaagaagagaaagaaaaaaaaagcaaa

SEQ ID NO: 267244 - DNA, 563 bp, Homo sapiens
ctggaggtaatggagagtgacgttgtagaaagacaactttatctctggagaggaggacatgtgggagagagaaaatgtaggcatgcatgggaggccgttaaaggtgtctaatgcatgtatatttacagcaattaactagtatgtctctacttgatacgaatatgtctctacttttttcaagggctacttaatttgataatactagaggattaagggtaacttagaaatttggcttcagaaacttcatatttctaggctaatatttacttatgtagtggatgtaagaatattgcctcagttaattttgtttaagatatttaaagagaggatgtggcttactatgttttagctaactaagtaaaaaggaagacagtgattaatgaggaaattctggaaatgactctgtttaggctgcgtttcacatgcaattttgcagaaaagttgcatctcaaggtctactattcgtgggccccatctgcctctcacttttagctttgagccatcaacaaagaagttagacttatttttattccatttgaatgcatttttttcctgattgtaaa

SEQ ID NO: 267245 - DNA, 386 bp, Homo sapiens
tcaaattaaaaataaatgaattgacttgatattttctttacttaacacttaaaaggaattaaagacattatgtttgattaatcgtttcagtaaacttatgcctctagccacattttcataagccatttgtggggtggggcttgaccaagtaatacaagtctttggaggttttaatagatatgatgtattacctttgccaaagaaactggagatgctaatataaacagatttccttactggaggattttttgtagaaacctttcatgtgtcaatgaactctccttctctcaagtctacagccacagtgtacagcacttcctgaattaattgcctcttttttctggagtattctgagtctactgctaagactcattcaatgtaaaaaa

SEQ ID NO: 267246 - DNA, 466 bp, Homo sapiens
aggctggctggctggcctcaaactcctgggctcagacaatcctcccactttgaccccctgagtatctagagttacaggtgtgcaccaccaccccaacctggcttgaaatgtcctttcttgcctccttgtctctgattcacggggaaaggatggttcctgctggtttatattcaagattggctaggcgcggtggctcatgcctgtaatcctagcactttgggaggcctaggtgggtggatcacgaggtcagcagattgagaccatcctggctgacacggtgaaaccccgtgtctactaaaactacaaaaaattagccgggcttggtggcgggcacccgtagtcccagctactcgggatgctgaggcaggagaatggcgtgaacccgggaggcggagctggcagtgagccgagatcgcgccactgcactctagcctgggtgacaaagcgagactccatctcaaaaaaa

SEQ ID NO: 267247 - DNA, 664 bp, Homo sapiens
cgagaccagtttaagctaaaatattatttccatctctttatagtgccttttccagagctcctatttatctcattgttttactccattcccatcctgaacttctcaaaggagaagttctccttcagttctgtcattttatcttgactctcacagtcactgtcacattgtaagtactttacaaagaactgagaaattagattgtcgagatcaaaaacagaacttatcttccatttaactgtcttctctctaacagggaaaaggaagtcacaaacttgggaggcaggagggcacagcactccaggacacgcgctttggagtctgagcacaggctgtgccacacaatgtgtgcgtgatgatggacaagcctcaaccttagcccctgtatctgtaaaatgggcataatgataaggccacctcaaaggacattatgaacaatacacaaaaagatgcctatgaaacccgtagcatggtcattggaatcagcaaagtgttcaataaatgttagctatatcagtgctatggttaaacatttaaaaagctgaggctgggtgcggtggctcacacctgtaaccccagcacttcgggaggccgaggcgggtggctcacctgaggtcaggagtttgagactagcctggcaaacatggtgaaaccccatctctactaa

SEQ ID NO: 267248 - DNA, 808 bp, Homo sapiens
ctaagagctccccttctccgaatattctttttttttaatagcatcctattttggctcatggttgcagtattttatctccttgaagatgtttgtgtgtttatgtatgtatatgcacacacgtatacatacacatacaggcatgcatctctgtattctttcggcataatctgtgtcctccagggtttgtttctttgtttcccctgtatgtttgttttggtcgttcacattataggctttcctcagagttaatggtcttggtagtctactcatatttaagtgtggaacaccaaaaagcttactataagctgagagtgtggtaaagggctctttgttttactatgacctacctgagctatcttgctggggaacaccctaatgtcagtctctttataaagggcctttcattttggcctggcaagaaatactctttcatcctcctgcatggagggcaaaaaaaaatttaaaaattggctgctagggtctgctcacttccctgttttgcagaccccacactcttctgcaattcatttcatagttgtcaagactatacaaattgtcctttttaatgttctctcttctgctatccctagttggcagtcttcctctttacaacctgctgaaagtggaagacctccagttttcctttaattcctcagcaaaccaccaactattatatgtcttttttccagaacaacttattttttaactataattatatgcatttatgttagattcactgaaaacctcatcttgtatggtgctctgtaccctatgggtgctaaataaaggcttgctactggcaactgga

SEQ ID NO: 267249 - DNA, 492 bp, Homo sapiens
ctccctttgttcagcaagagactccactccagactgctgcaactcagaacctctctcttcccacagctcccagtcagagaccagcatatcagcatttctcatcttgcccctagctacctgatgctgaaggtaaatcctgggggagtgtggtggagaggtgggagattccttcttccatccagaggctctaccttgggtggagtgctgagacaccagaggagacttcagctctttttctccatcactttcaccccatattcacccccaacctttttttttaatctctccatcttcccaagatagttatattctgtttgattaatcttcagtatatatgctattataatcatgtaaacggtagtcacagccaagttatgtaccaaactatgattacttttcctttcccacacaacttttagttttttctggagttaataattgtcttgttttgttggtttttccatgtaattctatcctaaactctgtcagtta

SEQ ID NO: 267250 - DNA, 394 bp, Homo sapiens
ccttcatccagtttctctctttccttttttctcaccctgttttatcgaggtgcagccctttttatctggtcacaaaagggaactcctaagtgttggtttgtgatcaagaagcagcaaagctgtcatctctctaaatatatttttatattttgcttggggttgtcactataaataagaagaagtattgctgatagggcttttcatgtgtgtactctctttctctctccgtcctcattcacttcatcatccttaggcccccagagctgtgtcaccaccctgaaacaaatgagggaaagcaaccaattacattaaaatgcaatataaatagagggaacaggcaatgtataatgtggatttcctgaacaactgttcacattctaggggctggtcaagc

SEQ ID NO: 267251 - DNA, 461 bp, Homo sapiens
tagggtgggtgatactgggaatgtgaaagcctgcctgtgtacacatttctggcggaaggacaagaggggtcgctcccaggccatagttcccagatatgggaaagaggccccctgcatggcaggcttcccagaggatgcacagcaggtggggctttgtgggatgtataggaggtctccaaatggagagtccaggcatgagccaccgtgcccggcctagacacaatttttataatgaatggaggtgcactttcacctgagcaaggtggaggaacaagaaagtgacctatgtgaggaaaaggatgtttgttttgcacgagctgtgtcccccaatgtacacagtaggtgctcaataaacttttttttttttttttttttttgagactgagtctgactctgtcgcccaagctggagtgacaaagcaagactcttgtctcaataaataaataaataaataaaatttt

SEQ ID NO: 267252 - DNA, 901 bp, Homo sapiens
ttttacagatgaggacgctgaggtacgaagaggctgcgtaacctaccagggtcacacagctttggtgtggagtagggactcaaatccagggcccctggtacggaggcatttgccctcaccaagattcaggcactgagagaagctgacgggcctagagaatggcaagacttgagatagcagaaggaaggagagagggtgagaaatggatccccgtgctgaggtctggtctggaaggagaagtctgcaaggagtctgcactatggaaacaacctgtcaatccagctcaaggcacacatagcccagacacccatgagaccctctccgtggggaccctagagcacctatcatgaacgaggagaccaaggctggctcctcatggaccccgttggcctccagctcggcaacaagaacctgtggagctgtcttgtgaggctgctcaccaaagacccagaatggctgaacgccaagatgaagttcttcctccccaacacggacctggattccaggaacgagaccttggaccctgaacagagagtcatcctgcaactcaacaagctgcatgtccagggttcggacacctggcagtctttcattcattgtgtgtgcatgcagctggaggtgcctctggacctggaggtgctgctgctgagtacttttggctatgatgatgggttcaccagccagctgggagctgaggggaaaagccaacctgaatctcagctccaccatggcctgaagcgcccacatcagagctgtgggtcctcaccccgccggaagcagtgcaagaagcagcagctagagttggccaagaagtacctgcagctcctgcggacctctgcccagcagcgctacaggagccaaatccctgggtcagatgtgccgggatctctagatgacccgc

SEQ ID NO: 267253 - DNA, 751 bp, Homo sapiens
gtgtgactttatcctggaggcagtgggatgctgatagcaagttcagacaggcatgaggccagaccagagctgagttttcaagataactccagccagaggagtctgcactatggaaacaacctgtcaatccagctcaaggcacacatagcccagacacccatgagaccctctccgtggggaccctagagcacctatcatgaacgaggagaccaaggctggctcctcatggaccccgttggcctccagctcggcaacaagaacctgtggagctgtcttgtgaggctgctcaccaaagacccagaatggctgaacgccaagatgaagttcttcctccccaacacggacctggattccaggaacgagaccttggaccctgaacagagagtcatcctgcaactcaacaagctgcatgtccagggttcggacacctggcagtctttcattcattgtgtgtgcatgcagctggaggtgcctctggacctggaggtgctgctgctgagtacttttggctatgatgatgggttcaccagccagctgggagctgaggggaaaagccaacctgaatctcagctccaccatggcctgaagcgcccacatcagagctgtgggtcctcaccccgccggaagcagtgcaagaagcagcagctagagttggccaagaagtacctgcagctcctgcggacctctgcccagcagcgctacaggagccaaatccctgggtcagatgtgccgggatctctagatgacccgc

SEQ ID NO: 267254 - DNA, 977 bp, Homo sapiens
ttttacagatgaggacgctgaggtacgaagaggctgcgtaacctaccagggtcacacagctttggtgtggagtagggactcaaatccagggcccctggtacggaggcatttgccctcaccaagattcaggcactgagagaagctgacgggcctagagaatggcaagacttgagatagcagaaggaaggagagagggtgagaaatggatccccgtgctgaggtctggtctggaaggagaagtctgcaaggagtctgcactatggaaacaacctgtcaatccagctcaaggcacacatagcccagacacccatgagaccctctccgtggggaccctagagcacctatcatgaacgaggagaccaaggctggctcctcatggaccccgttggcctccagctcggcaacaagaacctgtggagctgtcttgtgaggctgctcaccaaagacccagaatggctgaacgccaagatgaagttcttcctccccaacacggacctggattccaggaacgagaccttggaccctgaacagagagtcatcctgcaactcaacaagctgcatgtccagggttcggacacctggcagtctttcattcattgtgtgtgcatgcagctggaggtgcctctggacctggaggtgctgctgctgagtacttttggctatgatgatgggttcaccagccagctgggagctgaggggaaaagccaacctgaatctcagctccaccatggcctgaagcgcccacatcagagctgtgggtcctcaccccgccggaagcagtgcaagaagcagcagctagagttggccaagaagtacctgcagctcctgcggacctctgcccagcagcgctacaggagccaaatccctgggtcagggcagccccacgccttccaccaggtctatgtccctccaatcctgcgccgggccacagcatccttagacactccggagggggccattatgggggacgtcaaggt

SEQ ID NO: 267255 - DNA, 1074 bp, Homo sapiens
ttttacagatgaggacgctgaggtacgaagaggctgcgtaacctaccagggtcacacagctttggtgtggagtagggactcaaatccagggcccctggtacggaggcatttgccctcaccaagattcaggcactgagagaagctgacgggcctagagaatggcaagacttgagatagcagaaggaaggagagagggtgagaaatggatccccgtgctgaggtctggtctggaaggagaagtctgcaaggagtctgcactatggaaacaacctgtcaatccagctcaaggcacacatagcccagacacccatgagaccctctccgtggggaccctagagcacctatcatgaacgaggagaccaaggctggctcctcatggaccccgttggcctccagctcggcaacaagaacctgtggagctgtcttgtgaggctgctcaccaaagacccagaatggctgaacgccaagatgaagttcttcctccccaacacggacctggattccaggaacgagaccttggaccctgaacagagagtcatcctgcaactcaacaagctgcatgtccagggttcggacacctggcagtctttcattcattgtgtgtgcatgcagctggaggtgcctctggacctggaggtgctgctgctgagtacttttggctatgatgatgggttcaccagccagctgggagctgaggggaaaagccaacctgaatctcagctccaccatggcctgaagcgcccacatcagagctgtgggtcctcaccccgccggaagcagtgcaagaagcagcagctagagttggccaagaagtacctgcagctcctgcggacctctgcccagcagcgctacaggagccaaatccctgggtcagggcagccccacgccttccaccaggtctatgtccctccaatcctgcgccgggccacagcatcctatgacgaatacgtgcaatggctgcacttcgcggaagggtcggccatgctgccgctgatgctcaacctctacgttgggcgcctgggtgaagcaggtgcgcccttgcacccgcgtatcgaatccgaggtcgcgaactac

SEQ ID NO: 267256 - DNA, 672 bp, Homo sapiens
gtgggagtaagggttgggggagcctcaagtcagaattcaggtgacttcaaaaaaacaggtctgatccaggacttatggtggccttaggatgtgaagagcatagttatattacattcttggtgaccacaaaagcaagaacaaacaattctcagtctgaaacagtgaaagaaaaggtttatctgatttatacacagcatgtttgctccaacccataatggaaaaacaccagataaatctaatttgtttgtttttaatctggatatgctgttgttcaatgcactttttaatgtgtaatgcacacagatcattgagtttctgaaaaactgtatctggagcattggaaagctaaagccgctgttcaaaagaatgactaacaaccacaacagcagcggcagccccattaacacatctgagccaacaaacaccagcatgagacacactagaagcagagaaactagaatgaacaagtccgaatttttgcctggcacataggtcactcagtaagagtcaataggggaatgaaatgcatgggcaaactactgggaaattttgggcagctaaggaagactaagaacaaagaagtttcttttgaccccctctgctgagggtagagaaaagcaaaagggaagttaatgtaacaaaaagcctacgcagtaggagtaatagagggtg

SEQ ID NO: 267257 - DNA, 425 bp, Homo sapiens
ggtcttttagggatcatgactgcttcccagaccttagtctcaggatgccacaccggaagagctggaccccacatttgaagacagatgtccctggcggtgcccgcctgctctgtaaagagctagtcccaggctcccattgtgacctagcacctcaacctctcctgacccttttgcctaggccagatcctgagatcggagagtacatacatctccctggggcttgctttcctctcccataaaatttaggagttggggatgatcttatccctctacctagactgtagactcctgggagcgggaggcaaggcactcacaagcaagggcatcagagtgacatcaagacacaaacagccatggaatcttgggaacagatcaaggagtccacctcttaaaatattgtaaaaaataaaatctgagtacgaaaa

SEQ ID NO: 267258 - DNA, 463 bp, Homo sapiens
ctctgaatctgttaggaacatgttggttggctgggttcagtaataaatatgtgaggcttttcatttaaaaaaaaagtcaaatgatgtaattgcatagagtaccttagtttctgtattgctttttaggtttttttttttttttttttaactccactgggtcagtggatcacacctgtgatccttgcactttgggaggctgaggtgagaggattggctgagaccaggagtctcctgggaatcttctcgtctcctgtaacccagttcacgacagacccttggactttactatattggaaaaatctacataaaacaatgtcagtgtgtcaaagcattatgtctgtcacaagcttgtgaaaggaaaataaaaattactaagccaaagagaaaagtcaagctgggaactgcagcagacaaacctgccttccattttattcttaaacaagatagctagaaagacaaaaaa

SEQ ID NO: 267259 - DNA, 427 bp, Homo sapiens
cattgttctaagagcttttcagagcaaaactcttctaaccttcacaaccctatgagataggtactatttttatccctactttatggatttgaaagcagttaaacatttgcttaaagttacacagctaacaagtgatggagctgtgatatgaactcaagacattctgtccgaagagcctattctcttaactatgagaccacatttactgttttatgacaattagcttattctctatttttacttatataaaacaagctctccaatacagcagatattttatagaatattaacaggattaagaaagtcatatgattggccaggcgcggtggctcacgcctgtaatcccagcactatgggaggccgaggtgggcggatcacgagatcaggagatcgagaccatcctggccaacatggtgaaaccctgtct

SEQ ID NO: 267260 - DNA, 236 bp, Homo sapiens
tgtgtgtgtggttgtgtgactgtgtgggagtgtatgtgaatgtgcatgtgtggctgtgtctatgtgtctgtctgtgtgtgtgactttgtattactctgtgtgtctgtgtgtgtgtgagagattgtgtgtgtgactgtgtgagcatgtggctatgtggagtgcaagggcctgtgtgggaatgtgtctgtgtatgactgtgtggctatgtgtagtgtgtgtgactgtgtagctgtgtg

SEQ ID NO: 267261 - DNA, 179 bp, Homo sapiens
tgctcagaatgtagatgcttcttaggaccatgaagcgaaagccaagatctggggatagtgaaacagatagccagaggaccccaggctgtggatggatgagtgatcctgagcagcagccgtggacatgggttccctaattccttcatgtcccatgagaaaaataaacctctatgtgttta

SEQ ID NO: 267262 - DNA, 502 bp, Homo sapiens
ggggtttcaccgtgtaagctaggatggtctcgatctcctggccttgtgatccacaaggcctcctcggcctcccaaagtgctgggattacaggcatgagccactgcccacggcgttttttacaaagggaaataagaagccatttagaggaataagggagatactaaaagtggcaatatttgatgacgatgattttagtaaactctgattaagatactttgggtaccaggcaatgagtgaagggcttttgttaagtgttacatttggtcctcccctgtaaggtgagctactagtattatctttggttttctctactctaaagtttagagaaaaattaaattggccaaatttagagaactagaatgtggccgttcaaactcaggtctgtctgacttctaagttattaatcactgtgtgctataattgcctcagctgacattaaatttgtccttgggcctttttaaaaatttttttaaaagccttttgactcagtaattctgagtc

SEQ ID NO: 267263 - DNA, 447 bp, Homo sapiens
aggtggaactctagcttgtatattttgaagatgatccctaagtgatggtgatatatatcttcattgagactggcaccagggagccatctttctttattagatttaactcttacctatcactggttttttctaattaatgtttcctcatttaaacctaaaaggaaaaatcttaaataagaattgggttttaattttccatgattatcattggtaaattttaatctgttagcctacttcagctatgaaccagttacttaaaggtttactaagatatatttcagttgaaattgcacttgtaatttgagtgataatcagcccatacttactattttggtttacattatttatccaagaagtaactcagctccatttagaagtgacttcctttgttccacagctcagctataccaaatcccttctctctaagcaaaaaagaaaatatgaagt

SEQ ID NO: 267264 - DNA, 449 bp, Homo sapiens
atgcctgagcaagaatgcttcctactcattggtcattagctctgcccatacatatatgttatttaattgaaccctcacagtaaccctgaaagtttagtagaattatttcccattttgaagactagttgaagcatggagtggtcactgaactaagttgtcatgtagtacagagacagcttgaccctagcacatattgtagttcaccaggatgactttgaagtttttctgaaatagaacaatatgatgtgttttgttgtgtagacaagctgaagtcccagttttctagttgttttctttgttttaaagcagagattctaggagctgtagggcaggcagctcttaagaaaattgggatgaaaaggattagcagttcttttacctgctttgtagattgagagccctgtaagattttgcctgacaaggggctcttatgcttctaaactggaaaa

SEQ ID NO: 267265 - DNA, 345 bp, Homo sapiens
tgagacagggttcttgctctgtcacccaggctggagtgtagtggtgcaaacaccactcaccacagcctccatctcctgggctcaagcaattcccctgcctcaacctcccgacacacctgactatttaaaaagctttttctgtaaagacagccatgttgctcaggctggtctccaactcttggcctcaagcgatcctcctgcctaagcctcctaagtagctgagataacaggcatgaggcaggttgccaggcctgataagatgctctccataacacctgcccagtaatggcatcttcaacaatggccaactctggctttcagtctgcaaaaccaataaactctgtt

SEQ ID NO: 267266 - DNA, 263 bp, Homo sapiens
ctactcttaagtgtcatctccatctactggactacagcctgaactgcaccaccaaacaaaaaacctgctaccagaagggcttagtgctagtctgagataagtttcctaagacctatgcacctgcactctcaatcccacaggaaatagtgtgtccgctcatatgttcaatacatcgctacaacaatcagcatctaagaaagtcactacacagaggctatccacaaccaacgtacccatatacagccttggcccactgaaagtac

SEQ ID NO: 267267 - DNA, 449 bp, Homo sapiens
caaatggataaagaggaaaattactgacagatttaacttcccatatttctctcaaatttttagctttctaaggaaactactcattttgaattaatttagttaaaataatacatcccaactttttaaagatgttgtgaaatgaatactttaatacattactggtggtagtataaactgcctaaaaacagtctgaaaattcatttctaggaccataaaattatatactctgtaacacaataatcctactcttgggattatgtatgaatattttcattacagtatcatagaatggtaaaaaatgaaagtcattaaaaatacctaagcaagaaaggaatagctaagttacatatagtataccaacaaagtgaaagaagaaatgttatattgtgattgtaaatcatgtatgtacaaatgccatgaaaattaaagccagtaattactgcttaggg

SEQ ID NO: 267268 - DNA, 337 bp, Homo sapiens
tttttttttttgtagtagagatggggtttcaccgtgttacccaggatggtctcttatctcctgacctcgtgatctgcccgcctcggcctcccaaagtgctgggattacaggcgtgagccgctgtgcccagccagacttccattaatcttttaaaaaagtatttattaagctataatactcattaagaaaaagtgtacatatcataatttcacacctagatgagtttttcaaattttaaaacatctgtataactaagatcaagtacagcatcaagaataagaaacagtattatctgtagtccagatgttcccttcatgtccccttctgtcgtcttctc

SEQ ID NO: 267269 - DNA, 217 bp, Homo sapiens
ggggaatcatccagtcaaagggtcgaaggtctcccctgacccctgagcagctggtcccctcccctggagtcagcctgtgttctgatttgtgcctgtgttcccggcttttccgtgtgcgttcaggcagccacccgtgtgcctccctctgccttgtcaccctgcaggtagcgcacggctcctcttttctgcacctggcttttgccacttaaccacatct

SEQ ID NO: 267270 - DNA, 182 bp, Homo sapiens
tagtttgatcctagcaggtgccagtgactcaaacactgttacagagaactaaagattcgttgatcgtgcttattagtgttgatgtttcagctttccttaaaataaaacttgcagagattgaaggctcttaaaattatttgtctgaaaattaccacatattacttttcagtggcaggtctaaa

SEQ ID NO: 267271 - DNA, 156 bp, Homo sapiens
gtcccagtctcaaaaaaagagaagccaattcattaccttgaaaataggcaaaaaatgggaaagaatcaaacattcatcttgcctgccctatacaaactatatcttgcagcgtaagtcacaaaaacacactatgtccctcataaggaaggatcacaa

SEQ ID NO: 267272 - DNA, 310 bp, Homo sapiens
tgaccacagggtctcacttcgtcactcaggttgaagtgcagtgacacaatcatagctaaatgcagccttcaactcctgggcttaggcaatcctcctgctgtagcctccccaatagctaagactacagggatgtgtcactatgcctagctaattaaaaaaaattttttgtggagatgggattccactatgttctccaggctggtcatgaactcctggcttcaagctaagccaggagtgggattacagacatgagccgctgcaccaagcctctgatatctttcttatgaattaaaacttttatcattattcg

SEQ ID NO: 267273 - DNA, 332 bp, Homo sapiens
gtttttaataaagcatcgatggtcatccatgattgactgctacctgcttttcagctgcacctccacctaatctccaaaccaaccaacacaccattgttcttattcctgtcaaaaaacagtatatttcaatcacagttaggtgcttggattttttcacaacttatgctcttgtttgttttacaagtgttggtctttctgtctgcaacatattattgccctattctcctaaataacagttttccttcattatatttatctttaataccaaggtactctcctgtcttcagctgcattgggtttccattctcaaaaaatagtctgtgaatatctag

SEQ ID NO: 267274 - DNA, 586 bp, Homo sapiens
tggaacagatataataattgcagtacagttagttagggcctattgaaggagcacaaacgaagcgtaaacttgtctgggaactagtggaaggtgtcccccaggggatgttaaagagctaattctagaattaattcagtggggaaagaaaaggagagggagatgccaggcagagggagcagcatgcctgattgtctggaggtgatcagagggcctggctgattgaagatgaacaggaattgtgtagtctgtgttcattcattcatttattcattccacaactatggatttaaaaacggttagtcaaccaatgtggaaaaatagcatctcgataaaatgttcttcaaatgtcctcacttttcaaaaccaatcacgccttcccagcagccccccaaagtgttatttcagcattaactcagaagtccacagtccaaaatctcatctgagtcaaggcaagtcccttgcacctgtgagcctgtaaaattaaaagcaagttagttacttcctagatacaaggggggtacaggcattgggtaaatatagccattccaaataggagaaattggccaaaacaaagggactacaggct

SEQ ID NO: 267275 - DNA, 852 bp, Homo sapiens
tggaacagatataataattgcagtacagttagttagggcctattgaaggagcacaaacgaagcgtaaacttgtctgggaactagtggaaggtgtcccccaggggatgttaaagagctaattctagaattaattcagtggggaaagaaaaggagagggagatgccaggcagagggagcagcatgcctgattgtctggaggtgatcagagggcctggctgattgaagatgaacaggaattgtgtagtctgtgttcattcattcatttattcattccacaactatggatttaaaaacggttagtcaaccaatgtggaaaaatagcatctcgataaaatgttcttcaaatgtccacctagtattttgatactcagttttcatgactggacccaccatcaaaggcctctgactctgatatttctatcctttggaccctatgggagatctttgcctccatgtgataatctccttctcacgtttttactaaaagtttggagacttgaattctgctccaaacttttagtaaaaacgggagaagaaaaattaacactatattgagagctccaaaatatctggtactgggccagataaatagctttgtatattatcatctgttagtgcgttctattacttttatttcttacaggaatgctacctgtcttacagggttctctaaataaacactgtgtttaaacactttacaccaacatagctggcatgcagtaaaggacaatacaactcagtattatttccctcattttacaggtaggaggctcaggtgagagaagcgagtaaggctggatctaacctagctctgactaatttaccacgagccacatattactccctaagacc

SEQ ID NO: 267276 - DNA, 415 bp, Homo sapiens
aaatggtgcagatgaagagactttgacaaaggaagtttcctgagctgtgggcagggatgagagctcagacaaatgatgggaagcctcccagatgccaaggtttcccacccccaggtttcaagggaggagagaggaagtgatgtcatctgagcccagtgaggccctgtcaagggaccagggaaaactgcccccactttttgctcccatcctctcattgactgcaggtgcacaggcagctgcctgaaagagggcctgcgaagtgcaagccagaggagttggcctccatggcacagagcaggcagaaaacaaatttggagaatgaccagcactcttgggtttatttgactgaaagtgcttgttttattgcattcactcacatccatttatttaataaatatccatggagtgtctatca

SEQ ID NO: 267277 - DNA, 476 bp, Homo sapiens
aagggagtactgaagcaattttggttcacaaatatagatatacagataagaaaaaagtagataaatctctaggtttgagtgttcttaacctttttgtcttagcctagctcttagttgagaatcagtgcttcaatgttaaattcataaggaagagtagaaaccatttgggtatatgtgttgctaacctttccatagactgcatttggttgtcccatgggtcagggtgggtcagaggggctgaggttgtccccgtccatgtcctttattccccctgaaggatttggagtcttcttaggagctgctggtgggcacggcctccccaggaatgcccttcataagcccatggctaatatggctgtcttcaatctatataggctcccgtggaacagtcccaccctgggcttgttgagtacaaaagagagtaaaatgttttgccctttggaggaaaagccaaatcctcatttaaggtagaaacc

SEQ ID NO: 267278 - DNA, 1009 bp, Homo sapiens
acatggagaggaccccatgtgaacagaaccctgaatctgctcattttctgtgctcctgaatgtgtagctacagactctaatttcgaaaacaaacctgataagtgggacggtgccaaggcctaggaagctggagccctctctaatgctctggagcctgcccacctcctgagatctggaccagtctctgcctcttctggggcctcagtttcccaattgtaatgtaatgagaaattaaatgtaaaactgcataaacatatgctctgtgagaatttggtgtcagagttctcaatactggatgataatttggagtggggtgggtttgggacccatgggttctcaggcctcctttcacacccagtgcagtaggtgtagagctctggacagccaggtgttctttcctgagccagctgattacaacacaatggaccaagggctctgatcttaaatatggggggagcagatgacaaaccccattatagtgaagaagagcaagaaactagacttgtgggcctggggaaaagaaaaaaacacttctatttctcccaaactgtagaatctcttgtcaaatatttaattttgattatatctgagcttgataatacattcatgtgttaacagctgcttaaatttgttttttctgtgaagtgtgggataatgtctttgccgtattttaaatcaaattctaaaagctctctttagagtggataagtgagcatctttgtaatataaacttcacatatttgttgccagtttgttctttttgtttttgttaaaatgttttgttttattctgatttggatgtcttttggggttttgctttgtggctatttattatgacagtgtaacttctcctctaattgactgacaggtttgtacattctcaataaaatattttcataaaatctttgtaaaaattgtgtagtcaattttacattacataaacataaaacagtaaagactatcatgatgaaaaagaaagattgagggcttaaaaagtaaaatacgacac

SEQ ID NO: 267279 - DNA, 644 bp, Homo sapiens
acaatgaaaagtcagcagtctgcaacctggaagagggtcctcaccagaacctgaccaggctggcacacccatctcagacttccagcctccagagttttcaaatttaggctggtctgcgatttgctttggctgacagaatatgatgaagtgatgttatatgggttccttactcagcctttaagtggacttgcagctactgctctctactccacactgctaccaccatctgaagaaccctacagtaggagacacttggcccagataatcacaaagaaaaagagtatgcagtgagaaggacaagtctcataaccacatgttgttaatgaagaagctgaggcaccaagcgacttaaggatttgaccaaaatcagacagcagcagattcaaagataatgccagctcctcatcttcgtttctggtgctgtttacaccgtgatacttcaacactgaaagaaacacctatcaattctcgtacaactttaaagatgcattcttactgtctcgaggcatcctctaattttgtgttcctatttgcttcatctagtttaggttattaactcctaaaggctagggcatacattttgaaatttttttttctcaggacattaggaaccttaataaattacttttgatggttaaaaaaaa

SEQ ID NO: 267280 - DNA, 222 bp, Homo sapiens
cctcattactctccgatgtcccctcaccgccttctgatgtctcctcattactctctggtgtcccctcaccgccttctgatgtccccattactctctggtgtcccctcaccaccttctgatgtcccctcattactctctggtgtcccctcactgccttctgatgtctcctcaccgccttctgatgtcccctcattactctctgatgtcccctcattactctct

SEQ ID NO: 267281 - DNA, 343 bp, Homo sapiens
aacattgataggtgcagtccaataataacaaaaattttaaacgtagaagattgtgaccaggtgtggtggctcacacctgtaatcccagcactttgggaggccaagccaggaggatcacttgagcccaggagttggagacaggcctgggcaacataatgagaccttgtctctacaaaaaatttaaaaattagctggatatgggcatggtggcacgtgcctgtagtcccagctactcaggaggttgaggcaggaggatcgcttgagcccaggaggttgaggctgcagcgagccatgatcatgccactgcactgcagcctgggcaacagagcaagaacctagctca

SEQ ID NO: 267282 - DNA, 566 bp, Homo sapiens
tatataaccaatatttcatccttgcaattgctattattatgatcattctgcattaagtgtatgtaagatcctctgggcctttccatatttctacaagatcttcattctaatttaataaattactgctcccatttgaaaaattgtagctttcaaaacgtccattagtcctagtcagcaggagcatatattgcctacatcagaaaactgtgtggtgttgtgtgtggcacctgggaaagtggcttcagggaacctataaacctgcttcattaaagagcctggatttcaatgcctgtcacaacgggcagccagagttagccaagagagaattatcagaagcaccaattaagtaaaaaatgaatcttgcttatttttcttcagtcccaagagataggggaatgaaagtataaggagtggaagacccattaggaatagagaaagagaggttacctacttcctaattgcaatgttcaaaatgtagctatctttataaaagtacttgagaaggtacacagtcttccaaggagtcattgtgcagcaaggaggtggtgaaaagtaaagctatttcc

SEQ ID NO: 267283 - DNA, 353 bp, Homo sapiens
gcttcatggttctcctgatgctcattcctaggttctgtgctgtaggttaagaatgtgttttttcttaggctgggcattttggcttatgcctgtaatcctagccgtttgggaagccaaggtgagtgaattgcttgagcccaggagtttgagaccaggatgggcaacatggcaaaaccccatctctagcaaaaaatacaaaaattagctgagggtggtggcacacgcttgtaggcccagcttttggggaagctgaggcaggagaatcgcttgagcccaggaggtagaggttgcagtgagccaagattgtaccactgcaccccagcctgtgcaacagagccagaccttgtctcaaa

SEQ ID NO: 267284 - DNA, 391 bp, Homo sapiens
agctttgaggatgtgtaaagaataaaggcaaataggtggtgggaataaagatctagggtcataaaaacattaaaaaaaagatctagggtcatattagaaacagtttagaactaagagctacctttcactgcagggttagcaataatattcctcttatctagaaaagctactgctcacttttcatcatttaggggaaaataggcaaaagttattcatagggcaagactgctgtagcatccatatttttaccaaccacattaatatttacaccttcagatttgctgagtaagagacagcctggagctgtcttgagttgacaggtgaaatgattctgagaaaggacaaaagcacatggcttctaagataccaatctacttgcttctgtggaaaa

SEQ ID NO: 267285 - DNA, 352 bp, Homo sapiens
tttggacttagtgcgggcatactttattttattgtgctgccctttattgtgcttcacagatactgcattttttacaaatcaaaggtttatgacaaccctgtgtcaagcaagtctgttagtaccattcttccaacagcatgtgctcactttgtgtctctgtctcacattttggtaattctcaaaatattcgaaattttaaaaaattattttctttatctcttatgtgatctgtgatcagtgatctttgattattacaattacaataactattgtaattgttgtggagtgccatgaacaatatccatgtaagacaacaagcttaattgataaatgttgtttgtgtttcaacaac

SEQ ID NO: 267286 - DNA, 407 bp, Homo sapiens
gcaaccacaactcattgcagcctaggcctccccagctcaggagatcctcccacctcagcttcccgagtagctgggactataggtgcacgccaccatgccctggcaatttttggtatttttagtagagattgggattttgccatgttgcccaggctggtctcaaactcctagactcaagaccagcctgggcgacagtgagacccagtctcttcaaaaatacaaaaattagctgggtgtggtggcgcaggcttgtaatcccagctactcgggagggtgaggtgggaggattgctcgagactgggaggtcgaggcggcagtgcaccatgactgtgccactgcactccctctagcttgggcaacagagttagagctgtctctaaataaataaaaaaatttaaaaataaaca

SEQ ID NO: 267287 - DNA, 447 bp, Homo sapiens
gtctgtttcttcttgtgtgttgaaggaaatggccagcatgtaggagtgccattgtcctatgtggtcactcaaggcttcaggttttttctacagtttagcttcatttatccctttggtgtcttctatgtgaagcttgggtagtctcagtgggaagtgaggaaaggggaagcatagatttcattttaagtaaatggaacaagagttgctcagaacactttcactcatattctattcatgaggactcagctacaaggtgactcctgagtaaaagagaggctgggcaatgttgtcctaccagggcaactaaatgcctagtgaaactctcatatttcggaaaaaggttagcgggaatggattttggaggaaaaactagcagtctgtcacaattattttacatacccccctcccccagctatttttggctagccacttctctagatgttaacc

SEQ ID NO: 267288 - DNA, 623 bp, Homo sapiens
aatgtgatccatttttctctgactcatcttagtgttgtaaactagttaaaagtcatgccaagttaggtgtctatttcacggatttttaaaacatcattccacagcttcttatgaagcagctacttttctagggagaatggacagcaagagatcagtggatgggaatgataagaaatatcctctgacctcaaagagcttctaatctgctgggtcaagcgggagagcggttggtaactatagtgaaaggaagcatgaaacacaagctggatatggaggttaaaggaaacatttctacaagtcctgcgggaagagggtgacaggacataaaacagaggtagtgttattgtttaatttccatatttttaattgtatttttatgaaactcaattagtgtattacagaacttgtcactttagtgaggaaggaaaagggactttatgagtcaaggatgtcattagaacatgttaattcctcttagtttctttccctccttgttttagagctctgccaactcccagtgcttcaaatagccactttcagtgggtgaatatgttatggattttagtttccccaaataaaatattgtaacctaatcaaattatccaccagtatggaaataaatt

SEQ ID NO: 267289 - DNA, 434 bp, Homo sapiens
tataactaggaggaagagaaattaggaaggtcactggcaccctctcaacagctcacaacagactgcaaacaaaggcctctgagggccttcttggctcataagttgaccctgataatttagctcacgtttactgagaaccgcctgtttgccaggcactgcgtcaagaccttaatgtatatcagtccattgaggaacagtcgccattccattttcagatgaagaaacaggcttaaagaagttaagtcatttcatttggttagtgagttggtgggaacaggatatggctccaggcagtgtctccttgctttaaggatcagtctgtacaatggataggaaaggccttatgtactctaagactgcattagttgtggttaacctttcagggaagcagtcccctttgagaattgactgaaagttgtcaagtgaatttccag

SEQ ID NO: 267290 - DNA, 411 bp, Homo sapiens
tctacttctttccttcctgaggctccaaagagcccttgttacaatattagatactaatagcaatgtctgagggaagccacatgtatggcatgccacaatagagaaaataaattgagataataaacttaggccagacgtggtgactcacgcctgtaatcccagcactttgggaggccgaggcgggaggatcacgaggtcacgagatcgagaccatcctggctaacacagtgaaaccctgtctttactaaaaatacaaaaaattagccaggcgtggtggaggctgcctgtagtcccagctcctcgggaggctggggcgggaaaatggcgtgaatctgggagggggagcttgcagtgaacggagatcacgccactgcactccagcctgggcgacagagcaagactccatctcaa

SEQ ID NO: 267291 - DNA, 421 bp, Homo sapiens
ctgttctcatcttgttagtctgtttcctactgcttgactccagaactctgaactacagggaaatgcctagggaaggtgagctagaggactgggagggaaagaatagtaagcttttcaattgttgaaaaaaattttagtagtttcctatactaatcaatctaactaacaagcaccaccaatttaaaaacagaaagccaatgtactggaggagaaatgaatacagaaaacaactatttttaaaatgtatctttttatccactggtaagagttaaagaactctgcatctgtaataacaggaagccatcaaaaaattaaataagcacccaagaaagaacatttcttggaaatggacaagctgcagaacaaacatatcattaaaaatcctttatacattttatttttaaaaatttgtaaaaatgta

SEQ ID NO: 267292 - DNA, 407 bp, Homo sapiens
gtgctaaactcaaataccagcacctctcccaagctacccctgctctgacaggctcccacaagtttttgtactttgtgcacatttttatacctgtgcctcctctcacgtgggattacagtgatttgctcagctgtctgcttccctgctggacagcaagccccttgaggaggaggactgtgcttcattcctgtctgagtccccagacctagcacattattagattcttattaggtccttaaaaatcctccctctcgccctcccttatcttttccatccttcctttcttcctttcttccatcctttcttccctccttccttcctttcatgaggagaaattagtcattattctctgtattatctcacttcattagttttgttgaatgtatgaatttacacatttgaaaatg

SEQ ID NO: 267293 - DNA, 364 bp, Homo sapiens
gatgaagattcaaggctcagagggaagaaacttcccaggcatcatacagttggtcagtgttagagccagaatttaaagtccactctgttataccgttctgatattctaatcactttgactcagacagttctccaaggagccctggttccttttattggatatcggcattagaaaccaagatgtgagtggtagatgtgctcattaccactgaggtgtcattgcttccaggccctctccactgacagaggaaggaaatgatgctgtcttctattcctctgtacagtattgtaccttgcactcagcggtgaccccaaaagtgttgactgatttttccaccatgttataaaagattcttctaaagaaa

SEQ ID NO: 267294 - DNA, 1107 bp, Homo sapiens
gaccaatgtcccctataaataatcctcaacaaaattctagaaaacacaatccaacaatgctttaaaataattatacaccatgtccaggtaagatttatttttgaaattcagaatgattcaacatacaaaaatcaatcaatgtactacatcacagtaacagaatgaaggaaaaaagtgtgattaactcgactgatgcaaaaaagctgacaaaattcaatgcttttatgatacactcaacaaacaaggagtataaggaaactacctcagtataataaaggccatatttaaaaaaaaaaaaactacagtgagcatcataatggtaaaagactgaaagctttttctctaagagaaacaatatgcctgctttcaccacttcaacataatactggaagtcctaggcagatcagtttggcaaataaaaaataaaagacatccaaattggaaaggaggaagtaaaattatctctatttgcagatgacataatcttatatgcaaaaaacccttaagatcacacacacacacacacacacacacacacacacgaactaataagtgaattcagccaagttgcaggatacaaaatcaacacccaaaaatcagttacatttctatatactgacaatctacaatctaaaaaggaaatgaagaaaacaatttcatttacaataccatcaaaaagactaaaatacttagcaataaacttaaccaagtaagtgaatgacttgttccctgaaaactacaaaacattgctggaaaatgcgaaagaaggcacatataattgggaagataccctatgttcagtctacccaaagaaatctacagattcagtgcaatccctattaaaattccagtgacaagttttgcattaatagaaaaactaattctaaaactcgtatggaacgtaaagggatctcaattagccagaacaatcctgagaagcaataaagttggaggtctcacactgctgatttcaaaacttactatagccaggcatggtgatgcgtacctatagtccaagctactcaggaggctgaggtaggaggatcccttgagcctggaagtttgagaacagcctggtcaacagagtgagacccagtctttgaaaaa

SEQ ID NO: 267295 - DNA, 341 bp, Homo sapiens
gagcaaaagtccgattctgtaaaacatcccctaaagcactggtaagcactgaatgtttacatttctccaaattcatatgttgaaattctaacccccaaggtgactgtggtaggagctggggcctagggaggtgtttgaggagtgaaggtagaactcttataaataggatcagtgtttttataatagggactccagagagctctctcaccctctttctgccatgtgaggaaacagcaaggaattggcattctgcaactcaaaaaaggatcctccctggaccccaaccatggtggcattgtgatcttagacttcccagacttcagaaatgtgagaaataaatt

SEQ ID NO: 267296 - DNA, 188 bp, Homo sapiens
gtgtccaattacattttggagaggtggacactgctatcactgcatacccatgccctgtgagggaacataggacttttctgcagaattcctggactaattattattccttatatatatctaggaaagattacaaaattaactgaccctaagatgaatatacccacaatgcaaagggaaaaataatttat

SEQ ID NO: 267297 - DNA, 433 bp, Homo sapiens
acagacaggacttcctcacgatgagaaaataacaccttttactctgtggcatacatttccctccctttcattcagtatttgggatctacatgctgagttcaagcccatatactacattttcctcttttttttttttcttaaatgctcagctcatctcatgagtgaaaaaagaattttctcttctgcctcccacatcataatgcagcacaaaaagtactcccatcctccatctgatgtctatcttgttcaagaatctgcacccatctactccatagagagacataaaaatttcacttaggaatgagtcatgaattgttctttaaacgttggatcaaaggagcttgtaaagcccaggttattagtgcatgtgtacagtgtgtgtgtaagggaacaagtggatggttcagatgcaaaagtctaggaatgggacctg

SEQ ID NO: 267298 - DNA, 554 bp, Homo sapiens
aagcagaaagaaacccttcctcgtacagctgctcccatgagaaaaagttcaacagaaaacatattaaatgcccatttcccaagactctcaatcagagtggtaagaagcaaagggacgacgctacagaggtgtctgggaaactcaggctgattaaaggtagcctccttgacttgcaggctctgtgaaggaaagcacacctcataaatccttttggactgttttttggctaaactctcagatttatacgaagaactattttaaatgaatcagcgtgtctttgtttgcatcttctgagattctgaagactgcagccaaggagctagtaaggctgagaaatggattgagcatttaatcggttgaatacttccttatgttttcctcgtgtgttctcataacaagcgaccttagtccaactcctagtaacacatgattgtggaatgtgccctcctgagaaatactgccttattttttcatcctgagcacattgaaagtctctgaaaatgcagatgagcttgtttggacaatggtaataataatatatgctagcgatacct

SEQ ID NO: 267299 - DNA, 411 bp, Homo sapiens
ttagaaaccgttgtgttgattttgtggtaaaagtgcaactcaaatcattattatctatctatgatgtcatagacaaacaatgtctatcttagttgacatagaagttctctatttaaattattgcctgaacaatcttaattccattagtttatctaacatttttaaagtattgtctctgaagacaacatgcagagatattgttcagaaggagatgcatgaatatacattttaactaagagttttcatcaagtgagattccctgggttcctcatctacttgcttatgtggctgtctacaagtcacttaatttaccttagtctaactgccttctgtaaagtgggttgctatagtctttaagccaatatgtatattaccgtttttgtaataaacagtataaatatgagaaaatta

SEQ ID NO: 267300 - DNA, 802 bp, Homo sapiens
aggctatatagttataaaattgggttttatttatctaaaaatattagcattgtaggaattacttgagatacgttacttttttcaaaatgtgaaaatcagctggaattgtcaatttttaatttaaaataggtaatagtaactctatgtaacatactgtttatagacaaagatgagtattctttaagaggttttatattgtctttttagtaaatagtgctggagcaattggacacccataaggcaaaagaataaaccttaacccaaacctcacatctttctcaaaaattaattcaaaatgggttgtggatttaattataaaacacaggtcaggagcggtggctcacacctgtgaccccagcattctgggagactgaggtgggcagatgacctgaggtcaggagttaaaggccaacctggccaatataatgaagccccatctctactaaaaaataacaaaaattagctgggcatggtggtgctcacctctagacccagctaagtctggaggctgaggcaggagaattgcttgaacccaggaggtggaggctgcagtaagctgctatcacaccactgcactccatcctgggcaacagagcgagactccatctcaaaaaataaaataacctaaaaaataaagcataaaagtataaaacttttagaagaaaacaggagaaaatctttaagatctcaggctaagcaaagatctctagaacataataccaaaagcaccatacctaaaagaaaaaaattgataaattggatttcatcaaaattaaaaactttagctccgtgaaagatgcta

SEQ ID NO: 267301 - DNA, 465 bp, Homo sapiens
  misc_feature (106)..(106): n is a, c, g, or t
tttttttttgtgatggggtctggctctgcagattgcacatcacccaggctggagtgcagtgatggatctcagctcgctgcagcctcagactcacgggcccaagcgntcctccaatctcagtcttcctagtatatggtggtgctcacctctagacccagctaagtctggaggctgaggcaggagaattgcttgaacccaggaggtggaggctgcagtaagctgctatcacaccactgcactccatcctgggcaacagagcgagactccatctcaaaaaataaaataacctaaaaaataaagcataaaagtataaaacttttagaagaaaacaggagaaaatctttaagatctcaggctaagcaaagatctctagaacataataccaaaagcaccatacctaaaagaaaaaaattgataaattggatttcatcaaaattaaaaactttagctccgtgaaagatgcta

SEQ ID NO: 267302 - DNA, 397 bp, Homo sapiens
gtccccacagaacccttcccttcttattccatcctggactggttgttctttaggcctgctgcatgctcagccgtgatccttggattcccttctcactgggttgagttgcttgtttcctggatcccatgtctttttctctcttggttatccccacccactcaccatgggtgcacacacgtgcacacacacgcacgtccttcccactccctctgtagctctttctcaagtagctttccaggaagtcatgatgtatggtaacatttcaattccgctttagctccatttctcctgtcatctttctagtttattttctggaagcttttctagactttttcaaccctctcttgagttgtttattttgtcaatcatttaattcccaagaatttttttttgttct

SEQ ID NO: 267303 - DNA, 419 bp, Homo sapiens
gcccaccacgcagcccgcgattcgggatcccagaggagaggggtgcgggctgagccggggccacgagtcctctcccgcgctcccgcccttttacctcactgtcccgccgggcgcacgcagagctcaccttgcgtgccggccggtggaggcgagccataggtgacggtgcatcctccttctccgcctgctctcgcccggctggcaggggctggaggctgccagcgccaaccttcccggcgctccggggcggagcagctcctgcgccctgcgctaccgcagcggcccttcagtcagctccgcgccgtcccccgcagagcccccggcgcaccagcgcctgcttttccttccccgagcgcctcaagcagtctctgggccgcaggaacagccctctgaagaggcgcttgggtagaggccaccag

SEQ ID NO: 267304 - DNA, 478 bp, Homo sapiens
gtcaatgtcactgttccgaagctagacttgcagttcactgggaagcatgacaccacagcacctccagctgtggacgcatcatggacaagccaggctgagaggagaacttctcattacttgcagcacagcaacattgggttcaatgtatgcccatgaaaaacctcatttaagagaatgccttggaaaggtgccaaggtccccatactaattaactttcatctctcctggccctctgcaccctctctccatgaggaacattaaacatagaacatcagcttgagaacactctatttaaagcaaaagtccttctaaagatagccttgaatgtccatctaaatcatcctaagtccattttctggcccagaatccacaaggccagcgccccagatgggccctactatggtggcttatatccataaagaatgtctttcacggttcattggttggattaatctgatataaagtgtctaaactgaaa

SEQ ID NO: 267305 - DNA, 287 bp, Homo sapiens
tctgagaccctcacatgttttcatgcccgcattggctttttgtcttttatgtgataggtaggtagggagtgttttctacctatgtattattccaggttttatgcccctgagggtcttttagctggagacttataggcatagtccactccactgagtacagatgttaaagttgccaatgaagctctttatgagggatggagacaggccagtatctttggcctggattctagagacctggtttgaaaatcctgggaaagctgagagcttcgtttctccctctagagtac

SEQ ID NO: 267306 - DNA, 466 bp, Homo sapiens
gtgtcacctgttgctgtggctatttgacaggtttatagagtcctatagcaggtgcaaaagttagggtggaatgatagggaagcatagggtttgagatcagatggggaggagggtttcagggtagggtggcctgtcctgggtttgattcctgtagatgacaccttctagccattttctcactaataaaatgtacaatgaattaccttataggtctgttgtgagaattaaatgaaatagcatgttaggtgtccagaacaatggtacaatggttcaataaatgttactcctgttttcctcaaaaaagatgctggatgacacttatttttgcaaatttttcttttctttttcttttctttcttttttttgagatggaatcttgctctgttacccaggctgaagtgggctgagattgtgcgctgcatccaggcctgggtgacagaccaagactctgtctcaaaaagacaaa

SEQ ID NO: 267307 - DNA, 476 bp, Homo sapiens
ccctttttaaaattagctctgtgagttacagaagtaatccctgctttcttgttaacatgtttcaaacagcacagaagggttcaaggtggaagctgaaggtactccccagtctcccccacaacccccagcccacctctgctaggtcccacatggcctttgggaaacatatgcattgttccctcttcccatagaagccagaagggaagtctggaatcagtgagccaggtacagctctgggcccaggcccagagatcccacactcatgccagcccctacccacgccagccccctccctgtgccagccaccgcccctccatctatgcaggccccctaccaccaagcccatcgataggggctcattattccgtcctgtctccctaggatggggcagagtgacagctgttccgtgtttaattaccgatgggctgaggctatgccaacccatgaataaaattacagttgttctgcaatgcaaa

SEQ ID NO: 267308 - DNA, 406 bp, Homo sapiens
caaaggatacaacgaaggcaggttgtataggggttatagtggggaagtggataggggattcattttcttatgtgacattttgccttaagaatataaaagtgctttagcactgatggctggcatttttaatataggcagtgaaagtgactttagaagcatgggatgaaatagagggaagaagagtttttattttctggcctttaaaaagtgcctagtaggtcatttgagacccagagaaatgcacagagcttgagcaaaggcatgaagtccctgacattgttttcctttttgtctcagcatatagtattaagatgcctagaaataggactctattgttccctcttgtataggcactttacatttcttgtcactacagcaaccacatacagtacagacaacctccaaa

SEQ ID NO: 267309 - DNA, 510 bp, Homo sapiens
gtcccacaagactgtccccacttcagacatcagctgcaaagaaggtgcccaggctacccacatttctgcccaactgactataaatttgggggttcccaccagccctcttcatgtttgataatttgctagaacaactcaccaaactcaggaaagcactttacttactattattggtttattataaaggctaaaactcaggaacagccaaatggaagagttgcatagggcaaggtatggggatgggagtaggggtggctcagaactaccatgtcttcttgggatgcattaccctcccagcaccttgacatgctcagcaacctgtaagctccctgaaactttgcttgggaattttttttttttttttttagattccattaagtaggcatgattgatgaaatcactggccattagtgattgaactcacactccagactaggtgtggtggctcccatgtgtaatcccagaactttgggaggctaaggcaggaggattgcttgaggtcaggagttt

SEQ ID NO: 267310 - DNA, 316 bp, Homo sapiens
actgttgaaaaaataaaggaaaacagacttcacaaggatctccgtgctgaaagcagccttcaacaggaaggtccctggagaatcagctccttccaaaagatcaggggatgaagacttcaagaccgcaactgctgctgtctcacccctaggcaggaatggaccaccctccgccctccaccctccgccagcagcccacaggaagcaagtagaacctgataccacctcccgccagtctgtgaatatataatctgacttgtattttccctgttttcccattttgcatacttcagaataaagacatctgttcataacacta

SEQ ID NO: 267311 - DNA, 490 bp, Homo sapiens
gagggttgcagaatttgctctttttgggatgggttgccctgaataacattacggaccaggtaaataatttcatagaagttcagtatagtacgtaattcttgtaagagtattgtatgcaagctctctgtatgccacccactgttagttcaaattgagatttttgttttgttttgttcttaagaacataccaagaaaatatcagtgaattgttggatatgaattccctgttagttgatttaaatcctttctgaataaagatcagataaacagtaactgaaggagcatgtatagctctttccttcaaattcaactagagcctttttaaaaagacatttgcctgctagtcagatacatttacatttatgcaaattttttaaataggagaaaattaagaaattgtgttaaaggcctaaagttcaggagtgtattactttaggttctttccagtttgctggtttttttttttttttttttttttttttttgggcgg

SEQ ID NO: 267312 - DNA, 733 bp, Homo sapiens
gagggttgcagaatttgctctttttgggatgggttgccctgaataacattacggaccaggtaaataatttcatagaagttcagtatagtacgtaattcttgtaagagtattgtatgcaagctctctgtatgccacccactgttagttcaaattgagatttttgttttgttttgttcttaagaacataccaagaaaatatcagtgaattgttggatatgaattccctgttagttgatttaaatcctttctgaataaagatcagataaacagtaactgaaggagcatgtatagctctttccttcaaattcaactagagcctttttaaaaagacatttgcctgctagtcagatacatttacatttatgcaaattttttaaataggagaaaattaagaaattgtgttaaaggcctaaagttcaggagtgtattactttaggttctttccagtttgctggttttttttttttaagggggggggggggaggtaaaggaagttgggctcttggaaccaacagttaataagggccctctaaccggggagacgagacccgagagcaccgctgtgcagaagatgaactaaacctcagagggggccggctatcacaagagcttccggaggtcaacagccggaatggggggcacacgatcgggggcttggcagcactgcttagcccaggtatcagcctgggaacaaaaccactggggggaaatccgaaaagcccccccaacgtgg

SEQ ID NO: 267313 - DNA, 617 bp, Homo sapiens
aatatataacagcttctggacattattaagtgggctggcttgtgttttgttgaggaacaggacaaatggggcatttactagtgctgtgtgcctcgttgcttttctgggtagtgtttggtgatgggcatagtgtggagtggtggtagagtacacagtgtgattctgtctggtaaggaagctgtatgttgatgttcactgatgtgaataggttcatacagtcccttaggcatttggctggaggataaagaacagccattgaccagcagagtactttttttgaagtttatgcaagacagcgtgctaggtactactgccagcttgacaataaaggcagaaagacatttagagccattaaagaattatttataccagaatacaaaaacacacttttcaaatgttttgtaggcccttttcctgcacagcatgtgcctcatctactcaaatttaggaaaggtggttggtggttttgcagagaagcaaggaactgtaatatctgtctgcattggtcatgcttatcatgtaacacactggattcagtataaaggaaaaccgacaggtatggagtgtctgctgttttatttttaaaaaattgttcattttttaattaaaaaaaggaa

SEQ ID NO: 267314 - DNA, 387 bp, Homo sapiens
agatttaaatcattttgaaatattaatataatgatcaaaaattaacttttatacatgttattaggcagaacccacagaaaacaataaagcacgagagaaaagaggatggcagtttacccaggaaacataggttgtgcaaagctttgcaatgatactctcaattcagagcaatgaagaacagaatgctgtcttcccataatgatggcattcaattatcactagacttacaagactacagaaaatttctcaagaaccagtaaggatcagacagagccaatgacaatactgaagaagcttgccagtggagaatgaaagctcagttacacaaattacgttgttgaaccagtgccagaaataaaatgtgatggacaaactcattaaaaatga

SEQ ID NO: 267315 - DNA, 413 bp, Homo sapiens
atctttctgcatgcacagatccatgtggcactcatctcatcattctgagggaagaaagatgcatagggaatgttgcatgtggttatttctgcagaacccacagaaaacaataaagcacgagagaaaagaggatggcagtttacccaggaaacataggttgtgcaaagctttgcaatgatactctcaattcagagcaatgaagaacagaatgctgtcttcccataatgatggcattcaattatcactagacttacaagactacagaaaatttctcaagaaccagtaaggatcagacagagccaatgacaatactgaagaagcttgccagtggagaatgaaagctcagttacacaaattacgttgttgaaccagtgccagaaataaaatgtgatggacaaactcattaaaaatga

SEQ ID NO: 267316 - DNA, 393 bp, Homo sapiens
cgagtttgttttgccaaaactcttaaaatgagatctagaattagaaatgacttttttccttacatcttaggcagaacccacagaaaacaataaagcacgagagaaaagaggatggcagtttacccaggaaacataggttgtgcaaagctttgcaatgatactctcaattcagagcaatgaagaacagaatgctgtcttcccataatgatggcattcaattatcactagacttacaagactacagaaaatttctcaagaaccagtaaggatcagacagagccaatgacaatactgaagaagcttgccagtggagaatgaaagctcagttacacaaattacgttgttgaaccagtgccagaaataaaatgtgatggacaaactcattaaaaatga

SEQ ID NO: 267317 - DNA, 492 bp, Homo sapiens
atgggagccagttggcaagatggagtctgtagggttcagactcttgaagaatagagaaagggtacagagaaaggctgaaaatgtatctggggcatggtaggtggacaatatgtgaataaccagcaaactctagcaacaataagcttattaagatagcctgtgtgatggttatttctactacgaatttttctactttaggcaccagttcgagccttacttgtaaggcatggacatttaacaatacttggagaggttttttaaatcagaacttaccgtgatgtggctcggtggcttctggtgtgaagatttatagtgggggctagatgcctctagtaagtgggcttgggtggtgcctcaaactcaaatatccatttgcatctcctcatgtacatagaggtcaggaagcccaggaaaaaagtctttgatctctgttcaccaacagagttcaatataatggttaaagagacggctccaacaaatggtagtctgcaa

SEQ ID NO: 267318 - DNA, 496 bp, Homo sapiens
tccattactaaaagagtttgaagataactgattgtgctataataataagttataaagtgaaatatgtaataggaaaagttttaatttggagggtttttaacagtgttacagataatacacttttttttcaagtatacaagaatttattttaaaaatatgtgtgattaagaaaacataaacatttttaacatgtcatagttttggaatctaatccaggaaacaaataccagtatcactttgcttgttctgtttttctctttatcacttaccttctttctcatttctgcatattcagtttgtgctcatttcaagtccaccttcccttgaagcctactgcttttctttgtgcattttctaccacagttttacattgtgtatttattttctgcaatatttttgcttctattttataactaagcatattctattttgtattatgattatgtacttgtatcttttttcttatttataaaaataaagagaaaaaaatctttgt

SEQ ID NO: 267319 - DNA, 544 bp, Homo sapiens
catcactggcaggagtctggaacgtaggcggggagaagccagtgaatgctcctccattcctcgctttggccagtacttctgatattgcttgtgtctcctccgtggtcccagcttccctggggaagccttacccttggtggtcgcagcacccactgagcagccccagctcctaaactgtggtgaaaccacctcctctagaaaggtgatggtaacttcctacttttgcaaagacctgccttcaccatttgctgtttgcctttttagcacttcccacttcttaagttccccatgttaaattctctcagtgaaaccacttggtctgggttcttttttcctgactgtactctgactgattcatttcgcttgtagtctccaattcaaaccaccagaaatgggatgatgaacaggggaaccaaaggagcacattgaccatttctgccccttcaattaaattatataagatgtataaaactattgtgttgctagtggtagacatagacatagaaaatatagttcataaggatcatataatgtaaagccacat

SEQ ID NO: 267320 - DNA, 500 bp, Homo sapiens
agagcagagtctgcagcaggaagcccgagagtcaccagcccaaagtcacccagggatgactgcgtttctcacctctggaggactcagcattcaaggtgccatcttggaagcagagagcagccctcactagactacaaacctctggcgctttgatcttggacttcccacccaccagaactctctccactcccttcctagactttcttcatagagccagaagagggtacctgaattggcctggactgctcagcctgtacggttctgggagtggggtggggtggatggagtgaactcagcaggcacccccagctctgctctcctgtggtgtgactggatctccaggagggacttcgacttttccaggtcttagcactgaagatgctttggtgcttctgcacaggggagaaaattcaaaataaaaacaaaaccataaaccatgcaatacaacttttatatggatgctaaaaataaaatgttgttttgttttcttaaagttaaaa

SEQ ID NO: 267321 - DNA, 142 bp, Homo sapiens
aatatctactttcaagctcacttacataggtgttggaaaacttacttcctcgaagattattggactgagagcctcagttcccatttgactgttggctgacctcagttcattactatattgtcctcttcagcatggcagcttg

SEQ ID NO: 267322 - DNA, 216 bp, Homo sapiens
gaaaattcctgagaatatttattaaatgtcactgggaggaaatttccctaagcaagatacaaaacttagaatcaaaagggaggactgacttatttggttttagaaatgaaaaagaacagtttggaagaaatagtgcgatgtggatgacttacaaacaattattattcctaaaatataggtacaatgagtttattgaaaacaacataatgcaatagg

SEQ ID NO: 267323 - DNA, 515 bp, Homo sapiens
ccttgatttcctcatctgtttaatggggaccatatgtctctggcaaaatcgttgtgagcaatgtttgtatgtctgtgttcacagtaccattgtttgcagtggtaaaaaggtagaggcaacccacatgttcgttgatggatgaatggataaacaaacaaaatacacccaatggaatattattcagccctaaaaaggaagaaaattcagacacatgcaacaacatgggtgaaccttgaggacattacgccgagttaagtaagacagtcacaaaaagacaaatagtggattccacttataggaagtccctagagaagtaaaatccacagaaacaaaaaagtggaaagggggttgccagggcccagtgggagcgggcaaggggagttgatatttaatgggtacggaatatcagttttgcgagatgaaaagagttctggagccggatgattagtgatgattgcaaaacattgtgaatgtacttaatctgatggtaaattttatgttatgttcattttatc

SEQ ID NO: 267324 - DNA, 265 bp, Homo sapiens
catagtttttcatggataaatcaccattttctctacttaatttaagggaaatgacacatagaaccttagtggttggctgtagcttctggcttatttcctcatggcctgaccaaagagatgagccttagaaaatatccaacttgtaggccggatgaggtggctcatgcctataatcccagcactttaggaggccaagataggagcatcacttgagctcaggagtttgagaccagtctggccaacatagcaaaaccccatttctacc

SEQ ID NO: 267325 - DNA, 536 bp, Homo sapiens
atgcagagagccctgtgatggggctgctggagccgaggcctggggttcagtcccctgagaagcccccaccagcttagcctgggggacgagttatgggaaggacagatgagaaactgctaactaaacaaggccaaaaggaccagggcaagctgggggagaccatggaggctgtggaaggaacaggctgactaagctcaggagactccccacccacaggggctgcagtcctgcctcagggctcagcaagcaaacacgtaagagcactgcacagttgaaaaaatgagttttaaaacaatctgccaagaaaaaagatgtcaaagtagtcatcacgggaaaagtcagaattttggtggacttcactgcacttattctgtggctattaattttaaattatgtatgtgggggaggggagcacaccataatctttctagtgccctgaggctcttaaaccaggctctgttcacctggacctgtgttcatgggcaggaaactgttctaggccctttatatgcattgtttgatttaatcctgtaagt

SEQ ID NO: 267326 - DNA, 453 bp, Homo sapiens
aaatgtaatgtaatttgatttcttgattagtggtgaagctttttttgtgtatagtaaagaatcattctgtaagttatatgagtttttcctgtatcagatttgccttaaataatcctatgttgaactcattataaataggtttgactcagaagtatcattttagtgtttttttgcttgtgaacagaagaataaggaccacaatgtaatcatcgtatttttcttcacgggaattccaccatctgtgtgttttgggcagtgggagaagggggagggcaaacttcttctcggtccctcctgtgtttctctagttctagcagggacgtttctgtaattggttttcaacatttgctgagagtctgtttcctcttaacattcaacatgtttaacagaagtcttgtaatagttccaaaaataataaaaccagtcccaggaataaaaatgatacattcacag

SEQ ID NO: 267327 - DNA, 484 bp, Homo sapiens
cgcccttctccaccctcctgtctctgttgctgcagggaaagcagagtaaaaaactgcagctgcaatgatgagcctgcgtgccatgcgcaaaaggctggagagaaactccgtgcagcccttcttcgccactgttcttaccgttccacctgtgtatgtcttcatttccccagaagaactgtacacatatggaagggaacaatctttttttatagctcctataccccaaaacataagcacttaacgtaagtttgcatatatttggccacaataggccaaatataaaatttaggacatccatttatcgataaagctaattctaaagcaacaatatcaataattaacacatggcagagttcttcaacgcggcatgttaattttcaatatagactttgcgtgtaatttgctttttcaatgtttttttctttttgattcgaggaggacaatcataagttgaattcaaataaaaataatacagaaccacttt

SEQ ID NO: 267328 - DNA, 532 bp, Homo sapiens
ccctgtgatgtgacatggagaagtgaccaacacaactttgccaactatactccattcttagtaactgccgattaggaaggatttctttctaagtctgtcactaattcaactgttattcacaagagaagtagaggcaaatgatagcagcttgatcgttgatttttgatttagatgatcaatgatgttcagaatagtgtttgtatgtgtgagcatggatgtgtatgtcgtgtgtgtgtctgtgtatgtggtgtgtgtgtctgtgtatattgtgtgtgtgtgtgtgcatgcgtgtgtgcagggtaggtatcaccacattccctgtggtggtgtgtctcttctctgggattggttcttctagaatctcccaccttttagaaccactttaagatatttatttattctctccaaccatcctggcaatctttttatccttaaacaggaataaattcctacagctgaatctattcaggatttctgtgtgtatgtgtgaaaatttatatgatgctcaatcctttaaaaatcttttattcaa

SEQ ID NO: 267329 - DNA, 225 bp, Homo sapiens
ttatctatatgtgttccacaacatcatgttgcaaacctcaaatatacacaataacagtattttaaaattaaaaataaataagagagaggaagagagaagaaacttcagatttactcacatggaacagatcaccgaacataaaattgctgagcagatgattgagtaaaggaaataaagaggactgtaaacaaaatcttggagaattaaggacttggctttatatga

SEQ ID NO: 267330 - DNA, 454 bp, Homo sapiens
aatttcagtcatgaggagtctattccaagtgttgaagatcatggcacaataacagggcagctgggatggctggcattttcaagaacttggcataaaaggactggagctgagcagagtacctgtacccagaatacaaataaactacctgagatgataaaagaagcagaagcactaaaagtacttatgggggaaggagatagataaggagtaaaggtgatgtgtgcagaaaaataaacctcaataaagacagaatattcacatgaagatgaacaataaatccataattagaaggtggctcctgttgaagaaaaaagctgggaaatatcagccgtatcagggagtaaaccaagctcttattctgggaagaagccaacctggaatgagtagaaaaggatgaaagtgccctagcagaagttgcagcaggtagaatatcaggcagaggatgtcaggaagg

SEQ ID NO: 267331 - DNA, 482 bp, Homo sapiens
ccagacaacatagatattatttctggtagccttctttcctcaaggagaactccctgagaaaagattctaaattaaggtaatttctacacgtttgcttgtatttttactcacacttggtgtgcagatggctctagaaatgatttttctggaatactcttcttatgcaccctatatattggacaaattttctgactattacaacaaattgttccatttgtgtaaatatctgcagtgcatttaggcaaacacttgagaaaaatgtgtttttctcttagtgtctccatccaatctggatgttaaaatattacatatagacatacacttttgccttatatgaagcactaaactgccaactcgtgtattcctcatattctaatacacaagattaaaaatgcaaaaccatgacccaggcacattttcatttctcacaattgttcaagctattctactctctttgaaattgattctagagcttcaagata

SEQ ID NO: 267332 - DNA, 582 bp, Homo sapiens
ggagaccactgtgttttcactgttagaactgggctgtctctggacaagggccagccttgttacgagcagaagttctcggtactgtgtctgggatgtggctcttgctcctctaggtcgtgactacgttgtttatgaaagtcaagctcttacacctaaagccggtgctcatgggatttccttacagtgcattacattgttaaatttcaggcccagacgtggtctggcggcttgtctggaacacacagtggtgctccaagcatgcctctgcatggacgccttacccaccaacatccgtgggctccagaggcctcgcaccctcccctggccggccaccccgggatgcccccaggacctgcaccctcagctgacgctcctcttgggaaggtggttttgaacctctgtcatgtggttcctcccgtggttgggacacactcatctgcctctggtgtgacccatctctctttggtctttcctcgtccctccagtgccacccattttcgtacagaaactgaggatgcctctaattccgtttgagcatttgagtctcagtgtctgtgaccttgactccccctgtgcggccgc

SEQ ID NO: 267333 - DNA, 479 bp, Homo sapiens
tactgtaactgcccaatgagtacttcttgcccactgccaagatagagccagtttaccaagacaggggaattgcagtagagaaagagttgaatatacatagagccagctaaatgggagagtggagttttcttattacttaaatcagcctcccctaaaattcagaggtgagaatttttcaaggacagtttggtgggcagggcctagggaatggatgctgctgattggctagggatgcaatcataggggtgtagaaaaggtccttgtgcactgagtccacttttgggtgagagctaccaaggagctgctggtctgctggtcccggtagagccatctggtgtcaggaatgcaaaagtgtggccaggcacagtggcccacacttgtaatcctagcactttgggaggctgaggcaggaggaatgcttgagcccaggagctcgagaccagtctgggcaacatagtgagacctcttctctacaaaac

SEQ ID NO: 267334 - DNA, 405 bp, Homo sapiens
agttgacaaagggtggactcatgatggttaatattaagtgtcaacttgattggattgaaggatgtaaagtattgtttctgggtgtacctgagtgtttctgagtgttgccagaggagattaacatttgagacagtggacagggagaagaagactcaccctcagtgtgggtggtatcatccaataggctttcagcacggctagaaaaagcaggcagaaagcatattaatcttaaatttcatatatgcttttatggtgttgatactacttatgatgcctaaatgtacaatcgtgtacatttgtgcaaaaatgtacaaaaactggcaagctttcaagaaaatgacattcagtactatgtctggtgatgtcagaattttatatttgtaaatatattacaaatatatcaaa

SEQ ID NO: 267335 - DNA, 406 bp, Homo sapiens
agggtggggcctaatccaatatgactggtgtccttataagaagaggaaattaggacacagacaggcacagagcgatgaccatgtgaagacacagggaagagatggccacctaccaccacgccatggtcacctaccatccaagccatggtcacctatcaccaagccacagtcatctaccatccaagccaccgtcacctaccatccaagccatggccacctacctgccaagccatggccacctacccgccaagccatggtcacctacccaccaagtcatggtcgcctaccatccaaggagcgaggcctggaacagatccttccccagagccctcagtaggagccaaccctgctgacaccttgatctcagacttcaagcctccagaactgtgggacaatccttcactgt

SEQ ID NO: 267336 - DNA, 373 bp, Homo sapiens
gtcttagtctgttttgtgctgctgtaacaaaatacctgagactgggtaatttataaaaaatagaaaattattttctgatagttctgtaggcaaggaagtcaatgatcaagataccagcatgtaatgagggccttctgttgcactctcagatagcattagtttaaatggcaagagaaaggcagaactctatttgagagggctgttgcaaccttacagcatgatacatcttgtgaaatatggttttgaacatttttattaaaaatgtaggcatcaaaatctctaccatttgtgtcatgttataataataactataaaactgcattattcagaatatgtaacaataaaaattaatattaaaaagttttaaaatgta

SEQ ID NO: 267337 - DNA, 299 bp, Homo sapiens
tggttagttgtaaagattgaaatattctatgtgtggtgcctaatataatgcctggcacatagtaggcacttaataaattgtatctgtgatttttaattattaattttcctgcctcaagggtaatattatataaaggctgttagctgggttcaaatgtgttagatgatgggatgggtagatgaaggaacaataataaaaaaaggatatggaaaagaatgggtacttaaagtatagatttatttgtaataaatggaaaaatcagttgtataaattgtctttgtcaaataaaacatttacta

SEQ ID NO: 267338 - DNA, 293 bp, Homo sapiens
cattaggcagaaagaacacctccagcagtgtactctggcaccatttcctcctgagaggcccatcactttctttgtgctctaagaatgtgcttgccacatggtgccttaaggtagaggtaggtggacttttcacatagacatcacaagattgcctttggggcttcagtgagattcccgaggtgtttcagagtatattggagcaagagcataaaatactgagtatgaggcagaacttactgaagggattttatatctaaatctggttcatgtgtctagattttgtgtgtgtgtat

SEQ ID NO: 267339 - DNA, 590 bp, Homo sapiens
aaatatggtgttttaataattgtaattttttacataatatctggcagtagaagttctcagtataccatagtctttgcagttatcccgaatgaagttcgaaataatttaagttcccctgacgctctctcccctaacaaaacaaagcaagacaaacaaaaccaaaagaatagtaattctaggattttgccatcaccttatatggaaaactcagaaccttctatttcacatatgattcgttcactataattgttttatttacttcttcttacacttggctgtaaaatttaggcaagaatttaagtttctaatactatactaatgtcataagataatccatttaaaatgttaacaattattctatacatagttcattcaagcttagatcagttttgctgaatggttgttttatgttcatgtccttttagacctttttaggattgttctttgaaaagcctcaaattggccaggtgtggtggcttacacctgtaatcttagcactttggaggctgaggcaggcagatcgcttgagctcaggagttcgagaccagcttagcaacatagacaagacattacttgtctctactaaaagt

SEQ ID NO: 267340 - DNA, 744 bp, Homo sapiens
gcagtttctccctccactcaccggctccaggctggcaaagctgacaccagtgccacagaaaatgcaacccgctgccctctccccaaaatgtggggagagcacggttttgctatgaagatgtcggctttgacctgaggctgacttgagagcccagctgtcatgtctcttccaaataagctgctgaacttggaattatcttggctgaataattaatcaggactaaaaataacctcaaactgcctgggctttgcttaaatcctacacaggcacagcatcaccttacatcgaagacagattcaacgaatctgcctctcatcctaggtggccactaggcaactcctctgggaccatttcttcctgctctatgctcccatgaccttcattcatactccctcttcccctgctggaaacctacttcttttacctcctcaaaggtaaaaggaccagctggtgaacaaaagaatacatttgctctatctaaagagaagcattagagcaagggaggaaaaactgatgcaagacaaatgacttgggctcatcataaaatactgagcagtcagcagaacattaagaagagacttctactccccaccacacacataaccatctgcacacctgaatgccgagactaagcctcaccagacgccagcagcataaatgagaggagtcacttacccctctgaggctcaggcttctcgactggaaaaaaaaaaagataataaaaatatcagttcagttgggaat

SEQ ID NO: 267341 - DNA, 406 bp, Homo sapiens
aaaccaaaaccagaaaaacgatagaaaagtcaatgaaaccaatagctggttctttaaagtatgtatatttaaagaaccagaatacatacacatattttaaagaacaagaatgggccaggcatggtggctcatgcctgtaatcccaatactttgggaggccgaggcaggcggatcacctgaggtcagaggtttgagagcagcttgaccaacatggagaaaccccgtctctactaaaaatacaaaattagccaggcgtggtggcacatgcctatagtcccagctactcgggaggctgaggcaagagaaacacttgaacccaggaggtggaggttgtggtgagccgagattgtgccattgcactgtagcctgggcaacaagagtgaaactgtctcacagaaaaaaaaga

SEQ ID NO: 267342 - DNA, 641 bp, Homo sapiens
atggttcattacgttgccccattgcagagatccagagtgctcatggacagggccagaaagtctgagtggatgtgccctactgagagccagccttgactttaagagcaaagatgtgctttctcggagatctagggctcttgcttttatattcgacaagttgttttcaacacttcagtcttttcagctgttgggagaaggactgtaagattcctgccaactctacacaagaaatattacagaagtgctcatcaccaaaacaaatgactgatgtgactgttgacctatgagtgtcaaaattaacttaccacaagagagaaaaacgtctttaatatgtttaaaacatgttctgaaaggggacagaaaggatggagcccgagcacctaatattgtcatttcactgtcacacagcctgtgcccacagcatgaattttcctaggaaatgtcactctgatgccttctatgtagaagaaacttgaattgtcaaatactcaccaaactagcacagtcttccaaaaaccaggaagacctggaaccaaacagaaaatgaatattcagccaagcatgaaactttcaaagaaaataaactgcatctatccctattaaactctttgttcattctaaataaaaacaatttaattaat

SEQ ID NO: 267343 - DNA, 373 bp, Homo sapiens
tcttttctttggcgcttcagtgatcaaatctatcacaataaataagcctcgagcatcaagaactctgaagagaaagagaactgaattgatttctgaatgcgctaacacccagtggttctcaaagtgtggtgtggtcctggaaccctttgggagtttctgagaccctttcaggggatctgcaaggtcaaaaaaaaaaaaaaccttttatgacaatgctgagacttacttatttgacttgttcactgtggtgacgttttgcagacaatggtggttaaaagcgccggtggtttaacccaatcaaggcaggggcaccaaactgtattgctagtcaaagtacgcgtcactaatctgcactctcagttacaaaagaaaa

SEQ ID NO: 267344 - DNA, 343 bp, Homo sapiens
catggttcctactaacattctccctatacttttggcatttgatgtaaaaggggaaaatctcattttaaaaataataaaatgacttaaaagaaaaaatatagcaaggaagtatttcggtccatttcaactcgttaaaaaacagccttattaaatagttacttgctgtaatcacctgtattttgccaccctttttggcagcatttatggcagtgctgagtaacagtgtgacctctctggtttatctctctctgcctctgtgtgaaagcattactgtcactactgtaaatgggtggtttataggctgtaatgattcttcattaggtacattcctccaactcttggg

SEQ ID NO: 267345 - DNA, 462 bp, Homo sapiens
ttcgatggtgtgcctggtgaggttattattagtaacaatggtttccagtgaaagagtaattttcacagtggagaaggcttccccttccttcaggtcaaaagctgaacggagacgaaaatgacattaaccagtgcaggatcctgaaaagatgaaatgctcaacacctcccagctctaaattggactgggcgtttactagcgttttaagggccagagggaagttgaagcaactgccggggtaacacacacgtgaaaaatgtgaggccagacagtccgggcaaataaataaccctgtgctggcaataagagacgtgcctggagttttagcgcggggctgtaaaagttgacaggagccatttggactgaaaacggccgtgtggataacgctgccaggttttgccaagcgcccggctgttgaatactacaaaactgaatagatgaaaaagaaaacaacagccacaaa

SEQ ID NO: 267346 - DNA, 408 bp, Homo sapiens
attaatatgcatataattttaatgatacagtctttatggtctttcaattcccttacttaatacttactatttctgtgtttgttcatagtctgttggctcccgtggggccagcacaatgactcttgcaggtctctgtaattcatacggagccagacactgaactccaccttcagatatcccatgcccatgtgttgagggtgacaaggaatgatttctttcatctaaccagagttcaacaaatgcgtcttgatcttcaaagaaaacacctgagagtccacaacaagggccataggatgaatgggaacttttagtacatcggagagtttaaaaagcacataggggaatataagttgaaaagggatattcggcaacaaatcagactcttgtgcatagaaaggagagatccct

SEQ ID NO: 267347 - DNA, 391 bp, Homo sapiens
tttttttttttggagaaggagtctctctctgccgcccaggctggagtgcagtggtgcgatctctgcctcccaggttcaagtgattctcctgcctcagcttccggactagctgggattataggcacatgccaccacgcccagctcatttttacatttgtagtagagactgagttccaccatgttggtcaggctggtctcgaactcctgacctcatgatccacccacctcagcctcccaaagtgttgggattacaggcgtgagccaccacgcccagccaagtcatcatttctgatgcagcaccttctgaagattcagagccctggccacagtggggacactgcaggcttattcaatacaatgtggtgtcacaggcacaggggaccataggccg

SEQ ID NO: 267348 - DNA, 479 bp, Homo sapiens
aggaaggagagggctagttgtctgagagggaaactgcttaaggctgcagactaggaaatgggattccaggtttaagatagctcctttctggacctcagtccttcacctagtcacctagtcacagggtggatcgcctctaaggatacttagtggaaaaggaaccaaattcgggatggttctccttgctttaagccttgatgggagacggggaggccaacccttctctgcagaccgtgatcctcactagacagaggagctccaaacctgcccatctcatcccatgcaccgacggtgcctggcctggctccaaactcccgaaaggaactattttacaggtgccaaaaaggggacagtgttgataataataataaaatgaaacaatctgattggggcattgctggatcagaaaatgtgtgacctttttaaagttaaattgttaaaaaattttaactattaaacattttaaatattaaacctga

SEQ ID NO: 267349 - DNA, 524 bp, Homo sapiens
tgacagctctcaaacagattctttccacgaggaattagcccgcacacaacatgaatgggctcgttttatatcagaaggctgaattttaactgacaaattggacaggttccctaaggcaagggttgctaagctttgtcattctcgctaaaaatgtgatttataatatatttctatttgctagacactccttttcccaggaatgaagacccagcccagaaacaggaggtctgctcagtatcttgaccccatataaaaatatgctcctcaaaagttttcattagcatataaacagatatgcatcaatcaatctgcagcatggccacgtcagctttatttcattatgttttaatgatattttaagcagccaaactcttagaattcaggacagggcaagagtaacccacaatttactttagaattttatgttttaaaggaaagatctaagggtctgatgaaaggagttgtatttcctcggatcttttcttccactttataaaataaaaaccatttttgttgcttcttaa

SEQ ID NO: 267350 - DNA, 440 bp, Homo sapiens
cacttggcaaagttgaatatttttgtgcatatgtgtttgcgggttgcaatgtcatttctctccacctttgagccatgtgcttaaatatgcttgtaccaaattagagaattatcagtacatagtattgtaagagctcctcaagcatgcggtggatcacacagtgccctctgagccagcctgtgcgccattgtttggggaattaaaggtgcctaattagtgcgatcaagcccggaagcgagcactgcggaccttgtctgtagtctctggggcccactggtgatgtctgtgtcatcttctaccttcaactgtgctgtgaacccagttgaaatttgatcacattacagtatggctaaggggcctaatcagccgtaaacctcaggaaattcaaaaattagagagtccattaatcccaaggcccctccctttgtgagtgtctctaa

SEQ ID NO: 267351 - DNA, 701 bp, Homo sapiens
cttaagtatgcaaaatgacataatgttgaaagcctttctcagtagccttctccaaggggagcaatactgagacagtggactctggatcccgctgcctgggttcagactcagctctgatatatgccagagtggccttgggcaagatacttgatcctttctgtgcctcagtttcttcatctgaaaagggggctaatagcaatgcctaatttgtggcgtggctgtgaagattaagtttaaataatatatgtataatgcacccagaaccctgtcctggcacctaatacatctaaaaaataaaaagagcatttattttaaattgcacccctctgggagtttgggggtgggagtttttctgaggtcatttatttttaaagcacagaaactcttgcatgctgatatgtcttaaaaggaaaactttgacaattagagaggaaatgccagtctgtttactcatctgtttcaggataaggcacatttgtacgtttggttctataaccattgagtattaagaataaaaccatgcggacagtatttactgatctctgtttagatcccactgggtggatttttgaagacaaggatatgctgtcctgttggctaggtttcttgtaccctaggggttagctgctttcttgcctcttagtggtattgtttgagaattaatcatgattgtctgaataaagtttttgaaaattgttttc

SEQ ID NO: 267352 - DNA, 182 bp, Homo sapiens
cctgcccagtcctcttttctcagtatctttaggccatacagtgaggggttaagtgcataggcttttgcttaagatctacgtagatgagactcttccactttctgactattgacttggaacaagtgacttgatctttgtaaaaccgcctaaactggttgtgagaattaaatgaaataatctat

SEQ ID NO: 267353 - DNA, 582 bp, Homo sapiens
ccaacatggtcaaaccccatctctactaaaaacagaaaaaattagccgggcgtagtgacacatgcctgtaatctcagctactggggaggctgaggcaggagaatcacttgaacccgggaagcggaggttgcagtgagccaaaattgcgccattgcactatagcctgggtgacagggcaagactccatctcaaaaaaaatgaaaaaaatttgccaaacgctgttagttgctaaaaatgggtgttgagttatattgggattcaaaaattgtgctgctggttataatggggatctattcttaatttgtatatgtttaaatttttccacagtaaagtttaaggtgtgacttactacctttttctctaataaagcccagcggcaactgaaacaaagatgctctaaaataacactgtataaggtaagccaacaatattttgctactccatctgacaaacactgactgaatactaactacatgcaatgcagtactgaatgaatttaaaatgaatccctccaaagttcccatattacgatctagtcaatttcttgaactgcctttgtgcacaatggtacattttaaacag

SEQ ID NO: 267354 - DNA, 408 bp, Homo sapiens
acagatgtacaccatcacacccagataatttttgtatttttagtacagacggggttttgccatgttgtccaggctggtctgaactcctggcctcaagtgatctgcatacctcagcctcccaaagtgctgggattacaggcatgagccactgcctggccaagtgtagtatttttatgtgtcatgttaaaatggatctttgatttttttgttaattcagtgtttagaatcaagattataatacattaatgaaatgtcttggtcagtttctgagagtttactgtttttctagaacagcttgtgtaaaacaggaatgaacccttgaaatttggtagaactcattgtttatactaattggtctgttcagattctctatcagttcttgtgccagttttggcataatttaatggg

SEQ ID NO: 267355 - DNA, 779 bp, Homo sapiens
ccctgttgcataggcatttatttattcagcagctactacgtacgtgctggcccgcactgccgagggaccggacgcctgccccaggcgggacaatgccgggtgcagcgctggcggggcctggacgccaagcttcagggtccccagcccctcagtcagagggggcgcctcccaggccctggactcctctccagccgggtctacaccaccgtcccccgtcatcttcttctgggttactgagcagcttcttttaaaatagcaacaccgaggaaggccccgaagcccagtcttgcacctcgtggtgtgaagtcgtttaatcctgcccgctaatgcgtaaggactttccaccgtgtgcaggactccgcgctgggcaggggctctcgcagggtttgaaccgacctccgcctcccctgcgggttcacaggcctgcgaggaagtcgcgtgaaggagattcgctactgtgtgaggctggcctgcgcggcgtgggcagtagctgtccggggctggggacagctttcggctccccaggccatcccgtcggggcatctgcggccaatctcgaaggtggagaggctcagggttggaacagacttcacggaaggggtcctagaagaggaaaggggtcgtgtttgcccttagagcagtctgggcgtgaagcggaaactttaaaccaccagaaactctggagagcttggagcacctgggaaggagcaaccagagtgggccggaggtagggaaggaaggcacccacggcgaatttgcccgctttgaccgcatttagg

SEQ ID NO: 267356 - DNA, 690 bp, Homo sapiens
agtctatcagcaatttagaccttgttttgggtgggaaaacatttagaaggacaacaaccagttaggaggaggtagttttggtgatccagaagagaagagtgaagggcttgaacaagggactgatgggtgcacagggaggaacagatttgacaggtattaaggactaaggtggaagattgagtacataaaattacaagatgaccagttaaatttgaatctcagaacaactgaatatgtttctaatgtaaacgcatattggggacatacttaataatacagttaatttttgtttatttggagttggcgttatgtattttatctagcaactttattaaggaagtagaatagtcaggtcctggggactgactggacatagaatgggagagagcagatggaggaaggttttgaggatgatttcaaggctactggttggggatctgagtaaatgacagtaccacaagcagaatgagcttagcaagagaaggtgaactattcagtcttaggcatgttgttttaaagatgccaataggacagtccaggtagagatgtctaatgagcaattaaaagatacagagatcagaataggagacagggcttggaggaatacctgtagagggcactaatagtaccatccactggtgttctctttcaactaggttcctccatggccataaaggccaggccaccagg

SEQ ID NO: 267357 - DNA, 354 bp, Homo sapiens
tctagatgctggtttctgcagcagcctctctgcaacctgagggcagcaatgccgacaggcagcaagctgcaggcacacttgacagatgtgaagatctgggttctggggatgctgttgagctgctcgatgagcccactttggacctgccctaccgccagactttttgtgatccaagtgcaaggaaattacagggctatcaactctatctctttccaagaccagaaagtcggcagatggagaacggtttctagatggggagggaatctgcctttggaacttttagcgacctggtatggttcaacattccatcactatgcaaaaataaataaataaattgcagaccaacgtacaaag

SEQ ID NO: 267358 - DNA, 524 bp, Homo sapiens
gttgttgaaatatggttttggtttctataaaaatgcaaataatactgataagtataatgttttaagctcttatcattcatttggatcttaaagtgaatgtgtccttcttgttttttctttgaagcagattttaatgggggatgggaataagaaattcagggtactggaaacataaaaggaaaaaggaggccctaagaagaatcccgaagaagagaagctggaggctgagggttcattactttgttgagggtgtttcttatgacaccaaataagacccatggtgcctgagatactaatgagaggcaattgccgtcctagtgtgaggtggggcctctggcccacttttcttgacaatctaaacatccattcacaatgacccaactacacttcttcactctttcctttggtcttcaatgtgcctatgcctatcctccccagaacatatatagttttggctaaaattgctatgcagaaatttttggaaattcaccctggtagacagagcatgacagcaggcattaaaa

SEQ ID NO: 267359 - DNA, 460 bp, Homo sapiens
acatgtgatattttgaaaaaaagaaaattatgtgcatatctggataactgggacaaccttcaaccttcatctcaatcattgactacttctttgtggtaagaacattctaaatgttatcttctagctaatttgaaatacacaataaattattaactgtagttgtctatgtgccaattcagcattctcaggagcaatgggtgaaaattcctgtttttcaacttcctcgtcaacatttggtattgtctatattgtgtattttacccattctattaggttactaggattttttcaatattaaacatacatttacctaatgaaaatccagttggtcactttttatacttattgttagatgcactttctattcaggtctttgcccattttaaaattaaattgtgtggttttgttgttcaattgtaaggtaatttgtatatttgtaataaaagtccttttccaaata

SEQ ID NO: 267360 - DNA, 398 bp, Homo sapiens
atggtaaatattttatttgagaagaatcagtactgagaaagacagattatatggtagactaactaggaccagaaaaaccatccagggagtagtaagccaaacactggatgaacagagcctaagctgggctagtggtgatgcaatgaacatgcagctaccttgaggggaaactttgtctctaggcttattgttcagcagaaattgggttggggaaggtatgcctattaaatcgttcctggaaggacacttgaagaaaggaaaagtactaataaatggtaacctttactgaacgcctactatattcttaatgttttcatatttcattttatttattcctcaatataatcctgtggatattttatttatttatttatttatttatttgagacggagtctcc

SEQ ID NO: 267361 - DNA, 291 bp, Homo sapiens
ccccccctcaacatactggtgtgccccagggctttgtcctgccttccattctcttctttgtctctactccctccctgggttatctcagccagttctacggcctttaacactgcctataagtgttacaaacaactcccgaatttatttctcaaagtcagccctctctgtagaattctagactttatttccaattgcctgcagctccacatgggtatctaatgggcatctaaaacttagtatgaccaaaacagaactcttgatattccccccacatcctggcaaatggtactt

SEQ ID NO: 267362 - DNA, 533 bp, Homo sapiens
tgctcctctaatggcatccaacctccccgctgtgatcagcaatcataccatccgcccccattcttctctccccacaacccgcaccttctggcagcccatgaacatgtcacactcagactgtcctgccccaaatactatcttgtttgtcccacatctggaatgtgctttttcctctgactccccaaggagaaccctcccaggccccctcctctgcaacggcctctcctccaacctcagcaccgtcctgccccctcctctaccgcctgtccggtggagcaggcccggcccaagtctccatgcctggagggcagcccattctggacatagcgcatgcccagaactgcctccacagccggcttcctctgcggctctctcttcacaagacacggaagagttttggggcctgctggtgtggcattgcttctatgatggctaaaaacagctgggaagctagaagacacgcctgaaccaagcgcaggacagcgatttgttagccaaaagcttaaattcaggccccaaatccaagtgtggca

SEQ ID NO: 267363 - DNA, 747 bp, Homo sapiens
aactgctcagactcaagccaaattgaggtcaacatagtatgccaaatccatagtaaggcaaatccacccccctaccccaatacttaacacacagaatactatgtgatatagaatgcactgaagacctacggtcactggtagtttgagccacaggccttcctcatgtaaccagagacagaatgggctacttgcaaaaacgtaactccttgtgtgtatattaaatccataaaatctctggcagtaaagccagcctgaagggatggcctcaccatcttagaatactgagatctcaccagaacactgtaagccatataaacagtagggaaagagtcagcaacagtgaaaccatctgtttaaaatgggcaaaagcgattaagggaaaaaaaacaggtgaatttgaaaataaaccagggtaaggtaaattctagaaataatagcatttgaaatgaaaacctcacttaagttcactagaacagtaaacaggagattgctgaattttttgaagacagcaatgacctcacctagatgactcaagtttggggaacatcaagattttgacgggtactataatgcttaatatgtccaaattttcaaaatgaagtttctcagatattatttctgccataggagctacagtgtagagtatcacataagtatcttgggctagagaaatgcagtttatatataccgttggatttttataataaagtttcccaagacctgttaatttgccagaaatgcttctag

SEQ ID NO: 267364 - DNA, 693 bp, Homo sapiens
aactgctcagactcaagccaaattgaggtcaacatagtatgccaaatccatagtaaggcaaatccacccccctaccccaatacttaacacacagaatactatgtgatatagaatgcactgaagacctacggtcactggtagtttgagccacaggccttcctcatgtaaccagagacagaatgggctacttgcaaaaacgtaactccttgtgtgtatattaaatccataaaatctctggcagtaaagccagcctgaagggatggcctcaccatcttagaatactgagatctcaccagaacactgtaagccatataaacagtagggaaagagtcagcaacagtgaaaccatctgtttaaaatgggcaaaagcgattaagggaaaaaaaacaggtgaatttgaaaataaaccagggtaaggtaaattctagaaataatagcatttgaaatgaaaacagcaatgacctcacctagatgactcaagtttggggaacatcaagattttgacgggtactataatgcttaatatgtccaaattttcaaaatgaagtttctcagatattatttctgccataggagctacagtgtagagtatcacataagtatcttgggctagagaaatgcagtttatatataccgttggatttttataataaagtttcccaagacctgttaatttgccagaaatgcttctag

SEQ ID NO: 267365 - DNA, 176 bp, Homo sapiens
cggggggcgggggaggtggagacagagtctcactctgtcacccagtgatatctcattataatcattataaagcagcaagttaaagattactcagcagaactaatgcatagcttcagaaattagaggaaaattttcacacaaccaaataaaaccagggctggagaattttgatatga

SEQ ID NO: 267366 - DNA, 333 bp, Homo sapiens
ccccatcaacagtccttgagtcctccctcccctgccaccctaatggtcagtgagtccatgatacctcttgagtctactccctaacctgagtttgcatttgaaaataatttatttttagtacaattccccgcgtttccccattgacattttgtattagttggtgtatttgttattgttgatgcgccaatactgataagttattgtaaactacagcccatggtttacagtaggtttcctgtctgtgttgtacagtttctatggggttacacaaatgcataaagccatgtattccctcattaacaatttcatgcaaaatacaaaactgggcggctg

SEQ ID NO: 267367 - DNA, 329 bp, Homo sapiens
tttctgagccatccttccgtgatctgtaaaatgggggtaaccatgtaactaatgcctggggctgctgtggggattggtgggtgtgctccacgggaagcacacagcacagcacccggtccgcagtgggtacttggcctgtggtcactctcctgatgataccaggctccctctcccgtctgcgaggccctaggcagaaagaagcacagcacaggagacagttctcatacttgcctgcagggtttccatccctggagacgaaagcccttccctctgtaaatgacagctgtgttggaaataaatggatacctggaagatccaagaaatggaaa

SEQ ID NO: 267368 - DNA, 541 bp, Homo sapiens
ccattaggactcgaatgttgttgcctcctctaaagatgaaggtgtttatcttgctgtcctcagggggtcctctttttatctcttttctttttagttcatgagaccaacactgtttatttacaaatattttctgcacatgttgatgtaatgtaaatggaaaacacagtgctgcttcctttattttttggatggtgatatggtttggctttgtgttctcacccaaatctcatgtcaaattgtaatccccacatgtcaggggaggagcctggtgggaagcgatgtgatcatgggggaggatttcctccatggtggtctcgtgagctctcatgaattctgatggcttaaaagtgtggcacttcccacctcactctctctctttctcctgctgccatgtaagtaagacataccttgcttcctcttcaccttccaccatgattgtaagtttcctgaggtctccctagccatgcagaactatgagtcaattaaacctcttttctttataaattacccagtctcaggtagttttttatataaaagagtg

SEQ ID NO: 267369 - DNA, 646 bp, Homo sapiens
gtttagtctgaagtttgaaacttgataactagtatttgtaaactaatgaatcaactctcctatttaaagcagtcatcactctgttggagaatttttgttttttctcttggtacaattaaactctgtgatgacaaaagcatttggtactaataaagcattcataaatgcttaataagtaccttgccaagcactttccacactattttgtttagttcttaatggtcttttgaggaagaggcagagattgagtatctcacgcaggattataggggaatgaagactcggatctctattttgtgcccagactctgagctgctttatgaacacctcaattaaattacttcattggagtgatttgagtaatctatctatagtgtaatattttctatgaataattttctgtaaccttatttcataagttaatatctaaaaagtgtttatttccaaattgccaaataaaaggttttatattagtcattagaatgtaggcatctgtgtctctgtatgctaagaattataacccaaaattatttttgtgcttaaaaaataaatgatgtctccacgatggcacgcatatacttatgtaacaaacctgcacattctgcacatgtatcccggaacttaaaaaaattttttttccataact

SEQ ID NO: 267370 - DNA, 436 bp, Homo sapiens
cccaccgccatgggacctcactcactcatcccctctgggacccacccaccaccatgggacctcattcactcacaccctatgggacctgcccaccgccatgggaactcactcacaccctatgggacccgcttaccaccatgggacccgcttaccaccatgggacctcacgccctatgggacctgcttaccaccatgggacccgcttatcactcacgccctatgggacccgcccaccgccatgggacctcactcacgccctatgggacccgcccaccgccatgggacctcactcacgccctatgggacccgcccaccgccatgggacctcactcacgccctatgggacccgtccactgccatgggacctcactcactcatcccctgtgggacccactcactgccatgggacctcagtcactcacagctcttctttctg

SEQ ID NO: 267371 - DNA, 505 bp, Homo sapiens
ttggtcttgaaataagctcacaaatcaaggggaaaagcccagccaagtacagaacaataaccaaatacattacaatccagagctaccttgagaggaggaaataagaagcacatggcccttgcaggaaatgaggtcagagtcctgctttgggaggtgggcatcactgcggcatccgcagggtgcaggtcagtgggcaggcgcccctgctggaaggttcttgctgtctgtaaactgataagggtggaacccgctggaagggcagaacctgagtcacgttctttctgtttcttttactgttataaggcaacttggtgccttccaaccaaaaaagtccccctctctgatatctcaactgcctgtcttgaaagtgaaccttttggcaggagtttttatgggatttctcagttgttatttctctcctcccactgttttgggagaagtgtttttttttgttgttgttgttttaattaaaaataactggtgtttactgagcaaatcgtgtttg

SEQ ID NO: 267372 - DNA, 420 bp, Homo sapiens
ttcccgagctcctactcgccaaattatccttaaaaactccgatccctgttttgggggagacttgcttgttccccgactgtagcattgaccacagtgttgggaaatgcctccagcttccattgtgtcaactccttgagaagaaaaagaaatccctttcatctcagcaagctaagctcagcaccaaaaaagattacattgctaacacaacatcaagaaaaaagagctcaaaactctgcaaggcgtagagtctaaactgcaaaatatttgcaggcatcttttcagattattttaccttgtctaaggtctctcacctggtttcttcatcagtggttgatatttacttgcttagcattcagcttcacaagaaggtatttggaaacaactgcctttgtaaattatccccataggtaaaacaaagaa

SEQ ID NO: 267373 - DNA, 486 bp, Homo sapiens
tctttgtgcctaaggccccaaattaataatatccaagatttctagaagtatgttaaacgaagtttttgtttttacttatattgtctactataaaacttttaaaagtaaaatttaaaaacttgggtctgaaaaataacttcctactttaagatgagtggaaaaggcagttttctgcatgggcttaacttcttttgtgtcaaatgctcactttaagcctttcagtattcacaagtggtgcataaataatagtaaagttatcaaccacactctgaatgtgatttttccttttgaaggtgcttacctttatagggcacataaccatataatgttccaacagtagtttctggttcctctttctcagaatactgggttaaatatagtcacttcagtctgatgcttgtgatgtaaccgtttagacttgcctagggtaggtcattggactactaagtattaatcatcgcaagacagtgagctggaaagaaaaaa

SEQ ID NO: 267374 - DNA, 501 bp, Homo sapiens
ttggtaggttttttttaatcactgacttaatttcagaacccattattggtctgttcaggatttcaatttcttcctggcttaatgtcaggaggttaaataatcttgggtggagaaatagataaattccttgtttcgagggatttatatatttcttctaggttttctagtttgtctgcagagaggtggttttttgtacttctatgtagttggttgtatttcaactttgtcattcctgaatttattaagcatatgaaaataataaactataaaggaataaagaaaatagatttagaagaaaagaaagtgttcaaggaaattaaaaagcatattgaatcataattttatactttaaattgttttatctgtgaatataacattttacatatactatacatgaagataaacagatacttcgtgcagttggtaaccgaaagatagccagagtggctatgttaatgtgagacaaagtgagtttatgacaaaaatttttataagtaaaaa

SEQ ID NO: 267375 - DNA, 498 bp, Homo sapiens
tatttcctgaccttgttgtcatgtttagaaagccatactctaagaaaactaagtacttccactattttcttctagttctttagggccatttcctccttcattacatttattattcatttttaaaaattaaatattaaatatattttagtgataatttctgaataattgggatgttgatcttagtctaggatgttaaaagatagaaagtccatcttaagttatgatgtagaaaggtggagggagtattgctcccatccttactataacaaagagccagtcatctgcaaaatcatgttttcttgaaacaattacagagctaaggttgtagggcaaacagttaggctgatatttaaggaaaaacaggcccctccaatgaaaagcttgctgattcatggcaatcactggacactgtgaaatctggtaaaaataattcagctgaccaggggcagtggcttacgcctataatcccagcactttgggaggccgaggcaggtggat

SEQ ID NO: 267376 - DNA, 727 bp, Homo sapiens
gtaggttcccctcctttctccccctgagttcagttaacttatttttatcctgtagctctaactctggactcaatctttttttttcttttttaagagacaagctcttgctgtgtcccccaggttggacagtagtggtgcaatcatagctcaatagagcctcagactcttggcctgaagcaatcctcttgcctcagccttctgagtcactggaattataggcataagccagtgtgcccagctcgggaatcattctttatctcagtcatgtccaggctcctgtttgaacatagacctcatatactttagacttgacttctgatacctatccctgcagactctgtctcaagttcattattagtttcttgtgaagaacaccatatttggatgtttgtggctttgggtatgattctctcagtcttccaaactgtaaagctgggtttggtagtgttgtgaagtggccttagaatgtaacagatatgcagaatctggaaaacaaaatcacaaggcctgttaggaaagagcagtgattatatggagttgttagctcgatttgagttagtcaaatcaaatagtaattctacatacacatccttacatttattttgtgttaaaataatttttatatatacaatctcattttattcttatagcactgctgcagaataggcattattatcctcatgtatcagtcaaggtataacaagagaaacaagcagaaagatggatg

SEQ ID NO: 267377 - DNA, 282 bp, Homo sapiens
caagctgcacattgtcaggtcgaaacagcttgctattgattattccttcagtctgagaggaactgagttcatagaaaacttgaacgaaatgaaatgtataccctaaggggtaatgatttcagacaaacaaacgtaacaaacatctacttgttagaaccaatactttgcactttaaaatgtggttaagcctttaaggtaagaggtttcttttttctcttgcctctttagccttacagaaaggcacatcaagggtaggaatgatcttcaaagtgcctcacagaa

SEQ ID NO: 267378 - DNA, 499 bp, Homo sapiens
tgagtagcatctgctccagtaagcaaatgagcacatcctgattctccctgcaggtgcctgtctcgtctctctctctcctaatagtttgaaaaaaagatactaattttctgttttcccagctatgttcttgtaaggatgttagcgttgcttttatcagctctctacatctctaagctaagatctaaagctacgctgtatgattgtaattttttgtaatttagtgagatagactgtcctttttttttaatgtgcaaaggaaaccagagagttatgttatgcagaggttatcctatatatgtcagtcaggttggttaattatgtcttttcaatcttctatatcagtggtcagaaaactttctgtaaatgtcagatagtagcctttgtgagagatacagtctctgttgcatctaccaaactctgcagctgtagtgttaagcagccatagataatacataaacaaatgaatgtggctgtgttccaagaaaactttatttacaaa

SEQ ID NO: 267379 - DNA, 361 bp, Homo sapiens
tcctgagacagagtcttgctctgttgcccaggctggagtgcagtggtgagatctcggctcactgcaagctccgcctcccaggttcacgccattctcctgcctcagcctcccgagtagctgggactataggcacccgccaccacccccatggcccagcacagtctggcaccctctacagtaatccccaaagcatccccataggagatagagccaggctcctccttccacccagcctgtgagtggggctgtgcctgtttgcagggctcaggctgtgggctagccctggatgggactcctctcttgcagcaccagcctagagtggccttcatttgcagtctgaggctctgtggccctccctgct

SEQ ID NO: 267380 - DNA, 522 bp, Homo sapiens
aaaacccacgttttcttagactatcctacatttgcttcactggaagctgcatgaaagctgagattatgcttgtaatatctctagcacgtggcaggcatgaagtaaagacctggaacagagtctagtatagctctccagagctgcagctctgagtcagactggtcagtacatatctcagccctgccaagcttcctagcctccctgtgccttggcatcctctcatagaagagggagataaggatcctgcaggggctgccggccagaactgctcagagtgggctgccccattacttgttgaccctcacccggagcagacgagggcagggctgggaaggatggggagggacatagaggattcggttcctcccccaccttgtttcttgagtgtttcctaatcacttgatgggtggtaccacctagaattcttccagcagcctgtaatgggagggctacaggttagccctggaacctgcaatcaaaccacctttgaatctgtgtgtcattaaaagtagatataaatgg

SEQ ID NO: 267381 - DNA, 263 bp, Homo sapiens
atggtattaccctgccaccttctggccaggttaacagttgcagccccgggaagggattactagagattgtagttcttaggcctgcatttgtattcaaaaagacagaaacaggaaaaatatcatttttttgtttgtttgtttgttttcctttgcaaagcaggaactttgaatatgttagatatgattgtaaagagcacaagatgtttcccttgttggcagatgatcactgttggtctgaggaggatgatctgttccagagctag

SEQ ID NO: 267382 - DNA, 628 bp, Homo sapiens
taaagtagctgggcatgcctgtagtttcagcttctctggacgctgaggcaggaggattgcttcagcccggaaagtcaagcctacagtgagctctgatcatgccactgcactccagcctgggcaacagagtaagactttgtctcaaataaataattaggtaaataaataaatttaaacaggtggtcctccctgagtttgtttaacagctcagttgtgtcatcaagaactcaggcttcttaaaacatctccccttcccccaccattttgttggcttttcttatttgagcttgtcacctcgtggtcccaaaatggccgctgctttctcagtcatcacatcctcataatgtctcatccacaagcatacgagggagtctcataggagtacaggaagagcaatgttactagtgtttttagttcaaatagctttttatatgatttgttatgtgaactatagattacaccaaaaagcagtaaagctaattttgaaaacacataaaatacagaaaagaataaaaactcatttagaatctcaaagctgggtaggcagcaggcaaacggaggcaggaatgtgagagtttttttctacattccctattgtggcatatgtgcattctgatgcaaaacctga

SEQ ID NO: 267383 - DNA, 514 bp, Homo sapiens
ccactgcacccagccagccattattctgctctctgtctctcagtttagaattgtttttagctcctacgtataatatcatagactttcccctaatttatcagagattgtaatagtgaaaaattataagcaaccaaagtatccatcaataatggataaatgaattgcagtgtacttatatgatagcctgctatctagtagttaaccagagatgaactatatttacatatatctgatttaggatttttcaacctcagtgctactgacattttggatctgataatttattgtgagggactggcttgcacttcataggacatttaacagcatccctggcctctatccagtaaatatcaatagcacttctccctcatcccccaatcatgacaaccaaaaatgtctccagacattgccagaggtacctgggcggcaaaatcgtccctggttgggaaccactgatctaaatgggaaccactgatctaaatgaatagatttcaaaaacataatgcagtgaaaa

SEQ ID NO: 267384 - DNA, 693 bp, Homo sapiens
tgagatagtgtctcactctgtcacccaggctggagtacagtgggccaagattgcaccactgcactccagcctgggcgacagagcaagacttgggctcaaaaaaaaaaaaaaaaaattcaatggcctttgtgcaaggttgtgggttttgtggtcttttgtgatagtttttgttatcgggcatatggaccctctcttcatggccttccctagctctatttgttagggttttcttaacattagtcactctgttttgattctgacaactttcactttcaacatgaattttggaggggatgccatcttttaaatcatcgtacctggtaaaagggactttggagatgggattaagtgaagggccttcagatggggggttatcctgcgctatccaggtaggtcccatataatcacgatcatgagagggaggtaggagcttcacagttggacagaagatgtgaccacagaagcaggggtcagaggagggaagatgctggctttgaaggcagaggaaggggccacaagccaaggaatgtggagacccctagaagctggaaaaggcagggacagattctcccctaccctagagcctccagaaggagccagccctgccaacaccttgactttacctcagtgagataatttagacttctgacctcagaactgtaagagaataaatgcttgtgtttcgaccactga

SEQ ID NO: 267385 - DNA, 586 bp, Homo sapiens
ccaatctattttcttaactgctattccaaatgttaaattcatatttaaaagatagattgtttatacactaatagtgatagagaagtatggaaaaaaatgcagaaatttaaaagtctgtagttcataccatccctgcccctaacttcaatctgacttgttgaaacaacacattttatgggttgatgttttacttacactttcacattttttgactttttattaagtatagataaaaagacttataagaaccttataagaaattcttgtaattcttataaggttcttagaagtctttttatcatctttatcttttaagtcttcccccgcaacttagggggatatggatgtctatgaaagcatatataattcataaataggaatatgggctcctagaataagtaatatttaattattagtgaaaagcaccattttgagaggttttttgtgtttgtttgagactgagtctcgctcttctactgcccatgctggagtgcagtggcgtgatctccactcactgcagcctccacctcctaggtttaagcaattctcagcctcctgagtggctgaaattacaggcgtgtgccac

SEQ ID NO: 267386 - DNA, 613 bp, Homo sapiens
tctccttgttggaatagaaggtattgatgataagagacatgagttgggcaatttctgcctgaaaggcaaaagtctccacctccttctctccaaggtgcacttcctcaggcatcttgaaaagaaaaggcttacacgtattaaagagcaaggtaggctggctctccaacacacaggcagcacaaacgctgtgccggagtgactccagagccgttctgtgactttttcaacttccaggtcctccaaaagctggggagaatctgagagctggagggagctctctctagttctttcctcctcgtctcttctaaggattttgttagcatctatctccctttttatgtgaaatacctggagtgtatttttctttttttttattttttattttatttttattttttagttattattattattattatactttaagttttagggtacatgtgcacaatgtgcaggtttgttacatatgtatacatgtgccatgttggtgtgctgcacccattaactcgtcatttagcattaggtatatctcctaatgctatccctcccccctcccatttgtgcccatcctgttgtgaccaaccccgttttaaacatgtttcaatagatccag

SEQ ID NO: 267387 - DNA, 615 bp, Homo sapiens
gggcatatgctaagtgggcagcatggagggcaggcaggcttggtaccccagcagagctcacagccagtgctatcacagaagcccatgggcaccatgccaccttccatgtgcatgaagccgcagcaattggcaatgcagcagcagctggcaaacagcttcttcccagatacagaagaggaaacagaagtggaggttaagtaacttgtccaagattacacagcagctagcagagctagatctgaagtctggtcggtactcctcttaactgtttactgcctcaggattccaggagagggagtttgggttagtccttaagaaagtgggagctctggccaggtgctgtggctcacgcctttaatcccagcactttgggaggctgaggcgggtggatcacctgaggtcaggagttccagaccagcctggccaacatggtgaaacctcgtttctactaaaaatacaaaaattagctgggcttggtggtgggcacctgtaatcacagctactcggcaggctgaggcaggagaatcgcttgaacccaggaagcagaggttgcagtgagcctaaattgcaccattgcactccagcctgggtgacaagagcaagactctgtcttta

SEQ ID NO: 267388 - DNA, 462 bp, Homo sapiens
ttggttgaaagaaaatgtatttgtggaagaaaaaagaaccttctgggagattctgaagtctagtggttgggtgacgaggctgaggcaggagaatggcttgaacctgggaggcagagcttgcagtgagttattgttattgctgtcataacgatgagcacttcacaacagctgtcaccacccgatgcagcagcaattgcatggaatcataacttaaaaaattaacaaccagatttctgaagttagagttcttagtttcaaatcttgtctgcatcaaaattgctctgtgactttgggaaagtttaaccactgatttctaccttgaagaaaaaaatgagtataataatatctatctcgtaaaatggtggtgaagatcacatgggataatgcaaatgaagtttgtatcttattgcctgatacataaagtatattcaataaatatttgccattatgattaccattaaa

SEQ ID NO: 267389 - DNA, 433 bp, Homo sapiens
taatttacagtgatcactatctgatacttgtcttgcatatttatttttgtgtttgtcttttgtatgtcttctcctgctccactagaagtaagcaccattcagaacagaagccttgcctgtattttcattgatattacttgaaccttgaagtaaacaatgatgttctgcagatggagggagcatgggagaacattggaggaattgaaagaaagctggtgtggctgaaagtagataagagtgagtgacagagctcaactagggagatattacaatggtgagtgatggtaacagcatgacttagttgggtagcagtggagatggggaaagtggatggaccaaagaaatatttaggggtgccgggcaccctggctcatgcctgtaatcccagcactttgggaggccgaggcgggaggatcacgaggtcaggagatca

SEQ ID NO: 267390 - DNA, 307 bp, Homo sapiens
ctcatattaaatacattttaatttaatatgcaaatgttctcatccttctctgtgtaggtaaacctctctccttatggttagttgtgaaattttggtatagtaatatgaaagaaaacatgtccacaaatatattcattttattttcaattgcattgtccttttggcagttggctacagaagtatcttgtttaagaaacactagtcaaaacttttttactgactggggcaattttattaaaaaacactttagttatctgtgataatgtttcacaaacaccaagaaaagttatattgaaattagagctac

SEQ ID NO: 267391 - DNA, 593 bp, Homo sapiens
tactactacagtcaacttaaatagtggacaattagctacagagacaagattttaagtgataaattttgattttcacccttaagaaaataattcattcttcacatatatgcattagtgcacgtcaaaattttacaaaacatagaaagccaaattagtgtcgacaggattgttgataatcaataaagggcttaatagaatacaaaatataatttgaaaaattttttttgcatgttacatttttggagatctagagatagtcacatgttatattaataagtagactccgtggtgaaatgtggggggctgcagtgttggtgggggtggagggggcttgtggtggatgggggggggcggtggggtgtctcgcctcgcgactcttttccttctatgtccctttccctcacctcctttacccgtccgcgcttgatctgtatagttttgttttgtcacgttgtgttctgaatccccccttctcctaccactcgttatcgtcgtctctctgttgttcacccccctctttttttctctcgtcctcctctcgtcttactgttgtatcttcagtctatcttacctcgtacttctaccgtttcgcc

SEQ ID NO: 267392 - DNA, 473 bp, Homo sapiens
agtgggtttcaagaccaatggtgacagtgacatcaataactcaagtttcgatcaatctctcaaaactgataaaatgaccaaaaagggggaattgttaaagcgaactaaatatggcctgagaaggactccgtacttctgtattggagtccctgtgaacaaactgagcctaacttaataggtagacaagattgaaaacctaaattaggagtatgtacctgtcacaattgctgagtctcggccagtcccagcagccgtacttcaatcactcatacactgctgaatgttcaaactgtgtgtaaataaggcaaatgccaacctgtaactaatccaggtgtttctctacctcacttccctttttttgtctataaatcttccaccacgtggctgcactggagtctctctgaatctgctgtaattctgggggctgcccgatgtgcaaatcattcattgctcaattaaactcctttaaattt

SEQ ID NO: 267393 - DNA, 649 bp, Homo sapiens
ccctatattctcaccacctacgtgatattccaaaatactatataacatgcataccatgcccaattatatatactggatttcagtgatatgaggttaagaaatatccagaccatatataatatataatatgttgttttaaaaaatacagggcacatatttgtatagctaaagatatgattacataagtatagagaaggtttgggagaatacataccgacttactaaaatcaattcatgaagtaataagggaaaaaaggaaattaggcagcgcaggagtaagtgttcttagcactttcagaaataactgaaagtcatttaaataaaaaaaattcaggttgggcatactggctcacccctgtaatcccagcactttgggaggctgagatgggtgaatcacatgaggtcaggagttcaagattggcctggctaacatggaaactctgtctctacaaaaacacaaaaattaaccgggcatggtggcgggtgcttgtaatcccagctacttgggaggctgaggcaggggaattgcttgaacccaggagatagaggttgcagtgaaccaagatcctgcactgcactccagcctgggcaacaagagtgaaactccatctcaaaaaatacataagtaaataaaattaaaaacaaaatt

SEQ ID NO: 267394 - DNA, 492 bp, Homo sapiens
aatcagttgtgtttattctcaaacttatttatgctacttatttctaattttgtaatttaaaaaatttaattatcacataaataagttaaatgtaactgtttaaaagctatgatctacatgaaaatcaaatttaatgttttggaaagtactgaaaattactttaaaatcgctttcagataaactacaggtaaggaaacagaaaatattgggaaaaatcaggaaaacctaaatggattctgctttggattgctttatttatggcttttagttcttaattcacataaataaaataaaacaactggcgtttattgaggatacgttatggatttgtttgtgtcggccctacatttgaagtttggcaaatgaataggtatatagcttaagttaaactaatatgttatgatatgtgtgtatctttttattatttcagttttaacctacttctttgattaaacaagtaattgttggtaccaatcttataagaagtctttt

SEQ ID NO: 267395 - DNA, 470 bp, Homo sapiens
taattgcaacactattcacaatagtaaaaacagaattaaaccagttacccatgaatcttttattggttaagaaaaaatgatgtacttatacaacctccaatactatgcagcaacagaagagcatgaagtaacatcttttgcagcaacatgaatgcagcagaaggccattctaagcaaattaatgcatcagaaaaacaaatgccacatgttctcactcatacatggacgctaaaaattgggtgcacatggaaacaaagatgaaaacaagaaacactgggaattctaaagagaaggaggaaggaagggagacaagcattgaaaatctggttaggtatgatgtatactacttgggcaatggaataattaagtgtccaaacctcaacatcatatagtatacatgttttacaaatctgcacatgtaccccttagatataaaataaaaacaaaatgtttttggtataatgaaatgt

SEQ ID NO: 267396 - DNA, 825 bp, Homo sapiens
agaaaagctggaatgccgttaaaacaacaccctgtcatctttcaatcagtccttagctgaagttaaaatcccactcattctgcatgatccagcctctgtagcatagagtgagtagccccttaacaagaaccaaaatggagggtacggatgaggctcagatcgtcaccacctggagaatagagacagtgactgagtcaccaggaaatctgtcccctgctcatcccagaatccccgagctttgactttttaagagaacatgtgacagataatgccatctgagaaggattgcctcctttactgtatgttttccactgagatgaagattttggtcatttcctcattcatgttcctgcttttcaaaacccaagcaagaaaggaaacttctacagtgactttctcattatgaaatcttagcattcactagtcggccataatggaaaaccagccaaatggacacatatacactggtctgtacccgcagagaaagaaatgcaaatctctgtgatcagaaaactatcctatcttgtacattgttaaaagtctgcctccaaaaagtttacttctggaatactgtaattgaatagaatcagggatcctacctgtgtccttcaactttcacatcttgtctactcaagtaagggttgaatttgcatgactatatctaaggttcgagggcttacctgttggcagtagacccagtagtctatgaatggaaatgggcaaacctgtgacctcccaaaactttaatatgaaagttttgtttgtgtatactcatggcattattcttttaataaagagataatctatatagttttcttttttaaa

SEQ ID NO: 267397 - DNA, 497 bp, Homo sapiens
agaaaagctggaatgccgttaaaacaacaccctgtcatctttcaatcagtccttagctgaagttaaaatcccactcattctgcatgatccagcctctgtagcatagagtgagtagccccttaacaagaaccaaaatggagggtacggatgaggctcagatcgtcaccacctggagaatagagacagtgactgagtcaccaggaaatctgtcccctgctcatcccagaatccccgagctttgactttttaagagaacatgtgacagataatgccatctgagaagcttaggcaactcagtcatcaatgtgtcctcgagaagagcatatccccaaattggaaaataatccttcagggcatctgaacataaccacatttggcttactttgtgaagcagttgtctgaatagaataagactggcttggaacgagattcacagagcaaccaaataaagatgattgagtgaatggctaaagaaataaatatgttcgaatctgtac

SEQ ID NO: 267398 - DNA, 434 bp, Homo sapiens
ggatttctgggacagatgaaggatttttcttaccggtgaaaagaacaactaatttctggcattgttctgaaacactgcagctctcttcagcgtagtgtctgtattgagcagccagctgaagtccagtttctcatccctcaggccttctcctcttcagatggactgcagggggccacgagactccagtggcagccgctcaactctgaacacagccactgcatagagggttcagtgaagtgagtggggttgttactccccaccaagcagtgagtggctttctgctgttccactccagaggcctcacctcctgtgtttttaaactccagtttctgtctttccctgttggcaccaaacttatcttcataaaatataaatcaaatcacattatttccccatgaaatttgttgacgcctgtggctagtgggatcggtgcc

SEQ ID NO: 267399 - DNA, 533 bp, Homo sapiens
tttcaactcactacttttgttcttatgtctctttattctccagccctgttttctttagacgctgactcctgctgtctaccagatcctcgtggtacaatgactggtgtagactggcttgttgaagtcactctctggatctgagcaacgctggctgagccgtgatgaagtattcctatccatccactatgcttcacagtgggaatctctcactgttcatcaccgctgccctagcagccgcaggccttctcctcttcagatggactgcagggggccacgagactccagtggcagccgctcaactctgaacacagccactgcatagagggttcagtgaagtgagtggggttgttactccccaccaagcagtgagtggctttctgctgttccactccagaggcctcacctcctgtgtttttaaactccagtttctgtctttccctgttggcaccaaacttatcttcataaaatataaatcaaatcacattatttccccatgaaatttgttgacgcctgtggctagtgggatcggtgcc

SEQ ID NO: 267400 - DNA, 2161 bp, Homo sapiens
gcgagggaacggcgggcgggcgcggagcatgcggagcggcgccccgggcggcccccgggcttgggcgagggcttgggccaggcgcgcgggccgttggggttcggagcttcgtgggacccgcggccggcgcggggacgtacggcagtgactcggggctcaccgggggccagtgccgggccagggggccagccccgcccgcgtctcggcccggacggcccggcgaggaagctcccatgcgggaccgcgcggcccggtgagggcgcgcgcgggcgggcggggacgcagccggcaccatgtccatgctgcccaccttcggcttcacgcaggagcaagtggcgtgcgtgtgcgaggtgctgcagcagggcggcaacatcgagcggctgggccgcttcctgtggtcgctgcccgcctgcgagcaccttcacaagaatgaaagcgtgctcaaggccaaggccgtggtggccttccaccgcggcaacttccgcgagctctacaagatcctggagagccaccagttctcgccgcacaaccacgccaagctgcagcagctgtggctcaaggcacactacatcgaggcggagaagctgcgcggccgacccctgggcgccgtgggcaaataccgcgtgcgccgcaaattcccgctgccgcgctccatctgggacggcgaggagaccagctactgcttcaaggaaaagagtcgcagcgtgctgcgcgagtggtacgcgcacaacccctacccttcaccccgcgagaagcgtgagctggcggaggccacgggcctcaccaccacacaggtcagcaactggttcaagaaccggcggcagcgcgaccgggcggccgaggccaaggaaagggagaacaacgagaactccaattctaacagccacaacccgctgaatggcagcggcaagtcggtgttaggcagctcggaggatgagaagactccatcggggacgccagaccactcatcatccagccccgcactgctcctcagcccgccgccccctgggctgccgtccctgcacagcctgggccaccctccgggccccagcgcagtgccagtgccggtgccaggcggaggtggagcggacccactgcaacaccaccatggcctgcaggactccatcctcaaccccatgtcagccaacctcgtggacctgggctcctagaacccatttgccttgatgagcttgccttttgtgacttgacactggggacgtggagtggcggtgtccaggggcgccccgcccctgcggccccaccaggtactgaaagacccgcaggctgagcgggtagaacagccgggtagggcagatagctgtctatgttggttcttgtttgggatttattttcaacaagttacttttaggatccttttggggctggagactgagtcttgaaccacagaagggaataaattatacaccactgtcattctctctctccctctgtctcttccttttaccctctcttgtcttgccttttccccctttcctcttcctttcccttccttctcttttcttttttctgctttctgtctttctccctctccttgtattgctttccttctagatttctagcttgccaccgttcattctctccttctgtctctccctttctctctccttctctgtttctcctctcttctctcctgccagtctcttgtactctgtgtcctggtccctccgtatgtacccctgtctttctcctcctgactggtggtctatctgcccctacctctggccctcgctttaccggagtagggggtgggagagggaagaggagagaaaagacagggactttgaacctaggccatctcctgaggccttttccctcgcccatgtgggtcagtgggagctgcaggtgtcagcttttcgtctagtaacttaagtgagagagaaagggcagcgccacagaagcccctaaacgccgcctcgtcatacgcccctcctccttctctcttggcgaggccccgccacaccgcgctcttcctcccgggactgtgactacagcgctcccggctgagcgcgccccccgagccgccgacttgccgtctccccgtaatgccctcatgtgaatgttcttcgggaaatatttctgcttttattttataataaaattagaaatcataaatatataaatggttatatgccacaaggcc

SEQ ID NO: 267401 - DNA, 396 bp, Homo sapiens
caggtcatatctattatatttaaaattcaaggagagactacattagagatgctattagatcaacttctaatttcaaagatttctaagatatggaacagttactccttatacaaattaaaaaagcaaatgctgaagaaattcagctacatggatacaccatgaggtggaaagatgctccataactcttagttaaactgcactaattacacataaaaggaaaatgtttcatttcactgtaatttggaaaccaaagaaagaaaagactgaatttttacatactgttaaagagattgcgtatctgttctaagtttaagacagaggcaaaatgtattttattcatttgtcctgcaccgtttagaaataaaattcaacttccttttaattttttttaagaat

SEQ ID NO: 267402 - DNA, 276 bp, Homo sapiens
aacaatggaaaacttttcaaaagaatttgaagaaaacacacaacatttgttagatcatctctctattgtttacgtagctacagatgaatctgagacctcagatgattcagcagtaaatatgtatatattacattcaggaaacagccttatatggatacaggatatacgccatttctcacagagagatgctctgtctctgcagtttgaaccagtactactacctacttctacaacaaactttacaaaaattgcttcttttacctgcaaaggtacaga

SEQ ID NO: 267403 - DNA, 655 bp, Homo sapiens
gctgatcctatgtggattgcattgggctttcctgaaatattccattcctataacccatatcccaggctccatccttagcctatgatccagcctcaacagagtggcatgttcaagactgctctgtggtgtttctgctctcacagtaaaagcccacactctcttagccaaagcccctcatggcctgcccttccaccttttccctccctctgcactatgccccgcttcttcccctcccttccagcattctccccaaccccaaaacttagaatagaacctggcacaaaatatcaatatttgttgaacaaaggattcaaatgagttaaatgatttaaaaaaggaaattaaaaactactgctatatggaataaggagccattaaaatctcctaagattttttttttttttggaagcatgtgaggagtatatttttgggagtatgtcctttttgggaatatgtgaggtcagctctctaaatatacatttattctagagtgttacagacttttaaaaaaatttttatttatttattttttttaaagaatgcattcctttgttcatgagggccatcctcccttccggcccctattgctccttgccttacctcccttgctcgacctctttgactgcggcacaccgtccgcgcccccttcggcccg

SEQ ID NO: 267404 - DNA, 411 bp, Homo sapiens
gggccctccatagcaggtctaagaccaaggaagtgagttgggcttcctcaaggcaattcacaatccagagggttgcagccagcctgaggtcaaactaacccaattttcctcctatcctctgaagccgtagggaaagaaggccctgacccatgcagtcaagagaggtcaacatcctaagcagagaacaaaggtggaaaagggtggagggtgaatgtggagaggccagtgatggatatgtggcatgcagatgaaagttcgtctgtgttgaaattcttgtttctcatagatgacgggttgatgggtgcagcaaaccaccatggcacgtgtatacctatggaacaaacctgcatattctgcatgtgtaccccagaacttaaagtataataaaaatatttttaaaaaagaaattca

SEQ ID NO: 267405 - DNA, 391 bp, Homo sapiens
ctgattgtaagattttaaacttttatgtaataaacaaaggtataagcctaacctggcatgagggattttctgtgatctcacccacagtaaaagtcaaagtccttaatataacctaagacatcttacctgatattgtccatatctcctttttccttacccctttaactctctggcctcaaattttcctactgttttcctccctttttctactctagctgttgtttcttcagtaagctggacataggcatgtttccaattggggtttttgtatcctttgccaagaacgcgtttctccagatggctccatggctcccttccttccttcttttagcttattaattgaaacccatttttttcagacatcttccctcttcatcctccctaaaaatgg

SEQ ID NO: 267406 - DNA, 394 bp, Homo sapiens
tgttctttttctccatccagtcttttctgcttttttaactatattaataacaatgtttatattcaatgtatatattttcctcaaagagtacatatgtagtatattttctgaatctttgcatatctaaaattgtgcttttccctcacatatgggagcttttctggatgtgaaattaatcttgggttacctcagaactctatataaatgttactccattgtcttctcgtgtttagagttgtgaataaaatgtctgattaatattggtgtctgggccgggcgtggtggctcacggctgtaatctgagcactttgggaggctgagacgggcagatcacgaggtcaggagatcgagaccatcctggctaacacagtgaaaccccgtctctactaaaaat

SEQ ID NO: 267407 - DNA, 352 bp, Homo sapiens
aaatacttcctacaggagtctttagttttgaagttataaaaaaaaattatcagaggaaatatgactaatgtatatgcttggttgagctgcattttcttactgtttctatacttagtattttaacaggatgtgattgataggaatttaacattctaattctttaagacaatcatgaagttctgatagtttcttagaaatggaaattgtgtcattatattttgttgttttattgttgtgcattttaacaaaagaggtgacttcacatgtaccctaaaacttaaagtataataataacaaacaaaacaaaacacatgtaccctaaaacttaaagtataataatacaaaaaaaaga

SEQ ID NO: 267408 - DNA, 414 bp, Homo sapiens
gacaccttgggcatttctgtgtcattatgtgttggcgatgggaggcgtgtgggtgggggtgttaaggatatctgcctcaattccacaacccattttataagtgtaagaaaagaagggtagagggtgtttttttctggttttgtataaatgtgagaaacctgaaggcagagatgacagacccccgacaaggcagtaaattacatgctggatgtgtgtttgtaacacaagtcacattaatgaagatgaatgccacttcaggttcaccccagcagaattacctcatgtgacagggaaagtataatcctacctcataaaactctggacaccatgtactctatgactaagctgacttgtgaatttcacaggcactagggtcgtatttagattggatcaagctcaaaaaagggcacccag

SEQ ID NO: 267409 - DNA, 256 bp, Homo sapiens
ggtgaggggcactgggaaatggtgaggggcactgggaaatggtgaagggcactgggaaatggtgaggggcactggggaatggtgaggggcactgggaaatggtgagaggcactggggaatggtgagaggcactgggaaatggtgaggggcactgggaaatggtgaggggcactggggaatggtgaggggcactggggaatggtgaggggcactgggaaatggtgagaggcactgggaaatggtgagaggcactggg

SEQ ID NO: 267410 - DNA, 538 bp, Homo sapiens
atttttggtttctctttggggcctttcccataggcactcttcactgtccttgccttttctcctgagtctgtttttctttctccctcctaaccagcttctggctcctcaagctgctgttcctgttaggtctctgtgctattgccttctgcattcctgatgagcatctcttcccaggtactctccctcccacactcttggcaggagtaggctaagttttctaagataacaagtgggtaagaagaggagtaatggccgggtgcagtggctcacgcctgtaatcccagcactttgggaggctgaggcgggcggatcacgaggtcaagagatcaagacaatcctggctaacatggtgaaaccccatctctactaaaaatacaaaatattagccgggcatggtggcacgcacctgtaatcccagctgctcaggaggtggaggcagaagaatcacttgaacccgggaggcagaggttgcagtgagctgaaatcacaccactgcactctagcctgggtgacagagcaagactctgtctcaaaaaaa

SEQ ID NO: 267411 - DNA, 362 bp, Homo sapiens
tgagacagtctagctctgttgtccaggctagagtgcagtggcgcgatctcggctcactgcaacctccgcctcccaggttcaagcaattctcttgcttcagcttcctgagtaactgggactacgggtgcgcatcagcacgcctggctaatttttgtatttttagtagaaacggggtttcatcatgttggtcaggctggtctaaaactcctgacctcaggtgatccacccgccttggacctcccaaagtgctgggattacaggcatgagccactgcgccccgcctataatttttaacttatttaatactttctatatgccagggactgtttaaagaggatacagatattaacttacatcctcac

SEQ ID NO: 267412 - DNA, 479 bp, Homo sapiens
agcattttcatctgctttggtttcagccagagataaactgttcctgctgcaaagtaattaatatcagtcgcctggaaagcagaaattgggagacaacaggctcctctttcttgataaacagattgttgggtttcctttgggaggggaaggaataaccttgaagagagcccttgacctgatctatgtagagggttggaaaattcacagcaatacaaagctatggaaacagactgtcatccacatatatgttgggtgatgggggagacatgaagagtgagagactgtggagacaggaaagtagcaacatttgccatgagattttcctcgaaaccatctccttcttgaatttagacactcattgtttatgtgcagtggccctaggtacagaagggtcaccaccccaaggagaactataccctccggactcataaaccaaattctagccagattctcccggaataaaatactacagttcatcc

SEQ ID NO: 267413 - DNA, 265 bp, Homo sapiens
agcattttcatctgctttggtttcagccagagataaactgttcctgctgcaaagtaattaatatcagtcgcctggaaagcagaaattgggagacaacaggctcctctttcttgataaacagattgttgggtaaggtatgcacatggatgtgacaattcatttggccatagaaatagcagaaatgagacgtttttagacagatatttggaaggcatgagcaaatatccccaggcttcatccatttgagctcagatgagtcttttgc

SEQ ID NO: 267414 - DNA, 496 bp, Homo sapiens
tctgtctgggctatgataaagccttagaagagaagatttcaggtaatcaaggccctgcaggggctttggtacctgagaggctgccttcctgaagggcatccaaagtctgcaagccactgcccctttcacactgctcatgggcatcgaggagacccaacatactgagatgtgagtgggagacatttctatcccagctgctgcttctgtggactgtgagtcctctcttcccgacatggaaattaccaagctaagtcctgggtgataggactgagggccggaaaaccagaaaatagcagcaagccaccaagtgatccagatggtggagatgagcgttttaaagtaggcagagccgggcatggtggcagcacctgtggtcccagctacccgggaggctgaggcaggaggattatttgagctggggaggtggaggctgcagtgagccgtgattgtgccaccgcatccggcctgggtaactgagcaagtctcaaaaaaaaaa

SEQ ID NO: 267415 - DNA, 1398 bp, Homo sapiens
agaaaagaaacctgggcttctgctggcctatgtcagttgactagtgggtgactcctggggcaagcaggaaagagcagagcggagaagcagcgagggtgctcaactctgttcactctgatgccaaaaggcccttcggcaaaatttcacaaattgtaccaccaacggatgctgattggacaggccagctggggcttcggatgttaagtgattatggtgataatgaaatatataatatgactttatttcagaggataccctggagtcaccccaccatttcagccctttccttccccagcacgctgcatggccgtggagaacagcttttccagtgcagactctaaagaaatggaaactacactttggttcattcacagattcattcaataggttctctatttaccatgtgccaggcccagcgggtgacaaggcaaataaaatacgcttgatgccaaccctcattggtgtctacagtgttaagctctgcgtgtgagtagaatagaatgcggagaggcaactgggagatgggtaagggagacttttctctgaataacattttgtatcttttgaattttgaatcatgtgaatgtatcaaaaaataagtgtaagtaaaaatatttttacaactttaaaaataggttttactggactggagcactcagaggacaacagagcggaagtggaaagcaaactaaccttttattgagcatttactgtgagctagaccttcagccaggtgctttatgtacatgatatcttttaatccacacaaccctggacaaaggcagtatcatcctcatttttatccattttaaatggaagcttgccaggtatggtggctcacacctgtagtcccagcactttgggaggccaaggcaggaagatcacttgagcccaggagtttgaaaccagcccaggcaacatagtgagaccttatctctacaaaaaagaaaaaatagccaggtacagtggctcatgcctatgatcctagcactctgggaggccaaagtgcacagatcacttgagtccaacagtttgagaccagcctggacaacatgatgaaaccccgcctttacaaaaaataacaaaaaattagccggctgtggtgttgcacgcctgtagtcccagctactagggaggctgaggtgggtggatcacttgggctcaggaggtcaaggttgcagtgagccgtgatcacaccactgcactccagcctgggcaacagagcaagaccctgcctccaaaaaaaataaaaattaaaaaaaatagcaaggcatggtggcacctacctgtcgtcgtcgtcttagctattcaggagtcttagctattcagtgggaggatcacttgagtccaggagtttgagagcagcctggacaacataacaagacctcttttttgtta

SEQ ID NO: 267416 - DNA, 1337 bp, Homo sapiens
agaaaagaaacctgggcttctgctggcctatgtcagttgactagtgggtgactcctggggcaagcaggaaagagcagagcggagaagcagcgagggtgctcaactctgttcactctgatgccaaaaggcccttcggcaaaatttcacaaattgtaccaccaacggatgctgattggacaggccagctggggcttcggatgttaagtgattatggtgataatgaaatatataatatgactttatttcagaggataccctggagtcaccccaccatttcagccctttccttccccagcacgctgcatggccgtggagaacagcttttccagtgcagactctaaagaaatggaaactacactttggttcattcacagattcattcaataggttctctatttaccatgtgccaggcccagcgggtgacaaggcaaataaaatacgcttgatgccaaccctcattggtgtctacagtgttaagctctgcgtgtgagtagaatagaatgcggagaggcaactgggagatgggtaagggagacttttctctgaataacattttgtatcttttgaattttgaatcatgtgaatgtatcaaaaaataagtgtaagtaaaaatatttttacaactttaaaaataggttttactggactggagcactcagaggacaacagagcggaagtggaaagcaaactaaccttttattgagcatttactgtgagctagaccttcagccaggtgctttatgtacatgatatcttttaatccacacaaccctggacaaaggcagtatcatcctcatttttatccattttaaatggaagcttgccaggtatggtggctcacacctgtagtcccagcactttgggaggccaaggcaggaagatcacttgagcccaggagtttgaaaccagcccaggcaacatagtgagaccttatctctacaaaaaagaaaaaatagccaggtacagtggctcatgcctatgatcctagcactctgggaggccaaagtgcacagatcacttgagtccaacagtttgagaccagcctggacaacatgatgaaaccccgcctttacaaaaaataacaaaaaattagccggctgtggtgttgcacgcctgtagtcccagctactagggaggctgaggtgggtggatcacttgggctcaggaggtcaaggttgcagtgagccgtgatcacaccactgcactccagcctgggcaacagagcaagaccctgcctccaaaaaaaataaagagtcttagctattcagtgggaggatcacttgagtccaggagtttgagagcagcctggacaacataacaagacctcttttttgtta

SEQ ID NO: 267417 - DNA, 383 bp, Homo sapiens
ataaaaagaagtgggagtaagagaaattttcagtcaacaacatgttgtacttataaaaattcaaaagaccacagaaagaatcttagaattatagttattggaagtcctagccagagcaatcaggcaagagaaggaaataaagggcatccaaattggaaaagaggaagtcaaactatccctggtttccgatgatatgactgtgtacctagaaaaccctaaagactcctccaaaagacttctgtatttgataaatgaattcagtaaagtttcagattacaaaatcagtgtacacaaaacagtggcactgctataaaacaaccagggtgagaatcaaatcaagaactcaatcccttttacaatagctgcaaaagaaaaaaaataca

SEQ ID NO: 267418 - DNA, 410 bp, Homo sapiens
cacaacactggaaccccacccccatctccatcatgcttccattcagtttcttgctgcagcagctggttaactgacagcttatctgctgtacagagccaaaactccattatgagtacatcgtaattacccatctggattgcagtaatggcagtgaagatcttggtatagctcattaattctgattttttgctttgaggaaaagagatgaagacgtggcagcaacagctctaagttgactgcttttagaatttgaccttagtggcacagagttaagaaaaatctgctcaccagagatattgacaggcttactgtgtaagcattggcctgatcgggcctggaagttttgcccctttcatctgtagggataagagggcctaagagaatagcagcaatctgagctctagagcacc

SEQ ID NO: 267419 - DNA, 734 bp, Homo sapiens
cacaattacaaccccacaaaagtaactgctagactgatttaaatggtaatcactttgttgcatttgattactgctgccacacctaaatgcatatatctatattttaatattatcaatttaaagttgttattaaatgtatattttattttacatctcttttttaatctagaagttcctccttctttccagttccttaaaatttacctggtgaagaacctgatcctaggacctatagagtttcccatactttgtattttgctgattgcacactcatggcacggttcagcacattgccctgtcctctcgatattagcacacagtgcaggttcaggcacattgaatttgagaagacttaggttcagtcctttggcaagactgtaaatcacggtgtctttctttccttcctccttcttctctctctctctctctctctctctttccttttctttctctttttttcagagttgcactctgttgcccaggctggagtacagtggctggtctcgaactcctgacctcaggtgatccacaaacctcagcctcccaaagtgctgggattacaggcgtgagctaccgcgcccagcctgaaatactctatattgggaggttaattagattctctcctatcacttaccctcagcacacatacccagattcatagcagtgtgggcccagagttgacacacctctaccagtcggtaaaatactaaaacattcatctgtaaaatgggaat

SEQ ID NO: 267420 - DNA, 927 bp, Homo sapiens
gatgccgtggcgtgctcgctttggccatccatgtccctcgtgttggacactagagctgtccccgatgtacccatactgacctggtcacgaatcgccttgagaggctggaaactcacccgcctccttccccggactagggggaagtggggtgaaggaggcgtgcagggaggaacctgggggagggggtggcccgtctcccaggctgggcgtgggccgggcgaggtccccagcccaccgggccgtgccaacaatggcctgttgtagaaggaggcgggaaggaatgcggcctggggagctgggcggcggcggggcggggcccggccaagcggctgccttttacctggccaggtagctcgcatttcccggcaagcggcggcgcccgcagcacctgttgcccggtgcgcgggcggggaggacggcgggggacatggcctggtagagtcccctggggagaccgtgctgagttcagtccggggcagggcagggcgagggagggaaggtccttccctggcgcccgcgcgggctgcggcagcatgaaaaagaagcagacggtgcagggcaccttcagcaaactcttcgggaagaagcacaccacgacccccagcacctccctctacgccaccaatccgccctggatcttcacccaggaggccccggaggaggggaccgggggcttcgatggcatctattatggagacaatcggtttaacacagtgagcgagtcaggaacagccacgctgaaagctcggccaagagtccggcccctgctgaccttccttccgctgaatgcccaggaaaaccatgggctggctgtgcccaccccctcggttccagatgattttgcagacaaagaagtgacaggtaccagctcactagtcaatggcacctccgactgtacaggtccgtggcctctatgatgtcacgcag

SEQ ID NO: 267421 - DNA, 1252 bp, Homo sapiens
gatgccgtggcgtgctcgctttggccatccatgtccctcgtgttggacactagagctgtccccgatgtacccatactgacctggtcacgaatcgccttgagaggctggaaactcacccgcctccttccccggactagggggaagtggggtgaaggaggcgtgcagggaggaacctgggggagggggtggcccgtctcccaggctgggcgtgggccgggcgaggtccccagcccaccgggccgtgccaacaatggcctgttgtagaaggaggcgggaaggaatgcggcctggggagctgggcggcggcggggcggggcccggccaagcggctgccttttacctggccaggtagctcgcatttcccggcaagcggcggcgcccgcagcacctgttgcccggtgcgcgggcggggaggacggcgggggacatggcctggtagagtcccctggggagaccgtgctgagttcagtccggggcagggcagggcgagggagggaaggtccttccctggcgcccgcgcgggctgcggcagcatgaaaaagaagcagacggtgcagggcaccttcagcaaactcttcgggaagaagcacaccacgacccccagcacctccctctacgccaccaatccgccctggatcttcacccaggaggccccggaggaggggaccgggggcttcgatggcatctattatggagacaatcggtttaacacagtgagcgagtcaggaacagccacgctgaaagctcggccaagagtccggcccctgctgaccttccttccgctgactgagtttcattcttgttgcccaggctggagtggtacaatggcgtgatctcggctccctgcaacctccacctcctgggttcaagcgattctcctgcctcagcctcccaagtagctgggattacaggtgcccaccaccatgcccggcaaattttttgtatttttagtagagacagggtttcaccattttggccaggctggtctcgaactcctgacctcaggtgatccacaaacctcagcctcccaaagtgctgggattacaggcgtgagctaccgcgcccagcctgaaatactctatattgggaggttaattagattctctcctatcacttaccctcagcacacatacccagattcatagcagtgtgggcccagagttgacacacctctaccagtcggtaaaatactaaaacattcatctgtaaaatgggaataaaaaaaaaaaacaaataaaatactgaaatacag

SEQ ID NO: 267422 - DNA, 120 bp, Homo sapiens
agacaatcggtttaacacagtgagcgagtcaggaacagccacgctgaaagctcggccaagagtccggcccctgctgaccttccttccgctggtgagtacggttctgctctgaggttggag

SEQ ID NO: 267423 - DNA, 1218 bp, Homo sapiens
gatgccgtggcgtgctcgctttggccatccatgtccctcgtgttggacactagagctgtccccgatgtacccatactgacctggtcacgaatcgccttgagaggctggaaactcacccgcctccttccccggactagggggaagtggggtgaaggaggcgtgcagggaggaacctgggggagggggtggcccgtctcccaggctgggcgtgggccgggcgaggtccccagcccaccgggccgtgccaacaatggcctgttgtagaaggaggcgggaaggaatgcggcctggggagctgggcggcggcggggcggggcccggccaagcggctgccttttacctggccaggtagctcgcatttcccggcaagcggcggcgcccgcagcacctgttgcccggtgcgcgggcggggaggacggcgggggacatggcctggtagagtcccctggggagaccgtgctgagttcagtccggggcagggcagggcgagggagggaaggtccttccctggcgcccgcgcgggctgcggcagcatgaaaaagaagcagacggtgcagggcaccttcagcaaactcttcgggaagaagcacaccacgacccccagcacctccctctacgccaccaatccgccctggatcttcacccaggaggccccggaggaggggaccgggggcttcgatggcatctattatggagacaatcggtttaacacagtgagcgagtcaggaacagccacgctgaaagctcggccaagagtccggcccctgctgaccttccttccgctgactgagtttcattcttgttgcccaggctggagtggtacaatggcgtgatctcggctccctgcaacctccacctcctgggttcaagcgattctcctgcctcagcctcccaagtagctgggattacaggtgcccaccaccatgcccggcaaattttttgtatttttagtagagacagggtttcaccattttggccaggctggtctcgaactcctgacctcaggtgatccacaaacctcagcctcccaaagtgctgggattacaggcgtgagctaccgcgcccagcctgaaatactctatattgggaggttaattagattctctcctatcacttaccctcagcacacatacccagattcatagcagtgtgggcccagagttgacacacctctaccagtcggtaaaatactaaaacattcatctgtaaaatgggaat

SEQ ID NO: 267424 - DNA, 880 bp, Homo sapiens
gatgccgtggcgtgctcgctttggccatccatgtccctcgtgttggacactagagctgtccccgatgtacccatactgacctggtcacgaatcgccttgagaggctggaaactcacccgcctccttccccggactagggggaagtggggtgaaggaggcgtgcagggaggaacctgggggagggggtggcccgtctcccaggctgggcgtgggccgggcgaggtccccagcccaccgggccgtgccaacaatggcctgttgtagaaggaggcgggaaggaatgcggcctggggagctgggcggcggcggggcggggcccggccaagcggctgccttttacctggccaggtagctcgcatttcccggcaagcggcggcgcccgcagcacctgttgcccggtgcgcgggcggggaggacggcgggggacatggcctggtagagtcccctggggagaccgtgctgagttcagtccggggcagggcagggcgagggagggaaggtccttccctggcgcccgcgcgggctgcggcagcatgaaaaagaagcagacggtgcagggcaccttcagcaaactcttcgggaagaagcacaccacgacccccagcacctccctctacgccaccaatccgccctggatcttcacccaggaggccccggaggaggggaccgggggcttcgatggcatctattatggagacaatcggtttaacacagtgagcgagtcaggaacagccacgctgaaagctcggccaagagtccggcccctgctgaccttccttccgctgactgagtttcattcttgttgcccaggctggagttgcagtgagccaagattgcaccactgcactccagcctggacgacagagcgagactccatctc

SEQ ID NO: 267425 - DNA, 228 bp, Homo sapiens
tcaatgaaatactagcaaactgagtccagctgcacatcaaaagataatacaccatgatcaaatggattgtattccagggaagcaaggatggttcaacatactcatatcaggccaggcgtggtggctcacacctgtaatcctagcactttgggaggccacggcgggaggatcacttgagctcaggagttgaagaccagcctgggcaacatagtgagaccttgtctctta

SEQ ID NO: 267426 - DNA, 863 bp, Homo sapiens
tttgtttgtttgtttgagacgttgtctcgctcagtcgcccaggctggagtgcagatggtctcgatctcctgaactcgtgatccgccctcctcagcctctcaaagtgctgggattacaggcgtgagccaccacgtccggcctcaagcatctgtatttcttttaactctcaggtaattctaacgttcaatcaagaatgagaatcagtatcctccagagctagagagtctttttaaaagcaacctttactaacatgttaataagattattaacagttgttaaggatctggctgttaacaattcactaaaatcttagccacaaaaattatcccactgataaatggaaactttaacccaaacctcactcagcttccagaaacaaaaggatttagcccaagaaagacaatagttcattatggtttatttttaaataacgttcctactcggcaatggagtttgagtctgaaattgaatggtaggttcacctttatctgtgaaacttctgtaagtacaaaaatggatatattaatctggctttccaaaatctctcaagccaaaaggttacaatattccattttagacttaacctaaaatcaaaaggaaagatttaaaataacctcgtgactttcacaaatttaactacccacagacaaaccaggagaacaaggtacagaacatgaaacatttcgaatgaagtattcttttccaactgcatgtgaaaaggcaacattgacagcatcacaaaaaccttaatttaaaactaaatgtcacataagaacaccatatacacccaaacaaacccacataccacataattcaacacatccgggcagcagtggctaaataatggactagcatgaatactg

SEQ ID NO: 267427 - DNA, 466 bp, Homo sapiens
tggcgtgtgatagtcgattcctagaggatccccattacgctagtcggcaatggagtttgagtctgaaattgaatggtaggttcacctttatctgtgaaacttctgtaagtacaaaaatggatatattaatctggctttccaaaatctctcaagccaaaaggttacaatattccattttagacttaacctaaaatcaaaaggaaagatttaaaataacctcgtgactttcacaaatttaactacccacagacaaaccaggagaacaaggtacagaacatgaaacatttcgaatgaagtattcttttccaactgcatgtgaaaaggcaacattgacagcatcacaaaaaccttaatttaaaactaaatgtcacataagaacaccatatacacccaaacaaacccacataccacataattcaacacatccgggcagcagtggctaaataatggactagcatgaatactg

SEQ ID NO: 267428 - DNA, 404 bp, Homo sapiens
cacgaggcggcacgaggcggcacttggaagattaccttcttccaggtatattggttttccttaattgctttaatagcatgagttgtgaatcttctctgtgtctcagaagaaacctaacagtggagattgtttatggcaagggtcacaaatttacatgctcaggttaggaccctctttaaggtaaagacatgaagtgcccccctttttattaatacataactgcatttgctgataatattgatttgccttaaaaaaactagtcctattgagaattcaggctctttttgcgtttacagacagtgctgtcctgaatgtgctagagatgtacctttagtcacttaagctggtgtttctgtagggtagattcctaggactgggattggattgttgcattatagtgtgta

SEQ ID NO: 267429 - DNA, 412 bp, Homo sapiens
cttttccctattttataatgattttatataatttaaataaaagtaccaagtaacatggcccttgtctaaattacacaaaaattagagctaagtggtctataaacaatggcagaaatggggatataagcttctaattaaggctctgaaataagaaaaaatttaattcagacaaacattaataggactttgaaacatattttagaatgtttctagcaatactaaaaatgaatatgcagttactagtgaactaagcggaggtttgctacacatgtggatttgttatatgtatggaaataatctattattattatatattagaatactaaaaatgccttaggactctcataactatatataatcttagtttgtaaagaacaaaagatggtggtatagtacgtcataaggtttcaaa

SEQ ID NO: 267430 - DNA, 421 bp, Homo sapiens
agattggaccactctctccaaatggctcatgtcatctatcagggtcaatgttcaatcctttcaatgtcttaagagtaccctttttgcctggctaatccccaaactccagtgacaccctatttggaggctttcgtccctttatgtaccaactacagaagaaaactagagtgggaggaataaaagacactctcccagatgagtgtcataataaataccaaagctatttttaatgggtgttaacacaatgtttgagaattagtaaagtaagcaagggctgctttaaaaagttgatctggacatgcacaggtggccctccatatccatgggttctgcatccatggaatcaaccaaccaagtgcatcacttgaggtcaggagttcgagaccagtcaggacaacatggtgaaatcctgtctctacta

SEQ ID NO: 267431 - DNA, 408 bp, Homo sapiens
ctgaggtgggaggatcgcttgagcctggaaggtcaaggctgcagtgaaccactgcacttggcctgggagacagaacaagaccaaaaaagtaaaaataataataataataataataatacaagatcctgcattataggcactaatggaatgcaataaatgcacagagaaaacagccataaatctcatgttcgagaagacacccaagaaagcatcactgagaggtagatctgaactaagaacaatcagtaggattttacaggatagaaggtaggatagaaggtaggtgggaaggggtgacatgaaggcaaagatttcaggaagaagaaaaattcataattaaaaacataaaagggccgagtgcagtggctcacacctgtatctcagcactttgcggggttacggcaggag

SEQ ID NO: 267432 - DNA, 570 bp, Homo sapiens
agctcattggagcatttcagattttggatttttggatttgggatgtttaaccagggtaaaatatagaatgcaaatattccaaaatctgaataaaattgaaatctgaaatgcttatggttccaagcattttggataagggataattaagctgtataacttataaaactgaatataacaaaatttcccaacatgtggaaaatgatgtcttttttcaaaaatgtcaatagcagatacatggtacagtaagttaggggaaaaaatgaggtttcatatcttctagtttcctaattaaaaggagcccattctgggttggaagaaagtgtcagtaagatcatttctcctatttgaaaatcatacaaagcttgtcagagtgactcaggccaggagtgtagctgggcgtgtagctaaatgatatctccccacatctatataataagctgttacctgctttaaaaggaaaagctctcagcatgactctaatgttgcatttctggaatacagcttgaaaagctcttctcagggttgaacagagcatgaaggtaatggttattatctactcacattaaaaaa

SEQ ID NO: 267433 - DNA, 222 bp, Homo sapiens
ctagacaggttgagccactgtataattgtctctgtatcaatatggttggaagaaggcacaatgctgaaaagtgccctagccttacagtggtgaagatggcgctggagcggtcagaatgacctcaattgccatagcagcggacgactggactggggatcctaaagcagtgtgctgcaggctgttctttcatggaagcatcagaaactttttaagacatcctgt

SEQ ID NO: 267434 - DNA, 414 bp, Homo sapiens
tttttgagacagagtgttgctctgttgcccaggctggagtgcagtggcatggtctcagctcactgcaacctccgcctcctgagttcaagtgattctcctgcctcagcctcccggagtagccgagatgggaggatttcttgagcctaggaggtcaaggctgcagtgagctatgattgcaccactggactcgagcttgggtgacagagcaagaccttgtctctaaaaagagaaaagaaaagaaagaaaagttctgaccatgttgtcctgaaattatgccatccaggcattcctgctggtctatcaggttcccactgggcagaagcttgagggaggggctatagaggaataaaggctccagacagaaaggtaaggaaggtcaagttcacagcagtctgccccagactatgtctggag

SEQ ID NO: 267435 - DNA, 434 bp, Homo sapiens
ccgttgctctcatcctgttgagtttaataggctctcttttttcttactgatgttttcatgatgagatttctaataagttatttgggagctatcagaatagaaactaataaatattatctatctattagctgtcagaataaaagcttactgagggtcctgaactgtgaggccactgaaggcaggggtttgggtctgatttatctgtgtttgcctagagctttaacagagcctgacacttgtaactcttaaaaatatgctttaaaataaatctaaactcaggcatggtggctcatgccagtgatcccagcactttggaaggctgaggtgggaggaaggcctgagcctaggaactcaaggtgagagtgagctatgattgtgtcactgcactccagcctgggtaacagagtggagacgctgtctctttaaaaaaaaaa

SEQ ID NO: 267436 - DNA, 538 bp, Homo sapiens
cctgtgccttctgaccccgcaaaaggtataagcttcttaacacctgcctttcagctctcttgtgcattcatggtgctgagcaagtctttgtactaagtagatgtctttattagttaggaggctttgggctgcaaatcacagtagacccaacttcacaaggcttgggacaaagagcatttatatcttacaggagtccagaggtgggaggggctcaggatggcagagcagagagctggaaagaccctcggtccttgatgtcacctgagggatacaggctgaggtgcagtgacccaaaccatcacattcacctttacacactcatagccaaaagcccaaggacaaggtgtccctgttaaagatcaaggaaaacctccagaaccgctcccagtgcatgttcctgcaggttgcatggccaaaagcacttcacctgcttgtttctacgctactggtagagaccaaacaagggccactctttgcagctcaaaagatattcagcctccctgaagcatcagactgcctggcttttggggaaaaaaaa

SEQ ID NO: 267437 - DNA, 507 bp, Homo sapiens
aggtgtgcaggtcccaagactctcccacttctctcttagtttggagtgggcattcttttaagaagtggaggaccctgtggtcactggcttccttagtggtgaatcatagggcaatcagagagcaggaatctgcaaaggggcgctgtcatgtgctgaattgtatctcctcaacatttatagattgaagccctagcctccagtatctcaggatgtgacagtatttggaggtggggcttttaaagaggtggttaagttaaaatgaagccattagagtggtccttaatccaatatgactggtctccttataagaagaaacttgtacacagaagagatacacaagggacatggaggcacagagaaaagcccatgtgaagaggcagcaaaagagtggccatgtgcaatccaagaagagaggcctcagaggaagccagccctgccaacactttgatcttgaactttcgggttccagactgtgagaaaataaatttttattgtttaagccaccca

SEQ ID NO: 267438 - DNA, 417 bp, Homo sapiens
gctgaggtgggaggattgcttgagccaaggaggtccaggctgcagtgagctgagattgcaccaccacactccagcctgggtgacaaagtgagaccctgtctcaaaagctgcaccatactgaagttactttcaactgttttaatacataaaaatatttcggctgggcacggtggttcacgcctgtgatcccagcactttgggaggccgaggtaggcggatcacatgaggtcaggagttcgagaccagcctggccaacatggggaaaccctttctctaccaaaaatacaaaaattagccgggcacagtagcgggcgcctgtagtcccagctacctgggaggctgaggcaggggaatcgcttgaacctgggaggtggagggtgcagtgagcctagatcgtgctactgcattccagcctgg

SEQ ID NO: 267439 - DNA, 426 bp, Homo sapiens
tgatcatgacttactatagcctcgacttcctggtcccctggtccctggtgattcttccatctcagcctcccaggtagctgggactgcaggcacaagccaccatgcttggctaattttctgtattttgtgttaagacagggcactgtttcccaggcttatcttgaactcctggctcaagtgacccgcctgcattggtctcccatagtgctgggattacaagtgtgacctactgtgcctggctgatattatgatttttttaaatataacgttgtataattaaaacaaagtaattaacctgcccaacatctgaaatatctgacattttttgtaatgagagtaatttgagatttactctctgagtgactgtgaaatgtacagaactcagttattagttgtatttgccatgttgtgtaataaatctcaaaa

SEQ ID NO: 267440 - DNA, 401 bp, Homo sapiens
agcttaaaaataagtcatacctaaaaagttaccaataatcccttcatatcagtcagtgttcaaattttcagttatctcataacactttttttcagcttaagatccaaagtagtccacccaatggcattggttgataggtctttttaaactagaattctctcattttcttcccttgcaatttttttgttgaaaaattagttttatagagttaatcatggtctggattttgctgatattgcatccccttggtggtgtttagaatgtgtctctgtcctctgtgtgtttcctgtatattgatacctggaactagaggattgatccaattcaggtaaatttttgttacttgtttttggctctggtttctttttctgataatcacagctgcttgtacttagtcacta

SEQ ID NO: 267441 - DNA, 346 bp, Homo sapiens
tggtatctcgtgcctcagtttcccatctgtaaatggaacacacgcgatttcagccgccgttcaacctttctaaaagctttcacatccattatctgactggtgtctcaaactgctactgaggcttcagctctgatctggaccagtgctctccaggcctactgcacagctgtcatactgaactttcctatatcctacacctggttgggattccctgtgccctggaccttgtgtctcaaacttctagattgtggatttactctgtcatctctgtgcagcacatctttctgtagattcctgagaaaggttgcaaagaagcaaatatatttagtccttgtatgtctaaata

SEQ ID NO: 267442 - DNA, 293 bp, Homo sapiens
gttgcttttgcatgaaatgtctcactgccttttctgttgtcccgtgctgtggtctgtcccggcgagactccgagggaccgcacattctggatttggggagctgaaatatggcatcctatctgcaaacggggtccctctctgtgtcagtttctaatggagagcgagctgacagtgcatggagggactctgccaagatttgcacgcccactgtcatcctttgtcggcccagagccttgtgttcagggctggggtctaagtcggagacagattccccactcagggggcttaccgtc

SEQ ID NO: 267443 - DNA, 476 bp, Homo sapiens
ttaaaaattgtagagactagagtgccctgcatgttactgtgatcacagaaatgaaacagtggatgaagtgtcttggtgacaatgatgtcgtgttattaaaaccacccacacttaaagggtatgtaccaaggtgttaatagggcttaccctgagtggtggaattacactttattttcttttttgaattttttagtgtttcccagtgaatacatgttactttcgtttacaaaggtgtagtaagcaattcaaacagaaaaagatatttcatcaaacgaagcctaacactggttcagattactgcttgcaggtgaaaatcttagatgtactaaaaggcagttttccaagcagaatatactagaaacatttattcctttttctttttgtcaatagatcttttttatcgcctgtgttcatattacattgtcaacaacatattttaaactaaataaatattcagatttatgttgattataaac

SEQ ID NO: 267444 - DNA, 277 bp, Homo sapiens
ctcaaaggagaaagctcttccagggaggtgaggaaggttttgaggacagggtgacaacttctgccagagtgactgggcccagggcctagaatgactcgattgagctgggataataggtctgtattgcctggctagacacagccaaggccctcaagcagcagggtgagggacccttgtctcctgctggccttgcctaaggttctgaggcagctgtgaagaggttgggggggtaggggctctgaagcccctatcctaccttgtgtcaattcaagcccca

SEQ ID NO: 267445 - DNA, 844 bp, Homo sapiens
aggggacatttggcaatgtctggagacatctttggttgtttcacctcggggcatgctactgatatctagtggatagaggacagggatgctgctaaacctcccctaatgcacaggacagccccacaacaaagaattttccagctcaaaatgtcagtcttaccatggttgagaaactctgccctaggtgaacatttcaaagtaactgaaaagttaatattgctgaacaggcctttataaggtagaggcagcacttactcaggtattccagtactgcaatatcgtaccatcttatggttctagtgtttcctcattagtaggtttcagactttattaaaagttcctctggtatactgaatttatattctgcttttggtccatttcaatggagtgattaatgtagtaggggataatggctaaggttggaagttggaactctgcttttaaaagaaaaaatgccctaaatttagtgatatgattaatatattgttattattatctgttgtcagttttactgtaattgcatgaatatatctgacagataaatcaaaaaaacatgatcagtttggactgacatacaggaaggacttagaaagtaatcaagataggtatttctggatgaatctctataacagcgcttcactggctttaacatgcagatgaaacacctgggaatcttaattaaaatataagctactgattccatacgtctgaggggaggtctgagagtatgcctttttatgaagcttctgggtggcaagtccagatgaagcattagatcattgcaaaaataagtatgctttaagtatcactttaaccaaaaagaagacaataatttttaaaagac

SEQ ID NO: 267446 - DNA, 113 bp, Homo sapiens
ggggatcgagtaaggagaatgagaggggccagcccacactgaagaggtcagggatggttggggatgactggaagtcactgtgaaaaagggacaaaaccgaggatccagaaggc

SEQ ID NO: 267447 - DNA, 405 bp, Homo sapiens
aaagaccatcctttcctctaattaattatcttaaaaactttgtcaaaaataaattgactacatgtgtatctatctattctgggacttatatttgtttctatttttctatttgtctctctctatgccaatgtcatgctatttaataactacagctttacaaaagagtagagatcagccaggcacagtggctcacacctgtaatcccagcactttgcaaggctgaggcaggtggatcacgaggtaaagatatcgagaccatcctggctaacacagtgaaaccccgtctctactaaaaatacaaaaaattagccaggcatggtggtgggcacctgtagtcccagctactcaggaggctgaggcaggagaatggcgtgaactgggaagcagagcttgcagtgagctgag

SEQ ID NO: 267448 - DNA, 353 bp, Homo sapiens
actcagtacacaaacatatgtctgtgaactataatgtaatttataaaaagcaagtttaggagaggaagtgaagtgtaacttacccagttataggggaaacttggatcagagtgcctgaacagcagaaacatttctggggctcaaacaaaataatttatgttgacaagatgtattttgggatgtttttattctgtgtcttgtccatagagagtttccctcactctctttggggattaatactggaacaggacctttaaatacgctcaatacatttgacaaaatggggaaatgaaaagagttaagttgacccataaactactaagttctgagatatggtattttttatttttttt

SEQ ID NO: 267449 - DNA, 492 bp, Homo sapiens
gatttaactgaattgaaattctaaaatgtaactatgtttctttaagatgtaaaataattttcctggccggacatgtggcacacacctgtaatcccagcactttgggatgctgggattacaggcatgagccacaatgcccggctaatttttgtgtttttagtagagatggggtttcgccacgttggccaggctggtcttgaattcctggcctcaagtgatccacctgccttggcctcccgaagtgctgggattacaggtgtgagccaccacacctggctcttcacaactttttagtctgctccttgttggacacctctatggactatgtggcccttcagacctctgttcctgagagaaggctcatggttctggtgggtagttttgtatctgctgatgagcctgatcctcataaacagaaagccctttattttttctactattcttactttttttttttttttgaggtagagtcttgctctgtcaaaaaaaaaa

SEQ ID NO: 267450 - DNA, 674 bp, Homo sapiens
atacagtgggaagcaaaaacagggccctggccctactgagttgggattcagtgctgcacactttcacacgagtcagagacatttcatcctcacatcatctctgtagagtgggcagcattaactcgaaattagtaaagagattcagagcgttgggcaccttatccatagacacagcatggtgcaggccccgagggttctcaactaaaggccgttttgcccacaaagggacatttggcaatgtggaagacatttttggtgtcataagtggatggtgccactggcatctggtgggtagaggccaaggatgctgctaaacatcctacgattcccaggacaggctccgtagcaaagatttctccagctccaaaggtcaacagcactgagatgaggagacacagctgcagacctcactggagctcactcacctccagttctgctcacggaggcccaggatctccacaccccaagaccctcgcagggggattggcttgtggctgctctggataaaaggcatgagaggaagtgcgtgtgtcacttctgggcagaagtgtaaacatgcgggtgacagacctccatggacgttcccccaccatgaaggtgaaggtcgctttctctggagctggccaagcttggagacaggagcagcctgcagggctcgatttctgtacaaggga

SEQ ID NO: 267451 - DNA, 527 bp, Homo sapiens
catgctgttgtaagaaataatacagagacctctttcgtgtacctttcactttgtttcccacacagtgaacatctttcaaaactgtcatacaatatcatacccaggatactgacactggtatagctaagatagagaacgtttccacacagaactttttctagcacagggatccctcatcttgcttttgatgaccatacccacttcactcccatccctactcccttcttaacccttggcaaccataatctgttctccatttttatagttttttttttttcatttcaataaagctgtataactggaatcataataatatgtaaccttttgggattggctttttttcatttagcatgattttctggaggttaatccagcttattatgtgtatcaagtctattgacaggtactttttagtgtgaatagaatcccatagtatagatgtaccacagtttgtttaactgttcacctgctgagagacattgggccagtttttggctactataaataaagttgctataaacatttgt

SEQ ID NO: 267452 - DNA, 954 bp, Homo sapiens
gaaggttgtgatctcaagcatggcagctctgtagcggaagcagatcctgtgggagccaacagctggaggcagtccactgaccacattccacagctgggcaccatgtacatccttgcaggaggagccaggtggcatatcttggtgtgtaccacatctaatactgtccattttttcctttctggtttcctttttttttgtttttcttgcatatagtacactggacaaacaacacactaatgccaggtagtgttcgtttataaacaatagatttatgactgacacacccaagtgtctcttgagtatctctgccccactacaaataccagacttcttggccaagttgctatgacagcccccaggaactccattcagtctctgcctctctgggcactgccagaagagttgctatacctctggtgcgactgtttctactccccagcaggctccaggctcaagctttaggaaaactggatgggatttagctacatgatatgtttccatgttagcctcaagtatgtaaccatcagttacaagtgttcttccttaggaaaataaaaacatttacacttaacatttttcttttctctcccttgcacttgctctcaaatcaagtttgctacttttgtatttaaagtacccaagtgacttcagtgatcatatctaaattactcagatatcaatcagagctcacacaaggcatgtcctactactttgctctcagctcccctgctttcagtatttagtgactggatttgggacaagttctcatttagattaattgtcacttgaaggattataatgttactcttgaattatgggattataagtcttcaattaaaaaaaaggggggtaagataccgggggcagtaggacatttgtaaggcaaggggataagagggggggaaagggaaaagggtggaacttgggaggacaaaagagaattgggggttggaa

SEQ ID NO: 267453 - DNA, 874 bp, Homo sapiens
gaaggttgtgatctcaagcatggcagctctgtagcggaagcagatcctgtgggagccaacagctggaggcagtccactgaccacattccacagctgggcaccatgtacatccttgcaggaggagccaggtggcatatcttggtgtgtaccacatctaatactgtccattttttcctttctggtttcctttttttttgtttttcttgcatatagtacactggacaaacaacacactaatgccaggtagtgttcgtttataaacaatagatttatgactgacacacccaagtgtctcttgagtatctctgccccactacaaataccagacttcttggccaagttgctatgacagcccccaggaactccattcagtctctgcctctctgggcactgccagaagagttgctatacctctggtgcgactgtttctactccccagcaggctccaggctcaagctttaggaaaactggatgggatttagctacatgatatgtttccatgttagcctcaagtatgtaaccatcagttacaagtgttcttccttaggaaaataaaaacatttacacttaacatttttcttttctctcccttgcacttgctctcaaatcaagtttgctacttttgtatttaaagtacccaagtgacttcagtgatcatatctaaattactcagatatcaatcagagctcacacaaggcatgtcctactactttgctctcagctcccctgctttcagtatttagtgactggatttgggacaagttcatttaacttaagattcaatttgttcacctatgaaatggacattcaataatgtctacctcttagaattctaatgggaattaaataaagcattctctcaaaaattaaaaaa

SEQ ID NO: 267454 - DNA, 457 bp, Homo sapiens
aaagaatggaaaggatcttagagctatttgtacgtccatgtttaaagcagcattattcacaatagccaagaggtggaagcaacccaagtgtccattcatgaaggaatgaataaacaaaatgtgatatacatacaatggagtattcagctttaaaaaggaagaaaactgacataaactacaacatggatgaaccttgaggaccgtacactaaatgaaatagtcacaaaaggacctatactgtagtggtcaaaattcacagaaacagaatggtgtttcccagtagctgaggggagggggaaatggagactagttgttttatacagagtttcaattgtgcaagatgaaaaaattctgcagattgttcagcaatatgaagatacttaacactattgaacgatatacttagaaatggttaagacattaaattaggtgttctgtgttttttacctaagaaatg

SEQ ID NO: 267455 - DNA, 657 bp, Homo sapiens
ctactgtcggactctacaggccagcctctgcctcacagtggaccctgcagacccagatggtgtctcactgtggcatcctcaggcaaagctcctgcctttcggcagcctctacggggccagctcctgccttgcagtggcctcttcaggccaagctcatgccccatggcgacttttccaggcacagcttttgccttttgcagcctgctgaggcccagaatgtccttaactcggcatctccaggacgagcttatcctcccagtgcgtctacaggcccgtctcctgcctcacaacaacctcttttggcccaactcctgctgagctgctggcagcctctgtaggccacagacttcttaaagtaaagctttccagccaccttcggcctcccagcagcctcagcaatcaaactattccctcactgcggccaccgaaagccaagtttctccctgcctcacggcatcctccgaaaactgagcatttgcctcacggtggcctccccaggccacgaatctgcctgcctcccaggcaggtgctgcctcacaatggtctctttaggcccagctcatgctaaaaaatggactctccaggcacagctcttgcctcctggcagcctctgcaggcccaaattctccaaaagttggcctctcctaactcagctcc

SEQ ID NO: 267456 - DNA, 775 bp, Homo sapiens
ggtgatgtctccgacgttggctcccgaaccactgagtcagaggctgagggcccgttggatgcgccccgccccgggcctgctatggctgggccattgagcagctgccggctctcagcccgccccgagggaggcagtgggcggggtcggcgagcagagagggtcagcccctcacgctccaatgaggtcatcagcccagagatcctgaagatgcgagctgccctcttctgcatcttcacctacctggacacgcgcacactgctgcatgctgccgaggtctgccgggactggcgcttcgtggcccgccaccccgcagtctggacaagggtgctgcttgagaatgcccgtgtctgctccaagttcctggcaatgctggctcagtggtgcacccaggcccactctctgacgctgcagaacttgaagccccggcagcggggaaagaaggagagcaaggaggagtatgcccggagcacccggggctgcctggaagctgggctggagtccctgctgaaggcagctggggggaacctgctgatcctgcgcatctcccactgtccaaacatcctcaccgaccgctcgctctggctggccagctgctactgccgtgccctgcaggctgtcacgtacaggagtgccacagaccccgtgggccatgaggtcatttgggccctgggcgcaggctgcagagagatcgtctccctccaagtggcaccacttcacccctgccagcagcccacacgcttcagtaaccgctgcctgcagatgattggtcgctgtt

SEQ ID NO: 267457 - DNA, 349 bp, Homo sapiens
attcgtggtgctgcttttgctttttggtgaccagatcttggacaagcggaacttggacttcttcctctggagtccctgctgaaggcagctggggggaacctgctgatcctgcgcatctcccactgtccaaacatcctcaccgaccgctcgctctggctggccagctgctactgccgtgccctgcaggctgtcacgtacaggagtgccacagaccccgtgggccatgaggtcatttgggccctgggcgcaggctgcagagagatcgtctccctccaagtggcaccacttcacccctgccagcagcccacacgcttcagtaaccgctgcctgcagatgattggtcgctgtt

SEQ ID NO: 267458 - DNA, 434 bp, Homo sapiens
gagtcattgaggccctcaagtggcctcagatacactgagaggtcactatgaggggatatttccaggcacaatggaaagatagcgtctgccccttctacagaaaactgctggctctacctttttagtaatagttcacttttgtaggcatatgttttgtattcacctccaaaagatacctggcatagagggtaagtggatagaagccattttattttcctaggtcttttgctacagacacttatagtttacagtcctagatttgcatactagggatccgagactctgtataactcaagcagcaaatttgagctcattttaagcattccagcttcaaagaaaagcctgaatgtttagaaaaaggtaaggagtgataacattgtaaaatccagaccgttttacgttgtggtgtataaaaataaatgtaaccaaatagt

SEQ ID NO: 267459 - DNA, 292 bp, Homo sapiens
ctgagctgggaccttttgaagtggggctgaaacagtacctaccaaataaagatgctgtttaggaggaaaaaagcaggcatggggtgtgcttagcataatgtcaaaatgtggcactcaggcaggggctgagaaatggtaaggctgctccagggcctgctggctgcccaactcccatcaccggcagagacctggcagggtctgttctccctctggaagtatctacatgtggccaggagcggtggctcatgcctgtaatctcagcactttaggaagccaaggtgggtgatcacct

SEQ ID NO: 267460 - DNA, 395 bp, Homo sapiens
tcatgaaccacttccctcagctgacccagatgaagtaagctcttctttgctgctatgcccagagcccagaccagttaagaatctcagcctgacttggcctgttatccctcagcttccagtcctgactccaaggtaccttctttctacagggtcttgctctgtcacccaggctggagtatggtggtgcaattgcagctcactgcagcctcgacctcccaagcaagctcaagccatcctctcacctcaacctcccgtgtagctgggattacaggcatgtgccaccatgcctggctaatattttattatttgtagagacagggtctccctatgttgcccagtttggtctatgaatattaagttaggaaagaaaaataatgctttcctatcaagtgaat

SEQ ID NO: 267461 - DNA, 216 bp, Homo sapiens
accagtgtaccacagatgagccaatgctaggctgctgatgggacttgtgggaagtgagggaagttgttggcttttagcattaaaatgaaaggagtcaaaaacagcaactctaaaagacaggaagctgactgggctagtcagttgacttcatctataacaggtacacctaacttttaaggtatacctaagtcatacgtggactgaattaaaaaaaaa

SEQ ID NO: 267462 - DNA, 426 bp, Homo sapiens
gaatcagcataagttttcggagagccagttaatgtgaaatttctaaactgcgtatcttttcattttacaatgcatttttaggaatacatcccgaagaactcatcttgcacatgtataatggtgcaggaataagactgttgctttttaacagtgaaaaattgtaaatgacttcaaatgtttggcatcataaaaattggttaaacaaattacagcatatccaatgataggactgtgcaacatcattaaaattatcatatggaaaaacatttaaatgccatggaaagatgttcacaatatataattacatatgaagagcaatttaaaacagtacatatcatgtgaacccatttttaattaaaaaaactatgtcgagtatgcataggaaagggactggagaaatacattaaaatattagaagtgtttatc

SEQ ID NO: 267463 - DNA, 775 bp, Homo sapiens
aatcttaaatatctcaattggtattcctacaggatacttctatacatttgttgaatgagccagagtgtagatacacagcctttttttgcttatcctttgagccccaccaaatttaacaagaatacatataagtaaatacagaatttccttttaaaccacttatccagaatttagaaaatactagcacagttttccttataaagagaactcacaaagaatcccctttagttttgaaacagatgtgcagactactgaaaatatacttcatccattttcattaactattttaaatatacaacttaataaagtgtatacaaggcataatatcttttaagttgaaccaaaatgcgaagggtaggagactgtatttcccttttcagttcaaagtccatagcctcatgagaatggtttacaataaaagaatattttaactatttctctgactagcatttttgcagattcattagaactgctcactgtgtcaccaaaaaaattacacctggtaacatgcaatctagattccagaaggcacctgcttgggaatacaataggggtcaccaggggttaggggatagggaaataagaaattgctgttcaatgtgtatacagtttcagttgtgctaggtgagtaagttctcgaaatctgctgtacagcatggagcctatagttaaaactaatttaaaatttatttaggatagatctcatgttaagtgtgcgtaacacacatgctcacacacacacacacaccacaaagggacacaaggaaatgctggg

SEQ ID NO: 267464 - DNA, 383 bp, Homo sapiens
tttccatctcagtagcagggagggatgagcccacccttgcctgtcttgtggggatccaatgtccttgtccaagtgggtgcatttctcctttgtgatttagggtctcttcccaaccatctattattattccttctctggcaacatggtgaactgttgtataaataattacattcctagctaggcgcaatggcccaggcctgtaatcccagcactttgggagcccagggcaggacgatcacgtgaggtcaggagttcgagaccaccctggccaacatggcaaaaccctatctctactaaaaacacaaacatgagccgggtgttgtggtgggagcctgtaatcccagctactcgggagtctgagacaagagaatcgcttcaacccg

SEQ ID NO: 267465 - DNA, 424 bp, Homo sapiens
acagtggcctggaggaccaaaggctgaggtaataggatgtggtgagttgaattatgtctcccccaaaaacaatttgtccatctgaaacctcagaatatgaccttatttggaaggagaggctttgtacatgtgattaaggtcagaatctggagatgaggttatcctggatgagagtgggccctaaggccaatgagatagaaaaggagaagacatacagagacacgggaagaaacccatgcacatgaagatggaggcagagattggagtggggcagccacagccacggatcaccaggaaccaccagaagctggaggaggccaggaagggcgtgctagagggagcacagctctgctaacaacttgattttggacttgaggcctccaaaactgtgaggtaataaatgcctgttgtttaaagtcactca

SEQ ID NO: 267466 - DNA, 191 bp, Homo sapiens
agcgcgtcaggatggccgagcggtctaaggcgctgcgttcaggtcgcagtctcccctggaggcgtgggttcgaatcccactcctgacaagcgctcttttccggtatttcagaagagaaatcttcgacgaccgcacaccaagagaggccctcaaacacagaggaccgtacgttttacacacaatccaaagtc

SEQ ID NO: 267467 - DNA, 449 bp, Homo sapiens
ctgagtttagcattccctaggaactgaatgaaggccacaggttgaatcacagagcccaagagagagtcatgtggctgggacacaggcaaaggccaggtcctgtggagcctcaaagctacattaaggatttagaataggatccaagaagtgcaatgagaagccattaaagaatttttttcagtttctttatttttgacaacaatatttattttgggggtacaatgtgatatccatgtatagattgtagaatgattaattaggctaattaacatatccatcatctcacgtactaatggtttatttgtgataagaacatttaaaatctacacttttaggccaggcacagtggctcacacctataatcccagcactttgggagggcaagacaggagaatcacttgaggtcaggagttcacctaaagtaatatggtaaaccttgtctgtactaa

SEQ ID NO: 267468 - DNA, 422 bp, Homo sapiens
gtacagaatagaaggggagtggaagggcagcctcatagcaggagaggcggacaggtgccacctcagccaggtactcaagggcgacatcgacggccgtgagccacactgatagttctggcccttgaaacgatgtgacgagaagggccacttcacctctggggtctgtctcccagacccatacccccgtccaatcacgaggagaccatcagctaaatcacaatagtgggggacacttgactgaatccctgaccaggactcctcaaattgtcaagagcatcagaaacaaagagtctgagcaaccgcgagagccaggagcagcctggggacacctgatggctaaatgtctcgtgggacctggggtagaaaaggacattaggcaaacacgaaggaagagtgaataaaatgcaggtgacttactcata

SEQ ID NO: 267469 - DNA, 491 bp, Homo sapiens
gcaggctagtggaatgagaagattttcctcttgtcttatgtttatctgttttcaataaagctttaaaggcatttcaataaagggcaatataatgcttgttcacagaaacaaaagggaaagaaagtaattttaatgtctactaagggaaatgatatattttggtatcagaacctttcatgatatcatggcaggattgagggtggggagcagatatgggaaataaaacaatatgtttagaaatttgagtcaaacgttagaatacaaatatttttctcaaaatggagtgttagttttctgcctctagtaatgacggagcagcttgtatcagattaatcctgcagttaacaataataaactttaaacaaaatatgaaaaacaactatttgaagacatagaggagcaactaaatacaggcagaaacataggaaaatcatagctgaatattttttttttaacaattctcttccagtaactgatagactaactagaca

SEQ ID NO: 267470 - DNA, 337 bp, Homo sapiens
tacacacacttcttaagcggactattttatatcacaattaatcacgccatcaagaaggcgcgggtcccgcgtgcgagtgcggccagcggagcccctcacataaaattagacaataattgaagccataaaaaagcagccaaatcgcattgtcgctctactgtatttaaatctatatttatgatatttcataaggagttattgtttcagaagccacacaggctggcgggaagtcggaaacgaccaacagattcgtttgcctcgccgtggctcccagctgtaaaaatttacgaggacttggaaaggttagactgttgtgtttggttggcgagctccctgt

SEQ ID NO: 267471 - DNA, 639 bp, Homo sapiens
attactttgagttctggatctctttgtaatgcagttagcttactgagtaaatttgaacttatcgttttattttagtaaagccagcatgagaatcttaaaacagtagttatctgtataaattaagccttgaccttcttcatcccactgtttatagtaagttcaagtgaacgtaaaacttgtcctttatttgcttgaatttcagaacagctacttgataccgttttaagaaaacttaaaaaaacccaatacttaccagtgaagtcattcttttttttaatagttagaatatcataattcagtttaattatgagccagattggtataaagatgaataagataggttttctaccctgagaagtggggagacaaagacataaaacaggtaattttaatataattggtatgtataaagatatgctgtactagtcgcttagaagaaattcacctaaccttaccttcaggtgaggcttcctaaagtgagtcacaacagataagtaagagtgagctagatcattgttttccaactgggtagttacctcttagtgggccatgaagtcaatttagtggtcatgaccagtaattaaaaaaaagagagaatagaatagattgcatggtacgaagggtaggttttcttttatg

SEQ ID NO: 267472 - DNA, 603 bp, Homo sapiens
ttaaattttgacgctttgaatagataacacttttacatggttcaaaaataatataaagagctatacattgaaaaatgttgcttccactcctgtccccttctacccattcctcatcttgtcccgaataaccgaatttcttcatttcttatttatccttccagtatttttttgtaaatacatgtatttttatattattgcttttctctttttttaatcacccctttttataccaaataggttttttttcctgctttatagtttgttctgaggagaaattcatatgagtgcatggagattgtttctcctttttacagctgcataatattccatggggtagatatactattaatataatttattcagtctgtctcttattgctagacccttgggttgtttttaatcttttgctaaaatagcactaccacaatgaagagctatacataggtcattttctacacatgcaggtgtatttataggatacctttctaggagtgagattactgggtcaaagagtaaatgcatttgaaatgtgttaactattaccagatttccctccataggaattataccatttgtactcctatcaacattatataagattgc

SEQ ID NO: 267473 - DNA, 575 bp, Homo sapiens
atatagtgttgggattaaaagtaggactggtggagccagatggctcaattcagatcccagatcttccgcttaatggctatgtgactgcaggtaagagagctaattgcctccctgagcttgtttcctcacctataaaatggggatagtaatagggttatcttacagtgttgttaggatgattgaattagtatatacaaaacaaaacatgtaaaagagtacctggtatgtacatgttaaccatgattactatgaatggttagttggttaagaaaggtagataatgctggccgggtgcggtggctcacgcctgtaattgcagcactttgggaggctgaggcgggaggatcacgaggtcaggagatcgagatcatcctggctaacacggtgaaaccctgtctctactaaaaatacaaaaaattagccgggcttggtggtgggtgcctgtagtcccagctacttggaaggctgaggcaggagaatggcgtgaacccgggaggcggagcttgcagtgagtgagcagagattgcgccactgcactacagcctggcgacagagcgagactccatctcagaaaa

SEQ ID NO: 267474 - DNA, 480 bp, Homo sapiens
gtgattaatcccccatcccatgtcatttcctgctagaactgtaaaactaacatattcgacagcctgcaagctgaccactcagaggctggcagtggggaaaagattaagctcttcctgtttacttcccttgtcttcagccttccaccgactctgtgaattgggtaccttcatgatacccattttataaatgagaaaactgaggtttttactatatgctggtcatcatgctgaggactttacttggattttctctcctgccaatgctacgcggtggggaccttcatgttctcccctttgcagatgagattatcaaagcagaaaaagaccatctctcctactgagtaacagaggtacattcgtctctgtgaagtgtgtttatgtttaatgttggtgagactgaggagaacaagtttttgtccaaatgccaaaatctcctcctcagaattattataataaaacatagaatttgtatcctgcata

SEQ ID NO: 267475 - DNA, 555 bp, Homo sapiens
gaaagagcgagactctgtcacaaatagagaaacacacgcacacatacaggtacatatgtatgtatgtatgtatgtatgtatgtactatgtggtatggaaacttttttaaaacaattaaaggtgaatcaactggctgtggtggctgatgcctgtaaccccagcattttgggaggccaaggcaggaggatcgcttgagtccaggagtttgaatccagcctgggtaacatagtgagatgcctgtctctacaaaaagtaataaaaaaaatttacccgggcatgatggtgtgtgcctatagtctcagctacttgggaggctgaggtgggaggatcgcttgatcccaggaggttgaggcagcaataagttgtggtagtgccaccgcactccagcctgggcaacagagggagaccctttctctctctctcagtcaatcaaccaatcaatcagtcaatatcaatttctttgagaattataatatccttttctgtaatatgagaccattacagtgtctcaacaactagataataatctcagaggggttggtgcccttgtgttta

SEQ ID NO: 267476 - DNA, 429 bp, Homo sapiens
atgacatgatctgattttaaaagttaaagattattctggcttctgcatggaaaacagactgtgaagcaggactgaagcagggagaccagtaatccaggtaaactggaggtacctgcagtagcccaggaggggacagtgggaggagaaccgcaaagtggaagaggtcagtgtagggatgcaatttcaggacttgctaatacagcttagtttagagagaaagagcagagtcaagatgaattcatgctttttgcctgagcatctgggtgtgctgcgccctttactgaggtgtgaatagcatgctgagcaggtggaggtagagaaaccttgggttcagtattggatatctcaaatcagagaggactagtagaatccaaaggaagatgtcaaaggggcacttgtgccaatgagtctggaagcccagaggagagg

SEQ ID NO: 267477 - DNA, 774 bp, Homo sapiens
aggaaagtttaatctgtatctaatcatgaggaaacaatctaatgaatccaagtgaaaaacgttctgtggagctattatcctggactcttcaaaaataaaaaatatctaggtagttttctggattaaaataaagagacaacacaattcaagaaaaatgatcctgattgaattctgaattgtttttaagtcataaaggaccttttttttaggacaattggggaaatttgaatatggtctatattgtatcattgttaaacttccagagtgtgaaagttttttgtggcaatgtaggaaaatactctacatagacaggctgcagtatttaggggtgatgtgccatgagacatgtttgcaactaacttgcaaatggagaaagcaaatgtgataaaatgttaacaattgatgaatctcagtaaaagtatgtgagtattcattgtactatttttgcaacttttataaaggtttgaaatttttcagaataaacagtttgctgggaagtataaaagaaaaaagatcagctatctgatagcacacatctttcataaccgtaatagatgccagaagatgctggagtgatgtttcaaagtaccgagtaaaaataatttacaaccttgaaatcattaaaacattattcataggaaaagcgtttttaaacatatgaagagtaagagagtttaccactcaaaccttccttaaaagtgcagttaaagggctgggcgtggtggtttatgcctggattagcactttgggagaccaaagcaggcggatcagttg

SEQ ID NO: 267478 - DNA, 370 bp, Homo sapiens
tcgcttgtctcattgggatagtcagggcagtgatttttgtgggatggccctatattgaagatcttctttccctccctaaaggtagagaccattctttagagtttagtgagtgctgcaaatgaagatttgatcgttatttggatttttttgcatgtgtatgtgtggattttttttggtagttatccagatacattttgtggcaaaatttatggctgagggtattgataattgtttctgagacaaacagtgcacttagggaaacaggattgacatatagagtagagaaggacttctttttatttcagttggatattcatcttttggtggctagctttttttaaaaaaactattaatattatttttgattgac

SEQ ID NO: 267479 - DNA, 256 bp, Homo sapiens
atgttttttttaagcagggcatcgcatggcctcgacggggattacccataggagagatgagttttgctgagaacgcctgagtgagcatggagcagagctccgtgagcacctgcacccagctgggtaaggaacaagtcaggaaaaacatgcagaaaacgaagcacaatgatcttaaagcccccgagccaataatcggctgcttaggcccttgcttaagtaagggatgcgatttgtaaactaactgtgatcactggca

SEQ ID NO: 267480 - DNA, 428 bp, Homo sapiens
cacggtggctgacacctgtaatcccagcactttgggaggctgaggcgggaggatcacaaggtcaagagatagagaccatcctggccaacatggtgaaaccccatctttactaaaatacaaaaattagctgggtgtggtggcacacacctgtagtctcagctacttgggaggctgaggcagaagaatcgcttgaaaccaggaggcagaggttgcagtgagccaagatcatgccactgcattccagtctggtgacagagcaagactccatttcaaaaaaaaaaaaaaaaagaaaaggaaagaaatggcagtagtatgtgaatgtctaaactttcaggcatactactgcagagataattactaaatttggtggtaaagttaaactttaaagttaaactataattcctttaaatgtgattctggaaacttta

SEQ ID NO: 267481 - DNA, 399 bp, Homo sapiens
tctcatctatatgttagtagaaataaagattaaatggttactggcccccaccatgataagctgaaaagtagattgcaataaactctgagggtcctccctccactccacttcaatttatttaacaacagctactctttatggagcactattctgagaatgacaattctctgagggaagtctaattagcctcattttgtacataaggacactaaatcatagaaagctataaatctggcaacagtcatgccaggagtcacacataggtctttctgactccagacccttcccaccagacctcacactgcttattcttgattcattccatgaacattattgagaacttgccatatgtaagtctttgagtcttacagagaagattccatataaactcccacccaa

SEQ ID NO: 267482 - DNA, 864 bp, Homo sapiens
gcagaaactatttccttcagtttcctgacactgtccaagtgatgacatcaattggcattactgagagcccagggataattttagcccaaaactactactcctaggaaggagtagtatgatctactactcttaggaaggatttaggaatagtaaaggtgtatttcttccaaacagcatagaactattagtactattagtcatttaacatttaacatggcatgggattttagagctttggtgcctgtaaagttttacttctattagctgtttcatttctttgcacttataaagttttcttctgttgcctatgaaagcaaacatttattccggttactggcaaggcagtttaaatcacctgcttctttcatgaaaggccaagacaatacatttattccctaacttgttgggagttgcgattacaagtctatatcctgatttctattagcacattcagctatccatttgtgtacactcccaagtcctagcttttgctcttcatgtctctttcaaccatatgatcaatcagttggacgacttctggtttttcctgaataaatatctaatcttataggtgcttctattaaatataattctgtttctttttcttaccatttatcattataacccagccaacatgtagaagtgcaataaaaatattttaattttcaactgttcaactgctaaaattattagcttgtaattaaaaaagaaaaaatacatccactatatatttagatatattgtaaatgtaacctttggtgactgataatttgttaagtagaatttaaattatgtatccaatttattcaaagtgtatagttgtgtaattatttactatttgattaaaaatagttatcatgcatt

SEQ ID NO: 267483 - DNA, 609 bp, Homo sapiens
tttgcctgttcttgaacttcatataaatggatttattcagtatgtactcttttgtgtctgacttctttcactcaagattcatctatgttatttcatctatgagtattttattctcttttatactgggtactattccattttataaatataatactatttgtttatccattatcctattgttggacatttggattgcttccagtgtgaagctagtatgaatggataaatatgtaggagtggaatttctgggtcatagggtaggtatatgtttaagaaattgtagtcaaatttacaaagtttttgcactgttgcctctcccactagcagtataacagttctaattctagtcttaaacctcaccaacatttgttgttattaatctttctcattttagccattccactgaatatgaaatgatataatttccttattcctaatgatgttgatcatctttccacgtgtttattggacatttttgtgtcttctttcattgaggtatcttttcaagccttttgcccaatttctaaattgagttgcttgtctttttgttattcatttgtaggaactatttatatattgtggatacaaatcctaatattttcttgtggt

SEQ ID NO: 267484 - DNA, 469 bp, Homo sapiens
cacgaggggaagctcagcgaaggaagggctttggaagttctgtagtagtttatgtttattccattgttctgtcctctgtggggaactgtccagaataggccagtgtctgaatcctggccagaggtcttcatcccaagttgaagatgactgtatacagttagctttattaggttttctcatgccaacatttcaatccaatttcctttttccaagccacaaagacctctgccaagctacctctctctgtcacagcctgtatgtcagagaatttatacagatgtacatatgcacacgtggatacactgttttcaaagtgcattttaggatattccagtatgcaaaaatctaataaggttagagatgagactgcattttatcacagcactttgtgtgcagggccctgactaaacacttgggggaggtataaaaggagaaaactcaatccctgaatgtagggaaatccccacat

SEQ ID NO: 267485 - DNA, 461 bp, Homo sapiens
ggagataggtttgtattggtgttatatgactcaagctacagtgtatgtaataggttagtggggcaacacagaagacaggagaccattaggaggctacttcattaactcaagtgcagactggtgatggcttagacttcattggtggcagtgggggtgagataagttgacgcattagaggccaggcacagtggctcatgcctgtaatcccagcgctttgggaggccgaggtgggcagatcacttgaggtcaggagtttgagaacaccctgaccaacatggtgaaaccctgtctctactaaaaataaaaaaattagccagacctggtggtgggtgcctgtaatcccagttactcgggaggctgaggcaggagaatcgcttgaacctgggagacagaggttgcagtgagccgagatcatgccactgcactccagcctgggtgacaggtgacagagtgaaactccg

SEQ ID NO: 267486 - DNA, 410 bp, Homo sapiens
atctgacatgatctccaggtagatagtactggaattgaattggaggacacccttttgtgttcactgcagaagtgattggttggttggtggtggagagaaattcccacatattttggggtcacagaagtcttctgtgttgattgttattgtgttggcttaagagcagagaaaaaacatggtttcagaattttttctgaaacagtaccacactgggtattagggcaattactctgtgatttcctccccatgcatattaataagtttgcatacctagtctcctgttctacctgttgccaaattttcagtgaaccttcagagggcaaagtgaaagttttccctttggccctaaaatatgaaagcaaagcatccttttattagcattaaagcatgcgttaaaaacattccatatt

SEQ ID NO: 267487 - DNA, 395 bp, Homo sapiens
caccaccaccaccacaggtgttgagacaaagcggcttgcggtgtttcaaaaatcaaaaatttggtgattttgtctctgtacactaaaaagaacagcaaattattgaactttgaaatgttggttgtgcttttttaaaatgaaccgaaagtatgtaaacgattgaatccaaacaaccagaagggaaagataagatggatgtttggtgcccttgtcaatctctgtgcttcatagctggtctaatgtgggcccttagttctcaccatgtacactctttagagatgtgatttgtgtctgtgtgatgcaggctggtctgttctccagcttccttgccttcttctccctggtgaaggtaaaatacataataaagctgatcctaaggctgatatctgacttga

SEQ ID NO: 267488 - DNA, 340 bp, Homo sapiens
gcagcaaagtgttcaaaaggtgacttgggtgccattaaaagcatttagttttggatgcgcacggtggctcatgcctgtaatcccggcactttgggaggccaaggtgggcggattatgaggtcaggagttggagactagcctggccaacatagtgaaacccccgtctctactaaaaatacaaaaattagctgggcttgttgtcagatgcctgtaatctcagctacttgggaggctgaagcaagagaatcgcttgaaggtgggagacagaggttgcagtgagccaagatcatgccactgctctccagccagggtgagagagcgagactctgtctcaaaaaag

SEQ ID NO: 267489 - DNA, 396 bp, Homo sapiens
gaataagcaaatgaagtttgctatctcttcctcccctcttccaggaagaaataatcaccatcagaactttaagagtttcccataagactgggcaaattagaggaaggacctctatacggtggaacagatgcaattgtgcaaacagaatggggttattctctacatatggagatggaacagaccctcccagatgtgttagtgtggggaaaagcaggtggtggaggtgcgttcagagtagcagtgttcagctctcccaagcacattcaaatcacccaggagcttttaaaacgtactgatgcctgcccaccaccctctcctcacagccccattaaatcagaatctctgggagtgggacttgagcacttttcattttaaaagctccctggtgactcctgg

SEQ ID NO: 267490 - DNA, 520 bp, Homo sapiens
gcagaagaactctctcccaacctcagtctttgtatcagtcaaagtggggctacctccctggcttcagttaatttgaagataaagtgagatagtgaaaagaaaaaggacatgctagagctacatgtactgttatagaaagatgattttggcatattgtcaactggacaaaacaggtttcagaagaaataagcataagaagattgggatattgggtgagaaatagagcaaacttaagagtggccatctctggtgggtgtgactagcacagcttgtcactcagatgttacattctgccatgatggttaaaacattttttttcaaaaatgcatcatatttagaatcacaaaaaaatagtcaagactttccattttagaaagaaaaagatgaaatatccagaatattttatgtccaaaaatggagaccacctgtatcaattttggtgtgtctttccctgcaggacgtctgaatcttcaaggcatatcctgaaaggattttgtgccagcgtttatctgaaaaaaaa

SEQ ID NO: 267491 - DNA, 688 bp, Homo sapiens
tgtataagctctggaaagctttgtaattttgagttggtctggcaatatttcccagccttctccctgtacctagttatagaaataaactctcttctatcccagttcatctgcatcttgttattgggccatgagaataagcataaaacaaaccttcctttgatgctggtacctaagcaccaaacaatagataccagcatcaaaggaaggtttggatacaatcttctttcgttttgtctggatacaaggagctagtttgggtctgctcagttaatgtatctatgctcatattttccttcctcaattataaaataaatcagaggtgaacactgtggttagccatagattaaccaagaaagcagaaatcatctcaaatgttcacagtggaaggaatggaaagcagaggtgggtccatgaagagtggagaggttgagaattaaacagtgggctctaaaataatcctgggagattgaagatggcaggaagtctttatcattcttgggctggagagacaaaaggaaaacatgcaattactggcaccaagaggaccactctaggagactgaatctctggtggcctcgatacaatgggggctggagtcacagagaagataaagcccctggagtggccaccttaggctgaaaacaggagggagtgtcttgatctccctcccccaaaaaccactcctcac

SEQ ID NO: 267492 - DNA, 421 bp, Homo sapiens
ccttgacagagtgcagcagacattattgctttcacaatgtgaacttgctagggacttcaatagtaagtcattcttcagtgatcacctcccatgggaaatcccccctgactccccgaggctgagcaggaatccctctattctggcacttacccactggtcagtatgtaatgctttgtttgtgtatcctctactggactgggagcttccaggagtttcattgccccatcctggtgtctagcacagtgcctacaaacagtaggcactcagaagacatacagactaagcgaatgactgactgaataaatgaatgaacaaggactttggaagagtgaccagttcagctttcactgaaaataattttagacatgggtgatttctgcagaaagtaaaaaagaaaacatgttcacaagaaaatttaaaa

SEQ ID NO: 267493 - DNA, 668 bp, Homo sapiens
aattatgcaaattagccagaagaaggggaaccgtgctaatgggccttattgggtgaggggacgagatggggttcatgtgaaggaggaagcgatgccgaggtaggaaaggccagccccagacatcctatcgccacaatgccatgtcgcaataggaagcaggggccggccatcgctaccttcagcacactgaccaacctggaattaagaccacctagattgcgagagctgaatttagaaaccagacaacgtcatgcagcccagaaactcctgttgttacctttgcctaagaaattttctttaatggcgggggcggggggcgggggtccaaagagaaatctctaaaagaatatgatcttccatccaagtggagggaaactttaaaacaaaaacacccagtactgtggctcaggatatgatgcttgaggagagggagggaacagagatgaccttaacttttaaaaaagggactgctgtgggccaaagccaagcccatctgccaggacgaggtaatgtcagagctccatcagcccggacagtgggaactaactggtgcattccccacacttaccttccggtgggttgctgatgagagaacctgaaaaaacctacacctctacagcaggtcgaattcatgacctgaagctgaatacttccagcatatttattca

SEQ ID NO: 267494 - DNA, 243 bp, Homo sapiens
aagggagttcaagaactcatcccttaagtggactgggcaagctggccatttaccacttgtcacagttagaattaggaacttggctttcatattatccattggtgtcacagagtgggaggaaaacatcagtaatggatccataggaccaccagtggaggcaaattgaatttgggatatgttatatcaaatctgttaaagggaaaaaaaagaaagaaaaggaggggagagaaggaagaaaagaaa

SEQ ID NO: 267495 - DNA, 522 bp, Homo sapiens
agtcaaaggatttcaatgctctgaagtggtcatgggaagggtccttagagaggagaagactggcagcaaaacaaaggagagacaaactcacaagacccacctgttggaatagaaacatgccttgcacaaaggatcagaagtcctctactttaatgtctctttatagggtgagagttctcctgagggagcagaaacttggtttctaaccggagcctcttcagaccctcccccaggaaatttgggcaaagtacttctatagcacacccaggaatctcctgcctctaagttcacagcagcacctagaacagggaagatagcttgacaacttcaaaagaaacccaagtgtagaaaaaaatatgctccatactacaaagagtgatcagcccttggtactaggatgaggcaatgaagggtaggaacaggatggggactaagatatttaccatttgcttctaagaatctttgttgtttcagtttttataacaaaggaataaaaagaaatatattcaattctaaactagt

SEQ ID NO: 267496 - DNA, 325 bp, Homo sapiens
aaaaaaagttcagatcaccaatcattattagataaatgcaaattaaaccaatacttaacttacgtaacttttctcacctattatattggtgaaaattaacaagcagacaatatattctgttggcaagactgtagagaaacaagcattcttctgcactgctgatgaggatgcaaactggcacaaccatccttggtgataatttggcaatgcttgacaaaactacatacacacttacttttgacccaggaattccagttctaggaacctacactgaaaatatatgttcagtactatggaaatacatacatgaaaggttattcatttc

SEQ ID NO: 267497 - DNA, 1088 bp, Homo sapiens
gacgggatttcactgtgttaaccaggatggtctcaatctcctgatctcgtgatctgtccgcctcggcccagcactttggatggccaagacgggaggactgcttgggctcaggagttcaagacccagcctgggcagcatagaggagaccgcatctctactaaaaattaaaaaattggccacgcgtgatagagcatgcctgtagtcccagctacttgggaggctgagttgggaggatcacttgagctgggatgtcaaggctgcaatgacccatgatcatgctgttttattccagcctgggtaaatttcatgtaaagcaggtgatacttcataactttatgaagtaggcaatacacacccatggtaaaagaatccagatatatcaaagcaaaaagagtctttcactcctgtcgctcttctgtttctcctccccagaggcaacaactttgaccattttctgtgtatctttaaacttgagcatgcatcagaatcacctgaaaggttattaaaacagattgcttgaccctttcctcagacgttctgagtcagtagatctgaatgttgccctataacttgcatgcttaaaaggtcccgggttgtgctgcttctgctgatctgggagacacactcaaaaaccactcttttagtgtatatgggtatattcactccacctcatttttttccataaatacatatactattctgcacctttgatttttctaaaatggtaaacctcagaaatcattccgcatacatagatctagatctgcatccttcctcttcataggtgcagtggtactccatggtctgggcataccacagttacatcagtctctattctggtcggctttgctgttcctagttttttgctactgtgaaccatgctgcaatgagtttccttttatataggtaagatctttgtatacatagatggaggaattgcattctatagatttatgtgacatgtcttccaaagcgattttaccaattaatccttatactacagcaatatgactgctttaattttcctacaccctgaccgcctttctgatctttgacaatctgataagtaaaaactttgacctgtggtt

SEQ ID NO: 267498 - DNA, 915 bp, Homo sapiens
agagggacgccccctcctccagcgggcctcttgtgaggcgcgcggagccgcctcccctgggtcaggtctgatgggccggtgggcgcgctagtggtggccgccaccgccgaaaccgtcgacctcctgggccccagttccgcgtccagccccgcggcagcatggactacctgacgacgttcaccgagaagagtgggcgccttctgcggggcacggccaaccgcctgttggggttcgggggcggcggcgaagcccggcagacactggccaaaagaagaccctagacaagaaagatggaagacgaatgtcttttcagaaacctaaagggactattgagtatactgttgaatcaagggattctttgaatagcatagccctgaagtttgatacaacacctaacgaacttgttcaattaaataagttattctcccgagcagttgttactggacaggttctgtatgttcctgatcctgaatatgtctccagtgttgagagctctccatctctaagccccgtaagtcctctgtcaccaacatcatctgaggctgaatttgataagaccactaatcctgatgtccatccaacagaagcaactccctcatctactttcactggtattcgacctgcacgagttgtatcttcaacttctgaggaggaggaagcatttactgagaaatttcttaaaattaattgcaaatatattaccagtggcaagggcacagtcagtggtgtgctgctagttacaccaaataatataatgtttgatccacataaaaatgaccctttggttcaagagaatggctgtgaggaatatggcatcatgtgtccaatggaagaggtgatgtcagctgcaatgtacaaagaaattttggatagcaaaataaaggaatctttacccatgtaagagtgatatttata

SEQ ID NO: 267499 - DNA, 1027 bp, Homo sapiens
tttctttataggtcctctcaaactgtgagtaactaagtggtttgtgcatcattccagaagcaaagctaaaatttttagcggtgttgtcgacttgacctgctaatttcctgttctggaatcgagagaagactcctcaacaagttgctgcaatgtctgtgtctaatctatcatggctgaagaaaaagtcccagtcggtggatattaatgctccagggttcaaccctttggctggtgcaggaaagcaaacaccacaagccagtaagcccccggcacccaagacccccatcattgaagaagagcagaacaatgcagcaaatactcagaaacatccttccagaaggagcgaactgaagaggttctacacaattgacactggccaaaagaagaccctagacaagaaagatggaagacgaatgtcttttcagaaacctaaagggactattgagtatactgttgaatcaagggattctttgaatagcatagccctgaagtttgatacaacacctaacgaacttgttcaattaaataagttattctcccgagcagttgttactggacaggttctgtatgttcctgatcctgaatatgtctccagtgttgagagctctccatctctaagccccgtaagtcctctgtcaccaacatcatctgaggctgaatttgataagaccactaatcctgatgtccatccaacagaagcaactccctcatctactttcactggtattcgacctgcacgagttgtatcttcaacttctgaggaggaggaagcatttactgagaaatttcttaaaattaattgcaaatatattaccagtggcaagggcacagtcagtggtgtgctgctagttacaccaaataatataatgtttgatccacataaaaatgaccctttggttcaagagaatggctgtgaggaatatggcatcatgtgtccaatggaagaggtgatgtcagctgcaatgtacaaagaaattttggatagcaaaataaaggaatctttacccatgtaagagtgatatttata

SEQ ID NO: 267500 - DNA, 628 bp, Homo sapiens
ctcctgacctcgtgatccacctgcctcggcctctcaaagtgctgggattacaggttgaatcaagggattctttgaatagcatagccctgaagtttgatacaacacctaacgaacttgttcaattaaataagttattctcccgagcagttgttactggacaggttctgtatgttcctgatcctgaatatgtctccagtgttgagagctctccatctctaagccccgtaagtcctctgtcaccaacatcatctgaggctgaatttgataagaccactaatcctgatgtccatccaacagaagcaactccctcatctactttcactggtattcgacctgcacgagttgtatcttcaacttctgaggaggaggaagcatttactgagaaatttcttaaaattaattgcaaatatattaccagtggcaagggcacagtcagtggtgtgctgctagttacaccaaataatataatgtttgatccacataaaaatgaccctttggttcaagagaatggctgtgaggaatatggcatcatgtgtccaatggaagaggtgatgtcagctgcaatgtacaaagaaattttggatagcaaaataaaggaatctttacccatgtaagagtgatatttata

SEQ ID NO: 267501 - DNA, 1015 bp, Homo sapiens
agagggacgccccctcctccagcgggcctcttgtgaggcgcgcggagccgcctcccctgggtcaggtctgatgggccggtgggcgcgctagtggtggccgccaccgccgaaaccgtcgacctcctgggccccagttccgcgtccagccccgcggcagcatggactacctgacgacgttcaccgagaagagtgggcgccttctgcggggcacggccaaccgcctgttggggttcgggggcggcggcgaagcccggcaggtgcgcttcgaagattacctgagggagccagcccagggggacctcgggtgcgggtccccgccccaccggcccccggcgccgtccagcccggagggacctgacactggccaaaagaagaccctagacaagaaagatggaagacgaatgtcttttcagaaacctaaagggactattgagtatactgttgaatcaagggattctttgaatagcatagccctgaagtttgatacaacacctaacgaacttgttcaattaaataagttattctcccgagcagttgttactggacaggttctgtatgttcctgatcctgaatatgtctccagtgttgagagctctccatctctaagccccgtaagtcctctgtcaccaacatcatctgaggctgaatttgataagaccactaatcctgatgtccatccaacagaagcaactccctcatctactttcactggtattcgacctgcacgagttgtatcttcaacttctgaggaggaggaagcatttactgagaaatttcttaaaattaattgcaaatatattaccagtggcaagggcacagtcagtggtgtgctgctagttacaccaaataatataatgtttgatccacataaaaatgaccctttggttcaagagaatggctgtgaggaatatggcatcatgtgtccaatggaagaggtgatgtcagctgcaatgtacaaagaaattttggatagcaaaataaaggaatctttacccatgtaagagtgatatttata

SEQ ID NO: 267502 - DNA, 494 bp, Homo sapiens
ttttattttgttttctgcttttttttttctttcctttaaaaaaaaaaaaaagaatcctgatgtccatccaacagaagcaactccctcatctactttcactggtattcgacctgcacgagttgtatcttcaacttctgaggaggaggaagcatttactgagaaatttcttaaaattaattgcaaatatattaccagtggcaaggtaaagaatgacactttagagaagacctttaatcatgctttagttattactaatgtatgatagtttggcatttacattttaagtcatcaatgtcagaaaatgcttgaatattatagaaaggtactagtgatactattattttgggttagtatggatgttgcttataacttagagtctggtgatctgttgtaattgttaaaagtaatggaatataaataaattcactaaggcacagctaagttgctgttggtaggatatttcaaaagtgtgaataaaatgactgctgccaggt

SEQ ID NO: 267503 - DNA, 383 bp, Homo sapiens
cagaggcccagggagcaccaaccttttgggagaaagaagagcccttcaagctgaggctgagcttgagaaaggtgaagcagtgagcagaggatggggtcccatgtgctgaggagggcctggtggaggaggtcacaccctgctaagaggacagcaggacgccggctgggaaggaggccctggatttcacaatgtgggcaggtgaattcatcagaaattgtcagagccatgcggtggaggaggaaatgaggacagggaggggacacagctctccggtgggaagagtgaggagtagcggctgggaagagacgtggagtccaggtagggatcttacgcatctttcaattgtcccttaaaaatcccagtcgggtttagccccactaggg

SEQ ID NO: 267504 - DNA, 464 bp, Homo sapiens
aattcaactttttcttgtctggacttttctctgctttttgggagcactcccagatcactattagttctttgtatgggtccaatggtgttattcaaggtttatgatatcgtgctaaacatgatgaaaaacatatgagaactgcaagagatcactttttactgcaatgtgcaatttactggagaaactgcttacgtggagatgattagtgtcatgagaaatttaagcagatatttacaatacttgagcaacaggaggcggctacaaaattattacagtagtacacaataaactctagttaattttatgcagttatgatttaataccacatctttacatttgtttacatttctcttaactgtcaatggcaccatgtttggtctgtaagtgtgtgtctaagttttgaaaatgttaactttttatactttgtgtatatttatggtaataaataaaaaaggccaatatct

SEQ ID NO: 267505 - DNA, 377 bp, Homo sapiens
gataagcaccccgagtgagacagattggaagacaaactaacacaccaaagttgctgagtacacacgactctttaaagatggcctcattcactactcaggctttattaacttcaaaaaagaaaaagaacaacaacaaaaaagtcgagcttggaggtttcagaaactccctaagaaattactagaaacccctcagtggaaaatgccaatgcatgcacacatgtctgacccagacccacatttcttgcagtacaagggctgatggagaaacatcagcagggaagacctgttggggagctggagggacaggacctcttgacaagcctagagtttactcagacgtcccaagttctgagatataaaccaagttttatccccag

SEQ ID NO: 267506 - DNA, 224 bp, Homo sapiens
tcttaatttataaaaaggaaaaatctaacaaaagaataaacagttaaaaaaagaaaattatagacattgcctttttatgaatgctttaatcaagttacagaaagctcctgtggaataatgcatataagattttttaacctcatttttctataaagtagtaaaggattcctgtttattcttaaataatcagaaacataaaggatgtggcttgttttgaagcatga

SEQ ID NO: 267507 - DNA, 224 bp, Homo sapiens
cctgccttggcctcccaaagtgctgggattacaggcatgagccaccgctcccggccaggacttcttaacatacagctgtcacttggcccagagcctgccagggatccttgtgtccctggctcctgtgcccagcttttgcgggttcacagctggactcctctggccttcggagagggctgcccttgccaccctctgcacctgccacccaacttcctcctcatccc

SEQ ID NO: 267508 - DNA, 426 bp, Homo sapiens
gctgatgtttgatggttaccttttggtatatatgtcatggcatgagaaagaatcactgctttagtctgtagaagctttgtcgtcctttgccatgccctggggagggagcaggaccatcctttgcacccatcagagcattcctagttcttttgttgccagatacgtaagagtggttgagtttacaggtgtctgcatctctctttagcagaaagatggggtttcaaatgtgttgcctctttccaattttgctatgcctatcagtagtcagatattttggggagaagggaaaaatccaaggtaaatgtgaggttcttacagtgaattacttttcaaaagaaatttctgctaccaaggggcatttgggaagtggctgtgtggagaagttttcattgtaatgcgaacatattgccaaaaaatattgtacat

SEQ ID NO: 267509 - DNA, 424 bp, Homo sapiens
tcttacttgcttcccatttaaatcagtgcaagagagaatatgaatttataatgctttacttgggatgcctgtggaatatgttgcttttctttatcatgtttcctaaaagtaaatttgcaaagaaagtaacatgctgcagacagtataaggcttcagccaagagcttcttttagatatgataatgaattgtggtaaagaggaaatgaaaatgaactagtgtgtaggattttgaaatttggtattttccagggagaaaaccgttacattttcctgtagtggttatgatgttgtgtcctgaacccatttggtactgaaacattctgcagaatgttatactatgagaagaaattgtgaagcccaaatgggaacaagagacagtgtagttgtatatgacagtaaatacagtacaagttcactatcaaaa

SEQ ID NO: 267510 - DNA, 370 bp, Homo sapiens
atcaaaacaatattcacatgatccaaatactgggataataatgtattacacacacacacacacaaacacgtatgtatgcatgtgtaacatatatgcagatacacattacatagctatatacacatagatggtttgtcttattttgtagaaatatataactttgtataaaaacaatgttttaaattgttggggaaatttcttaatatgtagcaaaagcataaccagcgttcaagtcaagcctgaagttaggaaatctttaattttataaatattcagctcttttataccattgtatgtgtgccccttccctgtctaatattctaaaagagaaattcatttctgtatattttctccagtattcagtcattca

SEQ ID NO: 267511 - DNA, 524 bp, Homo sapiens
ttcatagtatgccagaaattttattttattttgtttgttttagagacagtgtctcactttgttgctcaggctggagtacagtggtatgatcatagctcgctgtagcctcggactcctgtgctcaatggtcctcccatttcaacctcctgagtagctagggttacaggcatgcaccaccacatgtggctacatatttagtttttgtagagatagagtcttgctgtgtttgaccagactcatctccagctcctgtccttaagcgttcctcctgccttggcctctcaaaaggcaggtattgcaggcatgagccactgtgaccagcccaaaattttaaaaagaagcaaggaaaattaacaagcccaccttaaatttatttattcttagaaaattttcttcaaaaacatatacttaaatgtgacatggctatggctattcagtgcctgcaaaatagttcccttggaaacagtattaagaattcccatatgaatgtcactatcttcaaaacagctggggttgagttacct

SEQ ID NO: 267512 - DNA, 580 bp, Homo sapiens
agactgcgtcttctgttctagctctgctggccccagggctggagtccattaaagaatataaatcaaagagtgagaagccatccctgtagttggtcctatgatcacacatgctaagcaagcagtgtgtaattatgggaggacattaaaatgccagtggaagagatggatgagattcaaaacatgctttcttttctgggtcagtaaagtctgtttccttttttgccagaatacatgttcccttttattctatgaagaatagaaagtgtatctgagccatcagtaattttaaaagaaaggaagggaagaagggagcaaagggggcagaaagggagagaaaaaggaaggaaggaaggaaggaaacttccttttgataatcatctttcttgatggaaaaaataatgtacaaaatttaaaaataagagcaatttttggaaagtgattgttgattctggaaaagaaattctgaacagtgaagagatctttaaagataaacaaaactgaaacttaaatatagaggatctctatgaagcttgagagaaaaaaaaaagaaaaatgaacattagagacacctaactttcag

SEQ ID NO: 267513 - DNA, 122 bp, Homo sapiens
gggtggatgggtggatgggtggatggatggatggatggatggatggatggatggatggttcgttggacagatagataaataaaagcctgagcttcacagtggctaacagtactgaaccagaa

SEQ ID NO: 267514 - DNA, 423 bp, Homo sapiens
ggtcatggcaacagttttttggggatgctcaaggcattttgcttgttgactttctggaggaccaaagaatgatagcatcagcttatttgaaagtgttttgagaaagttaaccaaagctttactacaaaaatgccaaggaaagcttcaccagaatcctgctccatcatggcaatgtccctgctcattcctctcatcaaacaagggcaactttgtgagaattttcatgagaagtcattcagtatcattaagtatgctgatttgtctcctttgccttttttgtttcccaatcttaaaaatctatgaaggaggcggagcatctaggctgaggcaggagaatcgcttgaacccaggagacggaggttgcagtgagccaagattgtgccactgcactatagctaggtgacagagtgaaactcttatctt

SEQ ID NO: 267515 - DNA, 239 bp, Homo sapiens
gacaggaggcactgatgtggtcccaactggagaccagctgcagtcgaatgccatctggaagtgaaagcatgcaatgcacttcacagctggtccctgagggagggcaaggggatggctatgtgtgtacctgcctccatcagtgacaacctcccagcaagggaggtctgggtgagcaccaagagccgtcactgctactgtctgcttcccgtcgaacacaactggaagcattgatggcgggg

SEQ ID NO: 267516 - DNA, 391 bp, Homo sapiens
gttgaatggtttttatttttgtgtattaaacatgacagcccaatgaagaaaacttgtaagagttttatagggtacagtttaggtcacagaatgaagttcaacataacttgtttattttacattgattgtttaaccagtaattatccatatgacatcccaatgcaaatgctgacatccatttccaaaagagttgtttttttgtgctttttctaaggttacaaaggtttttgtggtttaaatgttgttacatattttacagcattaggatctatggaatattttgacaactgcaacagttcaatgaagttggtaatttcttcttttaattatttttcattgaacagctttggagttacatttctacattttgatttctggtatattataagga

SEQ ID NO: 267517 - DNA, 223 bp, Homo sapiens
gagaatgtcagtggttggttattttggttttcttttggttatttgtttagaagggtgagagacagggagtggctgcagaaaatgcatctaacagtaatactgaggtcgtagaagtaacctagccacattctttgtattgggagataacatggcttctgtgtggtaactggttatataacgtgagttctcaagtgtctgccgtgcctgtattaagtgtgctttc

SEQ ID NO: 267518 - DNA, 497 bp, Homo sapiens
agatattttgatgtgtttctgtactgtccgttcttaaatgatttttatgtagttcatttatgtctcctatgtattgtacgttttcagatactatttttttgactcaaattataatttgcacatcacttgaagttgtatttttaaaagactattattgctggacatttattactattgggttgttagttgttagaactcggttataaaaattcatatagaatatgaccaagtaatttagatctgtatgaggcaaaaagcaaaagtagacctattcattctacaagtggtttttacaccttccagatgtaaagggagtaacaaggcaagaaaatgggattacaggtgtgagccactgcacccagccccagatttcttaatgttaaatctagttcatgtaaattagtgccattttattatctaacagcattattcgactattacatactagtaaatggtgatagagtaggatccctgggttagcttgcattaaaaaaaaa

SEQ ID NO: 267519 - DNA, 450 bp, Homo sapiens
tggtgaaagtacatatttttgggtatgactatttggggaaatactttaaatatccttaaaccttattgggcgaaaatgaagtgggctcgtccgggatttgaacccgggacctctcacacccgaagcgagaatcatacccctagaccaacgagccacttagaaatggcttttgcttatatttactgtaggatttattcccaaattatttatttttattcctcaaagaatttgttaccaaataatatttatcactccatcaatcatttacataaatgaaagggttggaaaggctatttctgtggatggtctgctggtagcttaaattaccatactatggtaaaacttgtcacctgtagaaacatttctcctttattctactttgctatactactctaagtaatttaactcattttttccatttttagctttcaattaaaatattttagaaaa

SEQ ID NO: 267520 - DNA, 283 bp, Homo sapiens
ggcgtggagccttccggcaagtcaggccatctgactgagccccacgggtgcaccccttcgtaacctggtcatcacagctcacaggggagagccagagtctatgttcccaaggaggttttgaggggtgatgcgtgaatatgggagacacagtagaaggtgtgtgcccggggatggggtgcgggacggtctcagtgtttcagtagaggaagagggtactggaaagactcctgagttccctcccacgctctgtggctgcactgcggttctggggagactcttatcc

SEQ ID NO: 267521 - DNA, 442 bp, Homo sapiens
ccaaggaggtttccaagctccatgcctaggcacatgtctgggtgcttggtggccacacactgaattctcccttacagctggtacttatgcctgccattgatgttctgtaggcaattctgcttgttctagtacctcccatcttgcctcctatcccctagagactgagaagggagctcaaactactgtgcactctgtgaatcagcatattgcctgtaacaaagattatatacgcagccacagtggctgcagccaatacatatctatgagcaccatctactggcttgtaggtcaaactgcacagtccagtgaaaaacctgccaacagaagtgcatagagttaaagaagcaaagccaaaggacactacccagcattctctagtcacattccctagaaaggaagagaaaggggaaataaaggaaaaaataaaagcaatattatagtg

SEQ ID NO: 267522 - DNA, 294 bp, Homo sapiens
ggctgaggcacaagagtcacttgaacccaggaagcagaggttgcagtgagctgagatcacgccattgcattcccgcttgggtgacagagtgagaccctgtctcaaaaaacaaacaaaaccaacaaggcagagatgtggccagggcttctgaaggaatgcatgaagtccacccagcacccactccagttgtgtccctccatcctcccagactaccccctgcccctgcactcccagccatgccccctgtgtggggctctggtcctctcaccctctacctttgctggagaacataca

SEQ ID NO: 267523 - DNA, 830 bp, Homo sapiens
gcaggtcgttggcatttccatattagccttattgctcagagcttcataactttgaattttaagtcaataactttttgaaatgtcagacagaatttgacaggtttaatacctgttttctgaggaagaaaaaaaaattatatccatgctgtcttcaggcagagggaaagtgcatgttgtgattgagaaaggtcttatttttccttaaattaggacactcatctttaaaagatagttcacacatttgtatttttttaaactaaggaaatttaattagggctttacttttgactaagttatttttggctgctaacttttaaaattatggtaaatcaataatataatgtagtatgaatcagtgaacagtatgtatcgattgtaatgtgcgctaccagttgaaaccattttaacactagtagcttaatatcattaaaatgtttttcacgtaaaacagaaaaacgaccaaagccccaagttaaaggtttggttttttttcttttgtggtgtggtgattcagagttccttgcctcatatttcctttaactttgtcataatccatgattatctttaaattgttccattgagtcgagttagtcaatgttgaattcttaattctagctatattttttcattttaatgttcacttaatgggacattttatgtacaccaatcttgaagaatggctctcatagtatatttcagactaagcctcatttttgatatcacaatacatttgctttatttattatgagagtttttttattctaaagagactgtaacaatgcatttctcaaattaaaatactgtatacttgtccttctcgataactattt

SEQ ID NO: 267524 - DNA, 674 bp, Homo sapiens
cagcttgagtatatttaagcccagatctacacagtactcacagggcaggattcacacgtttaagcctagatctacacagtactcacagggcaggattcacacgtttaagcctagatctacacagtactcacagggcaggattcacacgtttaagcctagatctacacagtactcacagggcaggattcacacgtttaagcctagatctacacagtactcacagggcaggattcacacgtttaagcctagatctacacagtactcacagggcaggattcacacgtttaagcctagatctacacagtactcacagggcaggattcacacgtttaagcctagatctacacagtactcacagggcaggattcacacgtttaagcctagatctacacagtactcacagggcaggattcacacgtttaagcctagatctacacagtactcacagggcaggattcacacgtttaagcccagatctacacagtactcacagggcaggattcacacgtttaagcccagatctacacagtactcacagggcaggattcacacgtttaagcctagatctacacagtactcacagggcaggattcacacgtttaagcctagatctacacagtacttacagggcaggattcacacgtttaagcctagatctacacagtactcacagg

SEQ ID NO: 267525 - DNA, 472 bp, Homo sapiens
tagactcagttacccagtatgccttaattttttaatgtgtgatgtgcgaaataattatttgaccactggatggcagtaaacaaagacaactttgagcatgatgtattattttccctctctctttgttgggaatgtaaattaaactaacgaagtctcatattttccacatacattttttgaaaaatctaagaacaatgggaacctatcattaatatacaacaattctattctgtattatatcaataaattttaaatatacttaaaatatgttgaaataattcagataactgttttactactttgtactatttacgcatccagcttgcatgcgtgtgtaaagttcatgaaaatccaatttagaaatattgattgattgaaaataattttttgaacaaaatatggatacaggaccagttagttggccactctgacttgcaggacattcctaaagataagaaagaaggaaaagaga

SEQ ID NO: 267526 - DNA, 407 bp, Homo sapiens
gaaaattggaagctcatgagtttggccttatctggtttctgcctgcctgggaagccccctatcagattactttcctcatctgtctgcttctttcagtaacttggccctccaatgttcttttccaccttagtgctttccataatgtatattccttctctacctagaaatttcattttatctgctcagattcctaattatattcacactctttcttaacttaaatgttactttgcttaaagacattttccttggcccttcagactgtataaggacctctctgaagtattttcatagcatctcatagtgctatttcagagcatttattttattgtaaaaaattgtgtaatggtttgtgttatacctgatctgttttcctgtatcaaaaataaaattaggatgaatctaaa

SEQ ID NO: 267527 - DNA, 405 bp, Homo sapiens
gagtgttttcgttgcattagtggtcttggaacttaaatatgaatattttttctgatttcccttgagattaaattttgacaatgaaagaggtatgctcaaataacagacgtctgtgttcacactattattggaaaggaagttccattaaaggatgctcaattacctgcagattctttgaataggagcaagtatccataatatgtgatgttataggtttttaaatattctagaactctgaaaagtaatgtgtgtgtaaaggtagaaggaaaactggctttcagtttttgaaaaaatcacaaaccaacaccctaatgattgttgttaatatataaaatacaaataataggacaatattactagtttttatacttgagttatattattctgaagaatgtttttcaaaaa

SEQ ID NO: 267528 - DNA, 512 bp, Homo sapiens
cgtctcaaaaaaaaaaaaaaaatcctaactctgccctacttttccagccttatttctcgttcttccacgtggcctctagcaatctgacttgtgttctcttgtctgcagtgcagctcttttctccagtcctccagtttaagacctgatgctacctattctttccaatccagctgaacttcctcctgttccataaaatagaaaaagtgaattcttcccaacagaaagtaatctctgctctcaacctctaccacaccttatgtttccaggcacatcactttatgtattacagtatagaggaggtgtgtgttaagttgaagcttagtcatcattgtcagccacatgtagtcaaaaattggcctaggaaatcctttaaattgctaaaatagtacaattccctttacattgaacttggccagtttttccttccaacattggaacacatctctgttctattgaatgctagttgaaaaagctgacttatatttataggtgttacatgaaataaaaaagaa

SEQ ID NO: 267529 - DNA, 535 bp, Homo sapiens
ccccaccccaccccttccagaaacagatgacattcttctaccagggagacatgaggagctaacttaggaaatgggttttaataatgtgtaaatatcacgatttcagagtctaaggagcttctgtgtaaaatgatgagcttctgtttggatttagttagggattcaggggaagggcatgaaaagtgacttatgctactaataaacactctttaattaaacagtgatttaagtttatcttataatgaaacacatcaactagcatagcaaataatcacgtattatttaagtactttcttagaaatgatcatttctttattgtgtgcctcttaagagtgtttctggtcagtcacctttcctttcaaggtcttccttattcaaactaaggtggcttttaggtcaaggtcacagtcattacctggggatgcaaggggatgataattgctatgtgaacagccacaatgaactgttttgccataaaaaagctggagttgttcatttatttttaaataaaataagagttactgtgctattattg

SEQ ID NO: 267530 - DNA, 180 bp, Homo sapiens
gttttttatgattggatgtaatagtttcagaagcaataaggagaagatgagaaaaatgacacccagtgatggccacagggtcagatctgagcttaggtgtctctggttcaaagtctcctgaccactttactgcctcttctctctgttgccttggctgggcaggtgcagtctggggtacac

SEQ ID NO: 267531 - DNA, 345 bp, Homo sapiens
ctcaaaactgtgttgacagtataatccctttcatcaattataatatattgtacataaggtggaacattttcctaaattaatcactgagcttttcattcttaaaatttcccttttacatgtattaaaactagaccatgacatcctctgctcaagtcaagaaggatccagccaaaatgcagataatcaaatgtaaattcttgtatttcaaaaaccctcaaatcagattttggaagctcatagcatagataacattttgagattaaaaaaaatatcagagtaacaaaaatcactgtcctgaagaagacatgttaccaattgacagagccagactattatctttaaaaa

SEQ ID NO: 267532 - DNA, 655 bp, Homo sapiens
tgctgggattccaggcatgagccaccactcctgactttaattttatttttaattgtacttgtttatttacttagtgtcatatctgaatgacttactttttctgcctattttaaggtaacttttacgtaggctgcctctccaggaagaaaatgtatcctggattacaaaagaagagtgggaaataggggaatctaataaagctgtgttaatgagtatgactttgtacttttttagaagcagacttcaattgttttaatacggtttcatggatacgataaaaaatcaaatctggcaaaacccagtcgtaaatgaggcctccccaaaatcattgcagaaaatcatattattatatggttaatgaaatgaccagagtgagcctgtaccgctagcctgcaagaaattctggggtctagcggcatgatttaagtctgtcttggccctggccaccagttgctgtcaccttgtttaaacatggatggggacaattttgagtccagctactgggattaggacttctactttattaatgcatatatttctgtaaaatatatttctagaagtaggattagtagattggtattaagcatttccagtgccaagtattattaatacttgcaattttgaaattcaaaaagctctgaaaaatcaagttgtt

SEQ ID NO: 267533 - DNA, 165 bp, Homo sapiens
ccttggctctcctgacttcaggtggctgccagcactccttggctgcagtggcctcactgcaatctctgtctctgtagtcatgcaggggccaaggcaacacttccccttcaccctctgaaggcttgctagtaaataaactgacaaaaggcagattaattggaggaa

SEQ ID NO: 267534 - DNA, 280 bp, Homo sapiens
cagttgcttatttatttatgtctttggtgatttttaatagtctttaatttttaataattaatttctaatagtaaatattttacatatttatttgatctgagagtaatagtccaccaaacgtcctattaacttcttatactctactgtggtttcttgggggttgtaagaggataaaaatcatgcatatgggattgcagttgacaaatattaaaataattattcattctcgtttgtacagcagtgagtaaaaaataaaataaaataaaaagggcaataatta

SEQ ID NO: 267535 - DNA, 480 bp, Homo sapiens
ggaagcatccagggtcagtttaccatggcatctggtcaccaggcttcacacttgcaatcagcacctgctctcctccccttaaagacagttggcctttaagtccacctctgcctaaataggcttcccatgctgctgatgtttgctacagggcaggtgctttagctgacccccaaaaagcctcttaattacaaagcctgcatcaagtcacatgtgcctgaatcatccatcaaagtggccaaacgggacaattaatcagacttgaagaatgtaaaacatctccgtacagaatagagggtaagctgcaaacaacctcgccatgtagcagaaccaacaggatatattgataaaatgctcatagaaaacattctaaaagctgccccaggagaaaatggatggggaaaatgctactttcctcagaacctaataattctgaaggaaatggagcataaaacaagcatgcatgaaacatcaaaaaaagaa

SEQ ID NO: 267536 - DNA, 1107 bp, Homo sapiens
  misc_feature (729)..(729): n is a, c, g, or t
atggaacctgggcagccccgggagccccaggagccccgcgagcccgggccaggagcggagaccgctgcggccccggtctgggaggaagccaagattttctacgacaacctcgcgcccaagaagaaacccaaatcgcccaagcctcagaatgcagtcaccatcgctgtgtcctcccgagccttgtttcgcatggacgaggagcagcagatctacacggagcagggcgtggaggagtacgtgcgctaccagctggaacatgagaacgaacccttcagtcccgggccagccttcccttttgtgaaggctctggaggccgtgaacaggcggctgcgggagctgtaccctgatagtgaggacgtcttcgacatcgtcctcatgactaacaaccatgctcaagtgggtgtccgcctcatcaacagtatcaaccactatgacctgttcatcgagaggttctgcatgacaggtgggaacagcccgatctgctacctcaaggcctatcacaccaacctctacttgtcagccgatgcggaaaaagtgcgagaagccattgatgaggggatcgcagctgccaccatcttcagccccagcagggatgtggttgtgtcccagagtcagctgcgcgtggccttcgatggggacgccgtgctcttctcggacgagtcggagcgcatcgtcaaggcccacgggctggaccgattcttcgagcatgagaaggcccacgagaacaancctctggctcagggccccttaaagggctttctggaggcactgggtaggttgcagaagaagttctactccaaaggcctgcggctggagtgcccaattcgtacctacttggtgacagcacgcagtgcagccagttccggggcccgggctctcaagaccctgcgcagctggggcctggagacagatgaagccttgttccttgctggagcgcccaagggccctctccttgagaagatccgcccacacatcttctttgatgaccagatgttccatgtggctggggctcaggagatgggcactgtggccgcccatgtgccttatggtgtggcacagacaccccggcggactgcacctgcaaagcaggccccatctgcacagtag

SEQ ID NO: 267537 - DNA, 521 bp, Homo sapiens
tactttttaccacaggggttgtaaattcagattcctcttggccatacgggaaatcaacaggaataaagtgggcttggtgggtagtgttgccaagtggagagtcccatgggtgggtctggaggggcagctctacttccctactgtcactgcttgggaatgtgggctgagagctgctgccacgtcttccactttttaagagaagataaaaatccatgcttttagtgtagtatctcaattttaaaaagatgttgggaactaattcaattaaggcttgaaatatacactcaacaccaaaagaaatggctcaggctggatgtggttcttcagccccatttgcaacctgtgctctatatgttatgtttcatcagcaagtcctttcgacactccttcctatgaatgaactgtgaagaaaacagcatggttgaaaaaagttcaatcataaggtgatcaaaaatggtcaactccttattaaaaagaaaaaagagaaaaacagaaatctctctcatgctgtttatgttttt

SEQ ID NO: 267538 - DNA, 408 bp, Homo sapiens
cagtcagccattctcgcctcccaatgtctagtaaaacttgagttattataaatttaagagattatctcgcccaacttccttatataaatgaggaaactgaagtaccgttgttttcaggctcccctgtccagggctgtgtcccttctgccccttactcactggtgctgccgttcagccagctcctggtaaatgcctcttaagtggcaggcatggtacctgacactggtgataacgaagatgaatcagtaacagtcactacccatgtaagcttggtgtcatgggagaaatagacatctaagggtctaaattcctgccataagactgtaagcatttattaaacatgtgtttaatgactagatcttgaggagaaaaatgcgttagcccaagggagagcgtctgattttgctt

SEQ ID NO: 267539 - DNA, 482 bp, Homo sapiens
catatattcagttacatctcttagaaacattaaaaaaccatttggtccagtagtggtccatttattatttgtaaatatgttaacttgttaaaaaaaaaaaaaaaaaactcgatggaagtttagcttctaaatgttttctctgatgccttttcattgccccaggctttgggagaacatgcgcaggtgtgtctaggctctttagtgctggtctgggctacagataatgatgcttaaatcatacgtgaggcttggagtgagttgaacatggattagcctatctcatctagaaattgatttaaaccaagtggggactcaatccagggctctccctacctttctcccctcttaatcatttcctgccttagttcatgctgtgtaaggaataaacgagcaatcacaaacattcctgaaatgaggatacccgtaagaattaggttttaaaagtgatttcctcctcaggatgcggtctgcatgcaaaaaaa

SEQ ID NO: 267540 - DNA, 369 bp, Homo sapiens
ttaaaacacaaacacattgtacagctgtacaaaaatattttcttcatatatccttattccataagcctatttctactttaatttttattttattattttctaattttacttctaaaactcttttgttaaaaattgagacacaggctggggacagtggctcatgcctgtaatctcaccactttgggaggctgaggcaagaagattgcttgagcccagaagtttgagaccagcttggtcaaaatagtgagaccctgtctctaccaaaaatacaaaaattagctggatgtggtggcctgagcctgggaggttgaggctgcagtgagccatgatggcgctactttgctgagtgatggaacaagaccctgcctc

SEQ ID NO: 267541 - DNA, 482 bp, Homo sapiens
gaagaactgttgagatgggaccaagcactggacctgcaaactggcctggcataagcagctcaaagggcctggactgactctgattggcacactaagttcagatgggtgcatcacacatcccccagctcccagaatccctcctcagagaaacatgggagcagcagagaactggggggcagacaggtcccagagccttctgaggcacaattcacatccacagggagcatttgcaatgttctttaataagaatatccactgccccctaaccgggtgcctaccttgtgcctagcactgagctttttgtgcatagtaatctcattgaaagctcacatcaactaaaagatgggggctgtcctcacatttttaggtacaaagaaaccaagactctggaagggcaaatgctgaggtctcctaactggtgtgtggtagctcatggcttccattgctacacagtgcaaatcagctgtgtgaggaaaaaaaaa

SEQ ID NO: 267542 - DNA, 386 bp, Homo sapiens
tccctcactttttccactctggccacactggcatcctggcacattcccaccccagggcctttgcacttactgttccaactccctggagtgccctcactcccacaccaagtcccttgcttccttcacagctttgctgaaatctcacttgctcagtgaggccttccctgaccaccctgcaaccaattccccctccctctgcaacattgctggcttttttctcacagcatttatcatttcctaacatactatgtaatttgcttgtttattatatcgtttctgtctttccctatatggtttcctttgttcactgatgtgcccaagtgccctgttcctgacacatagtaggcactcaataaatattcattaaaggaatgaatgaatgaaga

SEQ ID NO: 267543 - DNA, 834 bp, Homo sapiens
tgggctcctttcctaacatcctctctttcagtttcataaatggctgaatcacttctgtgggctgccttgagagccatgcagtccattctggtggtttcgatatgtgtttgtgcaggatacaagtgccagaccagtcactgttgagatttccccattgcactccgtcagttctgtctttaaaaagcgctagcaggccgggcacggtggctcacacctgtcatcccagtactttgggaggccaaggcaggtggatcacaaggtcaggagtttgagaccagcctggccaatgtggtgaaaccctgtctttactaaaaatacaaaaattagctggccatggtggcgggcgcctgtagtcccagctactcgggaggttgaggcaggagagtcgcttgaaccgggaggtggaggttgcagtgagccgagatcgcgccactgcactccagcctggtgacagagcaagataccgtctcaaaaaaaaaaaaaaaaaaaagcgctagcaaaatccacagcacatcaagtccagtatgtactgactggagtcaggcagcctctgcacagtgcttgccttcttactgagtgttggcgcctatggggaggcatgcgctctgacctagtgtgacagcagcagctccagagcctctgaattggtgacatagaagtggaaagttcacagcatgtgtgcatcctgaaacaggcgttctttcctaagtgacccagtgttgggaagaagctttacccgccagtagttgggaagagttacatatatcttataacttgacatgagtacaatctattaaatttaataaacacctgcccatgtttgatgaggtttca

SEQ ID NO: 267544 - DNA, 974 bp, Homo sapiens
ctgtaatcccagctacttgggaagctgaggcaggagaatcgcttgaacccgggaggcggaggttgcagtgagccaagatcatgccactacactccagcctgggtgacagatcgagactctgttattaaggaaaaaaaaagtttagtagaaactgaacatataatccatgttattgacaaggctactaaaaaaacacttgttttgtgtattttgggccccggaaatctacttgttgtgggtacaaggacagtgaatttagttgacagacttccatggtgacagtgatcctggttaaaggctaaggatctgggggcgattcaagattagaatcaggctctctgtgagtgagttgtatcagggctgaacaatgatcaaatcagagtcagtggctgccccacactgtagaggccaggcatcaaattcaagaagtcacttccagagaccagaaaaggctgggggaccaactgtgcatctgtctctaatggcaaagtgggcacttccaggccaagcccagctctggcttttctagcccaaatcaacgcagatgctgcacaaagactgaaggagctgctctgacaaggaagttcaggaggcttttctcaggaatatccatcatctacacagaaagcttttgcgcagggcagcccagggctgagtgcccagcaggcgggaaaatccaaatcatgagagtgtgatgctggcccttcttctccaactgctgtgtgcacatgtgtacgcatgtatgcatgtgcaggcatggtgtgtgcatgtgtgtgcgtgtgtacatgtgtacacgtgacatgagcataaacacatactccgtcactcgcctgcttctccctcgctgtgttcagattgccgggaaatgaccccgtggactttatattcctcaatgtaagcatttcagagcacaatggccaactatctgagtatcagactctgcaattttcttccctggttttttctttaaaaaa

SEQ ID NO: 267545 - DNA, 401 bp, Homo sapiens
ttgatgaagttgctatccatcatcctgaacttaaagttttgatttttccaagcaaggaacaattattacagttgtatgtaaaaattgaaagacttgaaaactctattatatataattgcacagaatccttgcattaaatttaggacaaggaagaaacagaatagtctattaatttattttcatagttccaggaagggataagagagtgaggaccataaacaaccagaatctgataaaatatccttaactttagcctcctgccatgagttagtatgttggaacagtgaatggcagagaaacacactaaggcaaggccaagtgagaacaagaaaatgtctgcaattcactttttcagtaagtactaccatgtgccaggttctagttatgtcaaaggacagaag

SEQ ID NO: 267546 - DNA, 409 bp, Homo sapiens
cgcgtctggagttcttccttctggtggttcgtgatctcgctggctcaggagtgaagctgcagaccttcacggagattgtaaaatcaggaagtatatctaagtcacctccagtagccgtaactctaccttgtccagtaaaagtgctgcttgttgctgacgtttctgcccaaacatcatgaaatgtggagaagaaagaacactcagatgtgccctggagactttccttttatttttaaacagtttttttttccattgggtttgaccaactctatattcgacttgaacaaatccgaaggaaagcttccaattatggggaacaagtcctctgaagtggctaaattcccacacacacaaaagaaaaggtagggtggtgggggggagaaaaacagccagcaaaaggaaaaaaaaa

SEQ ID NO: 267547 - DNA, 572 bp, Homo sapiens
cgcgtctggagttcttccttctggtggttcgtgatctcgctggctcaggagtgaagctgcagaccttcacggagattgtaaaatcaggaagtatatctaagtcacctccagtagccgtaactctaccttgtccagtaaaagtgctgcttgttgctgacgtttctgcccaaacatcatgaaatgtggagaagaaagaacactcagatgtgccctggagactttccttttatttttaaacagtttttttttccattgggtttgaccaactctatattcgacttgaacaaatccgaaggaaagcttccaattatggggaacaagtcctctgaagtggctaaattcccacacacacaaaagaaaagatgagtctatgcccaggaccaccagataattgagtcctgtacaaaagcttctgactaaacaatgtgctctggctcaggactatacagagaaaagacacagtttttaaattgatcgttcaaaaggaaacatatttatgatatttgctccatgatatgtatctctcatctgttagctcaggcagaattaaaatgctagacaataatgttcca

SEQ ID NO: 267548 - DNA, 415 bp, Homo sapiens
agaagactgcaaataacattgtttagatagcagggaaaccttcatagaggagacagaatttgggctggttgaaaagcaagtaagagaacactaggttaaaagaagaacaggaaggacattcttaaaagaggaaaggcatcatgtgtctggaaattcctagtgaagaaatgaacttggatgaatggaggtgctcgtgctgtagaaaatagctgtagagagggacagaggccagtgtgcaaagggctttattatatgctagggaatttggacattattctgtggatcataggtacacattggtagttttgaagggtacgagtaacataattagagtgatataatttaataggaccactgtaacataaaaactaacacatcactagacacaagcatcactagataattaattttctct

SEQ ID NO: 267549 - DNA, 287 bp, Homo sapiens
gctgtgtgctgcctggggcgtgaagtggtccaaaagccatcggtgggatttgcatggacagaaggaaaggtggggggtctgagcaaagcccaggaggtgcctccgaaccaggggaccctgagcgctggggcagtggctttctgtgagggaaggtggccaggaccctgagtgaagaggactgggtgcctgttggcagcagctggcttctgctcgcccagccagctctgcaaaccctccgcatctcagagcctatcaagaatctctctaataacacagcaaacattaat

SEQ ID NO: 267550 - DNA, 2047 bp, Homo sapiens
agtctggggaaataggcacatggacagattatatgaaggtatttcattagctttcttctctttatggcagcttcagattgatgaatttgaggtacaaatgagtgagtgacatatgtatattttcctctgattttatgactgatttacaaattaggagtgcaaatgggctgttccccgatagcatcttctgggaagaatccaaccaagatacaaagcagatgatggtggatcggcaaactcttttctatgaaaagaaaaaccagatataccagggactggaaagcacctgcttgaaaattgatatgagcatgtctgaatttttcccttataagagcctgagtattgtaacaggtctcttgcacagggggttgaaaaataaaaaaagaagttaacataattaaaatgcttggacaaaacatttgctttatatagattcttacaagtaatatttgattaggtatcaaaataggtttaggcaggtggaagttctgaatttcaaggcaaataaggcatgaagggtggaacattgcatctagggaaaataagagaaataagtgaaagtctgaccctacattgccaattctcagaccaagtacaaagtattaggaattttttatatcagctgacatcttgtgcttacagtaaagccatatagatgcacacatagtgactttattaaatcaaatgagttgtgcagagcagagcaaatctattaggctttctcttttagagttttctaattttactcttattagctccctcagttgtcatcaattacatattcctacatcagatattttacactatcagattctttgattaaaaaatcatcttcagctttacattattaatctctgaggacataaaatcaaataactttctagtccatgatcattaatccctactattttagatatttccataaaaggcttaaagggaaaaaaaaatggtaggtagttcagaaaaaaatggctgggcacggtggctcacgcctgtaatcccagcactttgggaggccggggtgggcggatcatttgaggtcaggagtttgagaccagcctggccaacatggtgaaaccctgtgtctactaaaaatacaaaaaaaattggctgagtgtggtggtgtgcgcctgtaatcccagctactaaggcaggagaatggcttgaacccaggaggtggaggtcgcagtgagctgagatcgcgccagtgcgctccagcctgggcaacagagtgagactctgtctaaaaaaaaaaaaaaaagaaaagaaaaaagaaaaattgaagaacataacttttctacttatgaaatagataattttttaaaattgtttaaactcctggaaattaagtgttattttttattactgcagttgagagataccttttcagaggaaaacaagaggctaaattccatgttaagagctaagtagtatttttttcttaacaattttgccaaaatttcttctactggaccaaaaggaaataaatctacaataaatctactttctaaatattatttaagatgggaaatgtcttttataggtatattctgtataatacccttaattagatgaattatcccttatcattccaaaaatgaaatgctgtgttaaatatctccagggcaaagtggtatgttgactgggacaaacgttagaaattgtattgttcattgcacttgttgccctgttccccaagcttgtcaatgtttagagatactattcgggttgctaaagccattattcatagaaaatttctgcccctacagaagtgtgtgcatgggccttggaaaatctacatgtgtatatctgagtagcgaagcacagattcactctaattgaaagcagcagtttggttttgtaaatgtaattgcaattgacactttcttttccctttcagttattattttttttaaaggacgttatgagaaggcactatgaaaagcctaattggaatagcattatgaaccatgtaatgcatgcccatgcacactgtgatttgcaaacatatgtccgctcttcaataaatgttacggctttcacagcg

SEQ ID NO: 267551 - DNA, 430 bp, Homo sapiens
agtaatagtctatcacgtctctgtatgtacatgtgtgcgtgtgtatatgtgtatgtgtatatatataacaatgtatccattcgtctaccaatggacacttaggttgtttccatgtcttggctattgtgaataatgctgccaatgaacatgggagtgcagatgcctctttgacatactgatttcatttctttcagatatatacccagaaatgggcttgctggattatatggcagttctattattaatttgtggaggaatctccgtaatgttttccataatggcttctaccaacagcgtacaaaggttcccttttgcccatatccttgccaacacgtattatctgctgtctttttgataatagccatcttaacaggcatgaagttatatctccttgttgttttaataaaatcacattgttgtacaaccaatt

SEQ ID NO: 267552 - DNA, 282 bp, Homo sapiens
caccattttactctttctgtgagttcatctttttaaaatttgacatatatatacccagaaatgggcttgctggattatatggcagttctattattaatttgtggaggaatctccgtaatgttttccataatggcttctaccaacagcgtacaaaggttcccttttgcccatatccttgccaacacgtattatctgctgtctttttgataatagccatcttaacaggcatgaagttatatctccttgttgttttaataaaatcacattgttgtacaaccaatt

SEQ ID NO: 267553 - DNA, 342 bp, Homo sapiens
tttttttttacataatttgtaatatttattaataaataaggagttatatataatcaattcaccgatggcacttttatcacagactaaattcttattaagttgttctgcctcgggcctttctgttttgttgcattaatgggtctaacgatccataaaacagtaccacactttgaattcttaaaatttaaaatatatctttaaatctgcccaagaaaatgcttcttcctttctgtgctccacacctgctctactgctggagtcattgctgccaccgttacctgattctcctctctttgagaaagaagtaagattcacaaccaaatccctttggttggggagtgc

SEQ ID NO: 267554 - DNA, 256 bp, Homo sapiens
ccagggcttgacggggtagacactgaacatgcagctgaccccagaagctcctctccggaacgcctgcagttaggcagcgccctcctaggccactctccaccctggacttcctctccgcggtggtgtttgtttcaatgctgccgtaatgaaactgcagtttggtgagggaaggccaagttacagctgtaatcaggatcatttcattccaagtaatacgttttctttctcagactaaatttgggttggttaaagctaa

SEQ ID NO: 267555 - DNA, 417 bp, Homo sapiens
ctgctctgatttatgaacacttgaactttgcctggtgtggtggttgggagtgggcgttttaaagatgatgttaactattggaaagttcatagaaatggtaccaagccaagtgccagtggctcacgcctgtaatcccagcactttggaaggcctagactggaggatcgcatgagcacaggagttcgagaccagcctgggctgttagtgagaccctgtctctacaaaatacatacatacatatatacatacatacatacaaaaaattagacaagtgtggtcgtgcgtgcctgtagtcccagctactcaggagcctgaggcaggaggatcacttgaccctaggagaggtcaaggcttcagtgagctgtgttctcactgctgtactccagcctggtcaacagagtgagaccctatctcaga

SEQ ID NO: 267556 - DNA, 430 bp, Homo sapiens
atggatgtaaaaggaagaaggtattttgtagggtagttgtaagttcctgaatgtgtggaatgatttatgtgcaaacattgtcttgcctaatggaaatagtcataattgcctagttttcattagtctgaaaaatgtcttaaagaagtattgggctcatcttaaatcaagagcaacagaagtctcttcatcagctgctgttagaacatgagtctgcgcagccatagagtagggatctgcagaccctgcaagaacagttcctgtcactggccactgtcagtggtcattaataattataacaatgtaagaaaacaagataatatagaagagtcaaactttgaactttaaacaaaacatgtttgctacattttaacagtcataaatagggcaatgggggggcggggcataagttttagaatatgttttatgtcat

SEQ ID NO: 267557 - DNA, 364 bp, Homo sapiens
tttttttttattttgagctggagtctcgctctgtcgcccaggctgcagtgcagtggtgcgatctcagctcactgcaagctctgcctcccaggttcatgccattctcttgcctcagcctccagagtagctgggactacaggcgcccgccaccacgcccggctaattttttgtatttttaatagagatggggtttcaccgtgttagccaggatgctctcgatctcctgacgttgtgatccgcctgcctcggtctcccaaagtgccaggattacaggcgtgagccaccgcacccggcctgactgatgcttttaacacttagtaataccaagaactgacgactgcttctatgacagaaaagaaaatcg

SEQ ID NO: 267558 - DNA, 437 bp, Homo sapiens
aactgactccccctccggttaccctagtaatttttgttgatcatttatatcaccctttatgacaaggacatctgaggtgaacatccatagtatcatacaaatttctcagctgcctcctccaaaactggcatcagcagaagagcaaatctgcatgagctcatgaatggctgctgtggaaaattactgacgtcaccagctgaataacaggctatctggagagtaagcagatgaaactgatgttaaattatcaaatgtacaagattttgggctcctgccaaaaccttcattgagaactaagaagagaaaaactgaaaacacacagagctttttttaagcttctgagccagcaggctgttcctacatccactccaggcatagaaagatggctgtaaaataaaagagatgattatctcctcccttcccttctcaatatttca

SEQ ID NO: 267559 - DNA, 118 bp, Homo sapiens
ggagaacaggcgctgaagagagacagatggagaaaggaagctaaagccagatgggctgaatgcctgtgtgtgaacgtatgtacacatgtgtaagcatgtgtacacatgtataaggcct

SEQ ID NO: 267560 - DNA, 492 bp, Homo sapiens
cagttctgctgccagaaggctttctccaaggtgactgaatttctggaactgacagatggagcctgagggaccttggtaatactgtgtcagctcccgtggccagtcagggagagcagagtcttcagggctgtatctccgcaccctgcccaccatcttccctctgacgcagaccaagcctgcagaccagtgagaggagaagaaatgaagtcagctgacccacagttggcactgccaggactggatgctgctggctgttggccaggatctgatccactcctttgagagtgtcaggagctgtggaaggtatggggtggggggcggggttcctcccaaggcaaagttcctgtggaggtcagatgagactgagcttgagaactgagttatgaaaaaaacctcaaggaacatccttcacctgccctctatggctccttagcttcttgaggttctgctgctcagagcctagtgtgataaataacctctttctctttaaaa

SEQ ID NO: 267561 - DNA, 392 bp, Homo sapiens
agataaggcatttgcaattggcagtgtttcaaaggactccagatttctccaaagaacctagatttcccaggtactgaacatgtgcaaaatagaaacaaacattcaagatgagtgagtgatgagttctgcctgtggtcagaagaaaacaacactcccaactctgcaacctgatcacttccctacttagtcctgtttgtggagccgccttattaacgacattagaacaaagatatgaaggtgatgtacaatcattactagtttttaaccaaagattttggtcacaataaggaccaatagctgtttctttggacctctgagcccatctctgctggaaaggtatttgatacattttagcatgcaggaaacaataaacatttacatttattttaaaa

SEQ ID NO: 267562 - DNA, 1234 bp, Homo sapiens
aatatttacaatcctatcccagtgtctaagacctgcaaaaggataaataaaattgcttgtaccatctatgtttattttgttcccaatcacaaaggaaatatttgaacattccattgttaagtgttataatttcaatagaacttttgaaaacaaatgttatcagttaaactagattctcttttaatttcgggttgttaaaatgtatgactttttaagaaaataaaattaaatatgcttataatattgttaagttatttgttgtggtgtatcatattaattgatacctttacatgaggccattattgcttcccagggtttcttagaataaacattggctgtgatgtcttacattttaatgcattgcttatttctgcatggaacttttttaagttttccttcaatattttcataaattacattggtgtttaatttactttccctttactatccttgtcaggttataatatcagagtcataatagcataataaaataaaatagagtatgttctttcctgtttcatgctcagaaagaattgtatgtaagattggaattattgttttgtttcatgtttgaaacaacttgccagtaaagtcatcatggcttgaaattatctttatgatatgatttctgactactgattacatgcatttgttgtagcacaattcagatttttcttttcactttaggttacttttggaaaaatgcatgtttcaagtaattgtacacattttacatatatttccaaatttattgaattaaacgttttcatactacactaatttaccttcttgatatttgtattatttataacaaaactcaataaactgtggcaaataagccagacagtatttataaataaagtattactggaacactgtcatgctcattcattgacatactgtcaatttatgccacaacaatagaattgattagttgcaacaaaccatatagcccaaaaacctaaaataattaccaacagatcctttccaaaaaacaaaaaaaattcttgacacctgatgtataattatttcctattttgattcctgagatggcatacttgtttcttctcttaattttatcaagccatttctccagagttttgttattgtatggctcctacaacaactaacaaacttttggccatatttcttgacttttctttccctgtattcttaatcactatgcatgtatttattatttccttttatttctgttgatatttctaacttctac

SEQ ID NO: 267563 - DNA, 523 bp, Homo sapiens
cagttgagacatttatctcctcactctggaccactatatgtattgcttctggctagttccctgtctccaggttcttctgcctcgttttccggctcccatttgcaaaggaggtttatgtacaatgctgctttaggggaaagggcactgacttcgttatcatgcacacttgggtataaatcccactctgccatttaccgggggtatctgggtgagtggcatcacttttcagggccttgtttatttgtgaaatgggaatgacaatacctaaactgcagagttgtaactattagaaaaaaatgtatgcaaagggtttagtgtggggcctggcccttagttggtgctcaataaatattcttagttgtggtagaagtagtatttcactaaacacacacacacccccagaacaaaacaatgattcatcattgctcacaggcagaagtccagattcctaagctttctgttctctctcctaacctaccatcctatccttattttccttttttaaaaaatcataaattctttg

SEQ ID NO: 267564 - DNA, 304 bp, Homo sapiens
caggagcccaagatcacggtgtcggcagagcccgttccttctgagctctgggtgggggaatctgtgttgctggtggctgctgacagtctttggtgttccttggcttgtaggcacagaactccagtccctgtcttcgttgtcacgtggccttccccttgtgtgctgtctgtctctgtgtccaaatttccctcctttataagggtacctgtcatattgcattagggcccatctcaatgacctcatttcaacttgattatctctgtaaagacaatttccaaataaagtcacaatctgagctactttg

SEQ ID NO: 267565 - DNA, 1022 bp, Homo sapiens
  misc_feature (974)..(975): n is a, c, g, or t
  misc_feature (985)..(985): n is a, c, g, or t
  misc_feature (1005)..(1007): n is a, c, g, or t
tcagctttgatgacaaaactcagcagaagctttcttacagactaagagcactttataaaacactgcttaaagctgaaggaaaccctctgaatgaccacccttgaatacctcctttactaagacccatgattatctgggagttagaatccataataatagctgccactgtgcacagtgattgtgtgctgggtgctttacatctattttctcatttaattctcctaacaactctatgatagcagtcacgctatgatacaggtcacactggtattgtttcacaaatgaataaacgggcctagaaaattcaactagatttccctaggttagcagtggagttggacttcaaacctaggtctgtgtagctcacaaatgaacacttattatgcttataccattttgcctcattagaataataggaagtccttccttttttggtgaggaagaaatttagagattggttaccctgactggtgatacagagcaaagctatgtacaaattgcatcaaagggtggcagatccctacattcccatctaacatcacatcattcctaacctttttccatgtggataagcatgaccttagtcaagtcatttcttagtaagatagattgttggttgctcgtgactctcagtgaagacccagtaatgccaagaatcatggcagacagttagggggaatatgtatcttcaactatggggcagtatggcaaagatattgagggccaggaatttgactacttttgaggagcgatgacaactgagtacaggaagtgagaggaagggagcatgtaccgtgtatcatttaatcaaccttgagcttgagaccaaagggaacataccctaagtttaactaggatgggtttatccagatataatggcatcacatcgtaaattgaaaagtgtctgtgtgtaattctctctgtcttatttcttcgagaaggagtttcgctcttgttgcccaggctgagatcannccactgcacnccagcctgggtgacagagcnnnactccgtgtcaaaat

SEQ ID NO: 267566 - DNA, 1158 bp, Homo sapiens
  misc_feature (1110)..(1111): n is a, c, g, or t
  misc_feature (1121)..(1121): n is a, c, g, or t
  misc_feature (1141)..(1143): n is a, c, g, or t
tcagctttgatgacaaaactcagcagaagctttcttacagactaagagcactttataaaacactgcttaaagctgaaggaaaccctctgaatgaccacccttgaatacctcctttactaagacccatgattatctgggagttagaatccataataatagctgccactgtgcacagtgattgtgtgctgggtgctttacatctattttctcatttaattctcctaacaactctatgatagcagtcacgctatgatacaggtcacactggtattgtttcacaaatgaataaacgggcctagaaaattcaactagatttccctaggttagcagtggagttggacttcaaacctaggtctgtgtagctcacaaatgaacacttattatgcttataccattttgcctcattagaataataggaagtccttccttttttggtgaggaagaaatttagagattggttaccctgactggtgatacagagcaaagctatgtacaaattgcatcaaagggtggcagatccctacattcccatctaacatcacatcattcctaacctttttccatgtggataagcatgaccttagtcaagtcatttcttagtaagatagattgttggttgctcgtgactctcagtgaagacccagtaatgccaagaatcatggcagacagttagggggaatatgtatcttcaactatggggcagtatggcaaagatattgagggccaggaatttgactacttttgaggagcgatgacaactgagtacaggaagtgagaggaagggagcatgtaccgtgtatcatttaatcaaccttgagcttgagaccaaagggaacataccctaagtttaactaggatgggtttatccagatataatggcatcacatcgtaaattgaaaagtgtctgtgtgtaattctctctgtcttatttcttcgagaaggagtttcgctcttgttgcccaggctgcagtgcaatggtgtgatctcggctcactgcaatctccgctacccgggttcaagtgtttctcctgcttcagcctcccagctattagggaggctgaggcaggaaaatcacttgaacctgggaggtggaggttgcagtgagatcannccactgcacnccagcctgggtgacagagcnnnactccgtgtcaaaat

SEQ ID NO: 267567 - DNA, 263 bp, Homo sapiens
gttttattaaaactaagataagaccaagattgtttgctaaaattgccaaattattttgaatttcagtggaattgattagaagtacagattgttggtattataattttcatgttaggattgtgtgtttttaatgaatattctaggtaactttctcatcagacagttttaggaaacagtggtttaaagaatatacatgcaaacaattagagtgaagttataaccaaatgaaattgtcattagccaataaaaagcgctttaaccca

SEQ ID NO: 267568 - DNA, 401 bp, Homo sapiens
gatgtgttcctctcgacctccagctgcttgtgaatctctgcccgcaagggtctcagggtttttacaggtacaggatggggtgtggcaagccaggttggtcttaggaaatgcaacatttaggaacaaaaacagaaatgcctgtcctcacctaggtccatgggcacaggcccatgggagccctcacgagggacctgcctttctctacccatgctcccctcctgtgtcatctcccccctctgaagaggtacatctaactgctgttaaaatatggatgatgactagtcttaagctacttcctggtgacagggggtgttgttttggggagaacagcagtgagattcctcccaggggtctatctaagggtttctagcaaacaggagctatcatccaaggctccaatt

SEQ ID NO: 267569 - DNA, 433 bp, Homo sapiens
cagaacccacacaaaatctgtcttaactcaactcttagctggttcccaaaaacgtccatggcccctgtattaccacctgcatacggagaaataggaataatatttaaataaggggaataaccaattgcattaataaaccttacttctgaaaactttgtgtggccatggtgggggcattgcagggcccctgctcaggtcgtgtagggtcccatgaagagggaagccctaaggctactctcctcagggctctctccagcaacctcgtgactgctctttctcctctacctactgtggacgtctaagcagtgaccaactctctgccgaacatgggtgctcacacaagctgaatgaatgaatgaatgagtagtacagagcctagcagaagaattaagagtgcactcaattgaagtaaaattatttgccacttcccaaa

SEQ ID NO: 267570 - DNA, 343 bp, Homo sapiens
cactgcgcagtgacacacacagacagccaggattattctttatttgatttttattacctggaaccttagcgagttcagttcttagactctaggggataaagaaatgatttcccttgaagggagaatgagagaccccagtgctcaggaagagttgttgcagagcctgaaaactgtttgccagagccttggctcttctgggtctgagtgcctgaaagaatctggggcggcccaggccaggggagaaggctacgctaggctatgagcctacagaatggttttttgggggtcctccttcgactctcatgcctcaagagaccaagaggaaagctgggagggcactgac

SEQ ID NO: 267571 - DNA, 315 bp, Homo sapiens
tatccaattagatgaagtatatgaaaataacttctaagttctagatgtgtgtattattaagctgagatcattcattcagcaaacttttatatttaacatatcgaattaaaactagttgtacatatttattttttaccactatgagaaaatcatatccagtactggaatctgattttattcatattgttatctttagtgcttcacacaacacaatgtccatagttggtactcaaaaatatttgtagaagataaaaaggagaaaccaggagggtaagatgatgattggggctattggaagttaattgaggatgatga

SEQ ID NO: 267572 - DNA, 487 bp, Homo sapiens
cacgcatttccctccaccttcactgctccatctcggccaagtcaccacgcctttcagggaactcaggagcaacaagcccccagtgcgggacgagccaccccaaagcccctcgagaagttttctctaaccacagccccgaaaagccccgccactacgaccactggcacccctgcttatttcctccagaccctcctcggccgtcccaccccatcaagccctcctttcgctcgcatctccaccctccctgcacactgcctaacccagaaaatggccaagcaggtaagccctgtcaactcacttctcctcgggactcgggtgtccctgacttccacgtgttcacgagaagctcgtcagagaccctgacctctcccgggagcacaacacagactcgaactggctaactcgggctgacgccggttcagctgactcccatcctggcaagaggcttccggagtgttccagcgcctcccaggcctgctgcggccgc

SEQ ID NO: 267573 - DNA, 436 bp, Homo sapiens
ccaatttatctgaatccttgacaccatttattactgtccattttctttattatagccatcttagtggaaatgaagtgggatctcattgtggtttggtttgcatttccctaatggtctataatattgatatggtttggctctgtgtccccacccaaatctcatctcaaattgtaatccccacatgtcaagtgagggacttggtgggaggtgtttggatcatgggggtggtttccccaatgctgttctcttgatagtgagtgagttctcacaagagctgatggttttaaagtgtggcacttcctcgctctctctctcctgctgccatatgaagaaggtacttgcttctccattcaccttctaccatgattgtaagtttcctgaggcctccccagccatgcaaaactgtgagtcaattaaacctttttctttataaact

SEQ ID NO: 267574 - DNA, 434 bp, Homo sapiens
tatcccactgcacactctgtcacccaggctggtgtgcagtggcgtgatctcagctcactgcagcctcaacctccagggctcaagggatccttctacctcagcctcctgaatagctggactgcagatatgcatcactacacccaggtttcaccatgttggccaggctggtctcgaactcctgacctcgggtgatccacccgaggcctgacaaagtgctggaattacaggagtgagccactgcatccagcctagcacactgaacttttaagagtacttgggaaacttagtatgtttaacacctcccaaaagaatgttaaaatgaccacagtttgcaaaattgaagagaaaacaatggcaacataaggcacaatattggtaatcaagaagaaactatagccatggatatggaagacattaaaataattataatgaat

SEQ ID NO: 267575 - DNA, 224 bp, Homo sapiens
ctaacacccatgtatcataaagactgcctcatacactaacattcaactattcaactgagagggggctcaaggggctttctgagtacctataatgttctatttcttgatctgggtgatggctatacagggttgcttgtgtgtgtaaattaaactgtaagcttataatttgagccttcttctgtatgtatgtcacctctattaaaagctgtatttataaaaactcc

SEQ ID NO: 267576 - DNA, 711 bp, Homo sapiens
gattaggattgatgttagctgtggggcacttaaagtgattgtattgtaaatcttagtttattctagcagtggcatcttgcagaatgtgtctggggttaggataaagttttagtctgtcttgggcaaagtgtagaagaacaagaagaaaggaagtaatttctgaatattaaattaagtgtatctattcccaaaatgcacttgctgagatgggtggtgtggaggcttgcttctggtcacaggaaaggggaagtcgggtcttctttatttttcaggagtttacccactgcagttgaattctgaccctttgtacatctttgcctttctcctccctccatttcactttccctcatcacaaaacaagggcaatgatgaatatttgcaagaatagaagctagtgggaaaacagaaatatatcaaattatattgaaacaaagtattttctgttggctgaggtaaggcagaaccaggaaaaaaaaaaaggttctctttttctaaaaaggcttaaaaaaaaacgttgaacctgtaaagcttttgagttttatttaagcgctgtatgcctttatttttaaaagtttgaattaatttcaatatgaaactcattttgccttgcaacggatcaaagtttagatgagaattttcggagttcagtaaagcccctctggttcctaatattctgaaagtacagtttctacaaagaaatgtaactacttt

SEQ ID NO: 267577 - DNA, 630 bp, Homo sapiens
gcctactactactactaaattcgcggccgcgtctgtcttgggcaaagtgtagaagaacaagaagaaaggaagtaatttctgaatattaaattaagtgtatctattcccaaaatgcacttgctgagatgggtggtgtggaggcttgcttctggtcacaggaaaggggaagtcgggtcttctttatttttcaggagtttacccactgcagttgaattctgaccctttgtacatctttgcctttctcctccctccatttcactttccctcatcacaaaacaagggcaatgatgaatatttgcaagaatagaagctagtgggaaaacagaaatatatcaaattatattgaaacaaagtattttctgttggctgaggtaaggcagaaccaggaaaaaaaaaaaggttctctttttctaaaaaggcttaaaaaaaaacgttgaacctgtaaagcttttgagttttatttaagcgctgtatgcctttatttttaaaagtttgaattaatttcaatatgaaactcattttgccttgcaacggatcaaagtttagatgagaattttcggagttcagtaaagcccctctggttcctaatattctgaaagtacagtttctacaaagaaatgtaactacttt

SEQ ID NO: 267578 - DNA, 328 bp, Homo sapiens
gtttgcaattttgaagcaattgtctatactgttataagcaaataagtaaatatattgtggaaaatgggagccagtttctcactgttggagaagggagttacaaaggtgaaaaatgtgaaggttaaaatgaactctgatgtttgattggaattgcagatagtggcataaattcatagttttagaagtatgtagatataggccgggtgtggtggctgacacctgtaatcccagcactttgggaggctgaggcgggtgtatcacgaggtcagcagatcgagaccatcctggctaacacagtgaaacccccctctctactaaaaatacaaaa

SEQ ID NO: 267579 - DNA, 338 bp, Homo sapiens
gctaggattttacccctactgggccatccacgcttttagaaccacagattctcagggaatgcagcattaacctacatacagctagaaaattgacagtagcatatctcaacccaattaccttgaatcacaactctggtaaaagttttagcaatggaagagttaaaatgattcactagatggaagtttttgataatttgttgactttagccatggataattaagagtgatggaatcctcgtttcactatcaaggaagctgcagtcaaggtcaaacagatgagcgccctggaattccatggaagacagcacaaaaccaataaaaccactggtgttcagtta

SEQ ID NO: 267580 - DNA, 329 bp, Homo sapiens
gccagaagagcagttctccaggcccagaagtaagctacacccacaattctgtatgcagctgtgagaaaggagagtggaaatccaagtcaatgcagtatcaccgtgttcccaatcacgagtattccactgggcccactggctgccaagacatggatgggatccagtggtgagcctgccccagcacatgaaacacatgcttgggaaacagtgcctgactggatggagccctctggtaccctcaaagagaagcaactcgcctcatgacgatgagcgccctggaattccatggaagacagcacaaaaccaataaaaccactggtgttcagtta

SEQ ID NO: 267581 - DNA, 339 bp, Homo sapiens
tactggatctcactccaagctgggaatagctcatactttcaataggcagagtgaagaaacctcatactaaacaggtttttgaggagagtactcaaagggtacttcctcaatggtgggacaagattagtccagactaaggctacttttgtctggacaaaatttaaaaggtaagacctgaagggatcaagctgtttccaagcaactttactgcatctcagaataaaactttaaaatacctaaaggaatgcaaaaatatccagtaatcaacaatgtaaaatttatagccaggcacagtggctcacacctgtaatcccaacaactcgggtgggtgaggtggga

SEQ ID NO: 267582 - DNA, 491 bp, Homo sapiens
tcttgtaatttttttctcttggatgaaagagagacatgtgctaagtgaggcttctcctttccctaccatttagattctgagatacggcatctattgtgaatagcacagcaaagtcatggtatgaaagccagggttttgaagaccaggagaagaagggtgagatccttgagagcctaaccaaccctgggactacctacctgcaaacatctattttgagagacaataaaacttcctattgatcaaggcactgttactttggcattatttcatttgcagctaatatcatcttaatttgcatgttcccaagaagcaactattttagagatctcttgttttagcctttgtagggaactcagatgcagactgttgacttaatcatactccttgattcatgacatataaccttctcttgttataaatatgtctttatttctttttatctatatttcccaccaggaataaatctgaaggttttgatgtgtaccttttta

SEQ ID NO: 267583 - DNA, 448 bp, Homo sapiens
tgaaaaataactatgaatcgacgttagttacaaattgtgactgtcgcgatggagaagtactaaaatctatgaaagagttctaatgtagatttaaggtcatgagaagtctccggcaaagtggcattttaaagtaatccctcagtcgtggagctactccaatgagaagcctgccactccagggcgcaccacggaggaggatccccagacaagaagacctggctccccagaggagtgcggaaagccagcatggctagaggacacagaatgagggagaagacggatccgatcgcaggcatcgggagtgctgatttttctcctttgaaaaacaggttgccatctacctttttaaatgtcccactgtgtaggaaaactctggggaaagctacgtcagcaatatggagtctggggttgcctttctcatgtcataccatggtcctggctggggagc

SEQ ID NO: 267584 - DNA, 379 bp, Homo sapiens
cgtctgtgaggactctggtagtcatattcattacctcctttttctagttcagtgcttaagaaacaggctgttagaaatgtttctaaaaatgggctgggcatggtggctcacactggtaatcccaacactttgggaggctaaggtgggggaattgcttgagcccagaagtttgatatcaacctgggcaacatagtgagatctcatctctacaaacagtaaaaaattagctgggtgtggtggcatgtgcctgtagtcccagctgctcgggaggctgaggcgggaggatcgcttgagtccaggaggtcgaggctgtggtgagccatgattacggcactgcactccagcctgggaaacagagtgagaccctgcctcaaaaaga

SEQ ID NO: 267585 - DNA, 604 bp, Homo sapiens
aagcatcattcaaccatacatccatccatcctcctatcattctgttctcccctttcctttcctctctttatccttttttccttcctcccttcctctgtccttcagttttccatccatctattcatccccccatttatctatccacccatctttccatttattcagtcaataaacattgattgtatgccacatggtataccagtatttatgtgaaggattgcaaactgatagctcaagggtaaaatctagtatctagaaatatttttgtttaagagtgtttaaatgaaaactaaatgtaaatcctttagataggacacatactgtacccttcagttccaaacgctacaattccctattgccttaggccaggttgtttcagatattttgttcaaaagagctacgttttattgaatggttgctcttgttccctgctgcactgagtgctttgcctacattatctcattttttttcacaacgcccagaaggttggcattaatattttcattttacgaatgagtaatttggagcctagtaaggtacagtgatttgtcccaagttaaatggcttttgtaaggtttagatttaagtacaacttgaactcaag

SEQ ID NO: 267586 - DNA, 575 bp, Homo sapiens
tagagcatcaagacaaaaatctcagtcttcgaggaactcacagtgtagcagaaaagacaaaggaggtaaacaggaggagcatgaataattcatcttgatgtaatcatgcaagactcctaagaagatgttaggagaccctgtcatcattcttttggcctctagtgtcctttatcttcatgtttgctggcttccttttactactatggaaatacaacatatgcaaaagtagtgttttcgctgtttaaaaacatcgtcagcagcatcatcatcattaactgcaccaggaagccatgactcctttctggacaaggtgcacttgcctgtcatccttccatctctttcttcctccttgaagttcacaatacccagtccaggagcattgcagagaatgctaggtgtgtctgcagacttgactttaaaagaaaacaagttccttcaagtgagttcatcatgatgggaatgataatttgtttgagagaatgtgtgttctttggcaaaggaactcctgttataccatgacagtaataatagcagtaataaaatcaccaataataaatttacttttgaatttaaaa

SEQ ID NO: 267587 - DNA, 696 bp, Homo sapiens
gtttgatcaaaacagtgacagaaaagagcagaggtgaagacgaagaaactttccactgaaagaggggactgcagacccaaccaggcccttcacattgggggtggacaccagcagcctagggggcccccagcacattccaccagggaacacattcctgcctgcacccctggcccagaattaacgtgagaacaaatggaatgggaagaccaaggcgggatggggctcaggcttcacccgcatggctttatgctacacagagagctcctgcacgcagggcggtccccagaacctgctcggccagtgggccttgtgctcctacctggactcaaggtttaatggcaaggaaaggcagctgagtctccactactcctctcccccaaggctttctaatgaggggtgcccagtttttagacatacatttcagaaagtgcagatgctgttgagtagaacacagcttccccacatgggaagccaccagaggtggggacggtgggcctagaaagtccctgacacaggccccaaagccaacttgttttctaggtaactaatggcgacccctccccatgatgctttcccaggagcagtctccccctgcccccccccccttttttttttttttttttttttgagacggagtcttgctctgtcgcccaggctgtggcatgatcttggctcactgcaagcttcacctcccgg

SEQ ID NO: 267588 - DNA, 496 bp, Homo sapiens
  misc_feature (50)..(50): n is a, c, g, or t
tcagatgcaatatggagaatggggagaatgcattcgagtaaaagcaggangaacagttagtgccttgtgtagaaagaatttttagtaatctgtttcagatatagaaggacaaactaagggcctggcaatagaaatgtgggattcttttagagttacctctgagtcctggctattgtggggagaaataaaagagaaggaagagagttatgtgtgcacctgtgcagcacttgatctcacccagcacacaggttttaaaatcgccttctgtactggccactcggtggtttctgtactcagcctggcccttcctccttaaggccagatgtctcagactgactccacatgagtttccacttaggtgtctgtggaacatctaagtggagatgactagtaggcaaattggataaaccggtatcgagctcacgggatgtaaagagtgttattaaaatgatggttcatggaatgtaagggtaagaaatcatggataagaaggaaa

SEQ ID NO: 267589 - DNA, 428 bp, Homo sapiens
tctgggtgatctctccccattgaataaattcctttatagcctaagtcaactagttgctttctctagcttgcaactcagaactcttgttaaacctaacctcttccactgggtctatgtcctgtgttctactctgagatcttatgaaattcatttccagaggtgaactgctaagagccaatgcatatctaaactaaccctcagccacatgggctgccttttgagtcaactgaatctgctgggaagattctgaagagaaattaaacctcttggtaatgcagatgtcagttttcctgttaagaatgtgctttaggatgggcacgttggcgcatgcctataatcccagcactttgggaggccaaggccggtagattgcttaagtccaggagttcaagaccagcctgagcgatgtagcaagactctgtatgtac

SEQ ID NO: 267590 - DNA, 578 bp, Homo sapiens
atatggagagtgtctactttgacacattcagggctagccctctcctgctggtgcagttcaatgtgaatttagtcatttgtggtcacttaacagcaaagagatctttctacagagtctagctgtgctgattatcaaactggggaaaattgatggccatttgttatggctaataacacaggtgccggtcaactttataaaaatgtagaaaagtatttgcggtgaaaattatcctaaccattgtggaaaaatgcccatcccacttcaattcatagctgaatacatataggaactacagttctcagacctgcagtgagttctgaccaatggaattcagtgggatgatagatgctgcctttgaagccaccccatcaactggctcatctcctcctgtctcagctctttctcctgctgcatcctgatgcaggaccactgcacaacctcacaaaccttatgtggaaagtagtggagccaccagatgttatgggtatcctttaatggagaactttacactactttgaaatgacagttttatacttttcataagaaagaaataaacttccattgtactaagccactgt

SEQ ID NO: 267591 - DNA, 408 bp, Homo sapiens
gcaacctcctgggttcaagcaattctgcctcagcctcctgagtagctgggactacagggatgcaccactacacccagctaatttttctatttttagtagagatggggttttaccatattggccaggctggtctcgaactcctgacctcaaatgatcctcccactcggcctctcagagtgctgggattacgggtgtgagccaccatgcctggccattcttaagatcaaatggctacaaagttggtggctcaaggaactgaaccagacattggaaccatctagggctttgtttataatcgttatgctatacggctgttgggagagtcaaatgaggacatgtgacacgtgtatgtagtcacttctcatgaaatgttagccatctcatataaatgagttagaacattctggg

SEQ ID NO: 267592 - DNA, 241 bp, Homo sapiens
ccaggctcccttgctctttaagtgacacctctagatccccagagcccaacagcgcatctgctcacagcctcgagggtggcaagggtggaagacatggcctgctagtgtctgcgtaggttggtgctttcagaaacaagtggttctggaggtgctggatgctttattagaacaacctgtgtggagcccgttgacaatgcagatgactcatgttggctttttttttttcccctttacaaataaa

SEQ ID NO: 267593 - DNA, 479 bp, Homo sapiens
gatttaccaacaacataccttctcaatggaaattccaattcattttagatggaagggaaattatctcaagaaaagactgaaatgtgaaacataaaagctgactgtatgctgggaataaagttagcctcaacaaatttccaggtacagtattgattttaattaggctccctgatcacaatgcaatcaagttagaaatcaccaacaagaaagagaaaaacccaatacatttggaaattaaagacaattctgacaacttgtaggttaaagacaactctttaaagtctcagaaatatgaagcttgttccaactaccttaaaacatcaggcaatttctcatgtaatcattagtaaaattgattatgttttaaaaaatataattgccaatacctaagctgcagatgtaaattttgtgttgtacctgtatacacttttaacaaatacactaaaacacatgattaaaagaacaaaagcttacagctg

SEQ ID NO: 267594 - DNA, 497 bp, Homo sapiens
cttcccagcagcaaatgtcaaagccagtagaaaacaaaggaagaataccttcattgtactaggagaaaatgctgtcaacctagaactctttcaagaccagggtgaaacataaaagctgactgtatgctgggaataaagttagcctcaacaaatttccaggtacagtattgattttaattaggctccctgatcacaatgcaatcaagttagaaatcaccaacaagaaagagaaaaacccaatacatttggaaattaaagacaattctgacaacttgtaggttaaagacaactctttaaagtctcagaaatatgaagcttgttccaactaccttaaaacatcaggcaatttctcatgtaatcattagtaaaattgattatgttttaaaaaatataattgccaatacctaagctgcagatgtaaattttgtgttgtacctgtatacacttttaacaaatacactaaaacacatgattaaaagaacaaaagcttacagctg

SEQ ID NO: 267595 - DNA, 553 bp, Homo sapiens
ctctaaggtgagaatgttaatcatttcatattcattaggatagtcagatcaacatagtaagagttttccaaagactgtttttctgaactgtaaacccttggattgtcaaggcctcaccaaactgagccagccaccagcctgtaatgaaaagttctcatgcaaatgaccagttagcatgtggcaggcctgtcttaagaagcttttgagacataagaaggcctgtcttaagacaggcctgtcttaagaagctggaaacttcacctgcagtatgtgagaaaagtggaagcaggaaaatgtccctcagcccttgggaagccaggcatctgtgaggaagcatgttcatgtatttcctgggtatttgaatgaatcaaatcactgtgataaaaataaacacaggtaatgaagggtatttttacttatttccaaccgtgatttttcacaataaaataatactccccaaaagtctcctaattagtatatttaatcttcacaatgaatgaaatccctgttgatatcggaggtgatacaggatttattagtgagactgtggggg

SEQ ID NO: 267596 - DNA, 400 bp, Homo sapiens
tgatcatatttagatatcagataaaatcagtgtgcatggaaatgttacgtgtgccttaaaaatgtagttatcaactttgaatcaacagaaaaataagtgttttaagtgtaatttacattaggatgtttacatttctaatattcttaagaaagtaaatgtggtatttagtataaaaatgaaatgaggccggacatggtgactcacacctgtaatctcagcactttgggaggccgaggtgatcggatcgcttgaggccaggagttccagaccagcttgggcaacatggtgaaaccctgtctctagtaaaaatgcaacaaccagctgagcgcaggtggcacacgacagtagtcccaactgctttggaggctgaggcacaagaatcccttgaacctgagaggca

SEQ ID NO: 267597 - DNA, 516 bp, Homo sapiens
gaaaaaaaagaaaggggaaggaaatagatgtcacccactgtggcagggaggccaaaaaaagtgacaaatcaatccaccacaacctctttgatcagcacactttataaagcagaatgacatcatacagtaaaggacagaagagtgattgagagtgaacacatgaagatactggagcctgacaactaacaagagaataatatttaaagctgtggagtgttgtggtcaagactgcagagtttagaatgaatctgcctaggtgtgattcttggtttcttcatttaatagttgtatagcttgttgggtcgctgtgaggattaaatgagctaatgtataatatatgaagtgcttggtctagctcttgagggattgtaagtgctaactaaatgttataaatcatttttgagcataacttatattgcaaattgcttatcacagaagtatttacaacttaaagctaggaatttaaactttatcatttttgtctaataaattattgattttatatgctcaaattag

SEQ ID NO: 267598 - DNA, 362 bp, Homo sapiens
ttctcaccaccatggaaggtattttcctaatttaatggaataattattttgttgttactggctttaagtgtgtgtctcgttttaggtgctcagtttgtgttgactgaaagaagaaaaacagaacacttagctacttaaagtttcaaaattcaactgttttagggcagacaattagtctgttagacaaactggagcactgattgcctttggaggaggggaatgactgggatggagtataagggatctttctggggtgatggttatagtctatagattgataagatttggtttacatgggtatatgtatttgtcaaaactcaatgaatacacacttaagatttgtacatttcattgtatgtaaa

SEQ ID NO: 267599 - DNA, 334 bp, Homo sapiens
actaatcctcaatacaatcaatagtccatgacagcagtttttggacatcagtgtacatcagtattaactgcagggcttgttaagctatggattactggaacccaccaagagtttctaatttagtaggtaggagacaaaggctgggaacaatttccaggtgatgctgatgtgctgatgcttctgatcaagggaccagtctactatctggtccagtgtatttttgatcattgaatggctccattacacattaaaatggaaaatacctactatgataatatgcctggtccctagggaccttgagtgtaatgtggccagcatggattatatgatgatt

SEQ ID NO: 267600 - DNA, 427 bp, Homo sapiens
tggtttaatatatgccacactttatgctgcagtagcaccatttggtcatatttagtgaactctgtggttgttgagaatgccaaagcagcaggctcagcgattgcagcataggcctgtacttagttagcaagcttagcttaaaagctgtcagtgcagctaatgttacagtggcttactgagaccttggcctggttgtgatagttctccaaacctgggtgttttcacctttgaaatatgaatctggatttagctttttcttagcagcaacaacaacaatacatattcacttattattaaatgctgttgtaaataacatttttagatttaataatgatttcccaagacatttcgtgctattctttactttgctgatggggtgagaagagagttgaatcttaattattattttttagttaattcatgtgat

SEQ ID NO: 267601 - DNA, 434 bp, Homo sapiens
caaatacaatttgatcttacccctcacaaatcatgtttttaatgagacagtggtagattcctttatctagaatttaattttttttctccgaagacctccatattcataactggatttgaatgtttttgaaaataactttcacagtagagcaaaactgtaaagaacaattgcattaaaagcaatttacctctaatttcttcatgctgtttgctatttattcctggctgttgttgctgtacgtgaacaagaatgtactctctgaaatagaggctttctttgaattagcactgaggtcctacagaagtttttgtcaacttcatggatctaaaatgtgtgcttttatgtacaccattgaaaagattcacttttgattaaaacacatcttgtgttccttttctataaagacctctatatgttgacaaccacatttgagt

SEQ ID NO: 267602 - DNA, 196 bp, Homo sapiens
atttccttttccaaatgtaatgaaccttttcctctccggggaaaaaaggaatacacagatttggatataatttccaggagtttaggaagtctctagataaatcctacgcaaaggccctgtgtgatttaaagtcacataacaattgaagtttattttgtttactgtgggccatatggtgagtgcctgataatatttc

SEQ ID NO: 267603 - DNA, 511 bp, Homo sapiens
aacttggcaagggtacagagaaacggatgtactgttttacagtatttggggagggtggtttgagcagcatttattgacaatttcattagtggggatgtttctattgaaaacacagagttaggaagtcataaaatgttcttgcaatataaggtaataataccaccggcgtttatcttatgttttcatgttctaagtgcatgcatctgagtaaaaggatctgggctgcagtccagtctgagagatgccagcaaaggcttcctaggccaattcagtccagtaaatccctcttcaatcttctctcccacacagacagcagtgatgagcatgcccgtgaactcacatgattattttggggaaaatgaaagagttgtattctttttgaggtagtaattccactttcaggggcaaatacattttgattattttatcacccttcagtgagttgtttttgttctttaatcaaggatgtatgtttgaagtaagaagtaaagcataaagtatacgattttgt

SEQ ID NO: 267604 - DNA, 419 bp, Homo sapiens
atcaacgtgaatcttaatttctaatagaaaaaaaccatcaataaaggcttaatttattttatttttaaaatatttaatttattttttattatttatggagaccggggtcttactatgttgcccaggctagtctcaaactcctaggctcaagggattattccacctcggccttccaaagtgctaggattatagcgtgagccactatgcctggccaataaaggcttaatttagaataagcaataggaatgattgctaatagtaaaggagcagaaaaaggttttcattacccatgtgaaaatgaactctttgagaattagtgcttgcttcggcagcaagtatactaaaactggaatgatacagagattacatggcccctgtacaagaatgacacgcaaatttgtgaagcgtttcattaaaaa

SEQ ID NO: 267605 - DNA, 304 bp, Homo sapiens
gcacgagggctttttgtttttttgagatggagtttcactccagtctgggtgacagatcgagactccatctcaaaaaaaaaaaagtattaaaatctctacccagtggtttaaattctggtcccagcaggaaaatttctcagaaaggattcgctcattaattaaataatgaagaactctttctctgcatgtgtaacctcctttctagggttccccaaagtggaacggctgcttaggtaatgtttgtttatttgacaagagtttaggtttattttttcttatgataaaagtatattataaaaaatga

SEQ ID NO: 267606 - DNA, 446 bp, Homo sapiens
actggtgaagtctatttatttaaccagttattcattgtattctttagttaagtcacacttttcttcatgtctcattttaattccatattgcttttgaagtttttgtgtctttaaatcacaaacgaggccgggcgcagtggctcacacctgtaatcccagcactttgggaggccgaggcaggcggatcacgaggtcaggagatcgagaccatcctggctaacacagtgaaactccatctctactaaaaaaatacaaaaaattcactgggcgtggtggcgggcgcctacagtcagtcccagctactcgggaggctgaggcagcagaatggcgtgaacccgggaggcggagcttgcagtgagctgagatcacgccattgcactccagcctggcgacagagcaagactctgtctcaaaaaaaaaaaaaaaaaaaaaaaaaaaaaaaaaaa

SEQ ID NO: 267607 - DNA, 686 bp, Homo sapiens
ggagtttgaggttaaagtgagctatgatggtgccactgcactccagcctgagggacagagtgaggttctgtctttaaaaaaagtggaggattgggactccagaggaactctgagaagttccttgtccccagctctcagctcccctcctcccattccttttaagccaccatgttgatcagagccaccctgggctgtcactgtggcccagaggctgccagaggaaacttctggctctgtgtcattcacatcgttgtaatggccttgagcaagtcacttaaccaggatccacattcatctatagactggaattttcgatgtgtacctcacagggtcattttagtattagatgaggtaatgtatgtaaagtacctagcaacgtgcccagaatataagaggtgttaatacgtaggggctatttttgttgtcaacattgagttgctgtcctggccacttgccttgcttcagttttatatttagaaccagctaacagttactaagcatctgcccagaactgggcactttcacaaacacaacctcatttgagcatctgtttgcccagcccgtttgcctgagttctgagctcatatctggcttgcctcttgctgttctttgttcctatgagtttcctagtttcctggtttttctatcagtgcctatgccttccagtgcctgttgcctgatctcag

SEQ ID NO: 267608 - DNA, 557 bp, Homo sapiens
ctctcagcccactctccatgccagcccaccctgggaggatggatgaggatgttatgttaatggcatctgtcatgtccctgacttatcatgagacatccacgatgagccagatgccagctgatgggcaaacgtgagtgatggaaaacaagtgtgtgagtgatgaagttggctcttgccagatgaggatgaaaaatctcttgaccaaaccccatgtctgaagctgccagttcccaatatcagagagatagtcgccatcctgctgtaggaggttggagaccgggacaaccccaggccccctgagaaaaacccttgccagaggctgaaggtgaagggaggactcagcttccacctgcggccagctccaccctgggagctggactccttgacagactcctggctacggggctgtctctgagcttttgaggtgtcactgttactgctccccagctgcccagcttgggctggacccagacttaagacatttgtggccgggcgtggtggctcacgcctgtaatcccagcactttgggaggctgagggaggcggatcacttgaggt

SEQ ID NO: 267609 - DNA, 909 bp, Homo sapiens
ctaagggagcttgcccgagcccagctgctgattgttaccagggcttataacaggttgcggggtctgtgatttagtgctttcatacaggcacaggactcgggcacggagaggggccgtgctgtgcaagacggctgaggctgtctttatttgagagctgctcagtttgtcctttttcagctgcagggttttatggtggaagctgtactttgctttccagtgaatcaatgctgtcgtccatgtgttctctccttggcttgtttgtatgaatcactgaagggctccaaaacaaacaaacaaacaaacaaacaaacaaaaaacagcttcctggaccgcaccttagaatgatgaaatattattttctggtatattttatcaaacatccccaaaggcttcttatgataatgaggaagcatgattataactgtctaactcttctgtgttcatattgatgttaatgggactaaattaccttgctagcttaatgagataagattttaaatgggtgttttatgtactctgtgtgtgtgtatttaatgaagacttggtggtcgcttctgatttacacttgggaatcaattcccctcttgtggctttttgctttgtttcctttcattcaccctcgaattaaggcatcctcagtatagaaaattttgaaaatacagaattatgtttaaaaaggtagaaaaatggaggtaaaatatgcacttgaaatctgtcataggcagtgttccaacaccaggtcttgtcctcagaggaggaagacggaggagattttattaccgaggacaagtgactatgtttaacaattaaccaacctttatgggttggaagtatctattaacacttatttacatgtttcctgtttccaagagaccaaaactgatatattgtgtcaactgttgactctac

SEQ ID NO: 267610 - DNA, 380 bp, Homo sapiens
taaatttaatttgtgcatgtgtgagagaccagagtgagaccagagatggcagcggtgaggggcggtggtctcaccatgttgcccaggctggtcttgaactccccttcaagtgcccccctcctcacctggcccccctcaccttgcctcctccccctcactcctatgccagcccctgccattccctacgccctctgttgaccgcaagactcaacaagtgacttgctgagcaaaccctgctgagaagagatctgtttagggacacaggaggccaagtacacaaaaaagcaaaagaactagcatgcctttttcaatggatgtctattttacagggctggcttcagattattgttatagctttaaataaaaggaccgttttgtca

SEQ ID NO: 267611 - DNA, 440 bp, Homo sapiens
tacatatgatcagtttattttttttcctaacactatttattgaaaatctttcaatgtcagctctctctccccacctcccccgctttctttttttctgagacagggtcttgctctgttgcccaggctggagtgcagtagtgctatctcaacttactgcagcctccgcctccagggcttaagtgatcttcctgcctcagcctcctgagtggctggaatcacaggtgcaccatcatgcctggcttggtcaccaaacttttactgtaaggggcagactgtcaatatttttggctttgtcgggtgcggtggctcacgcctgtaatcccaacactttgggagtccaaggtgggtggatcacgaggtcaggagttagagaccagcttggccaacatggtgaaaccccatctctactaaaaatacaaaaattagctgggggtggtggc

SEQ ID NO: 267612 - DNA, 118 bp, Homo sapiens
attgagaagaaacttaatcagaatagcaggtcagaggctcctaactgggcaactcaagattctggcttctactgaagaaccataaagaaaagatgaaaaaaaaactattaaagaaaga

SEQ ID NO: 267613 - DNA, 415 bp, Homo sapiens
ttaatttcacatttcataggtaacacatagacttagccacatttttcatattggtgcctccatggtagataagacattgaaactataatgcaactaagatcaaattttttaaatgtcagaataactttaataaataaatttgctcatccttttttgatggaccctaacaatgatcagtttttagccatgatgttatctgccactagactgtattattttctcatttaacatagcttcatggtactaggaatggaaggaggaaagggggcatgaacttctcaagactgctttgtaagtctatttctttctttgattcccatacctcaaggaactgagagcaaactttgagcctgagtgtaaagtttgttttcctggaaatgtcaccaggctgtaaactcagaaacagattgccccc

SEQ ID NO: 267614 - DNA, 371 bp, Homo sapiens
gaaacagagtctcactctgtcacccaggcttgaatgcagtgatgcaatcttggctcactgcaacctttgcctcccaggctcaaaagctcaaacaatcctcccacctctgtctaccctggaacaagaagggagcctgctatctaaagggaaggacccagtcctggctggattcaccacttgctggttaaagagcccttgggccttgaacaaacatcagttgtagccaggcagtagttgcccggggcctgggatggtgatggccacaggagagggtctagaaatgttgtccaggaattagggcctagaatcaggaatgttagaaatctacttggtgcttcattttactgtagctgaggtagtacccaggttgc

SEQ ID NO: 267615 - DNA, 317 bp, Homo sapiens
gactctactccctcaccacatctatcagggtgtctgcagatctttacatactgttccctttacctgctacactttcatccagatcgttcatggaggacttctttccaacaatgaggtctctacatgaatgtcgtctgctcagagaagcttgccgcaaccaaaatttcatcctttcttctatctcgagcctaaaatggtgctaaagaaatatttgcccttcaaaatactgtgctacactgcaaaatgtcatgaaacattaaaatatagcctgccaaacatttttattgtatgctaagtgactgccatcttcagatatt

SEQ ID NO: 267616 - DNA, 429 bp, Homo sapiens
gtaaatttgtaaccagaactttatcacatcctggctttcaatctgtagatgtacaaatctagttcagtatttgtacaatgcctagaaagtcacaggtcctgtagtccaaatccagtgtcaaatcatggctagacttgtctgtatgagagacatatagcactggataaagttgggtattgtagtcatttaggtgaaaagggagaatcaaagataaaggtgatcatttttcatgcattctttaatgtgtactaaataccaattgttgagtctttgttccgggttgaatggcagtcctaatagcctgaccaagtcaactagatttccaaaatgctccacttgtgctttcacacctggaaatacctacccaggtatgtgtatgtatttatatctaagggtggataatctgacatcctgtaggtatagatgttg

SEQ ID NO: 267617 - DNA, 343 bp, Homo sapiens
caaaagaattgagtagatttgcaagggctgctgactttttgacccctaataatgtataatacttaatatgaacagcaagtaacagatctcagtgattgtagatgtttactaaggtattttattttccacggggctttgaatgctaacatatatttcctgtcatcagctgtcttaccaaataataattaaatttatcatccacattttgaataaaatattagtactttctattggcgtatggcaatttaaaaaactttaatttccataattaaatccatcaacttgtaggtgatatagatgataagtgcaaaatactttcagttttaaatggaaaaattgaggc

SEQ ID NO: 267618 - DNA, 686 bp, Homo sapiens
agatagaggagctcttattaagtaaggaaaagtgtgaagaagttcgtcaagcattgagcaaaccttttagtctaaagggaagaggagtgagggaagtgataacatgagtgtgttgaaattagtggtttgaactgactgaatctcttaaggtcgcctcgaggtctaacatgcttgttaaaaaaggttttcagtatgtattttttatctaatgccagtggggtcatacaaacttgtgtaactctgagttatgaccttttgaaatccttagaattgtgttgtaacaagacttaaaagatcttagaacagtccaagggagattcatatgattaagtcccaaccaacttacattaacaattaaattacctttgcttttgttgttgttgtttttaacagaaacaaggtctcactatgttgcccaggctggtctcaaactcctcagctcaagtaataatcctcctgccttggcctcccaaagtgctgggattacaggagggatccaccatccctggcctagctttgctttaacattatgttaagctatttcttttggttgcaaataacagaagcctactttggtttatttaggcatgaacattcaagctctgtaaagagtaaggattttagtaggaagagtttagatactttagatatttcaatataataaagttcccactcactttctttca

SEQ ID NO: 267619 - DNA, 453 bp, Homo sapiens
gaggagtgctcaggaataggattagtgtcttataaaaacgatcccagagagctctcagctccctttcaccatgtgtggccatggcacgagggtggtcgcctgcaaccttgaagaaggcctcaccggaagctgcttgcactggcaccctggtctcagcttccagcccccagaactgtaagaaataaatgcttgctgtggccggacacggtgggtgatgcctgtaaccccagcactttgggaggtggaaatgggaggattgcttgagctcaggagtttgataccagcctgggcaacatggcaagaccctgtctctataaaatattaaaaaattggctgggtgtggcgcctcacgcctgtaatcccagcactttgggaggccgaggcaggcagcagattgcttgagctcaggagttcacgaccagcctgggcaacatggtgaaacattgtatctac

SEQ ID NO: 267620 - DNA, 378 bp, Homo sapiens
ctcaaagcgggcgctgacactgcccccaggccagcgagccgtggccgtggcgctggcaccagagtccacctggagcaccgaggctgagccgttggtgggcacgtagaggcggccgtcgcggggggcagggtagatgacccgcagcccagccactggggagaccacgtcaaagctgcaggacaggttgtgcctggacacgccattgcccacctctgcccggacctcatagcgcccaggcagccgcagcccagggttgggcctcaggcccagcagcacggtgagctgttccgtggctgcaagcagccgcagggcacaggcagggcaggcccaagtgccctccagctgggctggcaagtggggcagccatgacgaggcgtt

SEQ ID NO: 267621 - DNA, 342 bp, Homo sapiens
caactcagtatggaacgtgggtttaattttaattataaacaaaccataactgagaaggtaactctgttacaagcagataattcttcatgaagacaagtataaattcaggctaaggagtgatttaattgctatcatcttattcaattctacaaattttgtttagcgagaaaatattgactaaatagttctttcagttaatttggtcttcaaatccgtgccttcaataccagatattatcctatatcttcactccccaaaagatttattttaatgtaaaactcaccatgaaaaagtaatcagtctcttcaataactagatcaaaaccatcctgcaaagccttcc

SEQ ID NO: 267622 - DNA, 1018 bp, Homo sapiens
aattttttcagcgtttttcctctgtatctaaacaccaataatatacttaatttttgaatataaaagaagtagcaattgactaagaataaatatgttataaaaactaggggattatcttgatttacatttcctagagtattaaaagagattaattacagactttcacttgataatattgaggagtctggagggtcatagcaaaattttctttagttcatcttaaaatttagggaggtaaaaaaagattttattcacataaaagatttcttggcatagggaaggcgtaatgttaagggcttcttccttacccaagtgggagctgaaccagtaattgtggggaaaactgaatttatagcaacaaaggatagtagtttctcaactgggagcatacgagcaatttctcagttcagagatatttatagcatcttggtgttatgcaataaacaatgacaacaacaagcattgagctttcactttggagttactcagatctgagtttaaattctaaaattattctagtagtattttcctgcggtgaatctgttaaggatgtaagctatagtgtagcttggggaatcatcttgaacagttatgaaactcattaaagcttcttttcccttgtctgtaaaatgggaaaaataaatacctctatagctcttaagaggcttaagagttctatggcttacacccacatacagtccttggctcagtgctaggcatgtagcaggtgctgactgcctctctcccttcccttctttactctcagttgtcttatttcttcttatgcagaagagattaccttaaagctgactagaaaactcagacataaattgacatttccttatcattgcctgaaacccactgaataagtcccctttgatttctctcaggaaggataaaaaaggctacagtacctgctcataggagttcagtaaatgtttattgattgaatgaaaagaatttgatttaaggaaacaataacactccatcctgggcaacagagcaagatcccgtctca

SEQ ID NO: 267623 - DNA, 458 bp, Homo sapiens
  misc_feature (15)..(16): n is a, c, g, or t
  misc_feature (162)..(162): n is a, c, g, or t
actgtagaagaaagnntagtagaacgtgctgagatgaaactcagactggattcaatagtcattcaacaagggaggcttgtggatcagaatctgaacaaaattgggaaagatgaaatgcttcaaatgattagacatggagcaacacatgtgtttgcttcaaangaaagtgagatcactgatgaagatatcgatggtattttggaaagaggtgcaaagaagactgcagagatgaatgaaaagctctccaagatgggcgaaagttcacttagaaactttacaatgcatacagagcctgtttttgagttttagatactttatttgtaaataacttaaaatagctttctgaaaccgtgcattctgtagtttcttcctttcagtgaaattgctaaatgtcaatgtatttttggcactgcgattttaaccatttattaaataaaaattttgttaaagaaaaaaaa

SEQ ID NO: 267624 - DNA, 424 bp, Homo sapiens
  misc_feature (15)..(16): n is a, c, g, or t
  misc_feature (162)..(162): n is a, c, g, or t
actgtagaagaaagnntagtagaacgtgctgagatgaaactcagactggattcaatagtcattcaacaagggaggcttgtggatcagaatctgaacaaaattgggaaagatgaaatgcttcaaatgattagacatggagcaacacatgtgtttgcttcaaangaaagtgagatcactgatgaagatatcgatggtattttggaaagaggtgcaaagaagactgcagagatgaatgaaaagctctccaagatgggcgaaagttcacttagaaactttacaatgcatacagagcctgtttttgagttttagatactttatttgtaaataacttaaaatagctttctgaaaccgtgcattctgttggaatcagtggctcagatgtccactactgggagtatggtcgaattggggatttgattgtggt

SEQ ID NO: 267625 - DNA, 1089 bp, Homo sapiens
cctcatttctgatataccacctctctatttggcattttcacctagctcaaaaagtcagttcctgatagcattgttaacatagctagcctgtgctgacagcttgcagaaactggcagggtctattgcccaggctggagtgcagtggcacgatcttggctcactgcaacctccgcctcctgggttcaagtggcccggctaatttttgtatttttagtagagatggggtttcgccatgttggccaggctggtcttgaactcctgacctcaagtgatccgcctgccttggcctcccaaagtgttgggattatatgtgtgagccactgcgccagccctaaaatctcatccttatgtaacctaagcccaggacttaggacttagtggttaacaggttcctgtgtttagttgattttaccgaagatgtttgggactctcagatctgatgggcacttggcattgctgttgcttttttttttttttttttgagacagagtcttgctctgtcacccaggctggagtgcagtggtgcgatctcagctcactgcaacttcagcctccctggttcaagtgattctcctgcctcagtctgctgagtagctgggactacaggtgcgtgccactgtgcccagctcatttttaaatttttggtagagacggagtttcaccatgttggccaggatggtctcaatctcctgaccttgtgatccacacctgcctcggcctcccaaagtgctgggattacaggtgtgagccgccgcgactggcctattgaattcttaaatatgaagaagccagccctgttggcagtttatcagctttaatcaccattactgaaactggtgctatgattgatcatgcctggtcctccagtcttccctggccactgtaccgcagctgcatgaacagctgcgtttgctcaatgggaaggagacttcctgctgggggaggtatgggagggaggccccggggagaggcatgaggaaatccaagtggccttctacatttttctctttcatcattatccatatcttgattctagaactttattttctggtgtctcagaaagttaagaaaccagtgtcttcaaaagtg

SEQ ID NO: 267626 - DNA, 866 bp, Homo sapiens
gatattgattcttttatatgttgcaaatatttttctagagtcttacttctcttttagcttgttcaaaatattttttcccatgcagaagtcattttttttaaagctttttacttatatcatgaacatgttttcatttattccttttttttttttctttatttgagacagggactcgccctcttccccaggatggagtgcagtagcacaattatggctcactgcagcctcaaccaccatctgcctgccttagcctcctgaatagctgagaccacaggcatccactaccacacccagctaattttttgttctttgtagagaatagagacagagtctcactatgttgctcaggttggtctcaaactcctgggctcaaactctcctctggaagtactgtaattacagatgtgtgccccactcctggcctcataagttcttcttaagtttacatcttatattcattgtctattaatacctaagaaattactccaaaaggtagtgacttgaaacaacacttaaaaaaaaaaatctcacactttctgtggctcaggaataagggcatggcttacctggctactttgattcacagtctctcatgggggttgtcgtcaaggtgttagctgggttggaatctgatctgaaggctgaaatggggaaagatgcagttctaagctcacttatgtggttgttgggaggattcatttccagaatgagaaatgaggtagtttagttgaggtcctcagtttctacctgtctgtttgtcaaagcccacttttagttttttgtcacatgcacctcccctatgtgccaaattgtttaatcaaagctagaaaatgacagattctgctagcaagatggaagtcatatag

SEQ ID NO: 267627 - DNA, 347 bp, Homo sapiens
agagatactgatttctttggaatgtaagaataaatgttagcattattcatctgctacataaaaaacagcaagatacagtggaaggagagagggccttagactgggaaagatctaggcacctattttggcccctttactatgtctgctgcctgaccctgggcagttactaaagtcttgattaaagctctcaattctctcaactgtaaaataagaatccatacctcttgggatctgtgaaaggaataagtgaagtgatttttttaaagtgccaagcacagtgacacataggaagtgcttaatggtagctgtttattatgtttttgaaatagagcaagaccctgtctaaa

SEQ ID NO: 267628 - DNA, 529 bp, Homo sapiens
ttttcttctttcagtctgataatacggcaaattacattgatttttcaatgttaaaccgactttacattcttaggataaaccccacttcatcattatatcttttctttgtaaagtattggattcaatttgctaaaattttgtttgtgatacagtctgcgctccatatccacaagttctgcatttgcagaaccacagatggaaaatacattttaaaataagaaataacatacaacaataaaaataatacaaataaaaaatacatataactattatataatgtttacattgtattaggtactaaaagtcatccagagctgatttaaaatataaggaggatgtgcataggtcatatgcaaatactataccatttgatctaaggacgtcaccacccacacattttggtatctttggtatctttggtatcagggaaccaatccctgaaggatatggagagttgaatgtatttgcatctgtgttcatgagggaaatggatatgaagttgtcttcaaaagtccttgacctttatcgg

SEQ ID NO: 267629 - DNA, 475 bp, Homo sapiens
tgacatggagtctcactcttgttgcccaggctggagtgcaatggcgtgatctcagctcacagcaacctctacctcccaagttcaagtgattctcctgcctcagcctcccgagtagctgggattacaggtgtctgccaccacgcctggctaatttttttgtatttttagtagagatggagtttcaccatgttggccagactgttctcgaactcctgacctcaagtgatctgcccaccatggcctcccaaagtgctgggattacatgtgtgaaccaccgcacccagcccataaggtttttgaagaaatggcagctataagtatctactgagtgcctgctctatgccaggcattgtgcgaagggcctaacaggcactgtcgtctttgatctaacaatagtcttgtatggtgggtactaggatggactccattttacagatgaggaaaccaagacccttagacttgactgacttgtcca

SEQ ID NO: 267630 - DNA, 84 bp, Homo sapiens
tctacccattacaactattcacaaatatgtagtattatcattcataagggagaaacattcctcctactttaactaaactatccc

SEQ ID NO: 267631 - DNA, 397 bp, Homo sapiens
ggaaaacaccagtcactaaaaaaatatgaaacaagttctgaaaactcttgtttcgtagtaatagaatagagagattcgacatccttgaaatagggatggagaagagatacagaagaaaggcattcattccctccacaaattggatctcaaattctagtgctggtaagggcaaaaggtggtttccagagtagctgtaatcatctgttattctgaaatacaggttgagtctgagggagtcttaacagtgctgaagggcaaatagtcaaagggattttcagatgtcagctaaacagtggacgctgcagcaacatgttacatttgtgtaaggatccagaagtgggtgaacttaaatgatttttaggcccagattttacagtaaagatgataacttcacaaa

SEQ ID NO: 267632 - DNA, 440 bp, Homo sapiens
gacacacatgcaccagccttgtgcctgttctaggataggttgtgtgctttgtcttgggtaccctgatatcactgttgagaaatttctcagtccactgggagaagaaaattgttcatttccatgctcacacttcctctgctctctctgtcctgattggctaaccatggtactggggtgagaaagctgagactagtggtgttgctagagcgaggttgtcttgacttagaagagctgattgtgaaattttcagaaattttgcttgctgattattagtcacagccattattaaaaattaatgtacatggcatgaagcatatatggcaaaatgttaatgaatctaactggtgtgtatatgggtgttcaatgtgctattttttcctattttctgtatgtttaaaagtatatatatatttttaaattaaaaaggcaacactgaaaca

SEQ ID NO: 267633 - DNA, 1293 bp, Homo sapiens
ctcctcagtcctggctggtaagcctatactcgactggaagaatagaacataattatggaaactgtggctttttgaagtggcatttaattttgctgttattaagtctatgtgaaaatagctaaaacttttatttggaaaatataattgaaagcttcatccattctttgatatgactaaaatgaaagtttttatgttttcctgttcctggttatactgtattcagagctatggtgctttgtaaaatcttgaaaggcatttctttgttgttgttgatatgcattttaatggcatttaaatgagacgatttgtaattcttaagtgcattttacttaattgtatttattcttgggagaacattcattctttttatagatcaaaggttaaaaaataaccaaagctaaggcatgataattatcgaattaaaatatttcatgatctaaacatgaaataaacctaacaactgaaattttctttcaactctgaatttattttggattatgtaaaatctttttaccttagtctttaatcattgtatcaaaggtccatatttttagtaagttgctttatgtgctgtcacaaattgtgcatgtcactctgctagtccccatggaaatgtgttttatctgttaccatcatggaattgctgcctctttgtccgtggactgtcattcattacctgcccatctaatcttgctatttgatatcttgtacatgtgacaatgtgtttggcattggaggaatatagataagtgtaagaagagccagtatctcctgtcctcaaggattctaagtgaaaaaagtgaaaaagacaaaagtgattaagtgaaaaagacaaaatagtatatacatagtgctttgccacacgtgagtgagataaaggaagagctgtaggatttgaagtaatagaaatagaggaagcagaaatattatagaagaaagtgaaaaggatatgtattagttatcaggtgctttattagaacttcaggtggaaatggagatattaggagatacggtcccagagtgtgtagagtggtgaggaggaaatgtaaagattgggaatcgtttatataggagtgaaggttgaaatagaatagaggaagttaacaagaaagataatttacagggagagaaggagaggggaaaagtgtgaaattacccagatttatggaatgaaggagggatgggatggaggaggaaaatgatttcagcaaattagacacacagacctagaagaggaatcagaatgatgaaattctgtgaaaaccaaactagaggttttgaggagggaagatt

SEQ ID NO: 267634 - DNA, 482 bp, Homo sapiens
aagaaaggacgtctgctctaaccatcggatccggcatggtgctggaagcgctgggcactgcagtacgcaggacaaggaaagaaaaggcgtgtcgatcacaaaggaagaaacgaaactgcctgtttacagatgacgccgttgtctttgtaggaaatcccaaggtatccaccaaaaacactcctagaattatgaagcgaggccgggcgcagcggctcacacctgcaatcccagcactgtgggaggccaaggcaggccagtcacctgaggtcgggagttcaagaccagcctaacatagagaaaccctgtctctactaaaaaaaaattcaaattagccaggtgtggtgacgcatgcctgtaatcccagctactcaggaggctgaggtaggagaattgcttgtaccggggaggcagaggttacagtgagctgagattgcgtcactgcactccagcctgggcgacagagtgaaactccatctcaaaaa

SEQ ID NO: 267635 - DNA, 382 bp, Homo sapiens
acagagcgagactccatctcaaaaaataaataaataaaaatgaaaaataatttcagcagataattaactttgttagactcaaactacaaactttttcatggctgtggtgggttgtggctcagaacttagcttagattgctcccagtttgccacatgcatggtttagggtcaaccagagacttgggctgggtctatataccaatatgagtttcttcttcttctctaacttcctgttttccagaattccttcctcactctctattgcccctgtttgcccctaagcttcttccataaggacttccttacctttgattttttaaaaagttatttagtttcatgacataccctgcatgtagcattcaaaacctgtgctttaaaaaaa

SEQ ID NO: 267636 - DNA, 414 bp, Homo sapiens
ccaaattcaccagactgtggaagccagaaagaagatctgaccatctcttgcagaagaaataaagaatggtaactgtgcaacaagttattaccttaagtggtatttaaaggcagacatagtgaagaaatgaagagaaggaaagaggaagaaattcaagccaagtcgcataaatgttgcccctggggaaataagatcagagattctaagtccaatgtaaaaatcaggaatggagttgctcattttaagtacagactttccagtctttaagggaaaaaggccctagaaataactatcctttgacttgcagatgaaaagggaactcatggtcaaatggtatgataatcacaatcctgatatcacatatattctcactcatatgaagttacccaaaattactcaggctggttcttagag

SEQ ID NO: 267637 - DNA, 860 bp, Homo sapiens
tatgtgccaatcactgttcgcagcgttagctcatttaatgcattaactcatttagttctggtagagagagttctagtgtactcatttgcactgccacccaagtccgcatccacaccaagaagtaaatggatgtagcatgccactgcgtacactgcgaacgcagacaagcactccttttgggattcttttccttttgggattctattctgttccataacgtcatttctctcctgtaagccccttctctgccacatcaatgctgtcctctaactatgccataaatattttccatcatctttctgttcctaaatcactgtgtgctgttgatattccaccaatacagtacacttaacatgtacaaaattttagatttcactatcacctctcaaaagctggcttgctttctaagattttcccattcgtgtcagtgccgtcaccgttccctaggcccccaaacttgaaacgcgcgagtgtttcatccctctaatatccctcgcctcttcccaggtcttccccagccctttcccttgcaatttaatctttttgttgttttctgtgaaatatctctcaatcgacttattcattctacaaatattcgaggcctacttcatcccaggcactgtattagttctagagactcggggataagacactattcctgccttcaacgagcttacaacctggtagggaagacagtgaggtttataggcatagtgcagtgttataggcactgcaacagggacaacacaggtgctttgagagcacagcagagagatgtctcctgccactaaggaagaaagggaaggtttctcaaagaaactggtggccaggcacagtggctcatgcctctaatcccagca

SEQ ID NO: 267638 - DNA, 254 bp, Homo sapiens
ctgggcaaacttaagctttttaactatgtgccagtgacttaaacacaatgccacttttattttttttttagagatagggtcttgttctgtcacccaggctggagtacagtggtgcaatcataactcactgaagcctgcaactcctgggctcaggcagtcctcctgaatagctgggactacaggtgcacaccaccatgcttggctaattttatgtttttatttttagagacagggtcttgctgtgctgcccaggc

SEQ ID NO: 267639 - DNA, 556 bp, Homo sapiens
tctaaggaggtgacgttgtgccggggcctgcctgatgagaagacccagggaagagctttccaggcagaaggcacagcaggtacagaggccctgaggtgggaaggagcttggtgtgtcagggcagagaggaggccagtgtggctggagcttcctggccggaaggtgaggccggacccagtgaggagtttggattgtgctctaagtatattgggaagctgttggagagttggaagccaaggagggacaggatttaattgatgttttaaaaagagctccttggtgggtccgggcacggtaatcccagcactttgggagggcaaggcgggcggatcacaaggtcaggagttcgagaccagcctgaccaggccagcatggtggaaccccgtctctactaaaaatacaaaatattagcctggcatggtggcatgtgcctgtagtcccagctactcgggaggctgaggcaggagaattgcttaaacctggcaggcagaggttgcagtgagccaagatcgagtcactgcactccagtctggccgacacagcgagactctgtctc

SEQ ID NO: 267640 - DNA, 597 bp, Homo sapiens
cagaaagcaaaaggcccttcaagaaacagaaaaggaaaagtcctgttgtcaagacctccaaggacaagaaccagtgaagcctggtaacaaacacattatgctttgaagatctgccagttaacagctgtgtggtctctctccgattaacatctctcagcccttttttcacctttatgagatggggattataataccacatcccttgtagggccattgtgaggattgaatgagctaatgcatgcccacgtgcccacctcatggtgggagcaagccattgcctccccctcagaggacccagtggagagaaggttgacagcttggcattctctttggaatggctgttgacttcgcactgccatccacagaagagctccataaccccacccgagggcacggaatggcctttccttaaaggtgaagcacaacatcattctcaagtgcctttgcaaataacgaagaccagaactggtcatttacccaggccgagccagacctatatgatacatcaaaagcagaacagaaagaaagggaatgagagaatccaaatgagtttatttgtccattaaataaatatgcaaaattatgcagatgtggaaa

SEQ ID NO: 267641 - DNA, 435 bp, Homo sapiens
cagaaagcaaaaggcccttcaagaaacagaaaaggaaaagtcctgttgtcaagacctccaaggacaagaaccagtgaagcctgggccattgtgaggattgaatgagctaatgcatgcccacgtgcccacctcatggtgggagcaagccattgcctccccctcagaggacccagtggagagaaggttgacagcttggcattctctttggaatggctgttgacttcgcactgccatccacagaagagctccataaccccacccgagggcacggaatggcctttccttaaagaacgaagaccagaactggtcatttacccaggccgagccagacctatatgatacatcaaaagcagaacagaaagaaagggaatgagagaatccaaatgagtttatttgtccattaaataaatatgcaaaattatgcagatgtggaaa

SEQ ID NO: 267642 - DNA, 494 bp, Homo sapiens
ggacaaccagccagagtgggcagctgaggtcacctggagtaattaatcctaaagtttactggtgcctgttctgctggggagcaggaatccaattacccacagtgacagcagcttagtccctggggagatactcatctgcagggcggccaacaacctgtccacctgaaatcttcccgagaagcaacaccaacctccacccccttcactttctccgcacaccctagccaggcacagacctcagctaaccaggacattgcccaggccacactgcctgggttgtggtgcaaaggagtgaattctgggagattggaccaggacagcttctagaggtctcctaacaagaacccatttctcctgtagaacgaagaccagaactggtcatttacccaggccgagccagacctatatgatacatcaaaagcagaacagaaagaaagggaatgagagaatccaaatgagtttatttgtccattaaataaatatgcaaaattatg

SEQ ID NO: 267643 - DNA, 369 bp, Homo sapiens
accccagggcttcctctagatcagaccactctctcgcgttccaggggtcttggttcatgcacctccccaaagttcaacacctttgcccctccctgccctccccgttcacatctggcctggtctccaaggcagagggaagtttattagcccctcctgtttcccagcctcatgagaagatggagagtgtgtttttaagatgatgaattccagaaatcataataatttagttcatggcagttaggggtgtatagaagttttacatttttagataggaaaatttatcagtcttttatagttttccctttggtatcatccctagaaagactcccccaacttgtatcccaaggttataaaacattcatttatatt

SEQ ID NO: 267644 - DNA, 1153 bp, Homo sapiens
caaacaagaaaaaactgataggagtgtgaggaattaccaaaccgagaagggaggaggaaatccagagttcccaagcacgttggctgaaccagaagagattgctgaaagaccaagcagtgcttttgacacactcatgagtctagaaggacaatagaggctaggacctaccaatatagggagcctagtacattactccacatatttcagtgtgtactgaagggttccctctgggaataaggatgagctagaagtaagccagcctttctgtgaattttattaatctgtatggcccagttattgcaagcactgaaatttaattaagttgattataagtggctagtatcctagatgattgacataataaatgtactaaatgaaaattctctctgggggaagacattttcctactacacctcaacatatttctataattcttagatgtacattttttcacattagtatttacaatggaagtatatcagatattgtgacatcttaaattgctgccaggaggcagttgtaacatagttggcattacctgcacattagcagacttggttgtcatttgtggtattactgaaaaactatattttttagtcagaccacttaaaatgaccacttaagaaagggcagcaaattctagttgtgatctgaaaatctgtgggcttcttttggtaagattaagataacctcagtattagaccttgccaaatgaatgtcattggcttagaaggaaactcccggagacatagtgtggcactatttactatctagaaatgcagcatcatcacactgtgggcttaattggagaaaaaagaaaagaaagaaagaagaaatacaacatcacctttgtttttagtagcacaggtagcagcactttttggaaaaactgaaaaatctatgaccctgggtgggaaaaatgattcagaagattcagattctgaatgtgagttattagaaatatcttaaccggttttatattttcctttttgtataagagcaacatgataaaaatgtgtatctagttacataaaaagcttccagtaagaagtaaaaattctaagccatagaagtcattatatactttggttgacattgttttttctttcttagtactacctgaaataaatgttatgtcttataattggttgta

SEQ ID NO: 267645 - DNA, 474 bp, Homo sapiens
gagacagagtctcactcagttgccaagctagagtgcagtggcgcgatcccgcctcactgcaaactctgcctcccatgttcaagcgccccaccttctattgtagacagtagaatgccaagcaaaggagtgaaattgttgttgcatttcagagaaatcattctactctgattggcatattgaaaagtaggttgtggctggctgcggtggctcacgcctgtaatcccagcactttgggaggccgaggcgggcggttcacaaggtcaggagattgagaccatcctggctaacatggtgaaaccccgtctctagtaaaaatacaaaaaaatcagccaggcgtagtggcaggtgcctgtagtcccagctacttgggaggctgaggcaggagaatggcatgaactcaaggggcggagcttgcagtaagcggtgatggcaccactgcacttcagcctgggcaacagagcaagactctgtctc

SEQ ID NO: 267646 - DNA, 490 bp, Homo sapiens
aattcgcggccgcgtcgacctgaacctaccaacaaggtggttatctgagttgagaagtaagtattccctcagccttctaagacacaacacagacctgtgcagcagcaaaaaatgccaggtgggaatcaggaaccacctgtcaaatttaaacagctctcagtgtccagcgagaggagaccagcaaccttccaggtgtgagtggatgcaacagctctctcacctggaggacaaaggagaggattctctctcaaggttccctcagtccaagcactgactacttccctttggagacatagctggcctgctgcagagacacaacctctcagaggaaaggagagtggaaagtgtggatgggaaaggaaggacaaaagaaaaactacacaggaaaagcattgcagcgggaggggcaagaaccacccatcacagaccagatattctttctggcattttctggaagatggttttacctgcttctttctttatttaaaaa

SEQ ID NO: 267647 - DNA, 1867 bp, Homo sapiens
gtagagacggggtctcaccttgttgcctagactagtctgaaactgctaggctcaagcgatctgcctgcctcatcaaattgtatggtttaacaggattaattttatagtatgtaaattcaagctcaataaagctgttattgaaaaagaatcctctggctgggagagtggctcatgcctgtagttccaacactttgggagtctgaagagggtgcatcacttgagcccagaagtttgagaccagcctggcgacagagcaagactccgtctcaatagaaaagaaaacaaaagaaaagaacctatgtaaccacttagaggccttatcccttataaaaagctagatactaaaaaagaggcacctaattaatctcatcagtcatgaatacttagagtaattttgttaaacactttgagaagactttcagctgcagcagtttaggaacaagatggggcttgggaagaagaaacagcttggaacacgaagacctagattgagtatcctggaagcccaggcatctaagggacagcagtagggacagggaaggtggcaaacatttactgaacaccttaaacagacattgagcaagaagcattacagatgctttctcatctactctactcaaagtgcatttttgttaacatcacttcacaaataaggtacttgtggctcagaggaattatataatttactgaaggttactaaaaaaatactgagccaggatttaaacccaaatgtgcctgactccaaagccctgattttttccaacatagcaccttggtgggagaatatctcgaagtgggagaatatctcgaagtgagagaagggagaagggtagatagagaagagatggattgttcccaaagtcttgccaactttacagttccacccttcattgcctctttagtaagatagagggatagagaaagcggggagagagagcagttccctccctattagttatcactccccgacccaactcctgtgctagtgtgggtgctgggtcatgaacatgaaaacctgggtcatccagggcctcttgtccatacccacaactgtttccagcccccagcaatcttccaccttcctggcccatgtccccgtgtgcccctaccacaggggcccagctctattaccaaagtaaatctcctgttcaaaggtgttgtctgtggagtaggcaaactttccagctcggggagtcacctggcgaaagtagctctgggtttggggctgggagaggctcgtcttttcatggatatcctcagtgctcttgttgccaggcatgatctcaactgtctctgcttgttggaagtaactgggcaatcttggcaggggtgagaaaggagggaaaagggggaaagagtaggaggtggatccccctttccattaaatccacagctcgttccctttcctctttaagctcagctcctatacacgtgagcattgcagaacaccaatgtttaacttttagccttgtccccatggtgccagttgaatgtggagctgccagaagggcctgtctacagctgtcctgcctggctactaaaggatccatgccttctgcagccaccaagcagcagggcagagtggcggtgctccagcataacccttttttaacattcgtactcttagaggcggcatggccttggggaagggatcccacctccttcgtcatctcactctgtctattctgtgtgtggttatttaatgtccatccacctggtggtggacaggctgtaagctccttaaaggtacatatctgtgtctgttgcttttacattgtattcccagcactttgcagagtgcctggaaagtagcaagaacataatttatatttgtccaataaatgaataaataaatggatttccactg

SEQ ID NO: 267648 - DNA, 612 bp, Homo sapiens
aaaatatgcaatggtagtcctgccaaaaatttagaaaaattaaaaggtttatggtatctgtgtttgtgagttgtcctttaagggaaattacagcttatatctttcctgaggataacttaatgtcttagaaacagctttccaggctagcagcctaaagctatactcattttggaagggaatgttttgtagtgttgtgattcaaggcagaactgaaagctgaactctaatcagagtcccaggatatgggaaaagctggtgtgtgtaaggatttggcatacacacatcataacaacaaagaaaggtatcataatgtacgattcgagaatagcaaggaaagaatgatataagcttaagtacccaagtggcaaaagtaatcttatctgtaactgacttcagacaagggaacactaacttcctctgctcaattctgctttaaacaacttcagagaaacatttatttttcctgtttacaaacctactaagaacctccttatagcaaagttttcatgtttaagctaattttttattaggtgacactcagaggatatgaaaaatagcctgtcactattcccttcatttattcattcaatgaacatttaccaaatactacta

SEQ ID NO: 267649 - DNA, 434 bp, Homo sapiens
gtaaccttcaaaattgaagatgatttcccagaaacagaatctgcataattccacataagtagtggctcactcattccatagttctatcctaagacttctcatatgcaattaaaatgaccacttttcctgttggtctctttcttcagaaggtagattccttgaagacagagcagttgtatcttatcacttgtatgcctgccagctcttattgaatgactggtacctagctatctactgggcactaagaagtccgagattcttttttttttccttttttaaaaattttatttatttatttatttatttatttatttatttatttatttatttaattatacttgaagttctagggtacatgtgcacaacatgcaggttagttactacatatgtatacatgtgccatgttggtgtgctgcacccagtcactcgtcatt

SEQ ID NO: 267650 - DNA, 498 bp, Homo sapiens
tgaactacaaaatatgattgttttagttctcatattggttatcattgaatgtttatcgaatatttttgaggaatcattataaggtgtctttacctcattttcttttcccagcagattgaaacctactctcccctttcagaagcccatagtcattttttcaggcctccatatgtcagacatacaagagatatgaattaaaaagctgtattgcccttgctttaatggacctgcaggaaccagtcatcttggaaatatacctgtatgtcctgtgctaataggttgcaggcatttgcttgcccttgatttcaatgcagaggtactatttctggttcaccagaaaacagttaaatgaggccaccagagttgctgtcagccaacagggaacttgtatctcccacatcattagcttagctctgtgagtagctacttataccatattcccaaaggcgaatgttagcccccaggaaaacaatgcaattaatctaatctcaacatttc

SEQ ID NO: 267651 - DNA, 494 bp, Homo sapiens
atagaaatcagctcgggttccaactagctgtaaggtagtttgaattttagtttcctaaactttttgaacttccttttcttccgctttggaaggaaaacaaaacaagaactttcctatttcaattcatgagcaataaataaggaagtgatgaaaaatagttttaagttggaaacaagctagagaacctctttacagttcatgtcactggctcttcctacaggggtaaaccttcatgaagatgtctttctttgatactgtaaaaaataacccccagaaatgatctgtaaagacctctgtgagtcacaatacctgtgtctaattctagccccaaggtttgctaatcccatgtctcacatcttccttgagtctcagcttctttacctgtaaaatggcgaaagtaatacttaccctttggaacttttgtaaggacccaataacatatgatatggaaaaaagtttagaaagcttattaaaagccctagtaaaatatgaaa

SEQ ID NO: 267652 - DNA, 671 bp, Homo sapiens
  misc_feature (662)..(662): n is a, c, g, or t
ccttgcagacgaaagctgctgacgggaaaaccacgcgggaggggaacgtctaggccctggccctttcccctcaaaggccgcgggaacatagggctggggaatcctggcagaggctctgggcattattacagatggtcgttgagggtcgcaagcaccaggcctggaggccctcctcggcctgctaccagctgtgacctttggaaagtgacttggctcgcgcctcagttttccgttttctggaggacttgcggcctgagagtggccaccagtcatgcctttgctctcggagccagtgcctggtgcaagcactgcggtgggttcgtgccccagcttgggggccacagggctgactcggccgcactgcctatgcgagcttggccccagtttcctcgtcagggcacagaacttccttcaaagtgcaatacttccattgtgttcagtgcaataccttgcgtcacaccatgggacccatgcaatgctggaagtgctcccaagaagcagagaaaagtcatgacattagaagaaaaagttgaattgcttgatatgtatgggggagtgaccataccgataaaggaatggccctaggattttctaatccatgtttatcctaatttattggagaaatccgtggggaacccttcatcccttgtgtataccccggnatgtgttgc

SEQ ID NO: 267653 - DNA, 662 bp, Homo sapiens
agcatttcactggtgtcatggggaaaagttcagtaaaacttgtaaattagctggttttcccttcccagaatgtgcctttcttttgcagaggaggtgaaccctgtctgcgtgtggcattcagcctctgggatatggggctggccccagctcagtacccggggtggtgtctgctccaggggcctcggtgcttggcttccagaagaagcaagcgctggttttgctgcctgttgtctgagtccagcctgccagtgggttctctctggcctgggttgcatttttgaaagaaacttttcatttcccaataatattaggtttacagagaagtcgtgaagatagtacaaaggattcctgtatatcttccatccagtttcggttctcctagcgatcacatgtattactgtatgcttgtcaaaactaaaatgggctgggtgcagtggcgcatgcctctgtagtctcagcactttgggaggcttgaggctgaaagattgcttgagcccagcagttcgagaccggactgggcaacataatgagaccccgtctctacgaaaaataataaaaaaaaaattagccaggcatggtggttcatgcctgtaatcccagctacttaggaggccaaggtgggaggattgcttgagcctaagagtttgaggctgcagtgaggt

SEQ ID NO: 267654 - DNA, 714 bp, Homo sapiens
aaatgacttggcaatatttaattttggcttgcctttcaatctgcatgtttgtcttaaatttagaaaaattaagctctttacttacttttatataaagtattaattggccaggcatggtggcttacacctgtaatcccaacactttgggaggccaaggcaggagagttgtttgaagccaggagtttgagaccagcctgggcaacatgatgagaccgcgtctctacaaaaagtaaaattagctgggtgtggtgcttccagctactaggcagctgaggctaaaggatcacttgagcccaggagttcgaggctgcagtgagtgatgatcttgccactgcactccagcctgggaggcagagcaagaaacaccctgtgtgaaaaaagtattgaatttgtttgattccactttcaaaatatgctctagatacaggtagtcattctgccaaattgtgttcttctctaaaacattttgtccgtcattctttgaaactcattcttaattatttccactttaccttctagtttggtttgatgccttatattcttgctagttaaaagcattttttccctagtattttctgtctttctagcctttaaggcatattgttgttaacaaatctcttatttaagttaattaaagttttttctgtgcagctgggttttttcttttactacatgacaagcttcatttttacatttggaagtacatgtatatat

SEQ ID NO: 267655 - DNA, 324 bp, Homo sapiens
ccatgttaatgtaaatgcactgccaaatccgcctttcagaaagccagcacgcttttctatttgtctgaaaacatactatattttgtgttctctctccataactactcatattgattcatctttgtaacaatccatgaaagcaagtaaatacctgaagaccacatatctgatgaatggtaaaaaaaaaaaaaaaaaacaaaaacccaattagaaaatggccaaaaaacctgaagtgctatactactaaagaggctatacagatggcaaataagcaaacgaatcacgtccaacaataagatatcaacacacacctatcagaatggc

SEQ ID NO: 267656 - DNA, 380 bp, Homo sapiens
gatcaaataaactaagcattaatcttccatctgaaattgtcaggaaaccttgagatcaaaagaacatccctgggaaggtgttaggctcagcttattattatgtgggggctcagcgtctatacccacctgaagctgggctgtccatgaggcttcagttcactaaccagatgtgcatgaaacagatacaaaaaggggaagcctttagggccaaaaaatagacctaggtttgtattactatttcagcttaatcgtgtataccttgtgtttcctcggccaacaatggctaattatggtaaatactatttagaattatgtgctatgtactaagtgtttgacatatggtatctcatttaaaccttctgtgatcctctgaagagtgt

SEQ ID NO: 267657 - DNA, 435 bp, Homo sapiens
ccaacaattgctatgatctgtgtttttaatgtttataatgctactagggatggagtaatagtatcttattgtagttttaacttgcatttctctaaggcttcatgattttgagcatattttaaatcatgtttttatttgccacccatataacttctatggtaaaatgtctactgatatctcttgcctattttaaaagtaaatattagttgatattgaaatagtaaagaaattttttggaactgcagtcatttattaataatgccagtgacttatttgttttgtagggtaattttgaatattggaagaatatttcctcaaaattttgtgctgttcacaatgggaaactagagacatgaaacacttttaagtttaatctgaattattaacatattctctgctttcttaagtctacctggtcaataaaacaacagatca

SEQ ID NO: 267658 - DNA, 511 bp, Homo sapiens
agtcatcacttgcttgttgcaaactctgtaataatcctttgttactcaagcgaagacttcattatatcgaaggggtaactcgcgatagttacattttctgaataaaaaaatgagacaagttattgaacaaaagatttggggaggtgaagttcagatagaaaaatacgggtacttccaggccatttttgttgtttctgtggagaatactgaagaatatttcgtgtcattgccacctgggaaccttggaagtgtggtcctggagctcgtggccaggcagcgtgtcaccaagagggcagcgcgtcaccaagagggcagcgcgtcaccaagagggcagcacacgccctgagagtgcggacaggctgaggctcccgcacatccgcagagggctgggcttcaccacacgctgtccagcctgtgtttttgggtgaaaaaagaacctgtataaatatattgccttaatattcttggatatcaggaagttcactttaaatattaaacttaaaaaaaaaaa

SEQ ID NO: 267659 - DNA, 342 bp, Homo sapiens
ccctgtgtctttgtctccttctgcctttctcctaggacacttgtcattggatttaggccccaccctaaatccaggatccttaattacatctgcaaagatcctttttccaaataaagtcacattcatggttctagggtcaggacttggacatatcttttggggggccattatctattcaatttactacagtaaaccgccagagagtatgtagctgatgaaatggaggttattctcttggatgcaaggggataatgtacggcgaaccaacagcatgaaaacaattccgaaatcgttctatttagaaagagagtgatagctgggcacagtggctcatgcctgtaa

SEQ ID NO: 267660 - DNA, 330 bp, Homo sapiens
ttcaggaaattaaaagcaggaacagaagcataaattctagaggaaaaagattcagataataagatagaagagtgcagtcatgaagattcctctcaactgaagtggttttagaaactgaaggattggaatgtagaaagatatttgatgtggggagttagggagggcgaggtgataaacattactccgagatttggactttgggtggaagatcataatggcaaaaaaccacataggaatacagaacaaaagggtactgcttacgtagtttatccattagagttgtaagactgcaatcaatagaagacaatgttggctatcttaggtagaaag

SEQ ID NO: 267661 - DNA, 408 bp, Homo sapiens
ggagtcaaaaaaagcacaagggaggaaatgagccacatagttgatgtgaggcatcagcttttccctgcacattcttgctgttcggcaacactatgcgtttttcttcttgtcacccactgcccttcagaagggggttgataaattaagttgtggcacatccatctatacagtgagtgtgcttattaaaaagaatggtgaggatccatatgctatggcatggaaaagtgtaaaatttaaacccaagttgaaaacagtatatttccaaatatttccatggctcagttttcttccaaattaatgtcagggttagagtcccttagcctctgccttcagacatttaaagtgtctttttatttttaaagtaggtagcatgcaatacaaaataaaaagaattaattatcgactaat

SEQ ID NO: 267662 - DNA, 616 bp, Homo sapiens
gccaagaagctagaaagaattagaagacagatgagtcagaatggaagagacggggttttgccatgtttcccaggctggtcttgaactcctgggctcaagtgatccaccagcctcagcctcccaaagtgctgaaattacaggcatgagccaccctcacctggcctgagtgctgaaaaacagaaaagcctcagaggccaaagatgaagcactggatggaagttgacctccaagcagggagcaggcaactcagcaccagcctaggctccacgtggggctgagagagggggaaggccaccgacagtccctgctccatggggaaggcagcctctgactctggctgacgggccggcagtcggataaggattggctggcaggaatgggcatccagctgcctctgctgctgctgtgagctgggaatgatggtgccagtcaagtctgcatggccaggtggccgggccggggtctctcagctccagtggctgaaacacactacagaatcatcaaacctagtctgagatagtcatgaaagagatttagaaaaatacatagtgattttgttccccatttgctttttctaaaaacactcctctctaataaaatgtatgacagcaaaaaa

SEQ ID NO: 267663 - DNA, 650 bp, Homo sapiens
catggtgactggctcatacctgtaatctcagcacttgaggaggctgaggcaggcagatcgcctgagctgaggagttcgagaccagcctgcgcaacatggcgaaaccctatatctacaaaaaagaatacaaaaattggcacacacctgtggtcccagctacttgagaggctgcggtggggagaatcacttgagcctaggaggcagaggctacaatcagccaaaatcgcctcgctgcattgcagtctgggtgacagagtgagaccctgtctcaaaaaccaaaacaaaattataaaattgttaccaaaatgcttcacactatagattaccaactatagttctcaaaaagcaattaatgttcaaccaaaattgacaatataggagaaatggaaaggggaaaaaaaaaaaaaaaggaaatgctgaactgtttatgaaaagctgggttttaacagcacatgaagcagaaactgaaaagtcttggatttgaatttctgaccaacaagtcttccttacaaagattttaatttcagaaataattttggaaacctactgatacaggagttaagtacagctggctctctgtatccatgggttccatatctgcagattcaaccaactgcaaatcaaaattatttgaagaaaaaattaaaaat

SEQ ID NO: 267664 - DNA, 145 bp, Homo sapiens
caggctgctcaacccatgggctctgctgccccactaaggttgttcccaggcatagcaccttcctcttcttgattggaagcagatagtgggggcctaagggagggttcggactcttggacttagaggcagaaggggagagagagtc

SEQ ID NO: 267665 - DNA, 391 bp, Homo sapiens
tgcatttcaataaagagaaacttctagtgtgtgtatgagcttgggaaaattactttgtttctctgtacttcagtttccttttctgtaaaacacatgtggtaataatgtctactttttaggactcttgagtttatgtatgtagatgagttaatatatttcgaccactgaaaacactgctagacaccttgtaagttctctacatgtttattgttgttataactaactctactcgatctcttaattttgtgtttttagtcaggttagtcaggagtatgaaatctgtctctctttgttctatttttttatctttctttctttacaaagataatcaaatctctttgttcttaccttcctttatttccccatgaggattttacttttttcttttttt

SEQ ID NO: 267666 - DNA, 343 bp, Homo sapiens
tgattttccacctgcagtacataaacccagatcttctcgtggatgtcctgcccctggtgctgagcaggggcaccttggagagtctgaggaaggtctcacatcccttcctcactctagcagtggaagaagcactaccacactagtctggggtgacctgggggcatcaccccacacctgagtggaggtgaccgtggctgtggccccatgttggggatggccaggaaggatgtggaagcctttgactcagagccgctacttgacatctgagtttttcatttcattctttccctgctttccctctggaatgtctctctttcaaataaagaatatgtttgacgagagt

SEQ ID NO: 267667 - DNA, 121 bp, Homo sapiens
atatatgtatatatatatattatatttatactcgagaaacttacacagagtctttcctatgcacaaacccaaaagtaaagccaaatggctctatgcaataaacatcatggtaataacgtaa

SEQ ID NO: 267668 - DNA, 315 bp, Homo sapiens
tatgcaaacagtgttcatttggtcttattgtcaatgttggcatttcatatttcttgtcttactgcattggctaaatatcaggaaaaaaattcagctatattggggatgatgaacatacttaacctgcccttgatatactttgatctttttatctattctaatataagattggctgaagttttgtaagactttattgtgctttgtctgatttttgtattgacattgtattgcctattgtctctgtcagatttttgtattggcattatgctaacttggcaaattaaacgagagcctttaaagaaattatatggtctg

SEQ ID NO: 267669 - DNA, 651 bp, Homo sapiens
agaaaaagtcgaaacacaaacgtctgccaactcctgacaaagacccgcctttcacagcgacggaggggtcttccagggagccagcagatggagcaccggcctggctctgcatgtgcaagctaactatcagtaactccagaaccatcctgcgtgagcctcttattcaggcgcgctaatacagcctcacatggggccacacaaccttctagttcctttgctgtgttaatgcgcaaacttaaacacctttttgcatatcaggatgcttactaaccaaaggctccggtaaggtaaccttataaatcattagacactactaaaagtaaacattctttacatatattgtatttaaaattacactatgagcttctaaatgtaaaaggagaaaacagcatttgggaaaatgccattttttttccttaataatcaaaatgcttctgaaggcattttgataaactcctttattgcatataggtgcatactatgaaaataaaaagaaattattcactggccaggtgtggtggctcattcctgtaatcccagcacttcaggaggtcaaggagggaggactgtttgggcccaggagttcgagaccagcctgggcaacacagtgagactccctctctactaaaaattaaaaaaaataaaaaaatt

SEQ ID NO: 267670 - DNA, 357 bp, Homo sapiens
  misc_feature (8)..(8): n is a, c, g, or t
  misc_feature (11)..(11): n is a, c, g, or t
  misc_feature (16)..(16): n is a, c, g, or t
  misc_feature (97)..(97): n is a, c, g, or t
  misc_feature (99)..(99): n is a, c, g, or t
cggcgcanctnaattngatatttcctgattacggcactcggctctggacagggggcctggacaacacggtgcgctgctgggacctgcgggagggccncnagctgcagcagcatgacttcagccccagattttctccctgggccactgccctaaccaggactggctggcggtcggaatggagagtagcaacgtggagatcctgcacgtccgcaagccggagaaataccagctgcacctccacgagagctgcgtgctgtccctgaagtttgcctcctgcggacggtggtttgtgagcaccgggaaggacaacctgctcaacgcctggaggacgccgtacggggccagcattttccaggt

SEQ ID NO: 267671 - DNA, 306 bp, Homo sapiens
gatttggggagggggggacttccatatgcggtttgtgcgtgaagagcctaggctctggagtggtctctagttggcggcaaacagctctctgctctcagaatggggagctgtcacctagaaaaaaagaaggaaataaatcccccacaaagacgtagttgtcaccaattttaggaagacaggggagcactaggaccccatctgagggatatggaggggattttgattgttatgaattgtataagattaactctctgtgtgtcgagcgacggcaataggaaatctcactgtggactaaatttgaatttg

SEQ ID NO: 267672 - DNA, 501 bp, Homo sapiens
aattcagcaaaacatacaaaaccatctatcctgtgtgggagaccagaatataccttctcaaatatgaaggattgctgccctgaagacaagaaccagcagatgcaggagagctgtccacctgccctctttttacccagaagcaagacatagattagaaagagaaaaggtatcctgccccactcctttaccagggagaacaaaggttaaccactgaagacagcgtcagaccctcattagccttgaaatgatatcagaggaattaatattagctttttttaaaccatcttttgtctgctatttgtttgcttagcccaagttactgcctgtagagactcagagtccttttcctttgtcacatctctaaaaatttcctagtctttgttgaagatgctatacaagctggaattcaaagacgcttctttgagaactactcattctctgggtgttcctcatatataaatgaaatatattaataaacatctgtttttctcttgttaatct

SEQ ID NO: 267673 - DNA, 337 bp, Homo sapiens
aatattagctcgcattgtgaatctgacacaagtgctttaatggttaggaacaaaaagtatttcctcttactcttcctctggctcagatagtggctatctgtattaagcctgcatacttaaacaagtaaaccactgcatcgaagtcaaatgagaatcatgaaaacacagtaatctgattaaataaactttgaaactttcttattatgtgaaaagttaactgaactttagcaatatcatatgaataccagaaaattattctttataataaagaataaagaatgtcatagaaacccatgtttctaaattattgaactaactttcatattgtaaaaaaaat

SEQ ID NO: 267674 - DNA, 582 bp, Homo sapiens
cgccacccggaaatacttgggttgcgctagaatacgcaatgggtctgtgttcgggtaacctggtgctcatggtgggttattactattgttgttttactttactgcttttcttgctttcattagaaatgttactgagagaagcctcaaagagcgcagacctggggtcgtttggatgggttcatttcaactcaaatccactaattcaattcagttccacgactagtttccagcgcacaggtacacatggtagacgtcaagtgtatgccgtatgcatatgcacagagacgctatttgaaggcaactcttggagaattttgagataaaattcactctcctggagttacattcgcaatatatgaatatggaaaacaggcaatcagttgtatttaaaatttgccaacacgtcccagcaatccactctcacctaagaatccaaaatggggcattgaaaagatttactggcattctggttgtttaatattgaaaacaagcgtaaatcagttcatttctctttatatttcttttcaaatttaacaataccataataagtgtaagtaataaaaccatattttgctaaagaaa

SEQ ID NO: 267675 - DNA, 498 bp, Homo sapiens
tctatggaggctgcatagaaatgtccatcagaggcctcaacatagtggtcttgtttatagcaaaggcagatgctcccatttcacagacgagagaatctgtgacttgcccagggacgtagtcaggctagactagaaatggtttcttgaagcacacctgcattcaactcgggggaacagagatgttctgggcccccacagtgggtctttagggagggttgagattgctgttgtccaggtgttcgtccaagacagcgacccccagaggcggcctggagaatgggcacaagagccttaaaaaattgtgctaaaacggtgaaaccccgtctctattaaaaatacaaaaaaaattaaccggacgcggtggcgggcgcctgtagtcccagctactcgggaggctgaggcaggagaatggcgggaacccgggaggcggagcttgcagtgagccaagatagtgtcattgcattccagcctgggcgacagagtgagactccgcctcaa

SEQ ID NO: 267676 - DNA, 419 bp, Homo sapiens
agaattgtagttgggatcttagcatcttcactcaatgtcaaagtattttttgtctttatttatgattagaaatggaaaacaaaagatgagacattcatttctattaagcagtcagggtacacctgaactgtaatcaaaaatacatactgctgggcgtgatggttcatgcctgtaatcccagcgctttgggaggctgaggcaggaggatcacttgaggccagaaggatcacttgggtccaggagctcaagacccatctctaccaaaaaaaaattagctgggcatgatggcatgcctgtagtcccagctacacgggagcctgaggtaagaggatcatttgaacccaggagtttgaggttgcactgagctataatcatgccactgtactccatcctaagcaagagcaagaccccgtctctac

SEQ ID NO: 267677 - DNA, 474 bp, Homo sapiens
tttttaatattcacttgcagcaaccaatgagttaagtcattcccctcatttcttcagggttccctgtgttagtacaccctaaaaattgtctcatttttcaggagagagaaatgtttgtaaatagccttgactaaaatgcaggaaagaatagcaatagtaatagcatttgtcattcacctgctgtgtgctaagtatccacattgtctcatttaataatttctttctttctttttcttttcttttttgtttggaatcggattctcacttttgttgttcaggctggaagtaattgtctcaaacaaataaataaaataaaatgtctaatttcacaagtttattcaaatagtccttatttttagcacagctaaatatgagtgacaagcatcttcgtagtctggtttccccccactccatggcaaccccccagaggtgaaaattatctgaagtaacaaatatactctaccgatgatgaaa

SEQ ID NO: 267678 - DNA, 346 bp, Homo sapiens
ttggcccctccaaaactcatgttaaaatttaatccccaatgtggcagtattgagaggtgactggatcatgagggctctggtcttgcaaatggattaatccattgatggattaacagattaatgggttagtggattgatgggttatcatgaaagtggggctttataagaagaagaaaaaaaagaccctacctagcacacttagccctgtgtcgtatgacaccctgcaccccctcaagactgcggagagtccccacagcaaggagcccttaccaaaggcagcccctcaaccatggaactcccggcctccagaacagtaagaaataaatttattttcttataaattacc

SEQ ID NO: 267679 - DNA, 503 bp, Homo sapiens
ctctgtctaaaaaacaaaaaagaaaaggaaagaaataaaatgaagaatcccagggaattcaccagaaatgtggtttagcgggaagttgtactacctttgtgggcaggtgggcctagttcaaatccctgctccaccactaatgccggtggccttggaaagtcattcctcatctctcagctgacattgcctccagattccaccctcccagcatgaaggccagcagataaaatggccatttttttcctgactcttcccatgaagattgcctctgactggacagacttgagccacatgatcatctctgagccaatccctgtggccagaagggatcatgagtgagggaaccagtttgggtcagagaccaccattaggtccaggggaaatacctgaaataggatttgcttaatagtcttctttagattaagtcattaattttactaaatcgagttgttttaacaggaaatttgatattatgaagaactggtgccatttgccataaatca

SEQ ID NO: 267680 - DNA, 451 bp, Homo sapiens
tgaggcagtgtctcccttggtcacctgggagtacaggggcatgatcacggctcactgcagcttcaacctcccaggctcaatcaatcctccctcctcagcctcctaggtagttgggactttaggctcatgccaccacacccattattgacagtgaatcttctgaataattagataagcttaaggtttccttttgtttctttaggaagaagtatggctccaaagcctgagcttttaatctcagctataaatacttgtttaaattaagaagaaaaaaaatcatattatctagaaagaaatatttgcatgtagctttccttgttattctctgttgaaaaacaaaacaatattttgtgcacagctttaaatttttccatgagaaaacaaagcaggtgtgaaataacttagttcgattttcatcactctgttagctagtcttcttaaaagccgatgg

SEQ ID NO: 267681 - DNA, 159 bp, Homo sapiens
tcaccccacccccacctccccgcttgctctttcctatttaaatattgaagttcccaaaaccatacttggaaaatgcatggatcacagatcctacagtaacttgcatctgtttcctaagtgtgtcctcaaccttggcaaaataaacctctagtcaattga

SEQ ID NO: 267682 - DNA, 528 bp, Homo sapiens
tatttcaaagatctaaagctttcacttgaaaattagtcttttggaaaaaaagacattgaaactagtgttaaattatatttcattgaggtaatgaatataaagattcatttgctgtaatctccttgtgatcttttaaagtagtttcttgtacttttaaaaataacactataatggtctatatgtgtatcagtttttacaataatttgtctaaactttagcttataccggtgtgcatgaaaaaccaagtgcagtctgaattagcacaatgcaaatagaaaaccgaccttttattttcctcacaaaattatatctaatataaaccttatgtaaataaagaatttttaagtgcttgtaaattagtaagaaaatcatacaaaatgtcagtggagtagaatagttaaggattttatatcacagtaaaatgcatttctaaattgacagtattgttataaaacatattcttgaatattgtatgaatttatcaccactattgaagtcaaaataaagatggatctctaaagtatacaa

SEQ ID NO: 267683 - DNA, 414 bp, Homo sapiens
aggctcccgagtaactgggattacaggtgtgcaccaccacgcctggctaattttttttttgtggttttagtagagatggggttttgccgtgttggccaggctggtctcgaactcctgacctcaggtggtctacccaactcggccttccaaagtgctgggattacaggtgtgagccaccatgcccggcccacaattcctttagcagttctgatgtgatcctgtcctttgaaggtggatctaatcaaattgtcaacagagaggtccttgaaagtaattttccatgatggagggattttggatctgtaacttgaaaatagtacaaagaacagaatgccagtattataacacaacatctctttttttcccccatcctctcatttatatgaacacattttctctttccttatgttatga

SEQ ID NO: 267684 - DNA, 403 bp, Homo sapiens
attgagtcctattcctctgataccgtgccacgtttgtacatgcctcttcaatgttggtggcctgaagtaaatagacattttaggtccagaatagaattgaactttcacctatcttattttagcatctataattctactaatacagcttgtgtctatgcgtgtcagccatattcactgttgactcattttgaatttatagtcaaactaaaactcctgagttatgttcttattaactgttataaagctaagtttctgtaacttatgctatttcagtatgtttttgaccttaaatataagccttgtctgcattaaatgttttatcttttgtttcttgtttatctaaattatcaagaaaacaatgattttatgttttattccttcaatataaaaagtaatcttcacg

SEQ ID NO: 267685 - DNA, 404 bp, Homo sapiens
gtattatggcttacacgtaacccatgattaaaatataagtacatataggaacagcagccagcaacaacagtgatgattaaatcaagagcctcaattttagacaagtataatttctttgcgccattgaattaggtggtccaaatagctttgtggctcttttaaagtaagtaatttatacttactccatctgacatgcattcatatcttttcttttttttttaaagagagacagcgactcattctgtcacccaagctggagtgcagtggtgggatcatagctcactgtaccttccaattcctgggaggattgttgaggtcaggagtttgaggttacagtgaactatgattgtgccacggtactgcagcctgggcgatagaacaagaccctgtctcaaaaaaaaaaa

SEQ ID NO: 267686 - DNA, 494 bp, Homo sapiens
tggtgctcaagaggatccccgcacaaggaacacttcaactccttctttctctccaagtgtacacaatgtgacagggactgtttctcagaagacatctccttcaggtgaaacagctacctcatccctctgtagtgtcacaaacacatccatgatgacatcagagaagataacagtgacaacctccacaggctccactcttggaaacccaggggagacatcatcagtacctgttactggaagtcttatgccagtcacctcagcagccttagtaacagttgatccagaaggacaatcaccagcaactttctcaaggacttctactcaggacacaacagctttttctaagaaccaccagactcagagcgtggagaccaccagagtatctcaaatcaacaccctcaacaccctcacaccggttacaacatcaactgttttatcctcaccaagtggttccttgtcggggatcctctatgagcgccaacacccaggcacga

SEQ ID NO: 267687 - DNA, 438 bp, Homo sapiens
ctgctccgcccctctctgctgctccgcccctctctgatgtcatcatggatgagtacctgttactggaagtcttatgccagtcacctcagcagccttagtaacagttgatccagaaggacaatcaccagcaactttctcaaggacttctactcaggacacaacagctttttctaagaaccaccagactcagagcgtggagaccaccagagtatctcaaatcaacaccctcaacaccctcacaccggttacaacatcaactgttttatcctcaccaagtggattcaacccaagtggaacagtttctcaggagacattcccttctggtgaaacaaccatctcatccccttccagtgtcagcaatacattcctggtaacatcaaaggtgttcagaatgccaatctccagagaggggcggagcagcagagaggggcggagcag

SEQ ID NO: 267688 - DNA, 898 bp, Homo sapiens
  misc_feature (887)..(887): n is a, c, g, or t
gtgacctcagcagtctcaataacagctggacaggaaggacaatcacgaacaacttcctggaggacctctatccaagacacatcagcttcttctcagaaccactggactcggagcacgcagaccaccagggaatctcaagaggatccccgacaaggaaccacttcaactccttctttctctccaagtgtacacaatgtgacagggactgtttctcagaagacatctccttcaggtgaaacagctacctcatccctctgtagtgtcacaaacacatccatgatgacatcagagaagataacagtgacaacctccacaggctccactcttggaaacccaggggagacatcatcagtacctgttactggaagtcttatgccagtcacctcagcagccttagtaacagttgatccagaaggacaatcaccagcaactttctcaaggacttctactcaggacacaacagctttttctaagaaccaccagactcagagcgtggagaccaccagagtatctcaaatcaacaccctcaacaccctcacaccggttacaacatcaactgttttatcctcaccaagtggattcaacccaagtggaacagtttctcaggagacattcccttctggtgaaacaaccatctcatccccttccagtgtcagcaatacattcctggtaacatcaaaggtgttcagaatgccaatctccagagactctactcttggaaacacagaggagacatcactatctgtaagtgttccttgtcgacaaggaaccacttccggttgatgtgggagcgaaaactgaactcctgctgtcacgcggggtcaggttgaattgattatggctgatatcaccgcgcacggtggctgttgaatcccccgtgtcgcagncctgtgcctgt

SEQ ID NO: 267689 - DNA, 870 bp, Homo sapiens
gtgacctcagcagtctcaataacagctggacaggaaggacaatcacgaacaacttcctggaggacctctatccaagacacatcagcttcttctcagaaccactggactcggagcacgcagaccaccagggaatctcaagaggatccccgacaaggaaccacttcaactccttctttctctccaagtgtacacaatgtgacagggactgtttctcagaagacatctccttcaggtgaaacagctacctcatccctctgtagtgtcacaaacacatccatgatgacatcagagaagataacagtgacaacctccacaggctccactcttggaaacccaggggagacatcatcagtacctgttactggaagtcttatgccagtcacctcagcagccttagtaacagttgatccagaaggacaatcaccagcaactttctcaaggacttctactcaggacacaacagctttttctaagaaccaccagactcagagcgtggagaccaccagagtatctcaaatcaacaccctcaacaccctcacaccggttacaacatcaactgttttatcctcaccaagtggattcaacccaagtggaacagtttctcaggagacattcccttctggtgaaacaaccatctcatccccttccagtgtcagcaatacattcctggtaacatcaaaggtgttcagaatgccaatctccagagactctactcttggaaacacagaggagacatcactatctgtaagtggaaccatttctgcaatcacttccaaagtttcaaccatatggtggtcagacactctgtcaacagcactctcccccagttctctacctccaaaaatatccacagctttccacacccagcag

SEQ ID NO: 267690 - DNA, 796 bp, Homo sapiens
gtgacctcagcagtctcaataacagctggacaggaaggacaatcacgaacaacttcctggaggacctctatccaagacacatcagcttcttctcagaaccactggactcggagcacgcagaccaccagggaatctcaagaggatccccgacaaggaaccacttcaactccttctttctctccaagtgtacacaatgtgacagggactgtttctcagaagacatctccttcaggtgaaacagctacctcatccctctgtagtgtcacaaacacatccatgatgacatcagagaagataacagtgacaacctccacaggctccactcttggaaacccaggggagacatcatcagtacctgttactggaagtcttatgccagtcacctcagcagccttagtaacagttgatccagaaggacaatcaccagcaactttctcaaggacttctactcaggacacaacagctttttctaagaaccaccagactcagagcgtggagaccaccagagtatctcaaatcaacaccctcaacaccctcacaccggttacaacatcaactgttttatcctcaccaagtggattcaacccaagtggaacagtttctcaggagacattcccttctggtgaaacaaccatctcatccccttccagtgtcagcaatacattcctggtaacatcaaaggtgttcagaatgccaatctccagagactctactcttggaaacacagaggagacatcactatctgtaagtgatccttatgccggggatcctcttgaatcagctaaacccaggcacc

SEQ ID NO: 267691 - DNA, 572 bp, Homo sapiens
gtgacctcagcagtctcaataacagctggacaggaaggacaatcacgaacaacttcctggaggacctctatccaagacacatcagcttcttctcagaaccactggactcggagcacgcagaccaccagggaatctcaagaggatccccgacaaggaaccacttcaactccttctttctctccaagtgtacacaatgtgacagggactgtttctcagaagacatctccttcaggtgaaacagctacctcatccctctgtagtgtcacaaacacatccatgatgacatcagagaagataacagtgacaacctccacaggctccactcttggaaacccaggggagacatcatcagtacctgttactggaagtcttatgccagtcacctcagcagccttagtaacagttgatccagaaggacaatcaccagcaactttctcaaggacttctactcaggacacaacagctttttctaagaaccaccagactcagagcgtggagaccaccagagtatctcaaatcaacaccctcaacaccctagaagtaccccaagtggttccttgtcgggtaccgag

SEQ ID NO: 267692 - DNA, 1150 bp, Homo sapiens
gagaattgagccccttctttttaatggaaatcactaattttggtattcaaacttacattttagaatgcaagtagtgtgtatttcactgtttagaagtcatatcttagggaattaaatttgtgataatctttttaattactgagaaggcaatttaaactgcttgaagtttgaatatgccttattacacatgcaaatttgattgttttaacaaggcaaataaaccataatcttatttatttccaagaatgcatattttaatacaattaaaaatgaattttcctgaatttaaatgtaagctttaacttaactttaagtggtttgagtgaagtcttctaaattacacataatcactggttctaaacttccagaaccattctgtttaattaaacattatattatatatatattattattgacatggttcagggttaccactgccagagcattgattcatgttaacttcatcctattaatactgtatcaccctgtattagcagaagccaatatttattatagtattcaactggtaaaaataatacatgatatccatgttgcagtttctcatataaagatatgttttctttagcctctgtaataaagataatcattttcccatcaacattttttaaggaatatatttcttctttcataagatagccattaaactatattaagtggtggtatattttaatatagtgcaaatcaaaccacatacaaaaaaaaactggttctagacacggacagtcacaggctgatataagaaggtatgtgtttctaagtctggtaaaggaagtgggtttagacaaagcaaaaatctagaaaggtttctttctcaaagcaaatgtgcataaagactcaaagggcaggtcaacgcagaatagcagccttgaatcactgccgaatcagcaagaacattgctgtccatggtcaccatctgtaatcactgtgcccaaatgtcagcatcttggctggctggtgtagctttatttttaaaaatattttttgtaatagtacacttgtgtttaacatagaatgttgacttagataaatgatgaggaagttataaataattggagtagcataactttattatttggaaataaaagtattatgtacatatattagtaaaatgaaatgcacctgattcaag

SEQ ID NO: 267693 - DNA, 473 bp, Homo sapiens
cacgaggcgttcagctacctggaggtccaggccatggcgctgcaggagacaccccctcaggtcacctttgagctggagtccctgcgtgagctggtcctggagtttcctggtgtggccgccctggaacagctggcccagcacgtggctgcagccatcaagaaggtcttccctcgctcgacccttgggaagctattccggaggcccacaccagcctccatgctggctcggctggagagaagcagcccctcggagtccactgacccctgcagcccctgtggtggcttcttggagacatacgaggctctgtgtgactacaatggcttccctttccgagaggagattcagtgggacgtggacaccatttaccatcgccagggctgccgccatttcagcctgggagacttcagccacctcggcagtcgggacctggccttgagtgtggctgccctgtcctacaacctgtggttccggtg

SEQ ID NO: 267694 - DNA, 477 bp, Homo sapiens
tggtttttgcattttctatgaatactatctgtgtctcttgtgatgtggtgtcacgatctagaatgggaggagtgagacctgggttctgatcttgattctgctgccctggcaccctggagcaagtcacttaacttctataggcctcagttcttcagctgccaaccaaagacaatcatgtctatcctctctccatgaaagccctttggaaaatgcagggtgatccaaatagaaagtgggtcactggctgggcactgtggctcatgcctgtaagcccagcactttgggaagccaaggtatgagaattactcaaggccaggagttcaagtccagcctggacaaaatagagtgtctctactaaaaaactgaaattaaaaaatgggccagatgcggtggctcatacctgtaatcccagcactttgggaagctgtggtgggcagaccacttgaggtcaggaggttgagaccagcctgaccaaca

SEQ ID NO: 267695 - DNA, 485 bp, Homo sapiens
atttgtcatttttcttatattacttgtactattggtcaccagccaagaaaccactaccaattctaatgtccataagattttcctcagtattttcttgagggttttacaggttcaattcttaagattagttctttgagtcattctgacttaatttttgaaaagggtgtaatggaaggacatgaattttttccagcatcattcttttgcatgttgatatccaggtttccagcaccatttgttgatgcaccatctgttgcagtggggctgacacatttgtaagatgcagtgagcattaatacatgggagcaccatgcatttatttacctgtctttacttcacagttgttttgagaaggctttcactgacagactcaacagaaatgaatatatatgacttcttataaaatcatattcaagtaaaattataaattttaaaatgttaagactggagcaagactggaacatcactagacaagctgaaacata

SEQ ID NO: 267696 - DNA, 444 bp, Homo sapiens
gggttcctgtgtgcagtgacatcaagcaagagatttaccaagagaagtggatgccatgacaatgcatgtaaccatggtgtgaccggcctccctgacatggctctcaaaagctttccctctgtgaaaacagaagcctgtttgcaaattaattagtttctggcggcagcttgattgttgacccagagtttgtagagtggaaaaacaatcagattagtgtgctcagggtaaaagaccagtgtgcacttgcgtgtggcttgctcaactattgaagctatgaatggggtgaaacaaattctattctgagaagcccaggcagaggttaagtgtgatgagcctagagctccccaacagcaggggctggggaattaaaggattttacccagatcaagctgaatgatgggaagcaatgccattgaattttaatggaatggagagttttgacca

SEQ ID NO: 267697 - DNA, 618 bp, Homo sapiens
agagggcttccgaagttgtgtagtcttcaagtcccatgaaacccaaatctgtccctgtacttactgcctttctaagtactctatgaattcctttccatggtttcctcatgcaattctcacaacaaccctatgaggtagaagctattatattcacttctgagatgaggaaattgggcagctccaccatggttaccccatgagggagtgataggcaaggactttcactctggcatttgagactaactctacaactccactgaacactagggatggccaaacctaactctagctcatgttaaattaggcatgtagccaggtgtggtggtgcgtgcctgtaatcccaacactttggaaggccaagatgggaggatctcttgacccccagagttcgagaccagcctgggcaacacagcaagacctcattcctacgaaagagttaaaaattagccaggtgtggtggtgcatccctgtagtcccagccagttgcgaggctgaggtgggaggatctgttgagtgcaggaatttgaggccgcagtgaactataattgcaccactgtattccagcctgggtgatggaccaagatcctgtcttagagccattgcatgttggttgtcttt

SEQ ID NO: 267698 - DNA, 146 bp, Homo sapiens
cactccctatctgggggaggggtgatgctgtgacttaaatgcatggcctaagcaacagtctgtagtatgatacgtggaagttagtgaaaaagagaaaactggtagctcagaaaaacatgtgggaagggtctagatatttaaattct

SEQ ID NO: 267699 - DNA, 3364 bp, Homo sapiens
  misc_feature (497)..(497): n is a, c, g, or t
  misc_feature (1260)..(1260): n is a, c, g, or t
taaacacaagcttgtaataatagatattcaacttggaaatatttttgacacccacagatttttctggtaatggcaactgttgtaatgttctttgacgaatttttatttttcttcccacaacatctctatgctttaaaacagatacggcagaagttcttatctctgggagacatttgctctgataagaaagtattaagattctccctagaaaggctgactgggatggcacagggatggagggctaatgttagatactacagtttgggcagagtaccctgatgaaacctgccttctgactgctgtgtccctattttcctgtatgccaggtttatgactaagacgcactgcccaccctacctctactgctgaaatcagacaccaatacttaacgtgtcctcataccatacaacttctagccttagagaaaatggcatctctccaagccaaggagacatggtcaaaaacccaggtgccccatcagttccagctcccattancatgcagaatggaataggggagaaggtaggaaggacacacacttaaccatatcacaagaaggaaacagaattggcttggtcttcaaaggactttcctaaataaaagaatcccaattaaaatgcagaatttgttaatggaacagtccccactgcagctgagagactggggagactaagaagaacaacatggtgcacagtgactccggggaagaatctgcaggctgggccctctcctggagctctcattctcaccttctcaccagagaggctcacctggttggtgtcttaaggccctctttagctgagatgttactgacctgaccagggtcagtcagatctctccttctggtttataaaggggataacggaatcctcgcttctgggtgtttcattctttccacaattggatcatgtaaagacccgctaaaataatcttttaaagattatgactaatcctgtgcatgtggctatttatgtttctctataactactggcatcaagctaaagcaaggaactttagaaaacaatttcattaaacaggataaattgatagtctttagccataaaaaagagtgagatcctgccatttgcaaccacatggctagaactggagatccttatgttaagtgaaataagccaggcacagaaagacaaacattgtatgttcccacttatttgtgggatccagaaatcaaaacaattgaactcatggacatagagagtagaaggatggctcccagaggctgggaagggtagtgagggnctgggaggtagggatggttcatgggtacaaaaaaatagaataagacctactacatgtgacagcacaacagggtgactatggtcaataacttaattgtacattttaaaataattagaacagtgtaattggattgtttgtaacacaaaggataaatgcttgagaggatggataccccattctccatgatgtgcttatttcacattgcatgcctgatattgtttggctgtgtccccacccaaatctcatcttgaattgtagctcccataatccccacatgtcatgggagggacctggtgggaggtaactgaatcatgggggcaggtctttcctgtgctgttctcgtgatagtgagtaagtttcatgagatctgttggttttataaaggggagttcccctacacaagcccgcttgcctgccgccatataagatgtatcttgcttccccttcgctttccgccatgattgtgaggcctccccagccatgtggaactgtgagtcaattaaaccttttctttatgtatcacccagtcctgggtatgtctatattagttgtgtgagaacaagctaatacaatgcctgtaacaacacatctcatgtattatatatatataatatatattatatatatatacctactatgtaccctcaaaaaccaaacagaaaaaaattttaaagaaaaataaataaataaataaataaatggatagccctcactgcagaatcacctgaggatctggttaaagatgcagatgctgttttggtaggtctggggtgggagtcaggaatctgtatttcttacagaggtggttacacactactctgtaggaaatgctggcctggactcaggaaaacaaacaccatttaacttaaacctaccagcctgtgatcccctccagggtgagactgtgttttattcaacctatgtttctctagcacaaaatcaggcagaggagcccatgtgatgatcaacatttgctgaatgaatatatccattcaaaatgcatttcccaagttccagagttcagccagagcacaacgcacaaggtaggagaaggagaaatacacagagtaagcatccacatcattagcatccactcctgagccctggtggacagatgcatacacagctatgagcaagttcctgccctgtttgaggccttgagttgttaattgtacactctacttgcagccttcaactggaattcacagtttgtgacatttagtcatgcatggacatacaaatgtaaacacagtggcattttaccaagaggcactcttatgtaacaagacagcactgggaaaaagagtgaacagatgtacaaactaagcttctactctgcctaatgaaggtgtttgttgctgcctctgcatgctgaattaacttctcctttgatatactgttcttttcccccttccccttcatttgaaaaggctatttggccaggtgcccatcagctctaagcaatcgtctttcctgggctgtctggccaactcttgctgaggacagatttatccctacctgggctttttggtagcttctagaaaggtctgagtaccctgtagttgacctcttccctgcatgctgaccttccttgctcaccctttaaaaagtcagtggtctggtgagatccctcttgggaaaggctatatattgggttggctcccttcccctgtttcccagttgggagagtatttgggacccctttatgttgctctgatgggtttaaagtttcagtagctatatgtcccctggaagaggaaatggtggtggtaggggaagtggtgtggaaagtggagaaggtaaaagggacagcctttcctcgtgtttcttttgacatttggcctttcatggattctgagaacatggtcttcacactaattcattcatcttctaagcctacttcccctcctaacctatctgatggagtcattacaagcacgtgattagtatatgtaaagcatggctgactcacaggagatgctcaaaaactattagcaatttcattatcaaaaattgtttttttcaggtttggggctaaattaatctgtttctctgtctaaaccctgttatgtatccataattccaataaaaattcttcttgcta

SEQ ID NO: 267700 - DNA, 241 bp, Homo sapiens
tttaggctcctttacatttcttaatctttttatcagaaaataaaacaaagttagctttagtcattgctgaagcttccagtaagaatctctataagtggttttgtagtcgtgtgtaatcatatgttggtatatggcatacatttagctgtctggtatagatacataaaattaggtatggttttcacattccattcaattttctcacttgctctagtgtaagtaataaactttcatcctgata

SEQ ID NO: 267701 - DNA, 1229 bp, Homo sapiens
ttttgacatttttgtgcttcaagtgtttccagtgtcttgaacaaataaagaaatttttataactatttaaaatgaaaatgatagttttgaaaatgatagaagcataggaagtactctaattgtcctacaataaaggatacatctaactaacaagtaatcagtttcagattaaatatatatttatcatttcataatgatataaacaactgattgttacaccaggttaagaaaattactaaatgaaaaaaacagtagcataactaaagataacattaataaagtactcacagagatccttttactgtgaatatacctaagtatcataaaactgctaaaaagttagaaggtataaaattaccagtatggatcagattagtatttttgcttttacaggggtaatatcgttagcagcaataaagattacctttagtgctccgtaacttgaaatctgcagagcctttaaacactaaacaacaaaaagctacaaatccctagttttaagtatcagttcattttatgattaaggtttcttttttcattaaccctcattcttcagttagcttcatcttcagagcaagctgatgatggcttgtgtgtgctagcaggatgaacgctatcttttcaaaacataatgccacagttcatgtacagctggcacatctatctgctttaccagcagtgtttttaaggatcatgcggattgaacagcaactacagcttaaggccctgacaaggtttactgctgacattctcttcatggagatggtcacccttatcgtacgctttattcgttacttattatcttgaaagtagaggcgacgtctcattgcatcctgatatcaccacatcatttttatcttctaatttaacaatttctcagaaacagctaacaagagtaatttttctagtttgtattgtactgtgactttatttacattttaattgatgttatataatatacactgtatattatataatttaaatatatatttcatgttttatactaaaatgttacattttaaaatacatatttattcttgcacatagtatcaccagaatcctaaaatattagcacgaaaagaacttcgggaatcatccaaaacaaacgttcttttcactaatgaggaaaccgaggttcagaaagacgaaacaatttatgcctaggatgatatgatttaaacatccaaatataaaacttacctactttggacatttttccagctacatgt

SEQ ID NO: 267702 - DNA, 404 bp, Homo sapiens
tactaaaatatctctaggaaatagagatacatgcaatttgtttttctcagcactgcttaaaatagcagtgtatttggaaaaccccttatagtggattttataaattttataaatttatcaataaatttcagtgcatccataggatgggacaatatgggacctttgcagatgtcagtagatacagatgtatgttgaggtgtgaagatgtactctgaaaaaaagttggtttgattatacatacacacaaacaatctatggtgttagtaagccaaatatgtgtacaaaatataacatttcttcttttctggcaggtgtattgtgatattttttcttatctgtgatgtataaatgatcagcatgtttaaaacttctagtaaatgttttttattaatgaaattatcctt

SEQ ID NO: 267703 - DNA, 362 bp, Homo sapiens
gggcttaatcaaaataaaaaatgtttgtgtttcaaaggccatatttaaaaagtcaaaagaaaatctgtagactgggccgggcgtggtggctcacgcctgtaatcccagcactttgggaggccgaggcgggcggatcacgaggtcaggagatcgagaccatcatggctaagatggtgaaaccccgtctctactaaaaatacaaaaaaagttagccgggcaaggtggtgggcgcctgtagtcccagctactcggaaggctgaggcaggagaatggcgtgaacctgggaggcggagcttgcagtgagccgagatagtgccactgcactccagcctgggcgatagagcgagactcctcaaaaaaaa

SEQ ID NO: 267704 - DNA, 681 bp, Homo sapiens
aagaaagttaacattaattcagtaatactatatccaaatttttctagttgtccctcagaattccttcatagctgttctttttttgcaatccaggatccgatcagtgttcacatactacattttgttctcatgtctttttagtctcctttaatttagaaccgtcccccttgccttttgttgttcttggtgttttggatgacgctgacattttaagagtcctgaccagctgtcctgtataatgtttcacaatctggatttattgtttccctatgattagattcagattaaacattttttggcaagaatactatgtaggtgatattatttcccattacatcatattagaaggtacagaaagtaactttatcccatcacggatgttatgaagttggatcacttggcttaggtgttttcatcacgtcctgctccattatagaggtacattttcccctttttaattaatatgctatctggtgggtgatcctttgagaccatctgaatatcctattccccaacaaccattctgcattttgttttagtttctgaattttgctagataatggtttttcatgtatacctggcactcacgtattgaatattctctccctaagtgattccaacaaaaataaaacaaatttaatactgtgttagccaaaaagagactccattaagtcgattttt

SEQ ID NO: 267705 - DNA, 178 bp, Homo sapiens
aaatggagagttattgctagagtttgtatttgcagtgatgaaaatttttggaaataggtagtggtgatggttttacagcactgtgaatataattaatgctgctgaatggtacactttcaaaatagttaaaatggcaacttttgtgttatatacatttcatcacaataaaatttacaac

SEQ ID NO: 267706 - DNA, 778 bp, Homo sapiens
aacaccatcctttaaaggaaggcagaagaagcagagcccttataaatttcacagagtccccctaaggacattcagaattgagcgtgaaacctgggaaagcagaactagtttattgatcaacatttacaaatgtgaaacttaattttgaggaaaacagggtatactgcaattgaagctgttgagtagacccaaaaatgcctttgaaggtggaattgctcacctttgttactgagaaaactcccgggcaaaagtttagttttgatcatgttaaaggtaaattaaaagctgaccttggcttttatattcctggctttcctcaacctgaagtcttctgacttctctgaacctaaaggaatgagaaagttgcaaggatttgtaaccggctattggaattaattgtgctcactagcctatattttgttttgcttttttctccatgtgtttgctttttggatgtaattcttaaattgtctaaatggtcaccttttgttgttgttattctttaaatggtacctggacagctatgatgggtcaagagagagaattgctttatactacaaggctatcagaagatcactgaggttgtagtgagccgatatcgctccactgcactccagcctgggcgacagtgagactgtcgtgaggaagggaatgtgataatccaagagagagatgacaatggattggaacacagtggcagcagtggaggtagtgagaagtggttggatgcaggatatattttgaagaggaagccaataagattcggatgtgagaaaag

SEQ ID NO: 267707 - DNA, 891 bp, Homo sapiens
gcacattttactggctggaatcccagctgctttgggtgtggggttggtggccggggagcctccgggttcagtcggcctgaggtctggagggtggaaggggtatcttagggtcccctggggtgcagcagggcctgggcggcacccctggctcccattccagggctgtgtcccgtaaaactcgttccatccacttctgcctgccccgtctcctgctgagcttgacgtgcagtgcgtggggtgagcttttcaccccctaccacgggtggagcccgaggaatcgtggagggagcttggtctccccgaggtgctcagtgagctgtggggactgagggcgtgagctgtggggaccggagcccttcagggcccgggtgtgactgaaggcgtcagtgtcgggggtttccccaggatacctgccatcggcctggcttggttgcggttgtggctggggggtctgtggtgagctgtgcaggtcaggggtggatgggctgccgcttccgctgccttccccagacccctgctgtctccagagcttggatgctcccctcagtggcagctggagcccagggctttggaccgactcttcataccgcagatgcctctgagcaccgtgtgttcgggccgtgtgcactgtgcctggcctgcgcccccaccgagggctgctactggtgtaagccggggaggccgaggcagcgtctgggtggggttcgcccgtgggggctgcttcgtgtccccaggtgctgtggtgactctgggagcagggcatccctctgccgtgatggggcccctgttccactccagggctgcccgccgtttgctgtgcactcactgccctgttgggctctctctgtggctgtgctgcccgcacagagccttgtgtgagggccgaagagg

SEQ ID NO: 267708 - DNA, 257 bp, Homo sapiens
atgtgattttggagtttggtctcccgcaggtaagctggcactgatgacctcatcacaagttgtgggtgcaatacagatggtagcagtggagttaaaattttggctcaaggtgggtttgtctggcttactagtgggagcagctgcaccagctgggacaatactgcacatctgagaagtacaaggcagttgaagacaatggaattggatggctgtggctgggaataatagatcctgtggaaaaataaaaaaaaaaaaaa

SEQ ID NO: 267709 - DNA, 340 bp, Homo sapiens
atgctgaatctgcaaagtgctttcaggacctccaaaaggagatgcaggggtggggcttcaccagcagctttcacctccccgcctggaagcttctctctactgcgtggggagctgtgactacaggctcccacctctctggtcctggaaggtcatctgagagtgttgccttgaggcctagagctctgctttatctaaatttaaaaggagatggaaacttagagaagagtagagggttctgtagtcttgggcagcaagctcctctctagaaggtaagctagcggaaatgcaaatccagatgaacacagcctcatacgagtgacctccagactttggggattgc

SEQ ID NO: 267710 - DNA, 344 bp, Homo sapiens
ctattaatatttttagttcaaaaatacttttttccctcaaactccaaatatttcatgtttagaactgcagaaccacatcatgttgtcctaggaatcaccgtgtttccaaggccatcgaagtgtctcatgtgggtgctgattgatgggcccgggaggagcatgggtgcccctggacaacaggtgcccactgttgagagcagccttgagattgtctgtcccaccgattgcaggtgcacatagcacctcgattctctaatgcctgatgtccctctccatcagattccgaaaaatggggcagttccttctttcccagatacaaaaatggtagtttgtggcaagatgag

SEQ ID NO: 267711 - DNA, 497 bp, Homo sapiens
ggaagggaggaagcgtagaaggtgccgatgcacttttcctctctccagccctcctgactgctccaagaatttcatcgaacaagactcaaagaggcccagctgctctgcgttttgattcttctccctctctcagtccacactgacctgggaggggcttctcaaacaccacatttcctagcgtgctgtgagaagaggactgtgagctaagaagggagaaaaggcactccctcctcatcaacaaacacctgacctgggtagaccctctgcttaccaagatccagtccaccttttgacatcagcattcatgctgcctctttttacgaaccaagccaaagtggtcccttcctctggaaattataggatacttaatgtacatcatatccagcttcccgactccagactgtgggagatgacacagagccagcctgcctggatgtgactcagctctgcaacttattaaagacctttggcaaatcacctaacttccctgcggccga

SEQ ID NO: 267712 - DNA, 367 bp, Homo sapiens
tcattcctgctaccctccttgtggcacccaggtacattttttttttaaaggaggaaaaaaagacatttatgtgtaagtcccggttccatgggatactagctgtgtaaaagtgaactggttattacaaatgtaaggtttcaaaactgttttattagatcgctgattattcctcttatgtgggaacaaatccccttgtttgcagagagcatggtcctcttagggtatgaatttctgaccagtgtcctccatctccagcttcccgactccagactgtgggagatgacacagagccagcctgcctggatgtgactcagctctgcaacttattaaagacctttggcaaatcacctaacttccctgcggccga

SEQ ID NO: 267713 - DNA, 378 bp, Homo sapiens
aaatacagacaaaccaaccaaccaagcactgacgagccagtaaagagggaactgtcggggaatcagggctgagagaatctctgatacagcagcggaaataggcactccctcctcatcaacaaacacctgacctgggtagaccctctgcttaccaagatccagtccaccttttgacatcagcattcatgctgcctctttttacgaaccaagccaaagtggtcccttcctctggaaattataggatacttaatgtacatcatatccagcttcccgactccagactgtgggagatgacacagagccagcctgcctggatgtgactcagctctgcaacttattaaagacctttggcaaatcacctaacttccctgcggccga

SEQ ID NO: 267714 - DNA, 450 bp, Homo sapiens
ttaggattcactgtttgtattgtatatgctatggggtttgacaagtatgtaaggacatgtgtctagcattacagtatcatacataaaacaagttttactgctctaaaaatcttctgtgctctgcttattcacccttttgtcccactaatctctggcaaccactaatctgctttctgtctccatagttttggcttttccagaatgtcatattgttggaatcatacagtgtatagtcttttcagattggcttctttcactgagcaataagcatttaaggttcctctgtgttttttggtggcttgatggcccatttctttttatttgaaaagttagacttttaataagttgtgttggaacacctagataatcatttggtaaatatgaagtaggagacatactgtacaccgtacaccatcataaaatccagatgggtcagacatctaattgtag

SEQ ID NO: 267715 - DNA, 408 bp, Homo sapiens
gttgtccagttgtatattatataagacccagtagcatgacaaaattgccagaattttgcttttccagattacatagtctttcctgtgggctctgcaatctccactctccctccaaaacaagtacatttttgtgaaattttaaatagaaaaatctctatatagatctaatgtcggtttcttaacatttacatttcagtgtcttgggatttgtgattacatcaacttgttttggaaaagaaataaattctcttaactttcttttaaaaaaatctattttaagttatagagatgacataacaatattatagacagtttaccaaaaatgtgataatcctgccacccagtcagaatagacattgccatttttctgtttcctttcagactttaggtgacaggacagtgtgattt

SEQ ID NO: 267716 - DNA, 493 bp, Homo sapiens
catgctgaactgtgagtcaattaaacctccttcctttataaattacccagtatcgggcagttctttatagcagtgtgagaacagactaataagcacctggagtctgggagcgtgccctgcggctgccatcatggcgagcgtcatcagggagaggggccaggaaggcaggtgacttcacccacacagaaaaaaaaaaaaatgctgcttctgcagcccttcttccctgttacctagagtgggtttcagcgagaagactctgacaagacaacacctgaaatcgaacgtgtagtcttctaaattgtgtgggaccctcaaaggagggttggtcacgaaccagagggcataagagacaagtaaacagtagacccttcattttttatttcccgtccctggcgtccagcgacacacttttcattcccaaggacttccagggacccaaagtcctcccctggcttgcttttgtgaagcccatgatcttgcatggaaacctaaa

SEQ ID NO: 267717 - DNA, 369 bp, Homo sapiens
gttttacagatcagcaaatgaggcagagaaaggaaggttacttctgaagttcacactgctggtatgtggtggagccaggatgtcaagctcaagaatctctgcctctaaagcctcttgaagaaacagctaataatatctggagagccacgagaaaaaggaaaatacttgagtctgaaaagttttaatcctacttgacagagtgcaaggggacgtcactgtcggaagggaaatagtgcatacagtgggtaacaagggaagtcatttagccagttgggaacaaaccatcttgtaaaagtgaccatgaggaataaccgatggaaatttttgtatagtgctttttcagtataaagttcgaagtaactttcaata

SEQ ID NO: 267718 - DNA, 231 bp, Homo sapiens
aaaaaaaaaaaagattgataagctggctcatgtgatcttgtggctcaccctggaactgactgactcagtgcaagaggacagcttcagttccctatggtttcatctcctgccaaccaatcagcactcttgactcactggctttcctccacccgccaaattatccttaaaatctctgatcctggaatgcttgggcaaaactgatttgaataataaaactcctgtctccgaaaa

SEQ ID NO: 267719 - DNA, 526 bp, Homo sapiens
gtaatgaatggaaagacttttcttttccaaaaatgacagcttagaaaacaccagagggtttataccaaaatatatttttgcagatgcagtaaatatcaaaaaatatttaattcaaaattgattctatgtaaatatcagagaattttccatagaataattaaggcactgacacttcagacattacactaaatcagaatgttcagtataaaaactaatccacagctacagctgttagataaattatttctatataattttttaaaaagtggatttttgaagcactgtaattacattgaaagtatacttgttttcttgaaaaaatttttttgaaaagtgaataatgatataatacagctttcacattgctttatgctattttattcctattatattcacatgtgaaagcatgtgatcaattgttgctgcattagagatattagagattgttttttattagttgggcattatgtatgaccttttctataaaagagtaaggacattaaaatgtaagatgcatgatgaaaat

SEQ ID NO: 267720 - DNA, 746 bp, Homo sapiens
tccagcaggtagaggccaaacagaagctccgcttgggcagccctggtcggcctctcttatgagacccacacggctgcacgctctcctgactgcagctttgggctggatcagtagccccagggcccccaggccacttctgaagagggcgagaagctccccgccaggagtcttgttttgtcccctaggctggaatgcagtggcatgacctcagctcactgcaaactctgcctcctggattcaagtgattctcctgcctcagcctcccaagtagctgggattacagagacctgaggctgcaggacaaccaactggaagctggggagagacagggcctgcaggggaatggcattgagccctcccgtccctggggcagtcacggggcatcgttggcaccctgaggcacggacttgaaaaaatgcattgattcaagatggaataaaccgagtaggtttcagaacagccacccttggcctggacagtgcaagagctgcagagtgtcacctcacagggccagcggcgacccaagacacgggtgcctggaaagggggctctctgcggggacagggctcagaaaggctggacctgtcctgaaccacagaaacagggttccctgaacctcggccatcgtctaccattacggcgccctgtccagatataaagtcagaaaatctcagatgcacaaacattttgaagtaaaagatagtttctaaaccattactcaaaccaataaaacgtgaagtgaaatg

SEQ ID NO: 267721 - DNA, 419 bp, Homo sapiens
tcctaaaactccttcttcgcccccctccccccccttaagagtaaagaaaaaaaaattttatagcaccctgaggcacggacttgaaaaaatgcattgattcaagatggaataaaccgagtaggtttcagaacagccacccttggcctggacagtgcaagagctgcagagtgtcacctcacagggccagcggcgacccaagacacgggtgcctggaaagggggctctctgcggggacagggctcagaaaggctggacctgtcctgaaccacagaaacagggttccctgaacctcggccatcgtctaccattacggcgccctgtccagatataaagtcagaaaatctcagatgcacaaacattttgaagtaaaagatagtttctaaaccattactcaaaccaataaaacgtgaagtgaaatg

SEQ ID NO: 267722 - DNA, 407 bp, Homo sapiens
accacactccaaaacacacacacgcccatgtacacacacacacatacatgcatgcacacataaaacagtcacagctaagttgacctagacataattttcttacaacgaactacgcgttataataactacttttactctatagaaacagatggatatttgctgcatacttattcattaaactggtcatcaatgtctcatgcacttttttttttttttttaagaaggagtcttgttttgtcccctaggctggaatgcagtggcatgacctcagctcactgcaaactctgcctcctggattcaagtgattctcctgcctcagcctcccaagtagctgggattacaggtgcgggctaccacgcctggctgatttttgtatttttagtagagaagggattttgccatgttgg

SEQ ID NO: 267723 - DNA, 275 bp, Homo sapiens
ctggggcagacctgggcagggcagagcacagcttgcaggacctagtacacagtgttgggaattgaatttgggttttgacctttgaagctgtgcataaagtctaaaacaagaagaggagtggaggctgaggttgtatttgtattttaaaatgagcatttgccacacaaagccaggagcttcagaccagcgtggttaacacagcgagaccctcctctctgtgagaaattaaaaaaaaaacaataataaaagccaggcatgttggcatgtacctgtag

SEQ ID NO: 267724 - DNA, 717 bp, Homo sapiens
ggagcgtccgcgaggcgctggggcgacggggcaggtttatccgggctaactttgccgagtctgtttttgagggaagaggttgtgaggatcgtatcttccgggacgcgtttcacgtgggaaggcgctccacgcctggaactgtcagcagccggcgcctgaagagctcctgccgcgggcgggcgcggggcctctggcctggcagccgcaggacccaatggatcaggcgctcacgctgttctcactgcatggcttcagtgccttgcctggcacctcctatcctgtaactggccgactcggggtcccacccaggcttctccagcggccgggaaggggctctgcttccggaagtgtttaggaagggagccagcgtaaaccagagtcccttcctccaagcatcgctgaagccttttctcccctggcagccgacttccttttctttggaaaggacgtcagtttattttagcttgttgaaactgttcagagatgcggtcttgtgggcaaataaatgcctgtttagctgagctgttattttcagctaagaagttcttcaagttttcaagatctaggagggggtgtaggctcgaattataatggacccagtgtagcaaaacatttattcatttaaacaattgtgcatgctcattcagacgcactacctgagtgagatgatgccgttctgggctgcttcatcttaaagagagtcactgtttcttctgg

SEQ ID NO: 267725 - DNA, 347 bp, Homo sapiens
atacttaatcttacaaatcaggaaaaagtaagccagtgaggtaccactttatgttcatcaatttggcaaaataatatgacaatatggataattgttgcagagaaacaggaactcttataccacttggtgggaatgtaaaaatatgtaactattttgtagatcaacttagttgatgaagttggaggtatatattaaatatatcctttgacctagcagttttctttctaggaatatattctagaaataagtattgttctcaagaattgtttattgcagcttcataataacaaaattgaaaacaagtgagaccctgcctgtgcaacatagtgaaaccttttctttacaaa

SEQ ID NO: 267726 - DNA, 735 bp, Homo sapiens
attgaaattagaaacattgtgtgcatttctaatactcgtgctaggaaaaagactatagctgtgttaaagtttaatgcgtggaccgtaatagagagctgaacagctctccacggccccgtttttccattcgttttcggaataaagaagctggttctattttaggcttgtatttgggaagtggactttaccagaatgggagtctgaggccagagttgccttttccctcccatgtgaacagatacagttgagaggtgaagaatggtgtgctctgccctccactgcccgccccctttgtatgtgtgttatgtgaaattttaagggggtatatggagtttggtgatttaaaattctttatcagttttctctctagattttcatagaatcacctatagactttctttagggtacctctgttagggacagaaaaagggaatgaaatatacaccggtttcttgttgttttcatttttagcattcatttgagcagggatgcaactgaggctttagtttgcccttggattagttatcctctgtctcagtaggcaggtttatttggacagtggcatatggagagggtcaatgggggcaggaaggatgttggtattttatcactaacattgtttaaaattacagtgcatgtggacaataaaaaccataatgactttattatttgttttaaaactatctagaccagcactgtccaatagaattttttgcagtgttgcaaatattttac

SEQ ID NO: 267727 - DNA, 2055 bp, Homo sapiens
aggatgtacttataaggcatgggacataagccacccatctgtccataatcaagtggcacagtgagtgggaccaattcaacgtaggagagtatgcaaaaagtaatccagtgatctccactaccccaggtttctgcgttgcttattcactgcaacaaataatctgggtgttattaggcaactagatcttgcaaaacggtgattaaatgcagtcaattcttggtttgagtgaaccaagctgtcgataaaatgtagctgcattctcagttcaactgcaaagcatttaaaagaacgttgcttccagagcatatccatccagaagacagctttaaaaaaccaaaataggtcagggccatttttgtttaaatggatgtaggcttaactgattattcctataataaaagaagtttccagggaaatatcccagagcattcaattgagtcttccacccagcataggtatcccacaaccagctctgttttactcctgggttactttgggaaagggtaatagaacttctatcactcttagcctttaacttctatattccctctccccacacacaaaaattcatgttctgctatttcagtgttaagacagtcttcaaagaactttccaaagaggtctaaggagatagcttaaccctgcttattccttgaataccaatagagaagaagctctagaggacaaaatcccagtccttggcacaaactcaggaaatggaagccggagtctgttttttgtggggctgctaattgtgctgattgtcagcctggcactggtttttttcgtgatatttctaatagttcaaactggaaacaagatggatgatgtgtcaagaagactaacagctgaaggaaaagacatagatgatcttaagagaatcaataacatgatcgtaaagcgactcaaccaactcaaccaactggactctgaacaaaactaaaggactgattttctgaaagcacctgctaacaccttgagctttttactttcctgggagtgtacagggttaggaactgagaaagtgcacttcctcaggcaacagatgatctggtcaggcaacccacccctggggcccactttctgcagcaagatgggagcaattccaaggcaagtgggtatgggaatagcaactaaaaaggggtgaacttgtctcagcccccttttatggtagggcacttcaactttaatggggtgggcggctacagggaggagaatcaacaaagcaagagaacttgactatgtacgtccaacttcttacagaaggagctttgctaccagaacaagttcactgtgtcaatgaagttcatgacacctcatgcacctttacagatatctgggaaagcctgagaaattcattgagttttatgtattgaagggaaccaggtgattactcttttcaataagagggattctgctcaggtgattagactttgactctatttccccagggacagtgatgggtgggccccagagctagttgctgtctggtgtttgctggtgaaaacatgagcagtagttatgtggggctgagagtcaaaagggaaagcctaattaattcaactaatgtttattaagctcctactctgtgcaaatcactctactcaagaggagctcacataagagtgcaggataaagaaaggagatggacagttatatgtaattatataaactttgtgtattttgtttctcatgaaaaaacccctttggcaccctgctgattgatttggaagaaatctgatagatttgtggcctttcctaaattgcactaggaaattatgtagttagaatatttggaacctgcattagttccagcaatgaaagtaagacacacagcatatgacataagacacagtgtgaaataaatgagtttaaaaagcatatgagtcttagaaaatcttttatttaatataaaaatattctaccggtcaattgaagaatgtattatgattctatcattttggattgatcaaaaacatttgggtttactacgatattaagcattcactttacaatactaaatagttaatgaaataaacacattttgcttaccca

SEQ ID NO: 267728 - DNA, 1914 bp, Homo sapiens
agtcagtcatcatagtggcagcttccgcctgctacaggatatttatatatggaagcataccatggcaggagtgctggaaaggtggtgtcagctaacagttgcttcagccagataaggacggtgttccatcttaacataagtcaccaacttctaaacctggcactgggcatttgaagaataggattcgtccctactctaaggagttttcagtctatcgggaaatcaaagatgtaagcaaatagatgcaataaaatactacagatgttctgatagaagaatgtaaagaatccagcaaaggcaaaaggaaagacagggacaatgactcattcttcccaggacactggttcttgtggcattcaggaagatggaaagctttatgtggtggattccataaatgacttaaacaaactaaacctctgtccagccggatcgcagcatctgttcctgttaagacagtcttcaaagaactttccaaagaggtctaaggagatagcttaaccctgcttattccttgaataccaatagagaagaagctctagaggacaaaatcccagtccttggcacaaactcaggaaatggaagccggagtctgttttttgtggggctgctaattgtgctgattgtcagcctggcactggtttttttcgtgatatttctaatagttcaaactggaaacaagatggatgatgtgtcaagaagactaacagctgaaggaaaagacatagatgatcttaagagaatcaataacatgatcgtaaagcgactcaaccaactcaaccaactggactctgaacaaaactaaaggactgattttctgaaagcacctgctaacaccttgagctttttactttcctgggagtgtacagggttaggaactgagaaagtgcacttcctcaggcaacagatgatctggtcaggcaacccacccctggggcccactttctgcagcaagatgggagcaattccaaggcaagtgggtatgggaatagcaactaaaaaggggtgaacttgtctcagcccccttttatggtagggcacttcaactttaatggggtgggcggctacagggaggagaatcaacaaagcaagagaacttgactatgtacgtccaacttcttacagaaggagctttgctaccagaacaagttcactgtgtcaatgaagttcatgacacctcatgcacctttacagatatctgggaaagcctgagaaattcattgagttttatgtattgaagggaaccaggtgattactcttttcaataagagggattctgctcaggtgattagactttgactctatttccccagggacagtgatgggtgggccccagagctagttgctgtctggtgtttgctggtgaaaacatgagcagtagttatgtggggctgagagtcaaaagggaaagcctaattaattcaactaatgtttattaagctcctactctgtgcaaatcactctactcaagaggagctcacataagagtgcaggataaagaaaggagatggacagttatatgtaattatataaactttgtgtattttgtttctcatgaaaaaacccctttggcaccctgctgattgatttggaagaaatctgatagatttgtggcctttcctaaattgcactaggaaattatgtagttagaatatttggaacctgcattagttccagcaatgaaagtaagacacacagcatatgacataagacacagtgtgaaataaatgagtttaaaaagcatatgagtcttagaaaatcttttatttaatataaaaatattctaccggtcaattgaagaatgtattatgattctatcattttggattgatcaaaaacatttgggtttactacgatattaagcattcactttacaatactaaatagttaatgaaataaacacattttgcttaccca

SEQ ID NO: 267729 - DNA, 1586 bp, Homo sapiens
gatactctggtttctcttcagatcgtataaatctttcgccttttactaaagatttccgtggagagaaacgagtggacaatgactcattcttcccaggacactggttcttgtggcattcaggaagatggaaagctttatgtggtggattccataaatgacttaaacaaactaaacctctgtccagccggatcgcagcatctgttccctctagaggacaaaatcccagtccttggcacaaactcaggaaatggaagccggagtctgttttttgtggggctgctaattgtgctgattgtcagcctggcactggtttttttcgtgatatttctaatagttcaaactggaaacaagatggatgatgtgtcaagaagactaacagctgaaggaaaagacatagatgatcttaagagaatcaataacatgatcgtaaagcgactcaaccaactcaaccaactggactctgaacaaaactaaaggactgattttctgaaagcacctgctaacaccttgagctttttactttcctgggagtgtacagggttaggaactgagaaagtgcacttcctcaggcaacagatgatctggtcaggcaacccacccctggggcccactttctgcagcaagatgggagcaattccaaggcaagtgggtatgggaatagcaactaaaaaggggtgaacttgtctcagcccccttttatggtagggcacttcaactttaatggggtgggcggctacagggaggagaatcaacaaagcaagagaacttgactatgtacgtccaacttcttacagaaggagctttgctaccagaacaagttcactgtgtcaatgaagttcatgacacctcatgcacctttacagatatctgggaaagcctgagaaattcattgagttttatgtattgaagggaaccaggtgattactcttttcaataagagggattctgctcaggtgattagactttgactctatttccccagggacagtgatgggtgggccccagagctagttgctgtctggtgtttgctggtgaaaacatgagcagtagttatgtggggctgagagtcaaaagggaaagcctaattaattcaactaatgtttattaagctcctactctgtgcaaatcactctactcaagaggagctcacataagagtgcaggataaagaaaggagatggacagttatatgtaattatataaactttgtgtattttgtttctcatgaaaaaacccctttggcaccctgctgattgatttggaagaaatctgatagatttgtggcctttcctaaattgcactaggaaattatgtagttagaatatttggaacctgcattagttccagcaatgaaagtaagacacacagcatatgacataagacacagtgtgaaataaatgagtttaaaaagcatatgagtcttagaaaatcttttatttaatataaaaatattctaccggtcaattgaagaatgtattatgattctatcattttggattgatcaaaaacatttgggtttactacgatattaagcattcactttacaatactaaatagttaatgaaataaacacattttgcttaccca

SEQ ID NO: 267730 - DNA, 406 bp, Homo sapiens
aaagcacacccatactgtgtcttacaccaatcagatgctcatagatgcttcttctttctcttctggtgaccaaagttacggtggagtatagtggcttcacgaaataaacaccttaattgtcctccctgtcagagagcattttataagagtcttcattctcttccatttctttgaaagagttctatagaatcacagtgggttagataatgaaatggcactgatacacctttcaacctgaaaataatccatacatgattaagagaactaacattaaaaattcattgagggccaggcacagtggctcatacctgtaatctcagcactgtgggaggccgaggtgggcagatcgcttgagcccaggagtttgagaccagcctgggcaacatggtaaaaccccatctcaaca

SEQ ID NO: 267731 - DNA, 885 bp, Homo sapiens
tagaattgtattcaaataaaatataaaaaagaaagatcacttagagtaactttttcctgcctcacttgaataatgcagagacacttcaaattcgtaacatgtttagggggtctcaaggaggatgggctatgcgttttgaatatatgcatataaaacaacaaatgacataggcctaataatttctttgcatgtgtataatcctctcttcaatgtaattcaaaggtctcttttttaatatcagtctttacattgtccctgtaatatagagctatacacctttcctcaatcttttgtgatagtaggaaaagtagcattataagaagtatttataaatttaattcactccaccagaaatgttttattttaaagttagcatgggacttgcggtatccgcaaggtcagtgtccccactgaagaagtggccttctagagtaagaagtttcagcatcaacatgggtaatggaagccatataacagaacttaagaaggaactttgtggtaagaaaatgtagacagtggttataggcatatatgtaagaaggctgtaagttaaaggcaagagagatgtagcaattaataggagatattttttctgccatcattaacaaatgtatttgtttactactccttactttttaactcatccaccttgtatccactgctacctctgccaaccctgtatctgttactgaattctgtctactcttgtagggcctcttgaaaatgaaaatatccatttgtttccatctcttttgtcaagcccttatcagttgtctaaactcttgactttccaactgatttgtcagttttccctgctctaaaccatcttatgcattttttacagattagctataaacagcattcccataatagcactctcatgtc

SEQ ID NO: 267732 - DNA, 485 bp, Homo sapiens
acacattgccgttgaacttctaagatcttaggtttccacttactcatgaaaattataccacagggtcagagggtagtgttcattggagccaggtgccagaacaagttattacaaactactattttagagaaaaatgtcattaaagtttaagataccttaagctataggtttgcatcaaagttaatgaaaggtaaaaagatgccaagcgtggtggctcaggcctgtaatcccagcgctttggggggccaaggcgggcagatcacgaggtcaggagatcgagaccatcctggctaacacggtgaaaccccatctctagtaaaaatacaaaaaattagccgggcatggtggcgggcatctgtagtcccagctactcaggaggctgaggcaggagaatggcatgaacccaggaggcagagcttgccgtgagctgagatccagccactgcactccagcctggctgacagagcaagactgcatctcaaaaa

SEQ ID NO: 267733 - DNA, 457 bp, Homo sapiens
ttaaatttaagtgccttctatgccatgcacagtggtagatgcttttacttacaatgtttcacttagttctcacatttctccttaaagcagaggttattccatgttacaggtcaagaaatgtttactcagactgaagaactcttcctaaaatcatgcagctagtagtaatgtagctaggatcccaacctagttctgagtcccagactccattgctggttactaccttcatggatgaatgtataccagagaatttaggccaggtgtggtggctcacgcctgtcatcccagcagtttgggaggctgaggagggtggatcacctgaggtcatttaaatgtgtatgtgcgcacacacacacacacacacacacacacagaactgcttcattttctcaaagtgtttacgtttgaatacataaagactgagttatctgaacactgcttcattatagaaatctca

SEQ ID NO: 267734 - DNA, 372 bp, Homo sapiens
aagcgtggcaggtcatttgcactccctggttgaaatttccaggatgtgccagggccctgggacatcccaacaaacccctagagaatgtgagtctttaggtctgtcccctcctctacctactcctataggaaatggcagatgagaccaccggcccaaagctggatgccttctataaatgataccatcccgtctgttgcctgggggcacttaggagcagcaggattgcctaaccccgtgggaagcccaagtgtccaagaattgctccacaagttgccacatgaccttgcttcactccaacaggcgaagcacccattgcataattatataaatctaaatgcacccaaagctgtaccatgagattgtgaaatcaag

SEQ ID NO: 267735 - DNA, 666 bp, Homo sapiens
tacaaatgcatttttcaacatcttaaattacacaaggaagaaactccaatttgaggctatcagtaaaggcagcaatgggaaagggagaggtacaagggaccctcctggtctcctaaaatcataccacatgggtggtactaactctgaatgttagatcaatgtacattattacacctgcttatgagggaacagttagcttccctgtgggtaactgctatttgtgtcccaagtttcagaggcagcacagggaatatgtaaatccaggagctctagagtcaaattccctggctttgtattcctcttcctggtttagcagccaggggagcctctcctcctgtttccctatcttttcagtgatgatgctcacagcacccaccccaatgaggttgcagtgatgattaaatgagtgaacacacataaagtacttagatgggtgtatggcacctggcaaggacccagtgcaagttagctgctaatatggtacttcctaaataaataaaatcatgacaaagtatactggggtaaacatatgtaatttggagagaaggaagtgtcagtatttttattaccatcattcatcacagtctctggagatgaaaaggttacaacaatttctggaagttatagatagaagacttgttcatgtcctctcacttttcagctgct

SEQ ID NO: 267736 - DNA, 580 bp, Homo sapiens
tctccaagaaagttttaactatttgcgttctgatgagtcgacctcagggaagtcaagtgtcattaagagctagatctggtcataaaacaacttgaagttgtttactggaaagtttaaatacttgaatgtaattattcacagttatttctatttggtttattctgatactgctgtataatgacaacgtgatactaataggtcattaatgtaactaatataatagtatatgtatttttcatccacttaagtcctgtataacaaattacattttaactaatttgaaatttaattcaactcattttaagcgttagacggttttgtgaatctgtcaattgtgtaaaaaatgtattgaggtaatatttatattgaacaaaatagataaaactttaaattataattaggaatatttattgagaattttttctgcagtttgtgtccgagatttatttcaacattgactgacttttgagtgcagtggatcccacctgtaatcctagctactctggaggctgaggcaggaggatctgttgagcccacgagtttgagaccagcctgggcaacatatcaagaccccttttca

SEQ ID NO: 267737 - DNA, 523 bp, Homo sapiens
  misc_feature (5)..(5): n is a, c, g, or t
  misc_feature (14)..(14): n is a, c, g, or t
ccccncccgccganacggctgcgagagacgacaggaggggactcacagaacgactaagaaccttcctgctcggggatctgagacccccaccgaccctcatcacctttcacggcgaacaagatacaacactcacatgggacagactgggcgagggggagcagagggagggataggcgttgagatatacatccatacagatttggggatgcttaagaaccacccccagggccgggagcggtggctcacgcctgtaatcccaacactgggagaccaaggcgggcggaccacttaaggccaggagttcgagaccagcctgagaaacatggcgaaccctgtctctaccaaaaacataaaaaaattagccgggcttggtggcgcgctccagtggccccagctactagggaggctgaggtagaaggatcgcttgagcccggagattgaagctgcagtgagccgtgatcacgcaactacactccagcctgggctatagagcgatacctccatctcaaaacaaaacaaaacg

SEQ ID NO: 267738 - DNA, 423 bp, Homo sapiens
ggttaatggaaatttccttaaagtacagtcctgctgtttgagaaactgattttacccttattctgtctcacataattcttctgtgaattttaaatttaaccagttaaaaatctccatattttgggtatgtttagatgatacaatctttggttgaaattagttggattgaattccataatattctccttgcctttgtattttctttattgctttttaataagattctagtaactactatgtaatgatattctttatactcattttaaatactttataccatgattaccttactgtcagatttttattaaaggcatacctacattggctattttgttacaagactgactctgttttagtaaaattacagttcgctgtatgctcctttttcctaaaggactagcaatgtgcttaatgttcaagtac

SEQ ID NO: 267739 - DNA, 487 bp, Homo sapiens
aggaagactctgtacatgctcagtgtagggcttggtccgtcaagactggctaggagttttctagatagagccttgaatcttgcattacagtcactacagagcatgagctctgtggacatttcatgaaaagcttcctttctacttggatatatttttttacttcttgtgtgcatacttgatttatttactgttccttatagagctgcaaggccttgtttcttttctatagaagttatatttctctgagttcagatgtcacatcttcgttaccttctctcaagttttgctatacaagcttaggaacgtcatctctttctcttccagagttatcttccatcatgtaggctttggagccactttcctcagagcctccatttgcctcacctcttcttgcctgggaccttgtaaaaacagtgattgtggtaattaaattgagatatgaggaatatatataactattatgtagtcataataattaaaaatttaa

SEQ ID NO: 267740 - DNA, 293 bp, Homo sapiens
aaaatatacatatagaccaatataacagaagaaagagccctgaaataaagctacacttttacacccaacttatttttgacaaagtcaacagaaataaaggggaaataactccctgtttaattaattgtactgggaagactggttagtaatatgcagaagaaaactggacgcctacctcttcccatataaaaaatgtaactaaagacatattaaagacttatctgtgagtcttcaagctacaaaaattcaagaacacctagaaagtactcttctagacactggcgtctgaaaaa

SEQ ID NO: 267741 - DNA, 451 bp, Homo sapiens
cgtgagattctgcccttctgttctctttaccctcagacagtccctggtctgagggaaaggcagccgtggaggaagtgccagtctggacaggctcttctgctggaaacccacatcccaagtttctctctaccttcagtgatatctttattgtgaaattccaaactgtggtccctgaattgaggctgttgcaccaatattgttgtgtgttgccatacaacaaattgcaaaggttaggagactggatgtcagcccttaattaaagacctgcaaatatttctgccccttgcaccttgaccttcaagcaatggaaaacttgtctttccttcagacctttgattagaactctaggctgagttctatacttggaatgactctgaatgttaccatgtcacctacctgtgtcccctggcctcatccttgtgagtacataagtgtcattgatatcacctct

SEQ ID NO: 267742 - DNA, 163 bp, Homo sapiens
ttgtaaaactaatacgtgctgcttaccggtgttcagagcctcttctttcaaacatgacttatttacaaatttctccaactgaagtcatgcaatttttatttgttgtgcacttattttgtaccaatcactcttccaaccactaataaatatgtatttatacaca

SEQ ID NO: 267743 - DNA, 836 bp, Homo sapiens
tagtgtgtgtctctcaaatcttcattcaattcgtgtgtcgttccctctggagggactatggagcttaataaatcggttctcctggctttcatgttaaatgacctgtccgagatgtcctgccttgagaaacgatgtggggaaaaggccaatccccctgttcaaggctctcattctctctctgtggttagggtgagatttcgagtcttcatttgactgtaactttaatgagtgaagactgcaagcatggctcaggaagtgacctggggatggtgtagccgctgagaagttaatgctgtaggcgctcagaaaggacgtcctttggaagaggcatgttgttgacctgtcagacagaaggcctgtagcttcactcttctaaaaccgaagcaccacgttcaagaggattctgttcttaggaatcaactctgaatatctcctctgtattctcccattttttgttattttggctactgagcctacaaagtgaggaaagtccagcgtgttttctttgtgtccagggaggaaaaataaaaacattagtaactctattgacaaagctttgccccttaaaaaggggagctcttttcttcaggtttccctgcaataaaaaaaatcaaaagctgtcaactctgtttaatagatgattccctttatctccatagaaattacaacggacagtagcagtgagggcagtcggtctgggccaggtagtgagggaaacctctctcctgtagaagacggtgcttattcttatggcaccagtggatttgggagcccacccaggcgtccaggcatgagccctgatctcccacacgatatgcacacccttcctcctaaca

SEQ ID NO: 267744 - DNA, 567 bp, Homo sapiens
aatatatacttaattaggtttgatttttatcctttataacttttggtctttgcatttatctagttgttgacctgtcagacagaaggcctgtagcttcactcttctaaaaccgaagcaccacgttcaagaggattctgttcttaggaatcaactctgaatatctcctctgtattctcccattttttgttattttggctactgagcctacaaagtgaggaaagtccagcgtgttttctttgtgtccagggaggaaaaataaaaacattagtaactctattgacaaagctttgccccttaaaaaggggagctcttttcttcaggtttccctgcaataaaaaaaatcaaaagctgtcaactctgtttaatagatgattccctttatctccatagaaattacaacggacagtagcagtgagggcagtcggtctgggccaggtagtgagggaaacctctctcctgtagaagacggtgcttattcttatggcaccagtggatttgggagcccacccaggcgtccaggcatgagccctgatctcccacacgatatgcacacccttcctcctaaca

SEQ ID NO: 267745 - DNA, 294 bp, Homo sapiens
ctcctcataccttcatcctgtcatcctccttccttaacttgcaaaacttgttgaaaaaggagtctaccagccagtctccacttcctccattcacattcacacctccaaccccacacgctctaatttccataacaatttccattaatagcatcacctcccatccagtctacatcataaatcctgcagtcattgcaaatgctgcctcctcctcaagggcgccctgccttcctgacatccagctggtcaccaaattctgcaggtctgcttcagaaatgtccctggagtccagcacct

SEQ ID NO: 267746 - DNA, 506 bp, Homo sapiens
caggcaccatactgaatggcttataacagtgtttttccaagtgtggtccccagaccggcaacatgagcatcacctgggaactcattaggaatgcaaattatctgactccctcagacctgttgagtaaaaaacctagaggatgaacccagcaattggtgtcttcgccttccaggtgatactgatggcatgctgaactttgagaaccattgctttatttgcattctctaatttaatttacaagccaataaagtagatactgttatcaacctcagattgcaaaagttgaaactgaggcatgggaggctgagttacttgcttaatgtagttcagcttctaaagggaagattctggtttcaaatccaggtcacctaatccagagccccactaggccacagtgacctgtataaggtcttttggtacgtatggggggcaacactgtccaatatggtatgtgtccatttaaattgaaataattaaattttaaaaattgctttcttagcagcaca

SEQ ID NO: 267747 - DNA, 198 bp, Homo sapiens
tttcaaatggtttaagttgtaaggaagtacagtagagaaaatacatatatatgtgttttgtatattttatatacgtgtgtatgtgtgtatttctttgactaatatatgtcttactggaagaatgcttatatcagaaatctggcccactggcttggtgcagtggctcacacctgtaatcccagcactttgggaggccga

SEQ ID NO: 267748 - DNA, 447 bp, Homo sapiens
agacttcataccaaatgagaaaagcagaattcacactttgtttaagccacaaccagattgcaatcaacactgttgcacaatgaacttctctgcacacatcctggaagaaccagaatcctaggagcatggaagacttaattcattcaacagtaaccacctctttttagcctaagactttggcagccgaacaacagaacaggaattatgtcagcttttctgcttagcatgagctctgccccagaaccaatgacataaaatacgtatgtttgctttccctgccacaaagttgcgacacattatcaaagctttacaaagtcactctatcttaggacacccctagacaacttgtttccatcttacttctgggacaaaaatatttactgtatcctgctttcattgtctttgtgaatattacattaaatgttgacatgtgcttggcaattcaaa

SEQ ID NO: 267749 - DNA, 429 bp, Homo sapiens
acacatcccctcccagataaaaacaagcaatttactatatttagctgctaggagcttagggtcaaatttgtttttgttccctggcctttatattaactattttgtctgtctaaaagtttctttcccatagaggcagggtgtggtggctcatgcctgtaatcccagcactttgggtggccaaggtgggtctatcgcttgagcccaggagtttgagaccagtctgtgcaacatggtgagaccctgtctctactaagaaaacaaaacaaaacaaaacaaaaaattagctggttggtggtgcatgcctgtaatcccagctacttgggaggctgaggcacaagaatcactcaaacctgggaggcagaagttacagtaagctgagatcatgccactgcactccagcctggagtctcaaaaatagagtagaataat

SEQ ID NO: 267750 - DNA, 296 bp, Homo sapiens
ccccattactgtttcagctcctctacccaagcccgccagccctccagctactctataaacagtcttcttccaccttaaccttgccctgcaagtctgcctttttatgactccttgtacatttgaaggccagctttcccctaaagccatccctccccttcaactcccagaacagagggtggggtcaccttctcagtcacattctccatgttgcccccaagccccagctcctccgccatccctccctgcttccctctctcaaagacatctccttccaccactctctcaccattcatgtc

SEQ ID NO: 267751 - DNA, 425 bp, Homo sapiens
caaacgcatttgtagtcttggcaccgatgtgatctatgtcatctacattcacgttctataagccacagcaagccaaattgctaagttcaatacccatgtagttgggagctatacttctctcatgaagtctggggaaagggaagcattcaatggaaaaagagattctttgttaaataataatatgatctacaacatcatgtaaaaaaagagacacacgagtcatgacgtgcccatgatgtgaacaagtaagaagtgtgcaagccaacctatgaagtattctaaactattttttgtcaaactatcaatttatagaaaataaaagaagtaggggaagacgtcaagaaacgttacaaggaagcaactggcaacatctagaatgcgaagaataccacagagcaataaataattttcttctacaaattgtt

SEQ ID NO: 267752 - DNA, 312 bp, Homo sapiens
ccatgggttcatgtgtgattgatcacaagcacaaagggaaagaaatgcagaagcatcagggctgaccgatttccatgacaggaaaagaccctctatttgctatattgtgtctgcattttccatccctggttttgcaaatattaaacctgcatagaccttaccctgtgggttgtgtgaaggggaggctgaggttgaagggctccaggcagaagatcccacaggtgtgccagcgtgccaccctccctcctctgatttcacgttcaaccacagacagacggcattctgtcgttagtctttccagcctgggaattc

SEQ ID NO: 267753 - DNA, 572 bp, Homo sapiens
ccatattaatcctccagctgtattctcttcataacccttaacagtactcagaaaaggtctttcttttctactggtctctcctctccagaatgtacacttcattctctctcgtattctgctatatcctcagcacctagaaaggagcagccatatagaagatgctccataaacatttatgcacttaattatcacacactctgaaacaagtgtgtgttacgaacaagccagcacctcagggaagatcggcattcccccatctcctcatgcaggaccaagggctgtcgctcatggctctccatcactgtctttgcccaagtcacacagggctttgccttctgcccaccccacacctgccccagctccagattcttcatccatgtgggacttcaggcaagtcactcctttcatttcctgggcctcagttccttaataacaacaacagttaaagaatacttgtacggtccttagcaggcaccagcaattgttttaaacactttagtgagaccaagcgcagtggctcgcctgtattcccaacactttgggaggccgaggctggagaatcacttgagccc

SEQ ID NO: 267754 - DNA, 652 bp, Homo sapiens
ttagagatggggtctcgctctgtcgtccaggctggagtgcaatggagcgatcatagcccgcgctgcagtgcccagctggttttgccatttattcgcttagtgactttaggcaaatcacataacctatctttgtctcttaaattctatattaaacgttaagctgtcatccctaaaggtagctgtggtttggggagcacaaatctgacttttatttatctgcttaaaatctttcattaatttctcattgtcctctctgtaaaatctacttatttaccatagtattctaggcaatgtgctttctggagctggcatacctcctagcatatccccttctctcacttaaaaacaattttaaaatattataggccgtttgcggtggctcacacttataatcccagcactttgcgagactgacgtgggtggatcacctgaggtcaggagttccagaccagcctggccaacatggtgaaaccccgtctctactaaaaatacaaaaattagctgcgcatgatggtgggcgcctgtaatcccagctactcgggaggctgaggcaggagaattgcttgaacccaggagggtggaggctgcagtgagccgagatcacaccactgcactccagcctgggcaacagagtgagactgtctcaaaaaaa

SEQ ID NO: 267755 - DNA, 415 bp, Homo sapiens
aagagattctgatacatcataaatagagggacatacatctttacatgaaaacgacatggaagattttctgagggacatgtgaatgggagacctgaggagaggcagagagtcagagactgactgctggtcagtgaagtcggaacaccacacacaacatttacagattaagttcgccgtcttatatgggtgtggttcgtggtgctccaaaacaattacactagtaacatcaaagatcactgattacagattaccctaacagatataataataatgaaaaaaaattgaactattgcaagaattacaaaaatttgatagagacataaagtgagcacatgctgctggaaaaatgacactgacacacttgctcaaagccgagttgccacaaaacatcaatttgtaagaggaaaaatatcta

SEQ ID NO: 267756 - DNA, 831 bp, Homo sapiens
ataactcagaaagagaccaacatatacaagataaatagaaagaaaaaaagaaatgttgggcttcttcatcagccctaaccctgccaaccactcctgcctcactgaatgtgccaacggattgctcagctccaaccaaggaaaagaagaaggaagttggatactttataccctctacattgtccattagcaacacaacctagagctaggatggagaaagaaaatgccaaaatgctaatgaaaaatgttcagatgtatcacatattaagcatacatgatctcaaatattttgcctgatttatgctatgcatgctattttccatgttgtgtaggctctgatgctagtctacatttacagaaatctccatcagctgtacaaatggcaatttaaatacatttaactatgtgctaataatctcataatacaatttatcatgtatgattggcagaagaaattatttggggcaaaagctatgattgtattgttgtaagttattatgaatgctgggcagtgtagggcatggcacttgctaccacctcccagaaatgtgtaagggctgttgaaggtgccttgttcttctttcttcttcaatataagcaaagctatttatatcataaagctgaaacttgaaattccaaaaatgataacaaaatggcctagttgggttcaagcaatgatgttctcgccccgtcttcattatacgaagggctaatccatgatcctctatcgctgactaactgggctaagtatacgggttgtaagcgaggagtttggctactcgaaggtcggaatggggggatccacgagtcaggcgtgccggagaaatactcggt

SEQ ID NO: 267757 - DNA, 408 bp, Homo sapiens
tccagcaaagtctggatctcagccagccctaagagtgtgtctgtgtcttggaggagctctttttgagatgctgtatctcagccctagggtgcaagcccagaggcagtctataccccaactcaactggctggtcctcaatgctgcctgcttccgtgcccaacttagaactacacatctgctgcctcttggtaacatgtcattataagtctgaagattgccatttgaaatgctctttgagggatgcgaagtcaaccctggatccaaagtagctttgatgtttgtcaggaaaatgctggaattctatacactacagtttctacagagcatgaagaactccaacttcagacaacctgcaaaaaaagtcagagagcaattaaatataaaaataaattcctttgataaaacaaa

SEQ ID NO: 267758 - DNA, 979 bp, Homo sapiens
tccagcaaagtctggatctcagccagccctaagagtgtgtctgtgtcttggaggagctctttttgagatgctgtatctcagccctagggtgcaagcccagaggcagtctataccccaactcaactggctggtcctcaatgctgcctgcttccgtgcccaacttagaactacacatctgctgcctcttggtaacatgtcattataagggcttcttcatcagccctaaccctgccaaccactcctgcctcactgaatgtgccaacggattgctcagctccaaccaaggaaaagaagaaggaagttggatactttataccctctacattgtccattagcaacacaacctagagctaggatggagaaagaaaatgccaaaatgctaatgaaaaatgttcagatgtatcacatattaagcatacatgatctcaaatattttgcctgatttatgctatgcatgctattttccatgttgtgtaggctctgatgctagtctacatttacagaaatctccatcagctgtacaaatggcaatttaaatacatttaactatgtgctaataatctcataatacaatttatcatgtatgattggcagaagaaattatttggggcaaaagctatgattgtattgttgtaagttattatgaatgctgggcagtgtagggcatggcacttgctaccacctcccagaaatgtgtaagggctgttgaaggtgccttgttcttctttcttcttcaatataagcaaagctatttatatcataaagctgaaacttgaaattccaaaaatgataacaaaatggcctagttgggttcaagcaatgatgttctcgccccgtcttcattatacgaagggctaatccatgatcctctatcgctgactaactgggctaagtatacgggttgtaagcgaggagtttggctactcgaaggtcggaatggggggatccacgagtcaggcgtgccggagaaatactcggt

SEQ ID NO: 267759 - DNA, 364 bp, Homo sapiens
gcacatgcccacagttcccgggcaggccctgccagtgcacacaccctttttatgacttaagctgcctcttctgcctgggatcccttcctgccactctcccctctttctagactgagctcaggagtcacctcctccaggaggccttcccggacatccccctgggtcaggtgtcctttgtctatggttccacagcctcaagcaccctgttctttcagggccctcagtatctactcctggatctgcttcccccagtaggtcccgggctctttgagggcagaaatatgtcttgttcccttggtatttcagtccctagccccttgcttagcatacagtaggtgataaataaatagttcattaaactgtg

SEQ ID NO: 267760 - DNA, 696 bp, Homo sapiens
aattcgcggccgcgtcgacagaagacgacagaagggtgggcaggggggacagagtctcgctctgtcacccaggctggagagcagtagcgcgatctcggctgactgcaacctccgactccccggttcaagcaattcttctgccccaccctcctgagtagctgggactacaggcgcccgctgccacgcccggctatttttttgtacttttttagcagagacggggtttcaccgtgttgcccaggctggcaacccgcccaccttggcctcccaggtaggattacaggcatgagccaccgcgcctggccaatttttgtatttttagtagagatggggtttcactatgttggccaggctggtctggcactcctgacatcgtgatccacccgcctcgccctcccaaagtgttgggattacaagcatgagccatcgcgcccggccatcttgtttccacatttcaagctgcaaaggcaggggcttgggccagctgttcagaatttaattagtttacctaagagacgtcagatccccctgctctcatgatcactagtgaggtcttatacacacacatacttgttcagcgtgctgacctaaacaaggtggaacatagtttgaaaatagagcaatctgagttatatgatccagtggttgcaggaacttgggacaggattttatcttcagcctatttcctcatttaga

SEQ ID NO: 267761 - DNA, 478 bp, Homo sapiens
tccccagcaaccaccaatctgcatcctacctctatggagttgcttattctagatatttcatattaatggaattatacaatatgtgaccttttgctactggccttttccacttaatgtgttttcagggttgatgtatgttgtagcatgtattggtacttcattcctttttatggctgaatcatattccattgtgtgcatataccataagagtttatctgtttattcgttgaccgacatctgtgttgtttccaccttgtggctattgtgaatagtgtgctgtgaacaaggatttgtttgaatacctgttttcagttcttttgggcataaacctaggaatggaattgctggatcatatggtaattctacctttaccttttttgaggagttgccaaactgctttcctttcccctcatttttatcaacatacttataaagtcattttcctttcttgaagataatacacatattaagtggcata

SEQ ID NO: 267762 - DNA, 399 bp, Homo sapiens
attgtgcactttcatcacttgggatcaggagctgcaaggatggagtaagctctgtgagtcaggatttgctactggccaactcctccattcaggaaaaagagccaggactgagttattcattaggaacagtaggaaagtgcctagggcccactatactttcaggagcccatgaaaatgttttaactcttttaaaatcagaagaaaaggaatacagtctagcctggattgtattcaactttatacccatgcaattataaaaatataatttttaatattgttgtatggagggaggaacccaaaaagcaaaagtaccaagggcccatgaaagttataatgtgactctggaaaggacttatctgagaatgaaaccaatatggggaaaatatctttgagagatgg

SEQ ID NO: 267763 - DNA, 474 bp, Homo sapiens
tggaggcagtctcactctgttgcccaggctggagtgtagtggcacgatcttggttcactgcagcctctgcctcccaggttcaagtgattcttgtgcctcagcctcttgaatagctgggactacaggcatgcaccaccacgcctggctaacttttgtatttttagtagagacggggttttgccatgttggccaggctggtctcgaactcccaacctcatgatctgcccacctcagcctcccaaagtgctgggattacaggtgtgagccactgcacccggccttcattctctttagataaaattatttgtctgtatgaaacagttgcctaactccatgtttacttgatgtcttaaaactgttactaattatttaatcattctgccaataaaatcagcgttgggatcacaaatccaaggaatagactcactcggtcagtttgaagaatgtttcaaatagaaatcaaatccatgattt

SEQ ID NO: 267764 - DNA, 399 bp, Homo sapiens
cagtatgacatatataactagtgaatgttagcatgtatctgaaattcttccctcatttttatagggggagagaattcaagactagtttgaggaaattttgttaaatttggagctaatctcaaaaatcttggaattaaggagcccaggatgttataggttaatcactgggactttttgttaaattaatattaacttttttcggttgactttccaccccctaaaatatgttgattcagttttctctcaaactgatttaacttaattgttttaacttttcataattgaggctcctgtagagctttgaaatgactttgctgagcaatgtaggtacaattcaaatgggagactaacttgatacttgtatagaccacacataactaaaataaatctaaatacatg

SEQ ID NO: 267765 - DNA, 432 bp, Homo sapiens
gttcttttgcctatctatttttttcttccctgcctactttgaatctgctgatttgtctactggtgttgagataagacttactgtctgtggtgttactaattcaaggtcacttggctgaagaaaaacaaaagaatgaaacaattctttatttttttctctttttgagacaaggtctcactctaaggtctcactctgttccccagactggagtgcagtagtgggatcatagctcactgttatctcaacctcccaggctcaagcaatcctcctgcctcatcctctctagtagctgggataataggcatgcaccaccatgcctggcaattttttatcttattcttagtagagattgggtctcactatgttgcccaggctggtctcaaactcctgagctcaagtgatcctcttgcctcagcctctcaaagtgctggg

SEQ ID NO: 267766 - DNA, 367 bp, Homo sapiens
tctagttttataggttcatggactgtaaccaagctttggaagaaactattgtcagtttcacttagaaattaactactctaggaatactcaagtattaattttaaagacttattcaaaatgcctcttgattattgaatgcccatttctgtattttttatttttttcattttactttaagttctgggatacatgtgcagagcatgcaggtttgttacataggtatacatgtgccatggtggtttcctgcacctgtcaacccatcatctaggttttaattgaatgcccatttttaaaaaacagaattagagggggaaaaaacctactatgcttttgtagttttgaagctaaaggaaataactttatagag

SEQ ID NO: 267767 - DNA, 307 bp, Homo sapiens
tgtttatttcacaccagggagaatcagggagaagattcaaaagcattgtgtaaaccttgaattcatgaaacaattttaacaaagggtacaacttcagaagcattaaatttgattgtcttgtatttttgttactaaataatactaaaaccctctcaatcttcgtgaaaagtcttagtaaggaaaggattcttgggccaggcgaagtggctcatgcctgtaatcccagcactttgggaggccaaggtggaaagatcgcttgagccaggagtttgagaccagcctgtacaacatagcgagaccctggctc

SEQ ID NO: 267768 - DNA, 369 bp, Homo sapiens
tatactgctaaaatggagttttagtccaaactgagtaaactattacaaatttatccaaactcagctaaaaaagcaacaatatcttgcatgccttagtctgtgaaaccatataattctcaatatgtgtatgggtttatccaacatggtttagaaaaggcaattctgaaaaataatatcaatttattgatgctgggattacaatacctacttgtgttggagcagatagatcataaaggatccttccttaaatgatcagtacatgtatactgttccaggaatgtgaaagaccaaaaacagagtaaaattttctagataatcggattcaacatatctgtccccaaggatccagaatccaaaatttttgcaagt

SEQ ID NO: 267769 - DNA, 963 bp, Homo sapiens
ttatcttgccacgtccaggaaaagcacaaatctggacatttcaaaggctgagaccatcatctgaaaaagcctgggttagccccctggaggacaagaaacaacttggagcagagatgaacagtccttgctgaggcacctagatccctaacctgcaaaccttaaaatatgtgagtgaagtcatcctacactatctagaccataggagttgccagctgaccacagatacagcaaagcaagcacaagccagaaaaaaactgccagcatatccccagaattgtgagcaaatgaaattgttgcattaagccactatgctttgaagtggtttgtaacagagcaaaagctaactgatacactggttaatccatttttaataaatcaatagattcagatccctgcattgtaaagttccccaccaatctttcaattaatgctcatccactgattgttgcctatatcaatgtttaatttcatgcaaatcaataacttttttcctttttttttttgagacagggtttggctctgtcactcaggctggagtgcagtggcacaatcatgactcactgaagccacgatcttctgggctcaagcaaacctaccacctcagcctcccaagcagccgagactgactacaggcacgtaccactctgcctggtttggttatttttaacttttttggtagatatggggtctagctatgttgctcaggctggtctcgaacttctgagcttaagccatcctcccaccttggcctcccaaagtgctgggattataggtgtgggccaccatgcctggactaatgatgattctctaattctatcatatcttccacatcaatgagcaggaattcttctgcaaagcactttctctcatctaccagggttatgtctgtacatgatagatgcccaattctttccttttaaatacaaatattcaaatgagtaattctgccctagttacatccca

SEQ ID NO: 267770 - DNA, 345 bp, Homo sapiens
caagataaagtgacagaacgcctgaaatctaatcatctcttattttaaggaatgagatttcatatgtaaaaagttttctgaaagaaatgcaaaaacaaacacagtgaagggttattaggaatgaaaactccattttaaattgacctttaaatactctatgatgttgaggccaactgagaatgctcatttaaaatcctctctgcataaaggttataggtcatctcagtataatccaaaggtaagccagttaaccagttagttttgctaacaagcattattcttcactggttgaactccatgtctgatcgagatataatgtctactttagattagctattaatccat

SEQ ID NO: 267771 - DNA, 397 bp, Homo sapiens
ctggagtacagtggcatgatcactgcatgctgcttactgcagccttgacctctggggctcaagccatcctcccacctcagtttatcaatcagatgtcattttcctcattaacaatgccattccacctttatcggggaatagcttccagggaatagtgctataaggttactccatagtcattttcctaaagagaaagcaaaggcattttattaaaacttgacgtatacctatgtctttatagcaagaaaataaaatataataatagtaacaaaacaaaacaaaaactttacatataccagctcagtgccctaagtagctaggattgcaggcatgtgccactatgcctggctaattaaaaataaatttttgtagagtggaagtctcgctatattgccca

SEQ ID NO: 267772 - DNA, 423 bp, Homo sapiens
ctctggacatgtctcactgtttgtatttctctctcctgtcaaagtgaatgatatattcttgaaaacccccaatttcttgaaatgggtgttctgttcattcatgggcaggggtcaggattgaagttcatatatgaaacaactggggatgtagataggaaagaatgtctgctgcaagagtgtatgaagggggattgtcatttacaaaaaaaaaagtacctcatggatggaaggattcatgaatagataatggacataggaaaggaggtcaatggaggacacataacagacatgctatccaccatttatttgtgattttgtaagagggttctcttctttgtcttgttcagatattttcatgtgtgtgttttagtgagaatctgagtttttaatcagtaaagtctgatgttttgataacttgatgtt

SEQ ID NO: 267773 - DNA, 385 bp, Homo sapiens
taggcactgcagctcacattcctattcatggtagaggaacagtccatcttaagtccataccacgttttatttacttactcatcagctgatggacgcttgggttgcttccacatgctggctattatgagcaatgctgctatggaaattcatgtaccaatttttgtgtgggcttatgttttcatttctctgaagtatatatctgatggaatttatgggccataagggaactctctgtgtaaccttaaggaaaactgccaacctgtttccacagaggcttgtgctgtgttattttaatcacaaccctgccctgggactgagccgtgtaggtcctagcatgacccatggataataaatacagacacaggtactcatgccatccacctgg

SEQ ID NO: 267774 - DNA, 416 bp, Homo sapiens
tgaagggatcagagaggatgtcctgtctctgacatagaggatacttcttccaggagtctccatgcaaggccaagagccctcacctcacccctgggctcacacatgccttacaatgaaaaggcagtcttccagccagaatctaatgcttgagagatttggatgggttaagtggttgactttttttacttccatagatcaacattaaccttcatggattcctaaggagaagatgtgctcctccacttattctgattaatattttaaattcaagattttgaaatttgaaaacataggctttagagtcacacagacctggtttaaatttggcactgccatttactagctttatagattcagagaagtaatttatactccttaaaccttagttctctaattgttaaattgacacaagatta

SEQ ID NO: 267775 - DNA, 751 bp, Homo sapiens
cacctaacgtgcacacctttgggatatgggaggaaactagagtagccagagaaaacccaagcagacatggggagaatgtgcaaactccacacagacagtggcctaggctgggaatgttttttctcatcaacgttataaggaaatggcattgaatgaaatgaggttgtctgaggacctgctgtatttgtattggaggaggaaacaggtgaagtgcctgcattcctttttcctgttttaaaacagcagttagccctcaactttcaacatttgtctcaatctcaaatgagtcaaatttagctaaataaaactcaccactaagcaaaataagggaggaaaaaacctctagaacagaaagaaaaatgaaaatggataaaaccttgctctttactgatgctaacgtacttcataaagtacagcgcttaacttcattgctaaaaaggctataatgaactctatttcgctttagtccttaggggaaaaatgtatttaaaccaaattcctacacaagaaagccatacggagacccacagagaacacagaactctgctgctctcagttcacagcagcaggagagtcctaccatcacaaacaccacaagtaaagttccatcttactgagcctcttactattcagccttgatctggctacttccaaacatgggactgatgatgcagaatagctagtttgacatttttcccactgaaaatttatttttgccggagactgattttctaaatctggagaaattggg

SEQ ID NO: 267776 - DNA, 1123 bp, Homo sapiens
tgcgtttaaagcgcagacactgacagcaagtcttccagtctctccagtataacttaagtgacatgccagcaagagatgcaatttggtccctcaacagtgttaaaaatctgttatttgaaagaataacttctaaaaatcaaagtttatctaaccactgaaacaaacattgacatcggccagattccactctcatatgacaatcaatgacagactttttcaatctgccaaaaactggactggaattgcaaacattcatttggccaccttggaggagaaactgaacaaatagcagcaaccccctcttccagaatgtgagagctccctccacctaagagctaaaagaagcaaatgcaaagtttttcactggttttagagaaataatgctttagatataagcaagcatcacctatagaattaggtgagccctgtgcccatgaatctagtcctttctacctctgatcacttgttcagtacagtcttatctgctaacttccctaaagtaatttatttaccaattacaatggaaaaacccaagacaatattctcagaagacttcagaacccaagttctcctcctttacacgctcagctactaagaaggctttcgtttccattaatccagtatttaactgaacaaatttttaagcccttatcaccaacataaaggtgcagtagaaagaaaatgagtataacacagttcccattaccatcaagcttatggttatgaagtgtgtatgggagagatgggagaaccatatcatatggtacactatgataagagtcacaggaccgcctgttcaggctcttcatctaaggagaaacatacgtgcagacagagcgacctacagtctgtgctacaacgacatcttccacgcatcctgagctcggtgttacttaccctacagtggaaatccaaatagtccaaatatcaaccagctgtttcagtgggtatgaaaaatgggacagataatccaaagcagccttactagtaattaactattgcttctacaatgtattatgattcatcaaagcttttaatcatttatattttgcttacactattaataaaactacaatatgccctgagaacatagtaaattctagagaaatgcctatttaagatt

SEQ ID NO: 267777 - DNA, 494 bp, Homo sapiens
tgcgtttaaagcgcagacactgacagcaagtcttccagtctctccagtataacttaagtgacatgccagcaagagatgcaatttggtccctcaacagtgttaaaaatctgttatttgaaagaataacttctaaaaatcaaagtttatctaaccactgaaacaaacattgacatcggccagattccactctcatatgacaatcaatgacagactttttcaatctgccaaaaactggactggaattgcaaacattcatttggccaccttggaggagaaactgaacaaatagcagcaaccccctcttccagaatgtgagagctccctccacctaagagctaaaagaagcaaatccttactagtaattaactattgcttctacaatgtattatgattcatcaaagcttttaatcatttatattttgcttacactattaataaaactacaatatgccctgagaacatagtaaattctagagaaatgcctatttaagatt

SEQ ID NO: 267778 - DNA, 860 bp, Homo sapiens
ttgtctcaatctcaaatgagtcaaatttagctaaataaaactcaccactaagcaaaataagggaggaaaaaacctctagaacagaaagaaaaatgaaaatggataaaaccttgctctttactgatgctaacgtacttcataaagtacagcgcttaacttcattgctaaaaaggctataatgaactctatttcgctttagtccttaggggaaaaatgtatttaaaccaaattcctacacaagaaagccatacggagacccacagagaacacagaactctgctgctctcagttcacagcagcaggagagtcctaccatcacaaacaccacaagtaaagttccatcttactgagcctcttactattcagccttgatctggctacttccaaacatgggactgatgatgcagaatagctagtttgacatttttcccactgaaaatttatttttgccggagactgattttctaaatctggagaaattgggggttggagataggagagaggttcagttcgtgaaattctatttatagtgatgcaataatgcaggtactattgcctttaaagcgcagacactgtgcgtttaaagcgcagacactgacagcaagtcttccagtctctccagtataacttaagtgacatgccagcaagagatgcaatttggtccctcaacagtgttaagtgagtagaaatcttaggaatcaaaaagaaaaggaataccatgtagactgaattccagcttactacttaccacttgtaagttcactgaagctgtgaaatttcagccaaacaatttcaaaagtagcatctccttgatgaaaaggaagcaaggaacttatggatgtcagaatgacaagagtctc

SEQ ID NO: 267779 - DNA, 677 bp, Homo sapiens
tttgtcttactgtatgtactgttagaagtcagttggtgctggaagggagacggagggctgtttgacccctctcccagaataaattatttagcagtagcagtatttttctcactccatgatcttggcttttgttggtttgcaactgtattttaaacgattgagtttcttgaagcgcagaacattattctacctattaacttttaaattaaaaggttgtttaaaatcttgatttccagctaagtaaggctgatagtaagcattgatttacatcttttttaatgatataagaaattacataaatataaaatatggctataaaattcttcgtctataaagtgaagaatgtagactaggtgatattttaaaagctgcattcagttctcaaaaatttttactcttaaaccagctttaaagggcgtttctaaaaaaaagcaaaataaagcctcctttgaataaataaaatggaaacagaagatttgtagtgctcttttgcgtttttatttataaatttaaatttattttataaattactgtactctctccaattgctagtaatgttttttctttaagagtgaggcatgaaaaaatcatttggacccactcaaacacaatgagcaagcatctctagtacctagattgtgccatttatcactaaataaccaaaaccaaaaaaaaca

SEQ ID NO: 267780 - DNA, 519 bp, Homo sapiens
catctaaaaaaaaaaaaagaagaagaagaagaagaagacattcctcacagatatagaaaaaaaattctgaaatttatatggaaacatcacaaagtcaaagctatgctgagtatataaaacaaaactggaggaattccattacctggttttaaattatactaattaaaacaacatgacactagcataaaaacagacataaagacagatagaacgaaatagagaccttagaaagatactcatacagttaaattaattttcaacaaaagtgccaagaacatacaataaaaaataagacagtttttgtaataaatagggctggtaaaactggcattctgtgtgagggacaaacattcagaccctcatagcagtgttctggaatcctatgtgagggacaaaccttcagaccacagcaggagtgttctggaatcccctgtgaggaacaaacattcagaccctcgtagcagtgttctgaaatcctatgtgacaaacgtttagaacccagcaacagtgttctggagt

SEQ ID NO: 267781 - DNA, 292 bp, Homo sapiens
tgaatgaccttgttggggttgactaagtcttttccagggaggtcaacatcacctcagctatttcaaaacagagctaaagttccagtccagggaatggctgattcttcaggtgtgtttctgtgtgcacaacttgttctttcaacaacctccccatgagtttctggaatgtgaagactacttttgtctgaagaaaccactggcctacatatttttgttatacacacatgaaaaaattgttacaagaggtactgctgtgacaagcaatataaagtcttggactgtttcctagtta

SEQ ID NO: 267782 - DNA, 552 bp, Homo sapiens
caatttggtaatatctattagaaaattttgcatattcataccttttgattcagcagttataattctggcatcttattctgtgcagacactcatactgcacgaaggtgtatctaattgaattttttggtgttattcataagagtgaaattttgaagttatccaggtacctatgagtaggggattggtgtacatcaataagatgaaattccttgtacctgccagaaagaatgaggttaatctatatgtactgatgtggaagagtatacaagatatcttgaatgggggaaaaaagcaaattgtataatacttttttatgttaatgattatttatatttttgttaaaacatatatatatgttagtatatgcatactaaaaaatgaggctataaataccaaacttgttaatattggttatctcagggagggatagtagattatgatggactttcactgtctccattatatatttctgtaatgtttaaatttttcacaaagagcctgcattatttttgtaagtagaaaaaaaataaagatggaagtctctccaattta

SEQ ID NO: 267783 - DNA, 428 bp, Homo sapiens
tggaagccccgcggtcatcctgggcaggcagagcccgtgccggcttctcctccgcggtggccgagtgcgggagtgcgccgagctctcccggcagtacagccaggttgttctggaggcattcccagcagcagcggccctgcgtcttcgccgccgcgcagctcgctctcgcctgggcccctgccgctgcagctgcgggcaccggcggcctctgtccgggactgcccttcgatccgccgcccttcccgggcgccctacgggagccgctgcccgggagtccattgcaagctgcgtcggcggctctggctgctgcacctgctggctcctcctccggctccttctcgcgccgccgccgcctgggctgctgctggggcggctccccccggcgcgcgcctcgcggggagcagggcgcagctccccctgcactgggg

SEQ ID NO: 267784 - DNA, 338 bp, Homo sapiens
atggttgtgtcacagactcctcggatacttgacatctcatgaagcatcctcacataaggccactggcagaaatcaagtgaagggaagacgaccaaacctccaccagtatagagaggcccctaacaggccttcctccactgaaataggatgaagtcctctagtggccagggggtgacaatacaactcctcttccaagtccttacacaggatgcccctccgttgctggcgacctctagttgggtttgtttttgtcaagcgtgtcaggagagaatgcagggctccttctatccccttgctgagactgaaagagtcaaaatacatttcctaagaccaagtat

SEQ ID NO: 267785 - DNA, 472 bp, Homo sapiens
agtgaaagatttagtggtcagacatttgtacaagattagtataatagttttaccatataaagcttataaattttaataggaaacactgtaaagaacatttgctatttttttattgatttgccaatgaatatattttccttgtggtcagaaacaaagtttacttctacttaagattttaaaaaaagagttttagttggctgggcacagtggctcatgcctataatcccagcattttggaaggctgagacgggcatattgcttcagcccagaagtttacgaccagcctgggcaacatggtgagaccctgtctctacagaaaataaaaaaattaggtgtggtagtacacgcatgcctgtgattccagctcctcaggaggctcaggcgggagaactgcttgagtccaggaggtcaaggctgccatgagccactgcattccagcctgaatgaaacagcaagaccctttctcaaaaaa

SEQ ID NO: 267786 - DNA, 246 bp, Homo sapiens
ttccagcgcctggttctaaacattaaatctagtccttactttttggaagtaactatcaagcaatcaattaatcaatcaggcattcagcattgaagcaccttagaaaatttttcattggataacaatgaataatgcatggccctccagtatattgactgtggtaaatggtctttaaggtaaggtgctgcaacaagtacctttaaataaaatcaaataaaaagtttaccacaatcataataaattgtt

SEQ ID NO: 267787 - DNA, 293 bp, Homo sapiens
taatgtataacccatttgttacctgcaactgaaagacaatgaaattgattattatccaggcatgactgtggcttatttaaatcagatactttctcttttcagctgctgaagatacttgcaatcacctgtggcttttgtattggtagatacatccaagaaaatattgacttgaaaaaaattgtgcttagagccctgatctggacattttaaattcacttaaattgttttaaaaattgtgatatattaatgaaatttttattttaaaactaattatgaacctttatctgatcctg

SEQ ID NO: 267788 - DNA, 659 bp, Homo sapiens
acatctcactttgttctcacatagtcctcatagaggtatcctgtggctgctgtccttgaagcctgatagcatggagctgaggcctcagactataacagggcacataattttcatgaagttcaagaagaggctgggctgggcgcggtggctcatgcctgtagtcctagcactttgggaggccaaggagggtagatcacctgaggtcaggaattcgagaccagcctggctgacgtggcaaaaccctgtctctactaaaaatacaaaaattatcctggcatggtggcaggtgcctataatcccagctactcgggaggctgaggcaggagaagcgcttgaatccggggggcagagcttccaatgagccaagattgcactatttcaccccagcctggacaaaagaggaaaactacgtcttaaaaaaaaaaaaaaaaattaggctgggacacctttcctggaagggctacttactacaggggagctgtctaaggtgctgaaatgtcctagccctgcgctgtccaatatggtagttatgattaaattcaaataaaattacaagttccatgtcccagtcacaccagctatgtttccagtactcaggagctacctgacactgatggtgccatattggacagcacaactccagaacttttccatcctca

SEQ ID NO: 267789 - DNA, 344 bp, Homo sapiens
ggttggatcatgggagtgaatttctcatgaatggtttagtaccttcctcttggtactgttctcgcaatagtgagttctcgcgagatctggtcgtttaaatgtgtgtggcacctccctgaccctcctgcttttgctctggccatgtaagacgcaccagctcccctttcaccttctgccaagattgaaggtttcctgaggccgccccgaaggttcccatacagcctgcagaaccatgagccaatttaacctcttttccttataaattacccagtctcaggtatttctctatggcaatgtgagaatagactcatacaactatatattacagaatgaattgtgatact

SEQ ID NO: 267790 - DNA, 421 bp, Homo sapiens
ccgcgcctggcccctttaagctgaattttaaaggaacttagaatctcattctcttacatttttataaccaagaaatgaaccctgacggtaaagactattaatatactaattattcccagcattatacacttcatgtgaaaggcagatgaagaaaatgaagaacctgtcttctgttcaactaaaagggaaatttagctttacttagttgtatctgtaattgtccttttgtttttaagaatataagaatataaagaatataaataattgcaataaaacaacataagaagttgaccaatggaacaagaatagtatagcacttagtaagatgtacagatactattttaagtaccttgttttaaagttaagtaatgacagcctccagttaataaaccagaaataaactctaaccattatttcttgg

SEQ ID NO: 267791 - DNA, 436 bp, Homo sapiens
atatactctctcactcattgaaaatatgcatttttgcaacctttcagaaaatctatttgacaccatataagaggaatcttaaaacatgtaatcctgttgattcaataatgccaatgattccatgtatagcaacatattttaaacaaataatcacagatgcagatgcctaataaaaatattatttgcttatatatgttagagttttaatgtggcactaacctaaatacccaattggggaatagattaacaaattatgcaataatcacaagatgtaataccctacaacaaataaaaatgtgctctgaaagtttatttaacaatataaattatttgattatacacctaccctatgactctgccactcagccattctactcctaggcatttacccaagagaaatgaaagcatatctttacataaagacttctatagaact

SEQ ID NO: 267792 - DNA, 461 bp, Homo sapiens
taatcaaaatgaaccaactagagagacatgtttacaagaaatgtatataacaaagaaaataaacaaatttgagctgattagataatactcacaagtgtaagaggatctatccatagtgaaaaacattcattttaattccatttatataaagttttcaaaaatatatctttaatacattgcaatttattacattggtgacaaaactctaaagtgaaacatatgagtgactattacaacaatatggatagtagggaggaggaaaacaagaggagaatgggatcaacagaaggcatatatggggagtgtctggatggctggaaaattctattttttgaccaagatgtggtaaacacggggagtaaagttataactttttctcttactgtgcttttaggttttgttgctttctgtctgtatgctatgttccacaataataaaaatatttaaaaggcaaaaaaaaa

SEQ ID NO: 267793 - DNA, 248 bp, Homo sapiens
aaagggagggagaccaccgctctgtaaaactatgccatctcccaattgtcttttcatggacgatgccatatggtttcagcaagtagctcctccctgtcagcatctaactctactcatggaaaactcatctctcaatgcccaactaaatacacagtagtacatgcctggtaactctgtcaaattgggctcattttttctgattgtgaccctagatatgatgataaagtgatgaatgatatttttgtaaa

SEQ ID NO: 267794 - DNA, 433 bp, Homo sapiens
ttcaggcatcccctgggggtcttcaactatatcccctgtggataaggagggactactgtatattttgttaagtttatccacaagtgtttcatattttttgatgctattgtaaatggtgtttgtggcaaccagcctccagattgtcccccagtgatccttccctcctggtattcatacccttgtacagtccctcctatcccccacatggtaccagggttggtctgtgtgaccaggagaatatagcagaagtgatagaatgctacttctgagactaggtggtactaaaagacataaaagacatcatgtcttctttgctcttgtttgaattgcctgttctagaggacactgggagcagctctattggaaggtctatgtggaactagattttcctcaacgaggaaactagaactttcctcaacgaggaactgaggtc

SEQ ID NO: 267795 - DNA, 198 bp, Homo sapiens
ctctgtgattgtgattacgccaccttccctgtgtggacttgaggtttctcacttatccatagcgaggaccaaaccagataaaccttagtactctattgtgctcaaagagcttaggagtctcaattgttggccgcacagggcttgtgctcttgggtcagcctgatggaagtccaacttgccttctgccatcagaggcca

SEQ ID NO: 267796 - DNA, 383 bp, Homo sapiens
gagccgatttttccagcctcatttaaattgctcctcccctttcacctatttgttcagggaaagaaggctcaaaaaatatgtctcagtgcctccccatattatcatgagaccagtagaaatgagctaagattttagcatttgtgtaaaacaaggactcaaacttgaaagcttgagaggaaaggaacttgttgacattcttctcaagcaaacatgggcagcaaaatctaaatatcaagacaccgctgaagaaagagagaaatattcggatctgtagatcccaatcatcatttccagcttgtgtatattcaaagtgattcatttattctttagtaaatggaagatttatgaaggttactgaatgtgaagtagagtagtttattcac

SEQ ID NO: 267797 - DNA, 618 bp, Homo sapiens
  misc_feature (5)..(5): n is a, c, g, or t
  misc_feature (21)..(21): n is a, c, g, or t
taggnatttgcctcgggccangattcggccgaggtcctgaatgcattaaatatacgtacatactagtctattttaccatttacaaccatgaaatacatacaaatctattataagaagttaaaatctatcaaaacttacacaaacccagactgtatgtggtgtcattctctgtcaagagaaacgcaaatgtaaagatgcagtattgaatcataattgcatgaaactaactgtagtccattcagtgctactgtaaaatttcctggtcactgctcgttcctactgtagtgagcccaagtgtttcaagtgcccaattaaaatgctgtgtgacaccgatcacctctgtggcaccagctcattcctccagtcagttgcatagcctagtgaaacgtgatctctggtatttttcaacgtgtttggtgcaatactgtaaacctcgagtagcactgcaggacccatacacaatgccactggtgatgctggaagtctcccaagaagcagagaaaagttacggcattagaagaaaaggctgagttccttgatatgtcttatagatttcagtctgcagctgcagttgcccaccatttcaagataaatgaatccagtgtaagaactgttgtt

SEQ ID NO: 267798 - DNA, 650 bp, Homo sapiens
tgaaggcaagtcatggagtttttcacattatgggtgtggtcaggcaaagggagagtgagaggctgccgagaagaaagcaggaagagcccagcagagagaggagcagcaagaagaaccaatgagagctggaacggttccaatatgggacagggaaccagggataatgaccacagcaactccttccagcaatacccagcacttaacatacacagcgcttccgacagaactttctggtgcaatggaaatgttgcgtgcctgcactcatccaataagatagctactaagcgcttcaaatgaggctagtaccatcaagaaactgaattttttgccgggcatggtgcagcgcgcggagctgctgcaggtgctgcagagcctggaggccgtgctcatccagaccgtgtacaacaccaagatggctagcgtgggacttagcgacatcgccatggataccaccgtcacccatgccaccagccatggccgtgcccacagtgtggaggagtgcaggtgcccgagccggcagggctgggaaccacagagaccctagcaaggatagaggagaaacggcagggcctcaccgtccttgcagcgactcttttggtcctgtccccacagatgccccattggctattctggctttgtcctgcgagagc

SEQ ID NO: 267799 - DNA, 650 bp, Homo sapiens
ggctcggtccgccttaggtggtatacattatgggtgtggtcaggcaaagggagagtgagaggctgccgagaagaaagcaggaagagcccagcagagagaggagcagcaagaagaaccaatgagagctggaacggttccaatatgggacagggaaccagggataatgaccacagcaactccttccagcaatacccagcacttaacatacacagcgcttccgacagaactttctggtgcaatggaaatgttgcgtgcctgcactcatccaataagatagctactaagcgcttcaaatgaggctagtaccatcaagaaactgaattttttgccgggcatggtgcagcgcgcggagctgctgcaggtgctgcagagcctggaggccgtgctcatccagaccgtgtacaacaccaagatggctagcgtgggacttagcgacatcgccatggataccaccgtcacccatgccaccagccatggccgtgcccacagtgtggaggagtgcaggtgcccgagccggcagggctgggaaccacagagaccctagcaaggatagaggagaaacggcagggcctcaccgtccttgcagcgactcttttggtcctgtccccacagatgccccattggctattctggctttgtcctgcgagagc

SEQ ID NO: 267800 - DNA, 347 bp, Homo sapiens
tggcaatttctattgctgttctcaggcttcaaaactggcagatacgggaaaaaaacgttaatacagagagttagacctaccatacccttgactgaaatgaacatcatatagcaggacttacatacagacacaagtaaggaaatactgatggccaacaccatagaagtaatctttgcatactcttttaatgaatagtcttacaattcaaaagaatggaaactcaattactattacagggttttatcattagatattcatggtagcctctaatcttgttttctttcatccctgagattcccaactattacattaaacaaagctcaattacctttctgataatcattttt

SEQ ID NO: 267801 - DNA, 462 bp, Homo sapiens
tataataagctgtgtatatgtgtgtttaccctttttaaaaacccaaagtcttccaatcaatgatggagaatgtttctagtttgatgtattggctatctactgctagataacaaattaccccaaacttgggtgacttacaacaacagcactattatctcatggtttttgagggccaggaattggcactgcttggcgccagctgcatcacaaggcagcagtcaaggtgttgtctgggactgcagtcatctcaaggctggaccagggaaagatccacctgacctcactcacgcagttggtggcaggatgcagttctttgcaagttgatgggtttagggctttagtttctcaagagctgttgctcagaggccttccctggtttttcaccatgtatgcctctccacagggcaggttccagcacggcatcttgcttcatcagagtgagcaagtgagagggcgagagag

SEQ ID NO: 267802 - DNA, 445 bp, Homo sapiens
gctctgtttcttttttgtcactactaattgacaagttttgtcaaactctgattttggtgtacactttgcttcaaaaagggagatgggaggaaaaagtaaaccatctattaacaacacctttttttgctaaagatatcctttcagctcttgaatgtgggatatgatcagtttcctgttaatgggtaaagaagcctgctgaattaattgggttatcatggataaatggaaggaatatatgacaccatttctctgctcaaaaccctctgattgcttcctgtctaaagataatgaaatccagtcttcaccgcaatctataagacaaaatacaatcatatccctgacttcttctccagttcattcctaaccatactttcttgaacactcttctctggctttattagcccaattgctgtttcttgaatacatcaaatatgatattgtcaca

SEQ ID NO: 267803 - DNA, 415 bp, Homo sapiens
ctcccacaaagattactccttaagagataaattcttccagaaagtggtaatagaggaaacagttcccactcaattcatatggcctgcatgattgtaatccctgaacccaacaagaatgtgaagagaaaggaaaattgcaggctgatctctcttacaaacaaaggcataaaatccccaataacatattagcaacctgaatccagcaatttataaaacagggataacagatcataactaaattgaacttattccaagaatgcaaagttggttgaatattgaaaaatcaaagtatattgccatattaaacagataaataatttttaattatataaaatcattttaataaaggcagaaaagtatttgataaagttccagctattcattgagaaataaaaataaaatcctaagccccaca

SEQ ID NO: 267804 - DNA, 1126 bp, Homo sapiens
attatattatttttaattttttaatgtgttttttaaccaagtaggaatttgggtgtatggataagaggccaatctgcttctgtaggctatagaagaaaaccagttgtattttatggtcataatttgtccccctattattttggagatttaaatttaagtaaagtagccatcagtattttaattgaaaaatactaaagccacataactgagtaggatgtcgtatgatactttcaacaaattccctaatgctgcctaagcatatggatgttttaattctttgctgttataaacagatatctaatacgccagaattactgatggtaaaattgaagttgtgtaacttgtgaatttttttatcaatgttttaaatattatttaaatcttaaaatcatttaaagacttatgttgccactgggtggcagccatggcttctcccactaagcaacagaagtgaccaaatataattaagacaaattttcatctctattacatctgcttttaaaacattttagttcatattctattatttttctaactcagtactcctttgttgagggtaattattagtagttaagtttttaatggaaataaaaatcatgtatgcttatctttgctgtaaaatcaaatgaatataaattgaggaaaactttaaattgttgtaggatgactagtagtaaacatcatcttaatttttaacataaaaaaaaaaaaaaaaaaaaaaaaaaaaaaaaaaaaaaaaaaaaaaaaaaaaaaaaaaaaaaaaaaaaaaaaaaaaaaaaatgtggggggggcgacggccagccgcagaagaagttgttaaaaaacacaagctggtgggggggcggggcgcacaagagagagagaacgaaaaccgaggagaacagaagacgggctgcctctacacgagagaaacacactgcgcgggtatgaaagaacgggggcgggagtagcaccaccaaccaaaaaatagaaaaccggcggcggggaaaaaacacgacaaggtggttttcgtaaaaacaaacaccaacgaaggagagtcatgaggcggggtcaacaacgagggggagctactacacaaggggggggtagtacacgggagcgacgcaaaataaatagaatagcccgg

SEQ ID NO: 267805 - DNA, 393 bp, Homo sapiens
agcagctctttactcagtgctaacactgggtcatcaaatgatcaccacagtagagggctgttgtaaaatgctagatctgaagttcttctaaaataaatcctcagaaaatatgacctcattatttcctgaacttcagagctctttgtctgcttcgtagaggtagaaagaaggttattaaagcagtagcagagagaaaatgaatcattcaaaaaatatatgcccccactctatccttcagccgtgatgcctggccctttacatccctgggccactgtttattgttgttttctgtacatccctggggttggatcaggacagcaagacaacagtacctactaatacatcatcttgtcaggaactgccacatttgtctgtagttaatttttaaaatac

SEQ ID NO: 267806 - DNA, 579 bp, Homo sapiens
catattctggacataagctttttatcagatatatattttgcaactattttctcccagtctgtggcttatcattttctgaaatgcttaatgccattttaaatggactcttaagatgatctcagtatcatcaatgtgaccagtacaatgtatgtcccaaatcctgaagaggccaatgtaaaaatgctgtctcctcactataacggcagtgttaaaaaacatagtgctagattccaaaaaatcaactctagaaagacatctttgagacagttggagaaatctgaatttgggcaggctattacaggatttgctgttagttttgttagatatgataatggcatggtgattatacatattttaaaatgtcctcataagttatacactgaaatatttatggacaaaaaatccaagatgtctagacttctttaaaatgtttcagaaaatatagtatggggatagatgaaacaagataggcaaaattgttaaagctggctgatagatatatggtagctcattatactgttctttctacttgtgtgtatatttgacaatttcaataataaaaacatttaaaaagtagta

SEQ ID NO: 267807 - DNA, 903 bp, Homo sapiens
attcctctatttatttcttttttgctcctttttagtaagtacagcccttattaatttgtgcttttcaatgaaaaattattatgttatatgctttggataaatactactgcactgtaagtgcacacatctgcatcattattgccaaaaaagaatgctctgctgaggaatgtactggggtcttgaacatgaacattttcttcatggcagcagagggagcacaagagtgcttaataaaaccagtgcacaggtctctccaaatcatgacagattttacattgtagtatatgttttcattggaagtagcctgttatgtagttcaaaatgaagcaaatcaactgagcaaacacagataggcttaccaggtcataacaactatgtaactgaacagattgaaagttgaataaaataaagataaacttctttagagttttaggcttgaattcttaaaagaaagtggacctcaaaagtgaaaaagatgccttagctttgctcaaaaacaaagataacacaacacagaatcaggcaaccctaagatgccttagctttactcaaaaacaaagataacacagaatcaggcaaccctaatagtagctcctgtttatctaaaaacagagtcagttcactggaccctacatcaggtaacttaatttcatttggtgtcatacatgttggttaaggtccatgcgccttttgctgtgtttacactcagaataattttaggggtttctccttaatgcttgcagtggtgaggatttaggtttcagttatacctacgtagtatttcatacttttcactactcttccatattgcatcctcaaaaactcccttgaagcagataacatacttggtaaaagccaagtatccaaaaagttatggaaccacatcgtgctttcataacattg

SEQ ID NO: 267808 - DNA, 164 bp, Homo sapiens
agatgtttaaaaataataataataattttttaaaagcctcgcgtctcgatttccaaatgggtctctgacaactttgtccgtctctaggatctgctctccaggaccacgcgtttcggatttattgtccgccaacagtgtatttttaatacaagaaatgaagtctt

SEQ ID NO: 267809 - DNA, 482 bp, Homo sapiens
attaatgcagaaaggatggacttgaacaacactaaggaccaaatggccttaacagacatctgtaaaacatttcatccaacagcaactgagtatactttcttctcaagtgcacatgaaacattctccagaatagatcacgttaggtcaaaaaataagtgaacaaatttaagaaaatcaacatcatactaagtacctttttcaaacacaatggaatgaaattaaaattcaataaccatgagaaaacaaatacaaatatgtggaaactgattaacacattcttgaacaaacaccagtcaaagagaaaatcaaaagtgaatttttgaaatatctcaagatgagtaaaaacaagaccacaacctactaaaatttatgggatacagcaaatgcatgaataaaaggaaactttatagcaataattgcctacattaagcaacaagagagatttcgaatgaaaaaatctcactttacagctcaagaaactg

SEQ ID NO: 267810 - DNA, 351 bp, Homo sapiens
ctactcaggaggctgaggcaggagaattgcttgaacctgggaggcagaggttgcagtgagccaagattgcgccgctgcactctggcctgggcgacagagtgagactgtctcaaaaaaaccaaaaaacaaaaaaaaccctgaaaacatgcttggagtatagcaatgaacaagagattgagctgaaaaaatgagtaaaaagctattagctgggtgtggtggcgcgcctgtgatcccagctactcgggagactgaggcaggagaatcgcttgaacccaagaggcagagattgcagtgagccgagatcgagccactgctctccagcctgggcgtcagagccagactcaaaaaaaa

SEQ ID NO: 267811 - DNA, 409 bp, Homo sapiens
ttcctttttttgtcctatcagagtgcccttttttcaatcctccctgccattggctacttttaggatcctgttgcttggtgtattttagagcgattggtgcattttacaatcctcttgctagctacagagcgctgattgctgtggttttacagtgcactgtttggtgcattttacaatccccttgctagctacagaaacgttctccaagtccccactcgattcagaaagtatagctcgcttcatctctcaatgtaatataactgggtgtgattgcttgaatatcctgaccttaaattctatatgcacctgatttgtgaatgtgctgtgacattctttttacttttaattgttgtgaccagtgtcaagccagaaataaccatggcatgttaactgatgagttcaatgatct

SEQ ID NO: 267812 - DNA, 867 bp, Homo sapiens
tgtctgcgatcctggtctgggcttcccaggcccctgtatctgctgccttcaaaaccctgcatgcgggtctcttgtgtctcccccacccccccccatctcccagctcagtgagaatcatctttcacagtttgatcacatcactcccagctctgcttatctctcctggcttcccttctcaaagccaaacagctagctctgcccccagggcccttctcctgacccctggctcctgacagcctactccccaacccctgctcatcacttcccaggaatttgctttaagcaagggacctgcctgtgcactggcctccactcagcacgagtctgagagagtccaagtagaaaacaggacacttagctaccatctactcccaacctctctcctggggaggactcaccctaaaggtaagctggctgagtccatcagaatttgctcccatgactcgagtaaccgggagctcatgcacacctgtacggaagaaaagcagacagaggacaaggcttgcagacgaaaagtgtacatccaaacccatctctcccagctaccagctgtgccatactgggcaagcgatgggtcttctctggggctcagaccttccgtctggaaaatgaggctaatgagtcctacctcatagccatcaacgacatcaggaacatcatcatcatcatccctggacaatttcagtgtgaaaggaacgtggtattgcagctagtaagacctgaattggaatcccagctccagaacttggggaaatgagtcaacttctctgaccttcactttccccatctataaagtagggatagaaaggtctccctcaaagggtgactgtctagattgaataagatgacacatgtaaaaatggcttt

SEQ ID NO: 267813 - DNA, 530 bp, Homo sapiens
cctttaagaaaggcatggtttcataaaatacaacccggctacatataaattctagcggaagattttatggcacctcttaaaggccaggtagaagagaggcaaccgaaagttactcagtagaacagtacagtcctcatttcttcaaggcagacagccttaaccacctagaggctgatggcctggggagtacttttcaagttctgaagcagatttgtcaaagtagccaaaatggcatttccctcctgaagattcttcactacctcgattcttatgaaatagtctaaggaagttctaaagaaataagacaagtgaattctattttcgttaccagagaaatacaatcgtactagacggggctgtaatctggtaactgtatgtattttagttcttcagtccctgggaaggagacaggagaaggtgggagggaggaaggggccagctgaaatggaaacagatccctgatccggggcggtcagtggaacccttcttggtgtgcgagagcctgtgcatttcagaggcagcaaaaaagt

SEQ ID NO: 267814 - DNA, 915 bp, Homo sapiens
tcactgcagccttgacctcctggacccaagtggttctctcaaggaatctacttagtccgtcaagtagagctgggaccaccagcatctgccaccacacccagctaattaaaataaacttttttttgtagagacaaggttttgctgtgttgcctagactggtctcaaattcctgggctcaagcaatcctcctgccttggcctcccaaagtgaagaaattataggcatgagccaccatacctggccacccagctttttcttgattcatccaagttagggctgctaggaagatgaagaaccaacattaggaggctggaatatcttaagtactagccgtggactgttgctggcattctttgatctgtggctgctgtggctaggcttcaggtgggacccaaaacctgtagtctaaaatccattaattatttcattttacttttatttctttaaaaaaaaattatttattttgaatagagatgggatgtcgcgatgttgcccagcctattattttctttttcaggcaagccagtttctgtactaaaagggtcacatttacacgttatgggcaggaagaatatagggtgaaggacacccttcttttctttttatcaagaaaacaatagctttcctggaagctctacccattagacttctaattatgtctcactgagtgggacatggccactcttattttcaagagagtctaggtggtaaatagatttgtctgggcaccttgctgccctaaacaaaatcaagattctgaatgaaaattggttaggcaactagcggtgtctgccataggaactagctttattttcttctagttgtatactcaattatgctagcaccataaaataaataaagtaaaaaataaattaataaaataataaaataaataaaataaaatataaataaata

SEQ ID NO: 267815 - DNA, 2389 bp, Homo sapiens
tggggagtaagagaccatcgcaagccagggatggggtggcgcacactgtgatctcagccagtctggaggctggggctgggcggtgggggggtgcgggtcgcttgtgtctcagagctggagctgtggtgtgcgaggccgaggtccgcgcctataaatggccgctgcgctctggcccgggcaacactgagactccgactctggaaaacaacaaaacttaaaagacgaacacagatggaagtttgggagcctggtatgcggtaagcactccgcaggtgtcagccgccagcccgcagtcccggacaggtcaggggaaggcccgcggtatgcagcaggctgccggcttcagtcactgcctggtggaaaacaagcctgtctttggggccagccagctaacaagtgagcccttcaccccatctgaaggcgaagcacccaaaggggcaaccgtggacggctaaataaaaatcaagactcctgggacgccttctcgggacacattcttaaagagatacgtgcctgaggacgttgtgtgtatttctgtgtaacaggccaccccaaacctcagagggcgaaaacctctcttcactgctcatgactctgtgggcctgcagcttaagccggttcagctgggacggcttgcctcggctccatggggtgtctgctgggcccacttacaggcaggcgccccgggcagatccgggccacatgtcacccacccaccgcaggctggccgggcctccctcccgtggtggctgggctccgtcggcagcaagaaaaagcaaatccccatggtgcttccctccatctccccaggagggtgagatggccggggcctgagtggacgtgaggcaccgcacaggggacgggcacggcaagcatggttcatcggggctgtcactgcagaagtcttccacaggccttcgctgaggtgcgggttggtgtggggaatacaagggaactccccagaatggaggctgcttgtgcaagtttcaacttgtcctttttctccctccagagcagcagagagcggatggcgcccaaggccgggaccctctgctgctcccacaggcctctcaggcggctctgcaggaccagccagcagcctctgatgctcccttcctattccatggcttcaggtgccatcctctccacagagacggtttctattgtgacgctctccctgacttggaagaatggcactgggaacattccccttggtgctgatgtcggggaggaaagcagtttccagtcgcctggggccaggacatggcgttcccagctgttgtagagcatgaagcaccaggatgcccattcgggtgcctgctgagatcaggctctttgagaaggaatcctgtggtcgcctgaggaagtccaaaaaaatttcgaggacatctcagccatccatcccctgttcactgtggaggttgaacaccggggctcctggaggggggccctgggtctccacagaagtgctggcagccaccatccacttcctggccttccgtgcccgctccacctctgttctgttgtttactgtctcctttgtgggaattatggaataaacaatcactctggtgtcctggaaaataaacctgatgctggagggcttgagtgtaggaatccagctgggctcccactgtctgccccagggtgcggagttaggctttgcataagcatgtgagatgccaaccgctatgaaatgtggtctacacagcaccaaaaatccatttcccacgttttcccttcagtgcagttaaatggcatgaccctgtgactgtctcccacgagaagaactaaaaattacgctggtcctgccaatgcctacaggatacggtggcacaaaatgatttccacggtcttaggatatagacccaggccgactcgagagattaagtggatttcaaactgtggtcttgagccttctgggaactgcccgaaaggaggggaaggcgccagcctcggagtggtccagctgcccggcctgttcacacactggcctttcagttgaagacagtgttcaaagcttacccgtgtaaatgccactgatctgtgaacccccttcctgtcatgcccagggcctggcagactgtggctagaacggtgggatcagagcagtgggtcacgtgacctgcgcacgggtgtgctggcctccctgggccgcggtggccaggacagccttcctttccctttccagccacacagggcaatccgtgtgctcagatttctgtctcatcaattacagagcgagctgccaacctgctgtgctgagactgtggcctggtcttggtcctggtgtcctagggctgatgactgaccacagcctttgtgcttttgaagcctatttgactatagtccttgtgtgcaactaaaaatgtagctttaaacaatcttg

SEQ ID NO: 267816 - DNA, 503 bp, Homo sapiens
ataagcctttaggatttaatggcaggaaagtcactcagggaggacctacctcaaggagaagctcaaagcattttgcttcagctcatcaaacagagctctggagcattgcgaaaacgattttaaaaatggcaagacaaaaaaagtagaaaactatggaataatgttttgcttcaggtgtagctaatccaaactgccacaaaggaaaattggggcactggtggtgtgggatgagagggttcagtagtcaggagacaatcttttgttgaaatgatcttttatattgcttgaattcttaccatgcatatatgaccttttcagaaatgttgttcttactacaaactaaaacaaaatcttgttagaaattgatgtctaggcatggtggctcatgcctgtaatcccagcattttgggaagctgaggaggtggatcacctgaggtcaggaatttgagaccagcctggccaacacggtgaaaccccttctctactaataatacaaaaaaaaa

SEQ ID NO: 267817 - DNA, 828 bp, Homo sapiens
aagtacagaaacgtgggttgaaactgcagctcttttttctgcaactggtcaagctgatatttatgacttcatccctcacaagtcattctaggtttccccttggccttcagccagcacctcagctggttatggaggctcaggagtctgagtccttggagagcccttttagggtggggttttggaggtttgccattaacctttgctgtgctccgacgggcaccacctaaggaggtattttaggagcacgattgggtcctaatcatcttcctttctgttgctattgcatagcagcgaccctaatttgccttttagtcagaattaatctctgcacagaaagggacacttacccggtgctcaaagccccctgctggtgtgttggagcaacctgctactgcagtgtcttgtggacttgaggcgtgctctaccaggaaagcccacaggccccaagacctgtactcctggggccctgagcagctgcgacttggacctgggatgtcaactaagcccatcatacactcgtgcccagtactttaaggctggagggagaaagtcagagaagtgggggtcctgaatcatttgtccccgtgctgctgtggtgattatgttggtggcagcaggggcggcagcagtggtggtatggggcggcagtgatgtgggttccgtgctgacagtgctggcggccaatagctcctatggcaggatgtggctgtgtccttggctgcccagttcccttgctcctgccagtttctgattctccagcctctctgacaattccccaagctcctctatagctttccaataaaacttttctgattcaattaaaaaaaa

SEQ ID NO: 267818 - DNA, 296 bp, Homo sapiens
aaaaaaagaacagcaactgtaaatccagtggtcaaggatggcctccctgggaaggtgacatttctgctgagacctgaaggaatccaagaagagaagcaggtgaagagcttccaggtggacagggagaacagagagccaggagggaatgggccaagcacgcccacccaacatgacaaagtggctgcaggagcatggcacgagtgatgcaaacagcaggtgctcaataaatgtttgttgccctggacatctgcacaaggacagcgtgggcttgggaggccccacccatgcttattgct

SEQ ID NO: 267819 - DNA, 503 bp, Homo sapiens
ctcttctcctctccctacaccttacaaccacattactaaatgctcatttacaacagttccttttacctagtacatcatgtccaagctatcaagaaaaaaattacagggcataataaaaggtaaaaaacaagcaccaggaccagatacagcagggatttggaattatcaaacttggaatctaaaacaactatgattaatatgctaagggccctaacgaactgagtaaacaacatgttaaaaaagtagagatgaaaatcctaagaaccaaaaggaagtgctagagataaaacacaaacaaaaacaaaaaacagaacactgtaagagaaatgaagaatgcctttgatgggcttattagtaggctgggcatggatgaagaatctctgagcttgaaaatatgccaaaaaactacatctgggcataaaacgttgtaattacagaaattcaaggataagaaaaaaatccgaagtaagccagagggaaaaaatcaccttacctgtagagga

SEQ ID NO: 267820 - DNA, 451 bp, Homo sapiens
tgcatcctggttccagaccatggaggtgtcctacagctgaggatagggcaacatcacttaatagaccccacccttaagtctcagagacacagtgcctacctaagattaaagctgaatcacaacagaaaatgccatcccttctaccaccaccaaaatatcaaatgctgagtcaataagaacagcaatctactgctaaaagaaggataaaaacatggagaaagacccctctctgaggtacaggaatgaagggaaggcctaaaggtaagagtggtgcaaacattgagaaaatctcctttagcaaaccatcccacacactaaacttaaggtaatactagaagaatttgaagcctgtggataaccatagcaacaaaaacacctaaacacagtttaactcctgattagatcaactcaagccttcacaataaagatctaccgaaagaaaaagtaaaaa

SEQ ID NO: 267821 - DNA, 530 bp, Homo sapiens
tggtataaaatacatctaaaatctaaaatataataacttgtaaaatttgttttataaactatacattgtctgttaaaatgcaacatcttctcatgctggctggtaaattgcagtcataattttaggcacactttcttgctactttttcaatagaaaagatatgacaataaggtcactaatttccttaaagttatgaaatgtgaggcaatactgtattatgatcagacataccaaatttactagtttaatgacagaaactgccttgttttcttagttgtaaatggttaagttacctacgtttctcaggacacagaagcctacagataaacacaggatcatgaaatcattctctagctctgcttttctttcttcaggaactaaaaccctttcaaaattctcctgaaatatcagagagcttgcatggtgtcacattctcagctaatcagtaaattagacccctcagctaaactatggcaatgaacatttccaacttcctcaattttggtcccatgtgataccatgaccactag

SEQ ID NO: 267822 - DNA, 665 bp, Homo sapiens
aatatattgggttggcattctatcatgtatgaacgcttttgagactagcagtaccctcatttctttccccatttctgagctaatttagaaggcttatgctcttaacatgtagataataatacattataataaaattgtttttctctattatcatatgtattttatttgaaggatttagaacattattctgagtagaggcctacaggttttagcagactgctaaaagagtctgtaaaacaaattaacaaaaagttaagaacctctgctagacaatgtctctttagaagtaagcttatgaaatggctactgtacatatccttatgcagagatcaaagtcatttacatgttgcattgaattcagtctttgtcttggctcaatgaagatcataactttatatgtgatgtgataaatatattattttctttctttcaggatttgcagcactgagcctttcaacatatatagccatatcaatggaaattatgtcttgagtttaaacacccaggccaataatgttgcatatcttggccctgatttgttccatttttatgtagggtcttccctttcttagggtctggcaagccaagcctaggcccttcaagactagtctcctagctacataatgccactgcatcattttatctagcactcatgggtgtcatta

SEQ ID NO: 267823 - DNA, 214 bp, Homo sapiens
tacgtgcctccacacctgaataatttttgtatttttagtagaaacagagtttcaccatgttagccagtctggcctcgaactcctggcctcaggtgatctgcctgcctcggcttccccaagtgttgggattacaggtgtgagccactgtgcccgacctatattctatatattcttaaatcacatattgcagatgattgtcggtttgaataatatg

SEQ ID NO: 267824 - DNA, 461 bp, Homo sapiens
acttgcctggtctgacagcccacgcacgacagccccaggacagtgggtctaggccttgccggtggtgctaggagacagagtcctgagatcttcatttcctttctaggctctccattcttgaccctttcaagaacccatggtttctccaggggactaacaccctcttgtttactccaggcctttcagtggggaacggagaggggcaggagctcgccgctgtgcctgaaagccctaaacgcagtgtctccttagtttaatcttcgtgaccaaccacgcaatgggcaagccttcaccaccgttttacagatgaacaaacagaggctcacagaggccgaggcacttgtccacagccacagggtcagtatgtgggagagctcagactagaacctaggattgtccagctataaagcctgtgctgttttttaaacctcaaataaagagacttgagtgaatcacattca

SEQ ID NO: 267825 - DNA, 310 bp, Homo sapiens
gaaggtctcagacacgtcaggtggccttctgcacacacacctcactgtctccacttcagagagggctccctcctctcctcttaacccttcagaccagggcagataactgtccctgccatcactagcccctgggggtggtgccatcccttgtggtttccctgtacttcaactatgcatttataaactgcccctttataaaatattccattaatgattaaatttcagtgagtcatctatgggctgctgcaaatcttacttaaacatgacccaaggaagtggccccaaacaatgctagtattccaagatttcc

SEQ ID NO: 267826 - DNA, 402 bp, Homo sapiens
aaaatacctgctctacagactttattggattattataaacacaaaaggggtacatgaaggttaagtgaagacgcaataaggcttgttggccctggagcccaattctatgggtttgtatcaagtcaccaaccatcttcctttttgtttcttttttaatgagacagtgtcttgctctgtcactcaggctggagtgcagtagtacagtcacagctcattgtagccttgaactctggggctcaagtggtcctcccacctcagcctcctgagtagctgggactataggcatatatcaccgtgtctggctaattttttctatttttttgtagagatggagttttgctatgttgccaaagctcgtctcaaactcctaaaatcaagtgatcctcccaccttggccttgca

SEQ ID NO: 267827 - DNA, 455 bp, Homo sapiens
agcaaacacttgcagtggccgtggaaagcctcccgtttcctctggaccctcagcctctccctcgcagggcaccgggctctctccctcggggacaatgaggcgagagaggcttttgtttattcttcaggagtctctgagagttcacagtcatgttaaaaattaacctggggccaggcgcggtggctcatgcctgtaatcccagcactctgggaggccaaggcacaggcgggtcacctgaggtcaggagttcaagaccagcttggccaacatggagaaaccccatctctactaaaaatacaaaaatgagtcgggtgtagtgatgggtgcctgtagtcccagctactcaggaggctgaggcaggagactcacttgaacccgggaggcggagtttgcagtgaaccgaggtcgtgccaccgtactccagcctgggtgacagagtgagactctgtctcaaa

SEQ ID NO: 267828 - DNA, 440 bp, Homo sapiens
ttctagaagtctaattagattgttggtgtcatggtggtgagataatttagtggcaactgaaagcaactgtgttaatgagaagggggcactgtgcattgggttttctgtaattaatggagagtttttgaaaaacttcttggttccaataaagttggcatagtgagcccagctgcaggagtagggggtggcagggcaaaatctttcccattcattgctgcagaaatggtctcaggcaatgcagaagaactatgtaatgactgtcattaagaatgatcttgagtggtccaggcaggctgtagtcagtctaagacagcagagagacagagaagaggcatggagagaaaggaggcagggacagagaatagagtaaagattgtgagacaggtgtgacaaagacagagagagagagagagagatcactcacctgtctgctctctcca

SEQ ID NO: 267829 - DNA, 428 bp, Homo sapiens
acaatatttgttccttaccatatttgcataattgtcttataaaagtttctttggtttttaaatgtttgagagaaactaactggacatgttagaatttgtgtattagtgttggaggcaacattaatcaaagttgtgttttctctttatattgttctttacattagtgtaactctaagtgtaatcttatcaaaaagtattgtttaattgaaatttgttaaatgttgttttaactatctagtccattttttaatgctttcttgttatatggcattctgatttatcattactaaatgttgatcaaatacatctataatacattaacttttatgttttaacttacatagtcaaactaaaaaaaagaatcaactaaattctctattaaaaatgcacatgtaccctaaaacttaaagtataataataataaattt

SEQ ID NO: 267830 - DNA, 847 bp, Homo sapiens
tgaaacccgatatgtcaggcaagctggtgggatcctgggatccctcatgtaacggcactcattctgacagaagcagagataaaacagactaagtacacagaggagtttaaggtttcgtgaatgtaagtgctgagtacagaatggtgctcaataaaagcttgttaattgatggaccacaggtttgtgacaagacttctcagagtctgattctttcaaggtgggatataagagtaagataccttgactatgaataatagtttcaataaggaagacagaatgagttctgacacgatggttgggagctgtgacaggcagacgaaaaatggagccaaatggcatggaggtgtgtcatcactgctggattttaccttgatctacattcagttatctacttcttttcaaaatgctgggcattcattcaagaaacagcatatatgttctgactttgaagtaatggatgaactgtcatgtgcagtatatggaaataagttttattaccttcttcccacattaactcatccatccattcaatagccatttattgagaagctcactctgtgttaggcacagtggtgtcatgatgttggaacagtaacaataactcaaccaaccagggcttgtctgaatacaatcctacagcagcaggagctgtggagatatagaaggcaaggaagaccaggttgtgagggaagacgaatttactcccaggaatgttgggattgagagtaatattctccaataatggtggaagacagaacaataaaagcccaccagctccttctgcatggtgggataagagaaaagccaagggcagaagtgagaaaaataaccatcaccaaactgaaaa

SEQ ID NO: 267831 - DNA, 429 bp, Homo sapiens
tgaaacccgatatgtcaggcaagctggtgggatcctgggatccctcatgtaacggcactcattctgacagaagcagagataaaacagactaagtacacagaggagtttaaggtttcgtgaatgtaagtgctgagtacagaatggtgctcaataaaagcttgttaattgatggaccacaggtttgtgacaagacttctcagagtctgattctttcaaggtgggatataagagtaaggtaagcacctcagaaaatgcctggggcaggtcactcagtgttgctgggactgatggtgttggcttggcttgactaggatttaataatacagatgtgcctcaacttatgaaggagttaagtcccgataaacccatagcaaacttgaaataccatgagttcaaaatgcatttaatacacctaactgactgaacatt

SEQ ID NO: 267832 - DNA, 428 bp, Homo sapiens
caatatttattttggaaagctgctgaaaatgtctttttcaaaattaattatgcttaagatgtatggcattaaattcaattttatgaggctttctgacatatttactaaaaaaacctggaactgagactgaatttggaagacatttaattttgtagtgagatatctatattgtagatattgtacttttaaaacctgtcattaagtgtttggcatgtggttaatactttctctttagtcacaactggtattttaataaatgttataaacgtaagtgccaagatatgcatcactaactgttctatgaaatttgtctacttctcctttatgttcccaaagtcacagagaaagcagtgtactttatgacagtatatttatctttttatcattatgaattataagcagtgttaattttgagaaataaaagtcca

SEQ ID NO: 267833 - DNA, 484 bp, Homo sapiens
ataagtcaccatctatctctatcttcacatggaaggtgccatagactgccagtttcccatgtcccctccaatccattctcttctttctggtcaccaggctgtccaataaagactacatttcccagcttcccttgcagctaggtatggccatgtgactaggttctcagtaatgatatgtgagagagctaatttgtgtaacttcttcctcatttgcctgaaagaaaattgttgccttagacttttcttttctttctccccgtactgccccctaacggctttcctttgggctagaccccagaaatgccaatgatccagcttcagtgatgcaaatgaagacctcagggatcaacagagcaatgagagaaggaacctaggtccctgaatgactctggagcagagatgccccagacatcttaccatgccccttacctcgaatggtaagaaatttacatatatgagaaataaacttctatttaagttacta

SEQ ID NO: 267834 - DNA, 366 bp, Homo sapiens
gagccctcatcaatgggattagtgcccttataaaaggagccccagagtaatccctcatcccttctgtcacgcgaggacacagtgaaaagatggccatctctgaaccagggagaggatcctcaccagacaccaaatctgatgtcttgatcttggacttcttagccttcaaaatgaccccagaaatgccaatgatccagcttcagtgatgcaaatgaagacctcagggatcaacagagcaatgagagaaggaacctaggtccctgaatgactctggagcagagatgccccagacatcttaccatgccccttacctcgaatggtaagaaatttacatatatgagaaataaacttctatttaagttacta

SEQ ID NO: 267835 - DNA, 459 bp, Homo sapiens
acatatataatgaagggaaataattcctagcagaatccataacaaatgaatagtgtgtttccctttgtatcttagcctacctttgtgaggccagttttttactctggggctcaatttgtagtgctgctcaagaatgaacctagtgctgctcaagaataaaccatctcagctgggtatggtggcttatacctgtaatcccagaactttgggaggctgaggcgggcagatcacttgaggccaggagttcaagaccagcctggccaacatggtgaaaccctgtctctactaaaaatagaaaaattagccaggcgtggtgatgcgcacctgtaatcccagctactcgggaggctgaggcaagaggatcacttgaacctgggaggcagaagtttcagtgagctgagatcattccactgtactcgagcctgggtgacagaatgagactctatctcaattaaaaaa

SEQ ID NO: 267836 - DNA, 870 bp, Homo sapiens
tgctccttgtgtcatctgatttgaggacaaaaggaaccagtgctggaggcttgtcttctcacctgcgggtgaactgcacctgcccggccaccccgtggttgagcagcttgggaaatggcctggcgctgaatggaaagcagtgagcactgtggcaggcagacaggctgcaggtggcgcgctccaggtgcggccggaatcctccaggctcttggagggattgccgcattcgtaggaccaggcagcctttcctgaatttgcaggtcacttgcacaggcagtgggggtggtcacaggactgtgaggccaggcagcctggagtcctggaggtgtggctgccctgagctgtggctcccctagaaaagggtgctgttgctgctgctgcgaggattcatccgcgggcctaggacagggcctggccctccgcagtgctcactctgcaggggtgcccgcctcttctcctgtcatttctttgtggtttgtgccttttttgtccctaccaattcaccttccctaaaggtcctgcagagccgggactaggcaggcctcagagtagccatgtgagggatatcaccctctgttgccaatcagttgccgggtttcccagctgcgtttctgaacggtctgttctctgtcctgtttgcgagttgctctgtccagggttcaggggcagagcctgagtttgggccttgtgggttcatgtggtcctcctgtctgtccttgaagtgtcactcagtctttggaaagagtcctggagtccaggtcgagcctgtcctcccctcgtgttctgggtgccctacagaaggctgggatgtgccctgatccacagttttggtgccaggccttccctcggctgagatgtcctggacttttc

SEQ ID NO: 267837 - DNA, 439 bp, Homo sapiens
ggctgccaggtcgggtgccctttgagttcagcctggtcactgagttgctaagagaaggtgggcactgctgaccctctcagagcttagctttgacttcagaaggtgaggaggctggacaagatggcctctggggtcacctggtcttcacccctgtgttccacatgggctgtggtgtgagtttacgttgtatgtgcccagccagtgaccaggcccaggctgctccccgagctcctgagatgtgaggaaggctgggtgcagtggctcccacctttgggaggccaaggcgggtggatcacctgaggtcaggagttcgaaaccagccaggctaacatagtgaaaccccatctctactaaaaatacaaaaattagccaggtgtggtggcacatgcctgttatatcagctacttgggaggtaacagagcgagactctgtctcaaaa

SEQ ID NO: 267838 - DNA, 496 bp, Homo sapiens
ggctgccaggtcgggtgccctttgagttcagcctggtcactgagttgctaagagaaggtgggcactgctgaccctctcagagcttagctttgacttcagaaggtgaggaggctggacaagatggcctctggggtcacctggtcttcacccctgtgttccacatgggctgtggtgtgagtttacgttgtatgtgcccaagcctcagaagtgagtgggtgtctttcagcatcatcactgcgacccaggacttccatctgcctgccccacagcctcctcatctggctgggccattctgcagtgtttctctgagctccagaggcctcgtgcccctcgccaagccccccacactgtggaccatgccacagggagaggctgccaggaagctctgcccagcgtcccaccgtctttcctgagggcagcctcccctggagggaggagccgaggctgcacaggctgaatggggccctttattcccggctcccacagggagggtaca

SEQ ID NO: 267839 - DNA, 581 bp, Homo sapiens
ccattttggccaggctggtctcaaactcctggccttaaatgatcctcccacctcggcctcccaaagtgctgggattacaggcatgagccactgcacccggccactttttttttttttaaagaaaaatgctctgcatggattggagacacagcaataactactgttgccatggaagggttaacagtgtaggagctggtttatcagtccgctttgacatacagctaaaggaaatttatgtttgggggaaaaaggccctctgttcactttaaaattcagtgtggacttatgccaaagggggctgtttaagttgaaagaagccaagttaagtttggcctcttgcctggaatcacttgaattctgaaatttcactgcgacggacatgtgccttgtcacattttccattgcttaatcctgaagtttggtgcaagtctctctgcacctattaaaaagtgatgtatatacttccttcttattctgttgagttgtatagaattgtcttttgtatttaacactttgtaattttcacaatattttttaatttaaataaataaacacattttttccctcctgggaagtcatga

SEQ ID NO: 267840 - DNA, 440 bp, Homo sapiens
ttaaccaggcgaatgattacttgtacttccttaactgatagtttacgttttgcatttattattaatttttttgattgctaagccaaagtttgctgctcagtatacattctgtttattatattctaggacataagcattaattttaaaaccgtcacagctttggtaaggatattgtggattagtaccaggattggtagatttcttctgttatactagaatttcagtgtaatgctgatagatcaaagtcagaatgcctgttggatactctgttcaatacttgcacgacgggatctttcatactccaaacctcagcatctggcagtatacccaggtaataagcctgcacatgtactcactgaatctaaaataaaagttgaaaaaaacaaaccaaaacaacaacaactacaaaaagtcagaatgcgtaacaattgaaaaaaaaa

SEQ ID NO: 267841 - DNA, 465 bp, Homo sapiens
tgagacagagtctcgctctgtcacccaggcaggagtgcagcggcgcgatctcggctcactgcaagctccgcctcccgggctcacgccattctcctgcctcagcctcctgagtagctgggactacaggcgcccaccacgacgcccagctaatttttttttttgtattttttagtagagacggggtttcaccgtgttagccaggatggtctcgatctcccgaccttgtgattcgcccgcctcggcctcccaaagtgctggcattacaggtgtgagccaccgcgcccagccatggattccttttttaaaggtaaaaataagagtatttttaaaagtagcggtatttctcaaggggggaaggctagtcctgttcatgactattttacaggttgaatgagtcctccttttaattgagttaatatttttagttctaaagtaaacaactgacatggtcccaacatacacaca

SEQ ID NO: 267842 - DNA, 348 bp, Homo sapiens
ctactcctgacctcaagtgatccacctcagcctcccaaagtgcttgggattacaggcttgagctaccatgcctggctctaatctcttttcattgggcatttaagtgacttctattttttatgtttatagtttttttgtcttgactttatttttatttttatttttattttgagatggagtcttgctctgtcacccaggctggagtgcagtggcatgatctcagctcactgctctaccctccaagttcaggagaatcacttgaacctgggaggtggaggttgcagtgagcaaagattgcaccactgctctccagcctgggcgaaagagtgagactgcatctccaaaaaa

SEQ ID NO: 267843 - DNA, 496 bp, Homo sapiens
ctcagacgctggaatgctgccactggatgccatgttgggcatgggcttctccttggggtccacactctggaaagtcaggcaatggtctcttctgttcagggattccccagacttggctgacccatccactccctgagatgacccaaggaatggaggacttcaggaaaataataagaaaacatggaagagaaaatggctaatgttctgttttaggtaactgtcaatgttgcttactggtattgttttgatctagatttgagggaataatgataatcaagtttacataactcttaggagggttcatacacataattttatttcattcttcacagaaaccttttggagggagtggtattattccccaggtaaggaaagaggctcagggaaattaagtggctttttcagggtcgcatatggtgtggttttatcttgaagagtgcaattttaaaagagaaaagattcaaaagagaataaatggggctgtgtttttaagttg

SEQ ID NO: 267844 - DNA, 526 bp, Homo sapiens
ttaaaggcttctgcctgctgaaactgtccatacgcaaaatagcaccaaagctagttgaagttttttcaagttttgtctgggaactactataaagcagacaataaaaaataattcattttcaagacagatggcaccataatgttgcactattttctagtgtgcattttttcctaaacactagaggcagcgtctccatacaaaagaaagtccatccagctgcagccagttagctttcagattgctgtttctgtagaacatcacacacattaaaaaaaaaaaaaagtcccttttttcccccaccatagtcagctcaaccctttcttctaaaactctacaggagctattatttcatgcattattattgtcagtgtttctgatctctttcccgcttgcatctgattgttcacacctgagaacacctagaagtggtttgtacttgtaaggttaaagtttagttagatcttcctacatgctgtctgcaattcagaagggtgcctggtgcacacaggtaatgatacagtaagtt

SEQ ID NO: 267845 - DNA, 382 bp, Homo sapiens
agctgtcttcttcgtcttatttgttttgtctgtgcattacctgtggaagaaatggaagaaacaccaaaaaaagctgaaaaagcaagcctccttagaaaaacctggtaatgatctagaaagcccattgatcaacaacattgaccaaacactccacagagtggcaaccacagcatcagtgatatacaagatctgggagcacaggtctcaccatccttcctctaagaaaattaagcactgcaaattaaagaagaagagtaaagaagaaggagccagaagatactaaataaatgcatatgcaaatgtagcttagtcaattatagatatcacaaaagaaatctatcatctaaggattaaaaattgttctttggaaacctttataaac

SEQ ID NO: 267846 - DNA, 347 bp, Homo sapiens
cgtgttcacaggccacaatcaattcctcactaacagcaaactttgcgcacatttccgcgggctagtcctcagctcccaaactgtggagtctcccttccacgtccaccaatgaggagcctggaaacctctgtcgagagccaactccccactagtgccaaagccggagttcgaacaaatgccccccggtaactgcgcgcacgcactccccatccttcggtcccactctcactagaagcctctggctcccacttccagagaacctgtcccacacaagtggaaagaagagacgtgcaaaagaaggaaaaagcataaaagaaggcgaactgcatgggctgcatctactcact

SEQ ID NO: 267847 - DNA, 803 bp, Homo sapiens
tgccaggtttatacttttccacaggacagagattgtcttacccatctacctccaaaggctgtaaaacttggtggaatcctgcattctctaaatcaacttccatacttaattcttacagatactaaaataataggaattggaactgaatattttctcatggctttttcttttcagtcacaagtgaaaggacttttttaaaattaaatttttttttcttcaaatactgcaaaagggatgttattgaaaatattttaggtgtttggaaacacttattttgtagtttacaaactggcaccagtgctagatttggccctgagatgtgttttgtttggcccctatgcttttattgttaattaaattaattcctaacttttagaaccaagttatttctgttattgggaggatggaaggatcagactattcctttcagcattattggatttgaattcctgcttgtccagagaagataccctcttggggctcatgtctccagttcactgcattcaccccattccctattgctcctttgtgccgtgaccaagggtttgttgccattcagcaatgggcttaccctgttccatcctgacaactttcttcctgtattttagctgcataacccctataatcatttgatttttgacctgatttttacatgaataaaccaatcctagataaatcattggaaaacttttacaccactggcaaaatgaagtgcatagtaagatttcatcatctctactatttaaaaataaaaccattatgtacttttccttttttggaaataacatttttaaaaatcccat

SEQ ID NO: 267848 - DNA, 486 bp, Homo sapiens
gaattgttccagaattggagacaccaaatactgaaaacaggaagattacttggaagtctgtatgaaaggcaattagatgcctgcaccccctcccccactctctcaggagataggaagtttagtcttagatactgaaccagaggctccgaatcaggcacaccaagcataggagaaagggtgcaatatggaacaaaactgaaaagaagggctttaagataagagttatcagtagtgcatggtagaaccatccacctcttagacccagtttccagaatatctgtaggccgacagatatttccctgcaagagactggaagatcgtgctctgataaaattaactccagagaaaaagtcctgaagatactgaatacttctaggggtcctcaatcaaatggccgattcttgcctgatcaccctaatgtgaagcccacaaatcaacaagcctaccccctagccaagtgtcaccagacatttaaagaaaacctct

SEQ ID NO: 267849 - DNA, 309 bp, Homo sapiens
tcaccctgtctccctgatgcaatttctagcgctgcaggacgaggaatgaactttggccttcagttctgaaggcctggactgagtccacctcctgctccctgcccctcacaacaagctgaacctactccagtggctgcagaattccccaactagcagggggagatatagagagaccaactcagggccctcctgtatctagaaagagtaactgaaaagccccaagccaaggagttatgcagctgttgacggtttccgttccgggaatcactgtctccaagaaatgacctgggcacaaggaagccttgggag

SEQ ID NO: 267850 - DNA, 474 bp, Homo sapiens
atattaatatcacaaggagttatgatagaaacagtgttggagctaaaatattcaggcaacgaagcacggtattttgggtgggggagaagatggctgcagccaggtaagtggggtcataggtagcgctgtctgcacagggtctctgtgaggatgacatgcattgatgcatgtgatgctcttcactttgagcctgacaaatagcatgtgttagaggttcagtctaacacttgctagaggcaacaagtgttagaggttcaccatctgagtctatgtggctccagtgagtagatcttgctctgttgtccaggctggagtgcagtggtgcaatctcagctcacttcaacctccgcctcccggattcaagcgatcctcctgcctcagcctcccagctacttgggaggctgaagcaggagaatcgcttgaacctgggaggtggaggttgccgtgcgattgtgccactgtgtactccgcctg

SEQ ID NO: 267851 - DNA, 398 bp, Homo sapiens
gatttccagggacacttgtgacttcgcgtattcaccctccattttaaaaagtcacatttcccatgaagtgctgggtacagcattcaaagcgcatctcctggactgctgtgtgctctgggcagctgccagaggagaccgtggcaggatgtatgccactgtcaccagatgaataaccccttcttagcatacgttgcaatataatcaaatcccatcgtgcctgtttggtgatgttaattccagaattttattttatttttattgtggtaagaacacatgagatctgtcctgctaaaatgctaagtgtccaccgcagcatcgcgactatgggtgtgatgtcctgcagcggagctctagagctcattcatttggcttaattaaaacttaatgcctgttgagca

SEQ ID NO: 267852 - DNA, 243 bp, Homo sapiens
atgttcgtcatttgtaaatctgacattctctttagggtgtaaatttttaataatgagcattgcaaatggaattctacacatttgcttagatgtcatggaatagctgaagagagcttgggcttttaataggcagacttgctcccaagagggtgaagagtaagacaaaagatgtttgtgcctagttgtttccctgtgcttacaaatcaaatgaatcattctatttccttaggggcaaattaaatg

SEQ ID NO: 267853 - DNA, 545 bp, Homo sapiens
atgacaggaagtacttcgatggtgctattatacccaaaatagcattttttaccgagcagagtggttaaacatttgtttctacagcatttcctaaccagcaggaaacagtaacagaaaaatttccagtatgtttacacacttttaagttacatgcttatttacacagtggaacatggttgatacttaaccaaacgatactactgggtcctttctaatgctgctgagacacgtatgataagggtttggaaatagtctaaaaagaatttcttcttggtatttgactccattagaaaggcaaaccatattttaaactgatagtgtcctgaaaatttctctccagatgtggtagaattgtattaccatttcttaacaactttgtgttaggcaaatatggtaaaattatactttttatttaaaatattttgaaaagatgccttgtaatttattagaatactgatgttgtttaaatgcttgtgctttttatatttcctgcagagaacaagttgatttgacatgaaaaaatcctaaaaccagaaaaatgaaaa

SEQ ID NO: 267854 - DNA, 397 bp, Homo sapiens
tatgtaaattgtttagtaatatatgctaactttgatttttccagaactcagaaacgagaatgcttgcaaatacttaaggagacatttcagtttagcaagccatcattagcggtgttttataaagttctggaactatttaaattacccatgcattgctctttccatgttttcatgcagtgagcaatgtatttccctttttccactttgtgtgaagattgaggctagaaaacacccataattctatattttgcagaagtatggaacacgttcatcagcttagaacaacctcaaattaaattttttgtcctcattttggtctttgttgtgagcagtttgtaaatgtgtatttaaatataatactttttaaaaaataaaaacatatgaactccagatgaaa

SEQ ID NO: 267855 - DNA, 452 bp, Homo sapiens
agcgtgtaccattcctgtgtccttactatttcagaagtttgaatactgtaaaatagcctagggtggccttttaatttggttataagatgttggaaaaattcctggtagtatctgagatttgttaaagtagacttttgtagactaacttttttcaatttatatctaaggcagcttgagatgaggttgaaaaaattctggcagacattgggcataaataacacattattgaaaatttgttgattctttattaaattaaagaaaaggtatttttaatatttatgatctatcttcatagataatttcagcaattcccagaatattacatgagcctattacaagtagctttctgcctaaaggcatgtggtctttatcaaccctaagaagaaatattaaagggttttaagatgtgtaagagattacctgcaggaaaataacccagggagaatatacag

SEQ ID NO: 267856 - DNA, 356 bp, Homo sapiens
aaataagttacagtaaatttgttgctaacaatctgtgtaaattattgatttctttgtaagtgtatgaacactttcattaggttaaattgttgatattttaaagtttttgacctcagtggcagtttcatatggtttgacctattgcattatgaaactatggctataatcactgccctgtatataaaaatgttatggcacttaaacaaaaatacattataacttatttaaatagcataaatttgtgcgtgctttggcagcacatatactaaaattggaacgatgcagagaagattagcatggcccctgtgcaaggatgacacacaaattcatgaagcgttctgtatttttcagactct

SEQ ID NO: 267857 - DNA, 177 bp, Homo sapiens
caggcctctgccgttcccatgcagggcaggccaaactgttttcacagcatggaaagttatgtgagggaagccacaccggccgcagatacaggcaccagcacatccactcgcatgcacactcacggctgtggcccgcggcagatggaggcccgctctgccttgtctgtccctcagtag

SEQ ID NO: 267858 - DNA, 274 bp, Homo sapiens
tggaggtgaggagtggcctgatagtttcctagttccttgtcctaggtgggttcactggtgaatcctaccaaacatttaagaaaggaataacatccattctctgcagtaccttcatgaaaatagaagcagaggaaacacttcctaacccattctatgagactggcattaccctgataccaaaatgagataaagatactacaagaaaggaaaaccacagaacaataattgccataaacacagatgtaaaatcaataaaatgttagcaaatcaaatc

SEQ ID NO: 267859 - DNA, 441 bp, Homo sapiens
ttgggggcatgccattgattttaaaactggggataaaagccaatggtaacaattcataggtccaaatttttattagaatgaaggaagaggaaaaatccagacattatagtgtgagtgtggttggtaggaatggaatttgcaggccattgaggggccatgatataattaagatttaggacatctggagaagggagctaagagagagaaatagggatacagagataggaaaggggctttggccaaaaactaggcagaaaaaacctaacaccaaacccaactcgaacaaacaaattaacacgacctatataataacaaaactttcccctgacctatgataataatagtagtagtagtagtaataacagcaatgccaagttacacttgcagactgcttcttctttttcttgcttacaaaagactctcctaatccttactttctta

SEQ ID NO: 267860 - DNA, 672 bp, Homo sapiens
tgtcaatgcccctcttaaaataaatgcctggaatggaatattccacatggggtctgagcagtgcaaccaaataccggactggacttccctttgtggtggcgtccttagcagctccatcacctgttgcctcaaagaaaacttaacagtcaactaaaaaaaccccaggcttcctataaaccatgtcaaaatctcgccctgcccaaccttcctttttttttttctttaaaattagacatcgattatagtcatttttttttttttttttttaaagacagattctcgctctgtcacccaggctggagggcagtggcgcatctcagctcactgtaacctccacctccaagtttcaagcgattcttgtgcctcagactcccaagtagctgggattacaggcatgcaccaccgtgccactaatgtttgtatttttagtagagacagggttttaccatattggccagggtggtctcaaacgcctgacctcaggtgatccacctgcctcggcctcccaaagtgctgggattacaagtgtgggccactgcacccagccaacatggattatggtcttctgattataaaagtaacattcattttagagtcttaggaaatacagaaaacatctattcctacaacaaacattcattggataccttctatatgaaagaatctcagctg

SEQ ID NO: 267861 - DNA, 419 bp, Homo sapiens
tattaaaaagtaccgtgaactgagtggcttaaacaccagaaattattctctcacagttctggaggactaaagtccaaaatcaagctgtgggcagggtgggtttccctgagagctgcaagtgaaggatctgttccaggcctctctccttggctgatttcctggcaaacagaaaaagctctcttggtctttaaagttcatgacagattccctaagtgtttgtaaaacatctgccaaccacactgatgggctctcacacaaaggttttggaaatacagactgatttcctttggttactaaaactgatttttttttttttttttggttactacaattgattttatctctataattttcttctctgtcatcttattttaaacaaaaaccgtggcacaaaaataaagtgatggtttttgaggaaa

SEQ ID NO: 267862 - DNA, 507 bp, Homo sapiens
aaattcttatactaaaggtattttactttagcttgtataacttgataccatatatttgtcttttaacaaaaaaattagaaggcacatcaaaaagcaagcaaaagcagtctcaaaggaccaagcaagtatcagaaccaaactcagatatgatacagatattggaatttcagacaggaccttaaaatatttatgattaatatattgagggctataatggaaaaattagaaaacatgaaattaataatataagtagattggtaatataagtagagacatataaattcttcaaagggatgaaaatgaaatactaagaatctaacagaaatagataggctcatcagtaaattcattatggctgggttattgaactcagtgagtttgaagagatgtcaataggtaattctaatataaatcgcaagatataaaaggatttttaaaaactcagaacattgaataactatagactacttcaaaaagatgtagcatgaacataattggaatatgagg

SEQ ID NO: 267863 - DNA, 411 bp, Homo sapiens
tcagtgcttctcctctttgtcccgatttgcattgtcagtctcccagccccatcctttcaaagtgagtatttcttgcagtgggatcagattcagttcccctctcctttgcctggaagaatggatccagtttgcactgaagctttgcagagacatgctttataggcagtcttctccttgctggttaattttagggagacaatacaaaacctgagtgtcattgtgtgctcccttttgctgtgtccttgagccggattaatgttagtttctcacaatacgtactacactgcttatgtgcacacttccccactaccttctacgaggccttttagtagtgatgtccttatcgaagggaattgaggacatgtttctgtgagatgtatcattttcacaattcctttgtgcagaaaaaca

SEQ ID NO: 267864 - DNA, 303 bp, Homo sapiens
gaccccaaatccctctccaactaatttatggtaaaattccttgaaaaagctgtctattattactgatcccagctttggagcggtggtggcttcctgctgctgctaatctcttggctcaacaaaacccatctgtcattgcaactcttctctcacacgtggaaccaatttcttgcgctctatccccccaaccctgtgttaaataattaaagtggttttcctttctttgggtgactcctgactgatggacatgtaggagactattttagtaacagccattagattgtgtttattattcttattgtt

SEQ ID NO: 267865 - DNA, 326 bp, Homo sapiens
agagacttgatgtgcacaacttggaaaacatctgaatttctgcatgaaattaaatctgccccagacgtcaggattgtcaccacatcacctgcgggctaggagaagcggcaaggcttagatgcatttattggtttatgttctctcttttcatgggatagtgtcctcttttccccagaggcgggttgcaagagcaaatgatgtaagtaacgtgaaagaacactgtgctcgggcaagtcaggtggtccatggatagaattatgtcgtcatgttacattaatgccctgagaggaagggatagcactttggaatgaagatggaattcggct

SEQ ID NO: 267866 - DNA, 404 bp, Homo sapiens
gaccagtctgtctttgtcagactaacaaatcagccacaaaattagagattgtggttcaggggccatgcagcctctggctgtaggagtctgaatctccccaaattgctcctgggaataacatcactgttgcaaaacttaagataggtgcttgagatattttgcaatcccgcagcagataacaccactcaggccaataatctggctcaaccaatttggcgatcccacccaggaacagaagtcatcaagaataactcacttcgacccccctatgatttcatctttaaaccgaccaatcagcactcccacttttctaggccttacctgccaacttatccttaaaaactgatccctgaatgctctgggaggctgatttgagtaataataaaactggtttcccacacaga

SEQ ID NO: 267867 - DNA, 451 bp, Homo sapiens
ctgatttggagtttggaaatcctgatttttaaaaagttccttggttctcatcctctacgaggtatgggagccattgctttatgaaacatattctttaataggcttgatagattttcctctttggaatattggatagacccagctttgagaagtcatccatggaatctgagggttagttagtattaatatagcatcatagaaatggaaagggtctcaaaaagtcctctaaataatccccgtaataataaaaggtcctgtaggagatcccagaatatagtgaaatagtcagaaattgctctgagaagttcacacacggcccagtatcagtgtatttgagtattctaccaatttattgagaaaagtcaatgaacttctcacagaaaagaattgtatgttttttgtttgtatccatgattatttaccatgctaatacagagtaaataataaaaaa

SEQ ID NO: 267868 - DNA, 429 bp, Homo sapiens
gatcgcaccactgcactccagcctgggtgacagagcaagatcctgtctctggaaaaaaaagaaaaaagacatattttgtatgttatatatattatgtgctgtattcttacaataaagtaagctagagaaaagtacatgttactgaaaacattattagaaagagaaaataccttcacagcactgtgctgtatttatcaatactgtaagttttgttgtctgtttataagagaagttgtctgtctcaagcggcagtaaccgcggctgcagatctcaatctgtggtagatatcaagcagttcaacccttttttataatgtcatgacttttctttgcttcttggaagcagctctggcatcactagtggccccgcatttggggccaagggggttattcaaagtttacggtattgcattaaacatggtgaaacata

SEQ ID NO: 267869 - DNA, 414 bp, Homo sapiens
ctaagactccgattaaaagaccgagatagtgatgttgaatttaaaaagcaagacccaaccatatgctgtctacaagaaacccgttttgaatccaaaggcacaagttacaaggatgatatggcatggtaatactaatgaaaagaaacctgaagtagctatgttaatataaaatcaagtatatttcagaacaaagactatgtcatcaagaggatatagcaattctaaatgtgtacacttctaaaactagagcttcaaggtacataaaacaaaaattaaaagaacagacaaaacagacaaactcacaatcatagctgaagattttaacatctctctatcaacagttcaaagaacaaccaggaaaaaagtctgtaaggacccagtaggcttgaacaacgctattaaccaactggatcc

SEQ ID NO: 267870 - DNA, 366 bp, Homo sapiens
cgcctgctccgaggtgatctgggttgctttgacagctgcatgtgtggcaggagcttataagcatggtcttacctcccccaggggatcttccctgagagccagccccgtcacagagctagaagagaagcctggcctaatgcagacagactaaattgccacctgaagtgtccaccaggcccataattgtggccttgccgtggcgagtatatctagtctcccgaaatcattacgtggtgtttctcatctgcagcaacagatacagagatggtcagaaagtgagattaattctacttttagccccacggagggctccccatctaaagggagtttaataaacaaaggaatggccaatgtgatgaagcctcc

SEQ ID NO: 267871 - DNA, 761 bp, Homo sapiens
tttaataatcagataaatccaagtgacgtacaaaatcctgtttagccaggtaataaggtcttttctccaaccccctaagaaatggccacgggttaaggacttatgactctgctctcacccccatgcccgaacacccacacatacattttccactgtcatctctatgcgaaacctgatgtacgacctccagaagccactgtcactgtcttcgcctgagcagtcacttttaattcttataccaggaataagtaaagtagggtgtgggggcagggtggaatgccaaagagatgaaccaattatcctaaaagatccaatgccattttacattagcctactctgaaatcaaggaatgtacgagacatgccagctagaaatgccaaagagagctccaaagtgttttgcactgatttaccaagttagtagaaatgcaattatttgtaattacggtatcaatgttatctgaaacccattaacacctttctctgtgaactgcacatattaatctgtgactatatacagcagaatagaaccatcttactggtgtgaggataaattcaacttgctgaaaattcagtacttatttatttcaaaagaatcaatttcaattctagatttccttaagcttcctgattacaaagtaattttaaaagctgaactcatagtttacttttagccttctgtttgtgctatgaaacaaaaatagattttactaaaggagatggccaaaatcattctaaaaaatgttttggggtacttcatta

SEQ ID NO: 267872 - DNA, 602 bp, Homo sapiens
acctggtacatataagaggacatgccagaaatgaggacgagatcaatgggcagatagatgaaatgtttagcttccttatttacctgaaacctcatttttggaagtcctaaaacccataaagaatatttggtgctttcaaaaatatcttttacttggccaggtgcagtggcttacacctgtaatcccagcattttgggatactaaggccgctggatcacttgaggtcaggagttcgagcccagcctggccaacatagcaaaaccccatctctactaaaaatacaaaaattagccgggcatggtggtcccgcctataatcccagctactcaggaggctgaggcatgacgagaatcgcttagacctgggaggcagagagggtgcactgggccaagatcacaccactgcactccaacctgagtgatggagtgagaatctgcctttaaaaaaaaaaaaattagctgggtgtagtagtggatgcctgtaatcccagctactcgggggctgaggcaggagaatcgcttgaacctgggaggcggaggttgcagtaagccaagatctcagcaccgcactccagcctgggcgacagaacgagactccacctc

SEQ ID NO: 267873 - DNA, 440 bp, Homo sapiens
tattcttatctgttcccattttttttaatggtccattttgtattatctcttgttcctttctttgatgatatttttcccacctttccctttagaattagatttcctattggtaaaacattttggctgttataatccttgttttatgtttatagccttggcttcctgacaagtgcacaatttgggattttctaagaagttgacatttgttgctgaaaacccagtaaggctttccactgcctataggataaagtttaattctttaagtatttaaactctgtcccctctcccccacacaaatcttaaccatttctgaatttatcatattttcagtcaaaacaatttattttctctctcttgaacttgattgatttgtttcggcctttaaatttttgctgttatggccaggcacggtggctcacgcctgaatatgggaggccgag

SEQ ID NO: 267874 - DNA, 706 bp, Homo sapiens
ttctcaagatagagtgcaatggcaggatcttggctccgcaacctccgcctcccgggttcaagcgattctcctgcctcagcctcccaagtagctgggattacaggcacccgccaccatgcccaggatcttacctagccatatggcctgctgcctctgccaacttaaaaacagcattgaggctgtctgcaagacagtcaagctgcattgcaacagtgcatgtctgacaaacaccatacattgtcgtgagtccaaattgcgcggtgataaattgttacattaagtatttgtttttaaactttttatttttaatgatgataaaattttaagctaatgacataattgctttatttttatttactcattcagagttaaactccctcaatttctgaactactcccttgctgagagtcaggttctcagttactattacaaaatttaataatagaactgttccatatgcacaaaggaccaagacaaaggaatgggaaggctagagaataacattaacatccacacactgtgtactgtgctctctgcttgatgctttgcccacagtgataatttcttcatatagtgcaatgtagtttgtaaggtggttttaaattcatgaggtctcaagtactctctgccttataggacagatgtagatacggtttcggtttttctgtttttacagttttatgagagtacaagtgatgctgtttta

SEQ ID NO: 267875 - DNA, 439 bp, Homo sapiens
agaggtaagtagagagataatttggtgccaggtttcttcatggttttgaatatcatgaaaagaaatttaaatttatcccatcggcaaggaaaaacaatagaagattttcaagcaggggagtgacagtaggcctgttttacaaagatataaagatatagtttgtgtcattatagcagatggaattgtgaaagaaatcacatgcaaacaagcagctacttaacatttcagatatgaagagatctacaaagaaggtaaaattagaggcagctttttgtttcccaagttgaaaagttaataaaaatatattattattaccagttcatagtcaagatttaaagacaagaatataaataagcttacttaaaagtcattagagagctgagggatttttgagaagcatttacatagaaaggaatgaaaacctgttctcaaatttaaa

SEQ ID NO: 267876 - DNA, 323 bp, Homo sapiens
aggccaacatccccccatgcttccgcgtctcagccttgactgcctattgcaatcacatggagaactttaaagaaaatgctggggcctggtcttacagccagagtcttgtctagttgttccaaggcatagcctggtcattgagagtcttagaagcaggtaggctgatgccccctcacctcccacggcacagacatcccctcacctcttcgctggctgaaatagaagaaccctagtgtccatcagctgcttatagatgactcatcttcttaatcctttcttgacgaaaacttgcttcagatgttaataaaaagtacaaaatctgc

SEQ ID NO: 267877 - DNA, 265 bp, Homo sapiens
ccgcgcagatgccaggggcggaacctcctctccagcctgggtccctgctgtcctcagcttgagaagagaagggtatggtgccttcaaggaactggaagaaaaccattattgctggtggattgtattgctgcttttaatggagcgaatcccccctccccaccagaaacagcaaagaaacagcaactggaagataacagaatcatgaaagcatgattgaagaacaaaaaaatgggacagctgacacttccacttctgttaagagttc

SEQ ID NO: 267878 - DNA, 666 bp, Homo sapiens
aggcctgaaaggatccatacactgtccaactctttttcatgccaaaattaatatagtaaacatatctttgtttcagcaatcaaaacctggcaatttgccatgtcacccccattccacagccacgtgtctgaagaacatatgctttcagaatggcgtttatgatctcaatgccatcttgctgcaagccttccagctaggatgttccctgtagttgaaataaacggaaaggaagtttctgagttgaagtaaaccgaaaggaaggagggtcacagccccgcggcacagttcccaggatgactgctgtgccactcacaaaatgagccttttgactgactccagcagcaggacgggactgtcgtttcacgaggtgagctacgggcagacagatgtatccgaatcgcattaattggaacgtcttgtcacaggataagagaatttccatttctctgcggatgcctgtatgctacacatggtatctggcaggtgtgagaacctcgtctttgattgcctatattcccaatctcctttctttgcctattttcctgctgcaaagcaattacggctgaaaatcagtctgcaacatgcgctcatccatattcaactctttccacttcaggcaaatcttgcccagaaaaaaaataataaaagagagagacttataaatcc

SEQ ID NO: 267879 - DNA, 565 bp, Homo sapiens
caatatcctggcttatacagttgatgttagggtgatttctaccagtcagcagttaaacgttaaacactcatctaacctgagctaagagggtgtacatgatcttatgctaacagaattaaaagcctgttgattaaaaaacaaaataagataacacaattagaaatgcttcttaacctgataaccatttacctccagatctaagggttgtcttctgggactctactaaccttctaacacttgatgcaaattgttatttgggcaagggagttattggttttcatcacattttcaaaggggttctgaggcccagaagaggttaaagagcagggtacccgaaggcagtaagtacgagttatgtactagcgggtgaatgagtgaatcaaatgcaggaaactgtttcccatgtgtaagtgattaaatattaatcaagtctactcatatataaatctatttaaagctgccagttaatgagagtttacagcaaggagtaacgcgtccacttaggaatcaggactgtaccctctcttctgtatccctcatcaaaaaatatgtttaaacttttcca

SEQ ID NO: 267880 - DNA, 137 bp, Homo sapiens
tattttcacctcttacagtccatcttaaattggtctgctctttcttctctgtcccatctggcttgactttatttcaggccccatcgtctctcttctggtcaactgtaacggcctcctggttcctgcttctttctggg

SEQ ID NO: 267881 - DNA, 634 bp, Homo sapiens
ttttttttttcagtagagatgtggtttcatcatgttgcccaggctggtctcgaatgcctgagctcaggcaattcgcctgccttggcctcccaaagtgttaggattacaggcgtgagccactgcgcctggtcaatgatatctttttctaattagtttcaaacccaaatgtgttgccaatttaagaaaatgcagtaccccttctaatggttaaaaatgcaagctttgaagtcagactggtgagatgtctatctgtgttacatcatttaccagctgttaaactttgggcaaggttactccatgcctcagtttcctctactataatgtgggactaataataacaccgactttataggtgttacgggctaaatcgtgcaccctcaaaattcatatgttgacgcctggcttggtccattcaggctgttacaacaaacaccataaactgcgtaactgataaataagagaaatgaatttctcacagttcagaatgctaggatggccaaggtcaaggcactggcagagccggcgtttgctaaaggccccctttatggttcgtagatggtaccttctggctgtgtcctcatgtgatggaaaaggcaactctctggggtctcattgtaagggcactaatcccatt

SEQ ID NO: 267882 - DNA, 510 bp, Homo sapiens
cagggtgttctgctccagagcaggagcttgcaggcttgttggggccggtggggaggaatgtggtttcagaagcccacaccgccaggtggagggctcagtgcagacagccttggggccagtgtgtgtctgaatcgcacagggcagtgtttgaccagcctcacggtgatggtgcccgctttaatcgtgtcccaaaaaaattattgccatcatccagcgaggccaagagacatttctttccagttggaatatggccaaccctcctttgaaaatcctcaaagtgcaaactgtggaatcagaaaaagaaaactacccttctccaagaaacagggaggccctacgcacttggcacgtccccttctgtgagaaagactcagcgttctggagttggattcccagctgttgcttcatctgaagatgttcagaccactacggaggccagatggctgggacattagagggtgcacatgttcatcattgttttgtacttgagaaataaatatttaaacctga

SEQ ID NO: 267883 - DNA, 430 bp, Homo sapiens
aatatttatttagtcccacagtaaccagtttccaggcaccagggatacagcaatcaacaagacagatgcaacccatggattttttttccatgataatgagactaatttatttccaccgatgtcttcacgctgcccttgtaattcccgagggcttcctctccactgacttcagcaggtgtgaaaacactagcagactgcgctgagccaaactggtttcagaagcaaacagagaaagtggttccttgttcatattatgttgatctaccagttttaaggaacatttgttgaatttttctcattatgaaaatagcacataattgttattaaaaaaggaaaatatttttaaagtgtaattattcataatcttgtaaatccaaagataatgagcaccatcatctttaatgataaagtctgttcttcccctaaatca

SEQ ID NO: 267884 - DNA, 366 bp, Homo sapiens
agccaaacaggcaagccacacccctgtcacacttcctgtgaggaggatcagggaagtctctcattttaatatgatatggtttggttgtgtccccacccaaatctcatcttgaattgtaactcccactattcccacttgtcatgagaggaacccggtgggaggtgactgaattataggggtgagcttttcctgtgctgttctcatgacagcaaatgagtcttatgagatctgatggttttaaaaatgggagctctcttctcttttctgtcaccatctgagatgtgcctttcacctcccaccatgattgtggggcctccccatgccatgtggaactgtaagttcaataaaattctttcttttgtaaat

SEQ ID NO: 267885 - DNA, 381 bp, Homo sapiens
tgagaacggagtcttgctctgtgtcccaggctatagtgcagtggcacaatcttggctcactgcaacctctgcctcccgtgttcaagcgattctcctgcctcagcctcccaagtagctgggattacaggtgcccgccaccaggcccaggtaatttttgtatttttagtagagacggggtttcaccatgttggccaggctggtctccaactcctgacctcaggcgatctgcccgccttggcctcccaaaatgctggcgattaccgacgtgagccaccacgcccagcccgagcctgtactcttaatgtgcttcccccatgtgaaaagttccccaacaaatcaagggcaaatcaagccagtacattctggtgaattctcaggagg

SEQ ID NO: 267886 - DNA, 421 bp, Homo sapiens
atatatatatatatatgcaaaagaattgaaagcagggtctcaaaggtatatttgtacaaccatatacatagtagcattactcacaataggcaataagataaagcagcccaagtgtccatccacaacaaataggtaaacaacctgttgcatgtacgtacagtttaatatttcagtttttaaaaggaaggaaggccaggagcagtggctcacacctgtaatcccagcactttaggaggctgaggcggatggatcacaaggtcaggagatcaagaccatcctggataacacggtgaaaccccgactctactaaaaatacaaaaaaattagccaggcgtggtgacaggcgcctgtagtcccagctactcagtaggctgaggcaggagaatggcaggaacctgggaggcagagcttgcagtgagcc

SEQ ID NO: 267887 - DNA, 161 bp, Homo sapiens
ttttttcaatctttatattttgtgtctgttttttaccaactagcacaggaatctctagagaaaaaaattgccctttgaattttatttgtttgtttgtttgtttgttttggaggaaagaaggtaaaagtattccataagtatactttgagaaaagctaactg

SEQ ID NO: 267888 - DNA, 380 bp, Homo sapiens
tcttttttttgtttgagacagggtctcactctgtcgtccaggctggagtgcagtggtgcaatctcggctgactgcacccttgaccccctgggctcaagtgatcctcccacctcagcctctaagaaatagctgggactataggcacgccacactatgcccatctaatttttttatttttttgtagagatggggtttcaccatgttgcccagattggtatcaaactcctgagctcaagccatcctctcgtcttggcctcccaaggtcctgggattgcaggcatgcaccaccatgcccagcctatagtaacctcttcatggcttttttccactaggtcaaaaacattttgaggactgttttattcagcccaaagttcaaggtg

SEQ ID NO: 267889 - DNA, 729 bp, Homo sapiens
  misc_feature (656)..(656): n is a, c, g, or t
  misc_feature (726)..(726): n is a, c, g, or t
gaatgtgccactgcactccagccggggcaacagagtgagactctgtctaaaaaacaacaacaaaaaaaaaaacccataaaacaaaaatggaatcagactgtcatacttttggttggctgaaaaataggaaaaaaaacaaacccagccttatttatagatggattatcttgatgtttggagtaagctaaaaatagattgatacatcacatcctgccttgagtggctgtgatgtggccagggatgtagagaaatcctctccatggcctgaagctggaccagtacaagtgggcgttacctttgtgctgggagaagtgccctgaggtaaagatacatgtgtgcttttgtgggaaatggtttgtctcgttgttcagaagtgctgcagatcagtgacaagtatatatagaacaagggcatgaaattactggagtgggcaaagtgagtggatatttatgtcccacgtcagtgcctataaaaagaaacccactgcagaagaggggaggggaacctagtagttaaggttaaccaggctcagtcctcagccatcccagtccttgcactctagggatataaaatatagtcaccaaggtgttaggggacggagggttttttttgtttgttattgttttttgtttgtttgtttgttttgagactctgtntaaaaaacaacaacaaaaaaaaaaacccataaaacaaaaatggaatcagactgtcatacttttggttggntga

SEQ ID NO: 267890 - DNA, 803 bp, Homo sapiens
ggtggagatctaaatccaaactttatttcagagcttaacttttgattctgtgttttatgttttaaagtacattataatttagtaaagctgttttctgagggtatttagtgagaaaggtgatcattatgtaagtgaaagattttttatatcatcttcctcttctccctggaagagatgataaaatcagtcctcggccttgatgtgaacatcgcataccttgagttggtgttaacaaattttcttcaaccttttttcaagcagtgtcagctaaatggtgccatttgcttatcactcttctttttggttatttatcctaaagataagaacattagtaagccgtaaatgcccattttgtaaaaactgcatagctagacagatttgcaatccctattagggtaataatccatctgttatggaactggatcaattttgtaaattaaatagattaaaaagggggaaaaagggccatgacttttcccacagtaagccttttctcaaatgctaaaaagatttgggaagactcaaactatttgccattcttcctctctttgcttaactcagagagaaggccaaatatctattaaaaagaggggtgggtgcagttgtttttttttttaattcttcagggtctgattgctcctggaagtttcatatttttgacagagtttattgttaaaaccttttgatgactaccagaacatttctgctgttctcactgatcagtttagtaaatgtgtgactatgtttgaattttcttctgcacttagctcactttactgttactttcatcctgtctgttcaaa

SEQ ID NO: 267891 - DNA, 543 bp, Homo sapiens
ggcttggtgggaagggtggcttactatacagttttaatctctctttccaaccccatatctggttctgtctttctggggttcggcccggtcacttgtctccttctggattctgtgtcaaaaccttaaacacacttcctctaatcttccatttccccactctgttccctttggcaacacatttccatcagtttccactttctagaagtgcatttaagtcacttgaatgctctgggctgctcttccattcttttaactgttattggttcatttcctttggcatttcattttagtgaggttttggaaggggaaaaagacaaattcatgtgctccatccaccatcttgaacgaatgtctccaatattattttaagaaaatacagaaattttcaaatcacactggtttatttttaagtgtaaaacttaaaatattaagtgatggaatttatttgtaaaaagtagccagtgtacctggtaataggtactgttgattccacaaaatgtttatcaataattttaaagcgctcattaaataaagcaagcattc

SEQ ID NO: 267892 - DNA, 248 bp, Homo sapiens
gagaaggatgcccgaaacctttcatcataaaagaaagaataaaagtcaacatttccatgagtttctggattgtgttaatgttaaagaatcctatgtcagtcattcttatgcagatcaggaaacccatctaaatcccctgtgtttgtggctcttggatttaagttattttatttgaagatcctaactcacttctaagaggcttgtgtacccacaacatcctgaatgttaaatatatagtagtgtgtatg

SEQ ID NO: 267893 - DNA, 427 bp, Homo sapiens
tgtgcacatgtaccctagaacttaaagtataataaaaaaaaagtaaacaaagaagaagtaaaaaatagcaaccataaaaaggaatgaaagcatgtcctttgcagcaacatggatgcagctggaagccattatcctaagtgaattaacacagcaacaaaaaactgaataccacatgttctcatttataagtgggagctaaacatcagggacttgtggacataaagatggcaaaaatagacaatggggactattagacaggggcatgatagagggtggcaagagttggaaaactgactgttgggtactatgcttagtacctgggtgatgggattactcatacccaaacttgagcatcatgcaatataaccaggaaataaacctgcacatgcaaccctgaatctaaaataaaagttgaaaaaattagtca

SEQ ID NO: 267894 - DNA, 378 bp, Homo sapiens
gagggaaaaccagcacaggggcaggaggaatgttccagaaggcttgcagagtagaagacagagagagaagacagagtagcatcggcaggctgtggagtcagcaggggcctgggttgtatcccagttccagtgcattttgcaacctcccacaactcccttggtctctctgagcctcagtttcctcatcagtaaagtgggagtgataaaagctcctatttctcagagctgttgtgaggactctgtcaagaactgagcacagggcttggcccagaggaggctcccaggaaatggtgggtctgcagagctggggctgcctggctggagaagggacttgtaggggcctgagagttgcctgtgctgtgggagaagctgccagtc

SEQ ID NO: 267895 - DNA, 512 bp, Homo sapiens
gtgctgcactcgccgctcacctcgggcatgcgcgtcgccttccccgacaccaagacctactgcttcgacgccttccctaacatcgagaaggtgtccaagatcacgtcgcccgtgctcatcatccacggcatagaggacgaggtgatcgacttctcacacgggctggcgctctacgagcgctgccccaaggcggtggagccgctgtgggtggagggcgccgggcacaacgacatcgagctctacagccagtacctggagcgcctgcgtcgcttcatctcccaggagctgcccagccagcgcgcctagcggcggccccaaccggccggacctcaccccgcgccggccccccaggggctgcatgtggacccccgggcggcctaggggaccctgccccgagccaggggctgtggacgatgtacaggcaacagagctacgcactcctttccttttggaagcaagaagaaaataagtgaaaacggaaattaaagatttaaaatttttaaaaaaagaaa

SEQ ID NO: 267896 - DNA, 267 bp, Homo sapiens
tccagactacatccaatgacaaaacaaaacccaagtagtgtccacagagctctggggttcacaatggctctatccactgaacacaccccagatatcactgcgttatagagctgatgtggctcagttggagggaccccctttgtaacagccactagaaaagccataacctacaacgcaagagcattttctctttaagtcacagcgatggctgtagggagtcaggtgcattagctcacttcccgcattaaaaatagcttatgcaagttt

SEQ ID NO: 267897 - DNA, 660 bp, Homo sapiens
aatgcaggaggcggaggttgcagtgagccaagatagcgccgttgcattccagcctgggcaataagagtgaaactctgtctcaaaaaaaaaaaaaaagtggatttttttctctctggctctttgggttaacctaatgttttgtattttaaattgtgttactgtgaactccagttttaccatgggattaaaagctaatgtaaatactttttagtcttcactattttatttaacaaacatttattgaacatcttaagtgtgtcttaaaattgtattaggcactagggaaactagggaacacatatgtggttcctaccttcaacagcttgtaatctcttgggggaaggcagatttgcagtaaatagatgttagaattgataaataggcgctatggtagacatatatgaaattgatggaaacccaaaggaagaataattgataagttcttttcaggagtactagggtagggtcatgggtcaggaacagctttatagaggaatcactctggacttcaggcttggaagatcactagatgagtttgccatagaattataggaacatgctgtggcagaactaattgtatgagcatagagaggtataaggaagcatgtctgcacttagggaactgcagggagttcagtatgactgtgggaatacagtttg

SEQ ID NO: 267898 - DNA, 315 bp, Homo sapiens
agtgtccgatctcccctacccgctgggtatccagccttagcgcgcaccgactacaacttcaactttccacccatctccaggggaaattgattttgaaaaagcaggctgctgccaccacagcattatgatcctttccggctgctgaccaatctgtattttgtgaacttcacaagaggaatgagaacactggctgctgtgttacaactgggtggggggttgcacggagaagagagaaaaggatcagggagaccatttaagatgctctggtgatattacagctgaaagagacgtctaatcaataaatatcgaatgaga

SEQ ID NO: 267899 - DNA, 554 bp, Homo sapiens
tggcggtcttactagtacccaagctggtctcaaactcctgggctcaagcagtcttctcatccccgcctcccaaagggccgatattacaggcatgagtcaccatgcccagcctatgtgattctcttgactgtactataaattccttgactataagatcagggactataatagtttgttcaccattccattcacagagcctgacacacagtaggtgctcagtaactgttgggttaattggttgcaactctatggttgttattattgttgctttaaagatttgggttgtgaaaggtgtgtctgggtgcggtggctcacgcctgtaatccctttgggaggctgaggtgggaggatcacctgaggtcaggagttcaagaccagcctggccaacatggtgaaaccccgtttctactacaagtacaaaaattagctggacatggtggtgtatgcctgtagtcccagctatttaggcagctgaggcaggagaatcgcttgagcccggggaggcaaggttccagtgaactccagcttgggtgacagagcaagacttcatcgca

SEQ ID NO: 267900 - DNA, 507 bp, Homo sapiens
tcggtattgccctgaccacatggctgcatgtgagcatgccaggtgaggtgagcaggagagatgttctaggcagcgttggatgattctctgtcacattcctttgtggtcaactgaattgctctcttcaactgcagctttcactgaggccacttgaggttgcacaactccttccagacacagccatctctgaaactgggagcccagtcagcccccaagcaagtacaacctgcaagtatggagaggtaacgccctaggagccatctctaaccagtgaagaatgagagccagtaagcaagtctagccactcctcttttggagggaacattctagaaggcattctgcacacttgccaaaggtcacagaagaattgagcccctgttgcccaaagcagcaaccttaatgatgcacactcagtggcttttcattcttccctgtctcactctctcccttttctttcacctctgctttttgggatctcctcccaaataaaccacctgcaccaagaac

SEQ ID NO: 267901 - DNA, 426 bp, Homo sapiens
aatgacaaggtttcattctttatgtgaatttaagggttattttccttaagctagaataaagtattgccttatatacacaatggagaagggatttatttgtacagattatttattgattatttctttaagggatttatttgtaaagaccaaatatgtttggattttcagattgtctagcaatattatcctcctggataaccctgataccaatcaattaaccgtcttctaactctcctccttccctcccttaccttttctacacctattacctaagcatttgaggtacgccaaaggaagcagagtacagacaaaagaggtaatgaatactgtaatgatctaagtgctatatattcctatgtgcaaactgctatggaactgtcacgtactagatgctatgaagttaataaaagaattgagtaaaggtcc

SEQ ID NO: 267902 - DNA, 654 bp, Homo sapiens
gcgtcgacataaaataaagacactgcccagtccctccctcaacgtcccgagccagggctcaaggcaattccaataacagtagaatgaacactaaatattgatttcaaaatctcagcaactagaagaatgaccaaccatcctggttggcctgggactgtcctagttttagcattgaaagtttcaggttccaggaaagccctcaggcctgggctgctggtcaccctagcagctgagggactcttcaatacagaattagtctttgtgcactggagatgaatatactttaatttgtaacatgtgaaaacatctataaacatctactgaagcctgttctgtctgcaccgacattttcattgagtacggattcttcctaccagatacagctgctctacaactttcgagggctggtataaaactagcttttacctatttttaaaaattacatgaatagtaaaaacttggattaacccagtattcgggtattttcaatttccttgggagcttagaggacggacaaataaaaagattatttcaacatcaaatatacgctattgtttacatattaatataaccacatatatgtataaattcagttactttttagcaatactataaaatccaacagaaaaaaatagcatttactatttctaaaaa

SEQ ID NO: 267903 - DNA, 1071 bp, Homo sapiens
agttctattttaaagtcacagtgggaattccttagtgaggagggataaaaagttcctgaataagacactgagaacatctagatttattattttctctattttacttcccaacttacagaataaactgtaaattaaagaataactccataggaaataaaagaggtcttacaaacttagtttacaaattccagctacagtagttggagttttacttgatctatgtatttctatgtaccctgtaactaagcttctagccatcttaagtgtaaaccacagatcatttactaaagaacatgattctcaacagttctaggaacagttataaatggtctaaaggtgttctacattttgaggccccaggatatccttttattttatatatctgcaaggtagcaaaggatagctatacaccttgacacggcagagatccagtgtaaaaaggtgcttcactagtttgttttgtcaaaaaaaaaaaaaaaaaaaaaagctcatatatatttagctattaaacacataggcaacataattcattacactcgatacagctttggtataaaacttataatttatgaggtgatgttaatagcataaattaatataccttttctcttaaaatctacaataagtattctgaaagctcattggggaaggaaatttttaaataaaagttttaaagctgtgcgtgatgggaaaggattctgtattctgaagctgagatgagagcctggaggagaaaggaaaaagtcctatgcaagacactgtgggctacaaaaccaaatgtttcctctttcttccgctctcttcaatgatgagtcacctttagtttcttttaaaactattttcttattttaaaaactgccctaatttccacaaggaatccctgagacatactcaatactatacagtgaaaagaactatcactgttgagaggaacagattcaacccttccaaacagatgaagacaatgtcaacaagtgtcagacttcccatcatttcagcactaatccactggagccaactgtaccttaatgatgcaggttggagtcattttagggcaaatcagtctattcc

SEQ ID NO: 267904 - DNA, 240 bp, Homo sapiens
agcaattaaacaatagcttcatttccagcaaattaacaaccctaataggtaattgcgacataaatgaagataaatttgttttaatacaacgagataaaaagaatacagacaagaactgaatttcagattaagaattcagacttcagtacttcaggaaaaacttaaaagcttcactagaagaaatttaagcaagcttggctttttaaccacagcctattttagattagagggttgtttgct

SEQ ID NO: 267905 - DNA, 456 bp, Homo sapiens
acttcccatagcctcatcacatcctgcagtctctgaagacatgatactgattggcagaaaacagagtcatgctaaatggatgcaacattccctaaagttgatagaatgttctgcctacaactgttcctgataaaagtattgagaaaccatgacatgcctttgcatggacatggatggagctggaactaacacaggaacagaaaaccaaataccacatgctttcacttataagtgggaactaaatgatgagaacacatggacacatagaggggaacaacacacactgaggcctttcagaaagtggagggtaggaggaggaagaggatcaggaaaaataactaatggatgctaggcttaatacctgggtgatgaaataatctgtacaataaatccccatgacacaaatgtatctatgtaacaaacctgcacatgtacctctgaacttaaaagttaaaa

SEQ ID NO: 267906 - DNA, 281 bp, Homo sapiens
gactttttcaacaactttggtttggtttcagaccacaccgattcagattgcagcagggggaataggaaatggggcttgggaggagtagaattgataactggcatttccgcctctaatggagattcggttattggagaactcaaatagaaatgacagctctgcccaggtgcagtggctcatgcttataatcccagcacttcgagaggccgaggttggggaggatcgcccaaggccaggagtttgagaccagcctggacagtatagtgaggccctgtctatac

SEQ ID NO: 267907 - DNA, 696 bp, Homo sapiens
tatatatatatatatatatcgagctcaaaacaagctggaaaaaatgtgaatatcaatttcccctctcacaaagcttcagtgtgcctagtccactggctaaatccctgtttagagataattagttcagttggctactgcaggtttgtaataaacctgaaaaactactgaagcagagttaaaacatgaataatactggcaagatgctccagttaaagtttcttcccacagctcatttcattccttcagaaaactaaaggagcaaaaataattttctattctgcatgggttataagttatatttccttgtgaaagtatagttatcacttcagttctaaccatgagatttatttatttaattccttctctctttcccaaaatatctggttaaactcttgggccaaatgtaagaagtaaataataatttagaatatctgacttaatactaaaagatgatgaccacattgaccttataattctctcagagcccagactgtgaacctgcactccctggaggaatggctgattccaagtgtggggaaaatgtacaagataagcatagaacaccagtttccttattttgctctttcgtacaacaccagacaatgtgctcatgtcaaaaggactcagaacccaacatgaagatgcacccagcattcactgcacccagcattcaacgaagggaaaaaataagcacca

SEQ ID NO: 267908 - DNA, 435 bp, Homo sapiens
aaatctgacttcaaagttactcttttcaaactgaagctcgtttttagaactattcatgatataggaaaatacattcataactgaaagctttttttgggttattctttgtaacattacatgccgcttttcaccaatgaaaagaatcctcaagaacctggaaaaagcaattcctttttgcagttaaaatgaagataaagagccttgaaaaatggctgatgctaatagttcatggagattaataagtgatatgtgaaaggcagactgtcctgtagttgcaaaatgttacatagtttgtacaccttgtcagcgttgtgataacatgaagtcatagtttaattggtaaacaagaaaagcttccaataaagtgtcccatggatgatcttttcctttgagactccagcctgggtgacagaacaagatccgtctcaaaaaaaa

SEQ ID NO: 267909 - DNA, 225 bp, Homo sapiens
cctctcccgttgcctaggctggccgtctgcccaaagtcactgccctcgatcagctccctgcgttcccgcccatcaagtgacatcactgtcaccctattcagcccaagtgagaccaccacgagatcctccatattccgagacagacccaactctgttctgctctggggtctccatcaacttcactgcagaccttgggctgctaggccaggtttctttaaacaggga

SEQ ID NO: 267910 - DNA, 619 bp, Homo sapiens
acagtttgctggacctcacagaggtgattgatgcagcatccccccgggagccgggtgaaatcacagactccagcagcagcttctgagatgactgtggctaacaaatttttccagcaacacagagctgagaggattgggatctcagagaagaaggagccctgcattcttggcttcatctgcctggagtggagtttccatcatgctgagctggaggtgcacggggccagggaaggagcaagtcgtagctcaaatgtcccagactcttactattcttattgaaatttagtaggttttcttgaataaatgtttcttcatctgctgtatgcccttaggacaattcccaggaacatacatctatattgatatcaatataaatataaatagataattatgtatgtataactttagcagttttacttgttctgctggaaagaaggtctggaaggtttgcagagctgctcatgccaccattccagaagttatccaccagttcattgctttttgctcagtagtattccattgcatgtctatgccacaatttgtttatccattcacctgttgatggacatttgagctgtttcctgtttgaggctattacaaataaagctgctttacaaat

SEQ ID NO: 267911 - DNA, 330 bp, Homo sapiens
agtttattagcacttgctgtacccatcgtgtgagaggcctcaattcagaagtatttctctctcaaggcatgttgtgaacagcacaaggtcagacataaccaggtccacacacgtttatgtctttccacagggtgggaatatattgatgctatttcaattataaaagccacgagctacgaggagttgcctcgagacaattcccttcagtactacttgttaacttggtagagccatgggcaaaggctcaagccagtccacgtgtcagtcaatactgcaaactatacatcatagtgtacttaaaatacaaacgctatggtttaaacattctcc

SEQ ID NO: 267912 - DNA, 353 bp, Homo sapiens
gtttagattttaattagagatgtgctggaccttaatgtaaatgtatttagatagggaagccaaagacactaaactgaaaaccttgcatttcctacagatggtttattaaattgaaatatgtctcttaacctctggtcttgaccctgctgttgcaaagatgagtcattgaaacatcagcctgtctgttatcctgaatgactggctggagtggcccggctggaggcaccacttggtaacacatgaaactggttagttcatgaggatttttacttttattttcgcctacagtcaaactacctttatccaattagaattttcaccctcatctatttattatctcctgctctgggtaa

SEQ ID NO: 267913 - DNA, 171 bp, Homo sapiens
cccttcctcccgctacacccttcctcccgctatgcccttcctcccgctataccctcttcctcccgctacgccctcttcctcccgctacaccctcttcctcccgctacaccctcttcctcccgctatgcccttcctcccactacaccctcttcctcccgctatgctcttcct

SEQ ID NO: 267914 - DNA, 305 bp, Homo sapiens
aagcagttaatacagactcatctctggcattggccagctccgaaggtgagggcctcaagcagttaatacagactcaggatgagagattctcgtgatttagacaagggtagtagcagtggatgtggtgagaagtggtccagctctggatgtattttaaaggtagaacacatgggattcttctgatggattggaggtggtggggaatgaacagattcaggtctttatttaaagggaaatttcctgtttattgtctgcaaatgatttttctgttccctatattgagtcctataatttttaagtccttg

SEQ ID NO: 267915 - DNA, 471 bp, Homo sapiens
gaaaccggttggctttgctttggttttgagaaccagtggggaagagggtaggcatactgggctgggcgcctttccctctttgagtagttttgcgtgagataaggaagagcagaatgtgtaattgtagggccaaaataatcttgtttgtaaacagtgcctgtgagctcctttagtgcttcctaatggccgtgctgtgcaagttgttggttgggttaatctagacagtcctcattcattcattcattcatttctcacatgaccacaacaagagtccttgcctagaggcaagtgctagacagcatagtggttaagagtaggctttggagccagacttcctgagttcaaattctggctcagcaactttccagctgtgtgtacctgggcacattgcttagtctccctgtgcctcagtgtcttcgtctataaaacaaggatgataacagagagagatattatgaagagtaaaaagtt

SEQ ID NO: 267916 - DNA, 563 bp, Homo sapiens
gttttgccatgttacccaggctggtctcaaactcctgggctccagccatcctcccctctccgcctcccaaagtgctgggattacagtggctctatggaacaaattcatatgttaataccctaggatgggagttagggaacttttctgtaatgggacagatggtaagtatttcaggcttttgaggctatacagattttgtcacaactactcaactctgatgttgtagctgaaagaagccatagataatatgcaaacgaatggactgggctgtgttaaattaatactgtattcacagaaacagacagtggactggatttgtcccaggggctgtagtttgccaactcctactctgggagaaaaattgttttgcttacttatctgtccacagtctacaggggagtgtagtgcttcaggcaaattgcttcttttataatatatgcctaaactgagcatggtggtgcacgcctgtaatcccagctacttgagagactgaggtgggaggatcacttgtgccccaggagtttgtgtccagcctgggcagcatagagaaaccctcatctctt

SEQ ID NO: 267917 - DNA, 833 bp, Homo sapiens
attccatacattccagaagcctaggcgttgatgggagctgtctggagcaggggtccccagcccccaggccgcagactgatactagtccatgacctgttgggaactgggctacacagcaggaggatctctaccaccagtcctatgaatgcgtttgtgtcctcttcgcctcagtcccagacttcaaggagttctactctgaatccaacatcaatcatgagggcctagagtgtctgaggctgctcaatgagataattgctgattttgatgagctgctctccaagcccaagttcagtggggtggagaagatcaagaccatcggcagcacctacatggcagccacaggcttaaatgccacctctggacaggatgcacaacaggatgctgaacggagctgcagccaccttggcactatggtggaatttgccgtggccctggggtctaagctggacgtcatcaacaagcattcattcaacaacttccgcctgcgagtggggttgaaccatggacccgtagtagctggagttattggggcccagaagccgcaatatgacatttggggcaacacagtgaacgtggccagccgcatggagagtacaggagtccttggcaaaatccaagtgactgaggagacagcatgggccctacagtccctgggctacacctgctacagccggggtgtcatcaaggtgaaaggcaaagggcagctctgcacctacttcctgaacacagacttgacacgaactggacctccttcagctaccctaggctgagattgcactcgccttctaagaacctcaataaagagactctggggtgtctggagcccaaagatg

SEQ ID NO: 267918 - DNA, 1309 bp, Homo sapiens
cacagaggtgtgtcctgaaaggccccaagatgctgcactggctgcctgcactgtctggcctggtggccacacgaccaggactgagaatagccttgggcaccgccaccatcctccttgtctttgccatggccattaccagcctgttcttcttcccaacatcatcagactgccctttccaagctcccaatgtgtcctccatgatttccaacctctcctgggagctccctgggtctctgcctctcatcagtgtcccatactccatgcactgctgcacgctgggcttcctctcctgctccctctttctgcacatgagcttcgagctgaagctgctgctgctcctgctgtggctggcggcatcctgctccctcttcctgcactcccatgcctggctgtcggaatgcctcatcgtccgcctctatctgggccccttggactccagaatgagtactactgccgcctggacttcctgtggaagaagaagctgaggcaggagagggaggagacagagacgatggagaacctgactcggctgctcttggagaacgtgctccctgcacacgtggccccccagttcattggccagaaccggcgcaacgaggatctctaccaccagtcctatgaatgcgtttgtgtcctcttcgcctcagtcccagacttcaaggagttctactctgaatccaacatcaatcatgagggcctagagtgtctgaggctgctcaatgagataattgctgattttgatgagctgctctccaagcccaagttcagtggggtggagaagatcaagaccatcggcagcacctacatggcagccacaggcttaaatgccacctctggacaggatgcacaacaggatgctgaacggagctgcagccaccttggcactatggtggaatttgccgtggccctggggtctaagctggacgtcatcaacaagcattcattcaacaacttccgcctgcgagtggggttgaaccatggacccgtagtagctggagttattggggcccagaagccgcaatatgacatttggggcaacacagtgaacgtggccagccgcatggagagtacaggagtccttggcaaaatccaagtgactgaggagacagcatgggccctacagtccctgggctacacctgctacagccggggtgtcatcaaggtgaaaggcaaagggcagctctgcacctacttcctgaacacagacttgacacgaactggacctccttcagctaccctaggctgagattgcactcgccttctaagaacctcaataaagagactctggggtgtctggagcccaaagatg

SEQ ID NO: 267919 - DNA, 1394 bp, Homo sapiens
cacagaggtgtgtcctgaaaggccccaagatgctgcactggctgcctgcactgtctggcctggtggccacacgaccaggactgagaatagccttgggcaccgccaccatcctccttgtctttgccatggccattaccagcctgttcttcttcccaacatcatcagactgccctttccaagctcccaatgtgtcctccatgatttccaacctctcctgggagctccctgggtctctgcctctcatcagtgtcccatactccatgcactgctgcacgctgggcttcctctcctgctccctctttctgcacatgagcttcgagctgaagctgctgctgctcctgctgtggctggcggcatcctgctccctcttcctgcactcccatgcctggctgtcggaatgcctcatcgtccgcctctatctgggccccttggactccaggcccggagtgctgaaggagcccaaactgatgggtgctatctccttcttcatcttcttcttcaccctccttgtcctggctcgccagaatgagtactactgccgcctggacttcctgtggaagaagaagctgaggcaggagagggaggagacagagacgatggagaacctgactcggctgctcttggagaacgtgctccctgcacacgtggccccccagttcattggccagaaccggcgcaacgaggatctctaccaccagtcctatgaatgcgtttgtgtcctcttcgcctcagtcccagacttcaaggagttctactctgaatccaacatcaatcatgagggcctagagtgtctgaggctgctcaatgagataattgctgattttgatgagctgctctccaagcccaagttcagtggggtggagaagatcaagaccatcggcagcacctacatggcagccacaggcttaaatgccacctctggacaggatgcacaacaggatgctgaacggagctgcagccaccttggcactatggtggaatttgccgtggccctggggtctaagctggacgtcatcaacaagcattcattcaacaacttccgcctgcgagtggggttgaaccatggacccgtagtagctggagttattggggcccagaagccgcaatatgacatttggggcaacacagtgaacgtggccagccgcatggagagtacaggagtccttggcaaaatccaagtgactgaggagacagcatgggccctacagtccctgggctacacctgctacagccggggtgtcatcaaggtgaaaggcaaagggcagctctgcacctacttcctgaacacagacttgacacgaactggacctccttcagctaccctaggctgagattgcactcgccttctaagaacctcaataaagagactctggggtgtctggagcccaaagatg

SEQ ID NO: 267920 - DNA, 1106 bp, Homo sapiens
tacttacaccttaagctctacttctaaactgggggtggggtgggggtggtttcaggcatcatggagttggggctgaacactcaggagctgggcttcccctgctctgtgtctccccatggccccgggtgaccctccccagaatgagtactactgccgcctggacttcctgtggaagaagaagctgaggcaggagagggaggagacagagacgatggagaacctgactcggctgctcttggagaacgtgctccctgcacacgtggccccccagttcattggccagaaccggcgcaacgaggatctctaccaccagtcctatgaatgcgtttgtgtcctcttcgcctcagtcccagacttcaaggagttctactctgaatccaacatcaatcatgagggcctagagtgtctgaggctgctcaatgagataattgctgattttgatgagcctgatcctttaactccaaaggcttggggctgggcttctgggagaggtgatggagagagtaagagagactggggacaggactcttctctatatacagctgctctccaagcccaagttcagtggggtggagaagatcaagaccatcggcagcacctacatggcagccacaggcttaaatgccacctctggacaggatgcacaacaggatgctgaacggagctgcagccaccttggcactatggtggaatttgccgtggccctggggtctaagctggacgtcatcaacaagcattcattcaacaacttccgcctgcgagtggggttgaaccatggacccgtagtagctggagttattggggcccagaagccgcaatatgacatttggggcaacacagtgaacgtggccagccgcatggagagtacaggagtccttggcaaaatccaagtgactgaggagacagcatgggccctacagtccctgggctacacctgctacagccggggtgtcatcaaggtgaaaggcaaagggcagctctgcacctacttcctgaacacagacttgacacgaactggacctccttcagctaccctaggctgagattgcactcgccttctaagaacctcaataaagagactctggggtgtctggagcccaaagatg

SEQ ID NO: 267921 - DNA, 1510 bp, Homo sapiens
tacttacaccttaagctctacttctaaactgggggtggggtgggggtggtttcaggcatcatggagttggggctgaacactcaggagctgggcttcccctgctctgtgtctccccatggccccgggtgaccctccccagaatgagtactactgccgcctggacttcctgtggaagaagaagctgaggcaggagagggaggagacagagacgatggagaacctgactcggctgctcttggagaacgtgctccctgcacacgtggccccccagttcattggccagaaccggcgcaacgaggatctctaccaccagtcctatgaatgcgtttgtgtcctcttcgcctcagtcccagacttcaaggagttctactctgaatccaacatcaatcatgagggcctagagtgtctgaggctgctcaatgagataattgctgattttgatgagcctgatcctttaactccaaaggcttggggctgggcttctgggagaggtgatggagagagtaagagagactggggacaggactcttctctatatacagctgctctccaagcccaagttcagtggggtggagaagatcaagaccatcggcagcacctacatggcagccacaggcttaaatgccacctctggacaggatgcacaacaggatgctgaacggagctgcagccaccttggcactatggtggaatttgccgtggccctggggtctaagctggacgtcatcaacaagcattcattcaacaacttccgcctgcgagtgggtgagagacttcccctgctgcagcagtctggtacctcctcaccttcctgagcttgccccactccaagtcctttgttagctgctcccagttcatcctgaagcccctttcctgactcactccctgggatggggtgtgaaggtgctgggcaaggaggtacgaggctctcccactctttttcttaagctacattcctccagcccttagagacccctcctctcctctagggccccccaggctcttctcccttccttccagttccttgtggcttcctcttcccctcttccttctccaagtctgtcattaccacatccctcattagggttgaaccatggacccgtagtagctggagttattggggcccagaagccgcaatatgacatttggggcaacacagtgaacgtggccagccgcatggagagtacaggagtccttggcaaaatccaagtgagggaaccacattggaggcatagggggagggggactaagaatagggccacctccatattccctcgcccccctccaattgtaggtgactgaggagacagcatgggccctacagtccctgggctacacctgctacagccggggtgtcatcaaggtgaaaggcaaagggcagctctgcacctacttcctgaacacagacttgacacgaactggacctccttcagctaccctaggctgagattgcactcgccttctaagaacctcaataaagagactctggggtgtctggagcccaaagatg

SEQ ID NO: 267922 - DNA, 1342 bp, Homo sapiens
ggtgaaaccccatctctactaaaaatacaaaaattaaccaggtgtagtggcccacgcctgtggtcacagatacttggggagctgaggtgggaggatggctccagccctggaggcagagcttgcaatgagccaagatagtgacactatctccactcccacagcctgatcctttaactccaaaggcttggggctgggcttctgggagaggtgatggagagagtaagagagactggggacaggactcttctctatatacagctgctctccaagcccaagttcagtggggtggagaagatcaagaccatcggcagcacctacatggcagccacaggcttaaatgccacctctggacaggatgcacaacaggtacggcaacccttccttacctaccatcctcctctgggctctcattgatgggcttattagtgggacttattcctgtgccctcactggcccaccctggtgggcgggcccattgccaggatgctgaacggagctgcagccaccttggcactatggtggaatttgccgtggccctggggtctaagctggacgtcatcaacaagcattcattcaacaacttccgcctgcgagtgggtgagagacttcccctgctgcagcagtctggtacctcctcaccttcctgagcttgccccactccaagtcctttgttagctgctcccagttcatcctgaagcccctttcctgactcactccctgggatggggtgtgaaggtgctgggcaaggaggtacgaggctctcccactctttttcttaagctacattcctccagcccttagagacccctcctctcctctagggccccccaggctcttctcccttccttccagttccttgtggcttcctcttcccctcttccttctccaagtctgtcattaccacatccctcattagggttgaaccatggacccgtagtagctggagttattggggcccagaagccgcaatatgacatttggggcaacacagtgaacgtggccagccgcatggagagtacaggagtccttggcaaaatccaagtgagggaaccacattggaggcatagggggagggggactaagaatagggccacctccatattccctcgcccccctccaattgtaggtgactgaggagacagcatgggccctacagtccctgggctacacctgctacagccggggtgtcatcaaggtgaaaggcaaagggcagctctgcacctacttcctgaacacagacttgacacgaactggacctccttcagctaccctaggctgagattgcactcgccttctaagaacctcaataaagagactctggggtgtctggagcccaaagatg

SEQ ID NO: 267923 - DNA, 270 bp, Homo sapiens
tcccaaccagaaatagcaggatccacccctttggacgagtcttcccctgactcatccctgggtcagctgaaacccagcacaagccaccactgtgcccaagaagctacctgcctcttcaactcctcatctcctctgcagttcttcttcccaacatcatcagactgccctttccaagctcccaatgtgtcctccatgatttccaacctctcctgggagctccctgggtctctgcctctcatcagtgtcccagtgagtgttcccacatgccct

SEQ ID NO: 267924 - DNA, 332 bp, Homo sapiens
cacaatctgacatttaggagtccccagtgagagtgctggctgcctgcccactctccctaaaaatgagtttgcccgctgatgagctccgccatgcacacggaatttccaattaactttttagagcctcactgctaatataaacatctaaccaaggatcagctgatgtataaggagaatcaagaaatgataggaacaaaagcactaaaataagtgatggggaaaaggcaatctttaggaaacaaagacagtgctatttcagaagactgaaggaacttttccatagttttctcatagagttcaagaggacagtgcctcataaaacaaaaatagaa

SEQ ID NO: 267925 - DNA, 398 bp, Homo sapiens
tagagctggtaaatgagacaggatatcaaacagtatatcaaaatttgttgatggtatggtataaccaaatgaatgatatagtcagcaaagtatctaatcttgaaccactttttctcagagaatagagatttagcccaatggtaggtatttatgtgcttagaatatttgtagttaataaaaccttccccaggattgcataagagttgtagaggctgcagcctggccaacatggagaaaccccatctctactaaaaatacaaaatattagctgggcgtggtggattgtgcctgtagtcccagcttcttgggatgctgaggtgggagaatcagttgaacccgggaggcagaagttgcagtgagctgagattgcacactgcctgggggacagagtgagactc

SEQ ID NO: 267926 - DNA, 696 bp, Homo sapiens
atgaagaattatgtcatagactatctcaaactttgaacagggctctgtaacagatactgaagccacaactaattgatttccttagagagggaagaatgacccagcagcagcctctctccttcctcagtttgcttctattccctcaaatgctcattatttttttctcactaactctactgttagcatttaattcccttttctgttgttaaatttaagggaaaaatgaaatattactgcatatgaaaaatactgagtccttatactgttcagtagcatttgagacttaggttttgtcttggacggatgaattcatatatgttctgtttccagaattttttttttttggtagggggaagggttagatggagggacgatgtcacataattatatatttgcagtttaaagggaaaacattttaagtggaaaaaaaacaaacccaaggtaagttttatccttgtacatgttttaaaattaaccatattgtagactgcataacagattgttgaagatagaaatcaaatttaatgtgctttataaaaactgaaaatacagttttcaatttcatagtgcataaatatgcaggtaccaagaggttctgactagaataattatagtagacagttgttaatgaagattgatgaggaagagaaaaaattagttgagtgaaactccagaatactgaaaaaaaggaaagaa

SEQ ID NO: 267927 - DNA, 740 bp, Homo sapiens
gggatttgggagggtagaatttacaggggtgccagttggcagctgacaggtttagattctggggcttaaaaactaatagatgtgtggcctggttcagtggttcatgcccgtaatcctggcacttcaggaggctgaggtaggcggatcatttaatcccaggagttcgacaccagcctgggacaacaggcatgtaccaccacacctggctggttattttttgtagagacaaggtctcactattttgccaggattgttctcaaactcctgggctcaaacagtcatcctgccttggcctccaaagtgctaggattacacgtgtgtgtgccaccacacgggccctatggaaccattacttattggcatatgaaagaaccatgactcaaggattgcaaaaatccctcatagattgagacctgtaagcaattttggctttagtctgagagagttgcttctctgtgttcctgttgagttagtttcttacaatgtggtgggagactggagactgagaattgttcttgaaaaaggggtaaccaggccgggcgcggtggctcacgcctgtaatcccagcacttgggaggccgaggcgggtggatcatgaggtcaggagatcgagaccatcctgtgtacaaggtgaaacccgtctctactaaaatacaaaaatagccggggccgtgggggcgcctgtagtccagtatcgggagtcgagcggagatggggaaccggaacggactgggaccgat

SEQ ID NO: 267928 - DNA, 503 bp, Homo sapiens
gggatttgggagggtagaatttacaggggtgccagttggcagctgacaggtttagattctggggcttaaaaactaatagatgtgtggcctggttcagtggttcatgcccgtaatcctggcacttcaggaggctgaggtaggcggatcatttaatcccaggagttcgacaccagcctgggcaacgtggcgaaaccttgtctctactaaaaataacaaaaaattagctcgacatggtggcatgtgcctgtagtcccagctacttgggaggctgagatgggagaattacttgaacccaggaaggcaaggctgcagtgagctgtgattacaccaactgcgcttcagcctgggagacgtgagtgagaccctgtgttaaaaaaacaaaagcaaggccagatgcaggctgcacgcctgtaatcccagcactttgggcggccgaggcggatggatcacgaggtcaggagatcgagaccatcctggctaacacggtgaaaccctgtctctac

SEQ ID NO: 267929 - DNA, 1382 bp, Homo sapiens
cgcctcctaggttcaagtgattctcctgcctcagcctccccagtagctgagactacaggcacctgccaccacgcccggctaatttttttatttttagtagagacggggtttcaccatgttagccaggatggtctcgatctcctgacctcgtgatctgcctgccttggcctcccaaagtgctgggattacaggcgtgagccaccgcgcccagcctgactggtgtagtcttaagacttttctcagaatcgtatctcatttttttctgggctggtctggaagaacactgactgcactcaggccaagtgggttgggtgatacaagctgccagattgctgccacgaacctggagtagtttgcagacccttgcgaggagtatttgtctaagcgagatgttgaaaggacccagaggaaattgtcagagttcccttggtcgcaggaactagtgctgcatagggtacacttttgttcctgctccagcaaatgcagcactcaggtgcttgcctgggcaggtccgggatgccctgcctctgtggctgcccattgggactgaatcactgttggcatcccttatttcagaggatgaattcatgtgtcatttgggtttggcagtgagctaagagctaaatggggtaaacattgcccactggcaggaaacatataatcttgtctgaagctaatggaccgttacttttttggttgtttgagacagtgtctcgctctgtcaccgggctggagtatggtggtacaatctctgctcactataaccttgagctttgcagcctcaagtgatccctccacctctgcctcccgagtagcctgggacaacaggcatgtaccaccacacctggctggttattttttgtagagacaaggtctcactattttgccaggattgttctcaaactcctgggctcaaacagtcatcctgccttggcctccaaagtgctaggattacacgtgtgtgtgccaccacacgggccctatggaaccattacttattggcatatgaaagaaccatgactcaaggattgcaaaaatccctcatagattgagacctgtaagcaattttggctttagtctgagagagttgcttctctgtgttcctgttgagttagtttcttacaatgtggtgggagactggagactgagaattgttcttgaaaaaggggtaaccaggccgggcgcggtggctcacgcctgtaatcccagcacttgggaggccgaggcgggtggatcatgaggtcaggagatcgagaccatcctgtgtacaaggtgaaacccgtctctactaaaatacaaaaatagccggggccgtgggggcgcctgtagtccagtatcgggagtcgagcggagatggggaaccggaacggactgggaccgat

SEQ ID NO: 267930 - DNA, 278 bp, Homo sapiens
cctcctaagaccaccgagactcccacttacaactggactctcttcagtgttctattcataaagccctgccctatggctttttaagagaataaacaggccagagcaccaacccagactaaaaagcatgttcctattatattttgctttattctgattaactttgaacagcagtcattaacaagggaaaggctccactttggtctgaactgcttatgttgggaattttttcatccagcggcacctctatttaccttggccctgactctgtggctcagttg

SEQ ID NO: 267931 - DNA, 1015 bp, Homo sapiens
agttaacatcaacttcacaaactcttccaaacaataaaatatggaagaatacttcccaattcagtctatgaaaccagtattaccctgaagccaaaaccagaaaaagatctcacaggaaaactacagaccactacctctttcaaatatagatgcaaaatctcaacaagacactagcaaaccgaatttagtaacacataaaaaggattatacgccatgaccaagtggaatttatcttaggattccaagcttggtttaacatcaatcaatataataatccatattaatagaataaaggagaaaaaatatatgatcatctcaatagacacagaaaagcatttaacaaaattcactaccctttgatgagaaacactcagtaaactagtaatagaaggaaacttcctcaatctgataaactgcatctgttaacaaaaaaaaaacccataactaacatcatacttaatagtgaaagactgactgctttctccctaacatcaggaacaaaacaaggatgtccactctcactacttctattcaacattacactggaggttcttgccagggcaaagacaagaaaaagaaatgaaatccaaattggagaggtaaaactatattttccggtgacatcatactgtacgtagaatattctaaacaacacacaaaagacaattagaactaatagttcagcaaatttgcaggatgcaagatcaaaatgtaaaaatcaattgtggttgtatgaattatcacttaacaatctgaaaatttaattaagaaaacacatttacaatagtatccaaaagaataaaaaatttgggaataaatgtaacaaaagaagcgtaagatttatacaccaaaaactgcaaaacattgtggaaagaagttaaaaagaacctgaataaatgaaaaaacattctgtattcatggattggaagacttaataatggtaagatggcaatactccccaaattgacttatgcattcaatgcagtctctttaaaatcctagctgaaattcttac

SEQ ID NO: 267932 - DNA, 434 bp, Homo sapiens
ttatttttatttcttctgttttccattccactaatatttgcttatctttattaatgtctgcttccaagttcttttactttgataaactttttccagtttttatgatgcatcttatctcaccaatgataagaaaatacagatatatttattattcggtgctatgagcttgaacctccaatgatatttcagtttcatgatggattgtttgtttgactccaatacaaagataattatttctgaaataggcttctcctgagagaagaacaagccttacagttacaggcatgtgtattaacaatttttaaaaaagaaaatttgtctgggcccaaaagaagaatacatagcatgcaagccagcactaaagccaatgagatgaatgtgatttctgagactatgttttctaaaatagaaaataaaatgacatgcacaaatat

SEQ ID NO: 267933 - DNA, 718 bp, Homo sapiens
  misc_feature (19)..(19): n is a, c, g, or t
agataaaagtaaaaaatgngccgggctcagtggctcacgcctgtaatcccagcactttgggaggccaaggtgggtggtttcaccatgttagccaggatggtctcaatctcctgacctcgtgatctagctgcctcggcctcccaaagtgctgggattacaggtgtgagccatcgcgtctggcctgaaatacttatttttaagctagaaatagtttggcaataaggttgtgaaactggacagataatagcaattagttactgatcaagtgaacaatttaataatcgaaaaaactcttgactataagaaacttgaattgcatacagggacttaattacccagaggaactaaatttaaaagaaatttcaggctgggcgcagtggctcacacctgtaatcccagcactttgagaaggtgaggtgggcagatcacttgaggtcaggagttcaagaacagcctggccaacatggcaataccccatctctactaaaaatacatacctgtaatcccagctactcaggaggctgaggcatgagaatcacttgagcctgggaggtggaggttgtagcaagctgagatcgcaccactgcgctccagcctgggcaacagggccagactaattcattcattgattcataaataaatgttatagagctcctttacattgagggatcatttcttgttcctactgtagtagtcaataaatgttttggacaactgg

SEQ ID NO: 267934 - DNA, 349 bp, Homo sapiens
cttttcaggcaaaacaggaaaaccagaccagcagagaggagagagaccagcaatcagaccctcccagagacaatcattgttaacatattgtgtccataagccaaggaatgcaggcagcctttggaagctgtgaaaggcagggaaatggattctctccagaagcctccagaaggctagcccaggcttgtttgcatgttggtggaaaggagcaacaagaatagtgagacctcttaagtcctaggcttcgaactgacacgttgtcacatccgccacttctacggatcaacaaaaatcacaaggtcagccctgattcaagggcttagaaaataaacttaatctctgatgaaaa

SEQ ID NO: 267935 - DNA, 174 bp, Homo sapiens
tttttttaataactgtcaacttttccctaggcagcagggctgtgggcccatctacagctagggagtagagactgacagggactcttccagctacagatgcttctgggaaaccttcaagtgaacactgtctaggatagtatgaatcccctttgctttagcgcagatgtttttgtg

SEQ ID NO: 267936 - DNA, 1283 bp, Homo sapiens
tgagccctggaggtcaaggctgcagtgaaccatgatcaagccactgcactccagcctgggtgacaagaggaagaccttgtccccccaaaaagaaaaacattagtttcagtcaaacccacgttcgttccctaccatgtgtagctgtgggaccctacacaagtgaaattgcctctgagccagttgcctcatgtaaaactgagatgaccatacttaacatggccatcgcaataactagtgttggttacctggccgcttaagtaatttgtgtaagaacaggtttaccccacccaaaagaactgggccatggagagccttcataggaagaaaaggacttatctcctcttggtcaaagtgaccaaatgactgcatagccctcgcagcttccccagtctccccacccccacagaatttgagagaagcagctgagcatctagagacagctgggttacctgcagcttgcgagtggtccatcgcaggacagtcaaggccatgccaggggcactggtgctatatacacaatctgcaggacctgctccaccagggccatggccttgaagtggtgcttgttccagaagctgggttgggggagggtattgcacgggggtcagtactaggggtcatctcagggcggttgcctgcacccaggtccctgaagcactgaggggctaatggcttctaagtagacatcttacatttttgagcatcagaatgcatgcatgtttctgggcccctcatccgtgttcttgggtggctagaggggaggcagtgggcgagaatccttgcatttggccaggcgtgatggccacacctgtaatccaagccctttgggaggccaagaagggaggattgcttgatgccggaagttagaagtcagccaagataacgtagggagacctcctgtctctacaaaaaaaaaaaaaaaaaattagccgggcgtagtgatgtgcgcctctagtctcagctgctctggaggctgaagcaggaagatcacttgagtctgggaggtagaggctacagggagtggtgatcgagcccctgcactccatcctgaacaacagagtgagaccccatttcgaagaaaaaaccctagcatttaacctcaccaggtgttaaacacccgccaccttaggacccctcagcacctacagcaccacacctgtgtgccctgggggacacaaggacccatgacaagtcctgatctccaatcctggctctgcggccttggctgagccacctgccctcacctgctcagtgaggaagggaaatgccccatgccagcccca

SEQ ID NO: 267937 - DNA, 404 bp, Homo sapiens
cagtcaattttttttttttgtaatgctttccatttctcctccttgaggtagaattgagcactctctcctctgtgacatcactataccctatatggactgctgtcataccagctaagataaatttattatgtattttaacgagtttattgagaaataactgacaaattacaaattgtccatatgtaaagtatgcaatttggcatatcagtaaacattcgaaattatcaccactgtattattccattttcatgctgctgataaagatatacccgagactgggaataaaaagaggtttaattagactttcagtttcacatggctgaggaggcctcagaatcatggtggaaggcaaaaggcacttcttacatggcagcagcaagagaaaatgaggaagatgcaaaagc

SEQ ID NO: 267938 - DNA, 756 bp, Homo sapiens
  misc_feature (467)..(467): n is a, c, g, or t
  misc_feature (469)..(469): n is a, c, g, or t
cgcccagtgacctgccgaggtcggcagcacagagctctggagatgaagaccctgttcctgggtgtcacgctcggcctggccgctgccctgtccttcaccctggaggaggaggatatcacagggacctggtacgtgaaggccatggtggtcgataaggactttccggaggacaggaggcccaggaaggtgtccccagtgaaggtgacagccctgggcggtgggaacttggaagccacgttcaccttcatgagggaggatcggtgcatccagaagaaaatcctgatgcggaagacggaggagcctggcaaattcagcgcctatgggggcaggaagctcatatacctgcaggagctgcccgggacggacgactacgtcttttactgcaaagaccagcgccgtgggggcctgcgctacatgggaaagcttgtggcatctgctccctgcagggccgtgccgctgtccccacntnggctcacctggccacctcacctgcaggtaggaatcctaataccaacctggaggccctggaagaatttaagaaattggtgcagcacaagggactctcggaggaggacattttcatgcccctgcagacgggaagctgcgttctcgaacactaggcagcccccgggtctgcacctccagagcccaccctaccaccagacacagagcccggaccacctggacctaccctccagccatgacccttccctgctcccacccacctgactccaaataaagagcttctcccccaaa

SEQ ID NO: 267939 - DNA, 691 bp, Homo sapiens
cgcccagtgacctgccgaggtcggcagcacagagctctggagatgaagaccctgttcctgggtgtcacgctcggcctggccgctgccctgtccttcaccctggaggaggaggatatcacagggacctggtacgtgaaggccatggtggtcgataaggactttccggaggacaggaggcccaggaaggtgtccccagtgaaggtgacagccctgggcggtgggaacttggaagccacgttcaccttcatgagggaggatcggtgcatccagaagaaaatcctgatgcggaagacggaggagcctggcaaattcagcgcctatgggggcaggaagctcatatacctgcaggagctgcccgggacggacgactacgtcttttactgcaaagaccagcgccgtgggggcctgcgctacatgggaaagcttgtgggtaggaatcctaataccaacctggaggccctggaagaatttaagaaattggtgcagcacaagggactctcggaggaggacattttcatgcccctgcagacgggaagctgcgttctcgaacactaggcagcccccgggtctgcacctccagagcccaccctaccaccagacacagagcccggaccacctggacctaccctccagccatgacccttccctgctcccacccacctgactccaaataaagagcttctcccccaaa

SEQ ID NO: 267940 - DNA, 622 bp, Homo sapiens
  misc_feature (333)..(333): n is a, c, g, or t
  misc_feature (335)..(335): n is a, c, g, or t
cgcccagtgacctgccgaggtcggcagcacagagctctggagatgaagaccctgttcctgggtgtcacgctcggcctggccgctgccctgtccttcaccctggaggaggaggatgagggaggatcggtgcatccagaagaaaatcctgatgcggaagacggaggagcctggcaaattcagcgcctatgggggcaggaagctcatatacctgcaggagctgcccgggacggacgactacgtcttttactgcaaagaccagcgccgtgggggcctgcgctacatgggaaagcttgtggcatctgctccctgcagggccgtgccgctgtccccacntnggctcacctggccacctcacctgcaggtaggaatcctaataccaacctggaggccctggaagaatttaagaaattggtgcagcacaagggactctcggaggaggacattttcatgcccctgcagacgggaagctgcgttctcgaacactaggcagcccccgggtctgcacctccagagcccaccctaccaccagacacagagcccggaccacctggacctaccctccagccatgacccttccctgctcccacccacctgactccaaataaagagcttctcccccaaa

SEQ ID NO: 267941 - DNA, 456 bp, Homo sapiens
aagtgagcctcacagaattgtggagatagtgactcttctatgctagtggttctctaagtgtggtcccagaccagcagcatcaacgtcacccggtacttactggaaatgcaagttctcagacctcacatctgatctactaaatcagaatctctggggatggtgtccagtaatctgttttaacaagcccagcaggtgatactagtgtatgttaaagtggaagcacctctggtctatgacttctgctggcatataaatcagccccaagatttgaggtgtccctgagaaaggatgttattaaatctgagtaaaagggaaattgtgactgaaaataaaaataaattatcctccacaatgggtgagcagtaaaatatactatactaatccctattcttactataattgatcattttgtttggttatgcatgagtaaaagaatgaataattattgttttcttt

SEQ ID NO: 267942 - DNA, 900 bp, Homo sapiens
ggcttgattcttttgtccagccctgagattaggttttatcatagctcaggaagtaaacctagctcaggaagtaaacctctgtcgtagaaaggaaaaacaagaatgatttaaaggtccctttaatgccttaaaatttagctgtaaagttagctatatctgaggcacatggagaattcaggtttgggcaaaattaaaacagtttatggcattcatgaaaacatatattcatatattcagtcttatgcattcattcaaaatggcatagcatatttacaagagtacaaaattaatccaacttaaaagttttgattatgagacgtaatgaacaaagagatagaattaggcatttccattttgggccatttgtaaaacatttactataaatgtgtttattagagtggttttcagccttagttgtaaagttatcatagcttttaaaaaaacacattttattatctgtctctgtgagcacaaaaaaaggaaagaaaaatacatgttaatctaccattttatcctcttcatattttattattataatattgctatagaattcttttttctattatctggtttgaattttcaacttactgacaactagtaggttaatctaacagacaataactgtgtttaaagttagaaagaaaatgttctgttccttgcctcattccatatcaggaaagtcaggtgttgtgtttcagacccaaaccaaaaaatgtgttttactgtatgtttgtttaaatgtgttcttggctagagtaatattttagtcatctgtagatttgatgacagtactgtgaaataaatgacaagtcatttacttgtactgtacaaagaagcatatcctactatatggattagaggttaggttaactctctttccacactaccaaagacaaaaaa

SEQ ID NO: 267943 - DNA, 307 bp, Homo sapiens
taggctagatggtgaagtttcccataagtaggctggtctgcagttttgttctattggtcaaaatatattctgacaaaaatgtatttgaagtgcatgataaggtaaaggtgtgttgaatattttgatttcacacttagttccgagtgtactgtgttaagcaaggtgcccctaagttgaaggggtgtaggcacaattaacagtcacttgatatgtctcagagcatcttctagaaactgaggaaataaaagactaaagattggtaactaatcctttgtgcaaatgaggtattttccaatattttgtttag

SEQ ID NO: 267944 - DNA, 381 bp, Homo sapiens
agacctgattttagcaaggatacgaataatatttgacaactttggggggatcttgatgcctctgtaatttactcaaggataatctcaagaaaaatggcattaagtagattacagaaaaaatagaactatcatattgttattattggctatttacatgagcaatgcggagaaatgtttaggattacagcatttagaagcttctcaattgctgcatttcctcactgtaccacaagatggcagatactgcatttaaaatttttttttctgtgtgttttctcttatagtcacttggtggccatgtaacaagcagagcaacatgtattaacagattctttttgaatgcaatattggattaaaaactttgaattaaactacaattaa

SEQ ID NO: 267945 - DNA, 328 bp, Homo sapiens
cagtcattcattaaattgttctcaaatttttcattggtgaattattagcttgctcagttccagcttctgggcattccttgagaatttgatatcctggtggttttcatgatttggagactgttatgtgttcatatagcaatcatatttggagatggctctacatttttctcagaagattggcttcttgaaagaagcttattgtaggagtggggagaattaattaaaatggtatgtgtacagtgttcctttatataatatttctgttttcctagtatctaggaatagagaaaaaataaattggtattcaaattccaagattctatataca

SEQ ID NO: 267946 - DNA, 698 bp, Homo sapiens
cagtttttcattatataccaagatatgctcaacagtagttatccacaggtagcaaaagcagcagctaagctaagttttaagtaggaaaatcacaacagaagagtacaaagccaggggaaaattagctgattcatagaaatctatctttaaattcagtgtggcatcagttcttaatactgagaaagattagcctgcagattcagaaaaatacatattacatttgtaaatactgacatatatgaaacatttctccactcagaattttgatcatcctagtcccttacccaaaactaaaacatttatataaatctatattagaactaaatcagttatttactgcagtgattgatgtgtccatattaactttcatgtaacatttcgaaatatgggtcaagtcaaaacacagtgatgtataaacagtttttgtatttaattttccaactagtttacctaattagaatactgtaataaagtaatgatgctattttaaaaaactaacattttaattctaatgattatatatttgttttttgataagactaatatgacttgctttaactttttatcaatatgcatatacagatacattcattataggtatctataatgaatatacctgcttatgcatatttataataggatgtcatataaaattattattttacatgtataatgctaataaatcaagcataacttct

SEQ ID NO: 267947 - DNA, 499 bp, Homo sapiens
caggaaaatggcatgaacccacgaggcagagcttgcagtgagccaagatcgcgccaccgcaccccagactgggcgacagagcaagactcgtctcaaaaaaaaaaaacccttcattttactcaaaacttatttacatgatgctaaccaacttcaattaacatatgagttggacagacaagtaaataaacacaattcatttttaaatccccaaagttttaaacccagtagttaagaacacttggtaggaactcaaaattgctggataatcttaattaaaaaatttttacatttaggtcttcttaccccccaaaagaacacaaggtagatggggacataaactctcttttaccaagtggctgataggaaaacattaaaactgagatggttgtttctgtgtaaaagaaatcatcctcaaaataaataggaaccaaggctgaggcaggattgcttgaggccaagagttctagaccagcctggacaacacagaaagcctgtgtac

SEQ ID NO: 267948 - DNA, 467 bp, Homo sapiens
cacatgcctgttatcccagctactcaggaggctgaggcatgagaatcatttgaacccaggagatggaggttgcagtgagctgagatcatgccactgcactccagcctgggcaacagagcgagactctgtctcccaaaaataaaaaataaaaaatgaatgtcctatgactgaggtttattgctcctcaattgagctattccaatcaatgaaattttactacataaaggtagatgccttctaatggttttcttcccacagggatggtggggtgagatggggaactgttcaggtagtagacctgttcatgaggaaaaaaactatttaaatgctgagaaaaggatgctagcttttttggatccatcatcatttttgccaaattcatagaatttttggccagtggtgtcaaactttaaaattcataggaaaaagagattcagtaattactctgtaatattagggagggtgtg

SEQ ID NO: 267949 - DNA, 406 bp, Homo sapiens
ctaaggggtttctccaaaagctatcgttggctccaattagctggccaatttaacaggacaaatgaaaccgagttgaccgcctggacatccatgatgagtgaccaggcccaaaactcctgaatctcctcggacccaccgctgcccagcctccagggcaaagaaccccaaacagggtgaagcagatgcctccctcctggggagaaacgagtgtgtaagatgtttcacatgcagcagcagtagccactgcagcaaaaaaggcaagttcaaaggtaattggacgaggagttttaagcacggctgttcccgtagcaaactgtttcatgaatacccatcgggatctgtccatatggacagcagaagggttcctgctgttcttttgctaataaaaactgttgtgattacattt

SEQ ID NO: 267950 - DNA, 237 bp, Homo sapiens
caaagcctgtgccgggagccactgtctgtccagcacctgcggggacagagaggcagttgaaacagccccctcttggtggatgttcaagttgcttactattttcaggtttgcagacagagcggcagtgaacccctgggcctatctatctatctatctctgtgtgcctacctatgagtttttgtaggaaaaatcccgagtacattctatgtattatgttataaatattcaaacccttca

SEQ ID NO: 267951 - DNA, 193 bp, Homo sapiens
tcaagtcccagccaccagtgattggaaggctgatgatgggcaggcccctgtgaacgtcagttcttcaactctaaaatgaggataaatcttacctatctcgaagagctgccgggaccagctcctcctgctccaccacctcttcacaggaggtcagtggagggcctcccagggaacccagaggctggaggccttg

SEQ ID NO: 267952 - DNA, 691 bp, Homo sapiens
cttgaacccaggaggcggacgatgcactgagccgagatcacaccattgcactcaacaaaacaaaacaaaaaatcataaagccatttttttcttttctcttaatatctcaaattttaagagtgccttcctttcaaagagtgcagaaatagtctattttctgctgttgtgtgagtgtgtgtgtgcatcttaaagatacttaacgcttcatctatttagaggttattcttggcaccatggtggagtttaagatttgagactctgcaccctgtcctcttgtgtttgacgctccagctctgccactttccagctgtgtaaccttgggcaagttgtttaaccactctgtgcctcggtttcctcatctataaaacagggaggataagactacctatatcgatttgttgttatgaggattaaatgaataaatataaaaagcagaacaatgcctcgcatatggcaagcactcaaaacgtgagctgctggtatttttatcatgattgcgacatacgatggttgtgaaagtcctggagtatgcaacctggtaaatgatgattttcatttagattgcggtcagaggcaaggtcagagggaagatataagccattagatgtgatcgtgtcataagggaagcacaaatcaaaaccacagtgaggcaccatctcacaccagtcagaatggttattattaaaaagtc

SEQ ID NO: 267953 - DNA, 384 bp, Homo sapiens
ctcccaaagtgctgggattacaggcatgagccactgtgctggcctccagaacttttttatcacccccaaaaggaaaccctgtatgtattaaccaatcacagccaggcacagtgactcacgccataatccagcactctgagagtaggaggcaggagggtcgcctgagcccaggaattcaagaccagcctgggcaatataatgagaccctgtctctacaaaaaacttttaaaaattagccaagcatggtggcatgtgcctgtagtctcagctacttagaggactgaggtgggaggatcctttgaacctgggaagtcgaggctgcagtgagctatgattgtgccactgcactctggtctaggtgacagaacgagaccctctctctca

SEQ ID NO: 267954 - DNA, 330 bp, Homo sapiens
atgtcatcaagatggttgactagaggcgcttggtactcacctcctccacaaagaaggaccagaatagcaagtagataaccacacctcgaaaagagcatctaagagacaatatggggtttttggcagggaagtgactgagaatgtctaagacacagaaggaaaggggaaaggaaagtggcaaatgagtttttgccatgtatatgagtttcttatggacccacatcagaagagcaagccatcttcacactgccataaatcaaatagaacccatatagtttctattatcttcatttcccagatgcactaatataggttttcaaatgtcaactt

SEQ ID NO: 267955 - DNA, 440 bp, Homo sapiens
tagggatgaatcagttaacttgcttgagtttcacattcttcatctgtaaaatctggtgattagactggcccagcaaaagatataatgggcaaaagatataatacacataaattggaatgaatctgcattttccaagcctgatgactttattaaaactgaattaagtcactaactggcagcctgaagatgaaaggaaagaactcagtcatgcttcttaaggtaaaagggcagtctaactgagaattttgttatctctgaggacaaattacaaggagataaagacactcaagatcacatggaaggcttctgctcccacttagagactgcaatgtaaggtatggaaacagaatattctctatagaaacatacatattaaaatatgaacatttttgttcttatttcaatccaaaaataaataaatgaattaaatgtcaaagata

SEQ ID NO: 267956 - DNA, 434 bp, Homo sapiens
aaatacctaatctattaaacaacttagtttataatttttaatgttatgtttttatctttagaatttctgattatttttcagactttcctagttaatattgaaaacctttttctgctcatacttcttttatcctcttatttaaattaaactgattttatcttcaacacctagttattatagcatattctgagaactaattatagcttgatgttttctcaacaaatttttactcattttacaacccccgctccatattttatggctttgatttaattagtgtttttcgttgctgttgtttttgttttctgatgaacttgtatttctttgaacaacatgtatgggaattttttcagaaacctagattttaatgtccagctacagaatagactgtttctgtttaatgttaaggattcccttaagacgataaaaaattt

SEQ ID NO: 267957 - DNA, 424 bp, Homo sapiens
ccttgacaatggttttttggctattggctatcacaccaaaagctcaggcaacaaaagcaaacaagtgagactgcatcaaactaaaaagcttctgcacagcaaacactcaacaaaatgaaaaggcagcctgcagaatgggagagaatatttacaaaccatatatcagataggggttgatatgtgaaatgaaaatctcacacaactcagtcaaaaaacaatccgactgataaatggccaaagtatctgaatagacattatttaaaaaagacatacgaagggcaacaagtatatgaaaaggtgttcaacatcattaatcagaaaaatgttaatcaaaacaactatatcacttcgcaactgttaggatggttattatataaaaaagagataagtgtgatgagggtgtggaaaaaggaaactcatgttc

SEQ ID NO: 267958 - DNA, 1082 bp, Homo sapiens
aagatgagcagtggatgcccgctgccctgctccccctgccccctgcctgggtgtagatgatcctggagctgccacctgtgcaaagatggtgtttgcatgaacctctgtgccccaaggacaaggtttattactgaggaacttggctgttggtctccactgggaaagaaacacaaggatatggaattctacttggaaaactcaggtcttcctgtttgctggataaatacagagacaaaatcacaatgagccctctcacattgatgtgaaaaaagatctttggatagaaacctactcatttattctcaggactttaagtgccctgcttcatgttttggcatgttgcaactgactttattttatttattttattacaagcaagagaaacaaagtctggttcccgtatgatttaaaaaagaaaacaaaagaaaaagacttgggttgggttaggagtttctctgaaccatgaaaatgacctcaatattggctgaaaaatttgacaagaatgaaaaatggcatggtacaagctccaggaagatgttgcagagatgagcttcagatgcatttcattttgcgttgttattaatggcttggaaagaggccataaacctattatggtaattatgtctgcagatgagggtaaataggatggtgttataaacaccagtaagcaagagacgtagtacagagcaacctagggagattagaaatatggacaggaaatgaacaaacgagatcagcctggaaaagtgaaaacatgcatctggagaaatacataatttgaaaaacagagagatacttaaaggcagggtcatacttggaaagcagtaatggtaaataggcctttgagcagatatcagccctggataaatttgtaacatgatggaaaaataatactcagacctggtgttcatatagcctttcaaaatgcattttttcccaaacagaggcatttccattatctcatttgatcatcaacccaaagaggttggaagcaaagaattctccactgaagaaatgaaaagaggttaagtgaattgcttagggtcaatttgttaataaaatagacatggctaaaacttggg

SEQ ID NO: 267959 - DNA, 425 bp, Homo sapiens
agagcaagaagtgtgggagtgagaagagggaggtaacaaaactatcggtagcagcacttctcctcaatttcctacctctgatcatttcgcctaccagctacatctctgattgcaggacacccaaaagccaagcattaactgcttagaccaaaaatggaagaaagagtacatgcaacagagatttttattttttgaagaaaaggaacttctaactgttggggagcattagggtaaccggtgtgagtgtgtttaccagagaataatgctcgttgttttgatattcctgggtttttcattgtactgaaataaaaaagactggttgacctttcatcttcaagtataaaatcttgttaaaagcccttctttttccttagttttaacttgtactttctggaaacattaggaaaacctgtaactcaaaaaaa

SEQ ID NO: 267960 - DNA, 403 bp, Homo sapiens
tcacattatctaatttaaacctcacaacaatcttatgtggttcaatatcccattatcatctccattacacagacaaggaagctaagatttacatatactgaataagtggttggaaccaatatctgaatccaggtctgtttaactctagattgggtgctattaacaattatactatattaataaggtagctgaaaggacaataagctttacgatgctaaaagaatgaaggagaactaatgaatgaatttatagtatctcatttttataactcaggaacaaaactaaagtaacattctcagcatatcaaggaatctgaagccaaacagccaatctatcagcaaccagcatgttccaatatgtgatactgataaaattagctctacaacagggtctttagtattta

SEQ ID NO: 267961 - DNA, 411 bp, Homo sapiens
gcaggggagataacatgatcacgaaggtggttttcccagggcgaggcttatccattgcactccagatgtgttgacccctgcgatttccccaaatgtgggaaactcgattgcataatttgtggtagtggtactgcgttcgcgctttcccctgattttttgtagtttcaagaatacgctgtactctaagggctacttttttctttcattgatttgtgtcttggacgtgttattcttacagtggaaggctgggaaataggaattaagatgtcgcttctcccactgaggagaaatagggagcgtcagccttaacacaaacaaactagcgcgaaggccgtacagctcttccctttctacgcagggctgctttttgcagagattggtccatggtctccagtgtcttgggttctcacg

SEQ ID NO: 267962 - DNA, 407 bp, Homo sapiens
cagaataaatatatgacactgttataatatatggccctgagttggaagcaaaggaaacttgacttgttcttggagattaaaagttattcttaccttcagcaaaggtgatatgagaccgagtagaccctggaaatgcagggaatctaacatggcttaagccagacccaaagatgaggcatgttggggtattgtgagacagctgtcattctgagacccagctgctttgtaggaggttaaatgttgatgttgggactttgtatttttgtttcattgcaaactgtttctctactctacgctcccatggaaggggctttaactggatgtgctgttcaaaggaccccccagtcccttttgttctccttcagcttgtggtatccttcccttgcctccacatcatatatgacagt

SEQ ID NO: 267963 - DNA, 466 bp, Homo sapiens
cacagtggacttaagtaattgatagttcagttattttatgtttcttcactttgtttgacatgtaaatagaaatctagtttcagattttgaattttagaagaatgtggggttcagttgatacagcatgggaacttgagacatttatattttaaaaaattataggccgggtgtagtggctcacacatgtaatcccatcactttgggagactgaagtgagaggattgcttggggccaggagtttgagacgagccttggcaacatagtgagacccccatctctataaaaaaatttaaaaattagctagatgtagtggcatatacctgtagtgctactgcttgggaagctgaggctagaggatgggttgaatccaggagtgtgaggctgcagtgaatgatgattggccactgtactccagtctgggcaacagagcaagaccctgtctttaagaaattaattaataaaataa

SEQ ID NO: 267964 - DNA, 343 bp, Homo sapiens
tcttacaaagcatacttcacccttccttcctagagaaggggatcactgaaagattctcaaaagggtcctcatcacagttcaattcagagtcttagggggacatcaagggaggttccttgacatttcaatcctctgatcccatggaaactgtgaaatcagaagcaagtatgcttaatttacagaatgtcagacctggttaagaatcatcagtttaaccctcatcaggaaattgaggctcagtggagccgtgtcctattgaacatcatccagccaattagcatcaggtctcaagtgggttttctggggtttgcacacacagtttcctcactagttccgtccaaaa

SEQ ID NO: 267965 - DNA, 426 bp, Homo sapiens
ggtgtggaagcctgcaaactacacttcataggctgtgatcagctgccttctggttggctctgccagtgaaaagccttgggacaggactcaaatgctggagggaaggagaagtttgattttgcattgttttggttttgttttacccctgctttcacaaatgcctccccgagtggtgacacatcagcggaagtgcaacttctggccccctgcacagcttcagggaccatctgatagcagtaacagcaactgcacctccagaagatcagaagcacatgcaggctgggcttcttccaaaggctgggaagagctccctggcctctgagtttctcccttctcccttttactcttctacctcttccaaaagattgtaaccaactccctgtattaaatccctctctgctggaaatacctccagtgcaatctaaa

SEQ ID NO: 267966 - DNA, 552 bp, Homo sapiens
  misc_feature (524)..(524): n is a, c, g, or t
  misc_feature (552)..(552): n is a, c, g, or t
gctagttatattttcgttatttgatttctaactttattgtgttgtagtcagggaatgtggtgtttgaaatttatgtgggggctgggcacagtggctcacatctgtgatcccagcacttggggaggctgaggcaggcagatcacttgaggccaggagttcgagaccagcctggccaacatggcgaaaccccatctctactaaaaatacacaaattagctgcatgtggtggcatttgtctgtaatcccagccacttgggaggctgaggcatgagaattgcttgaacccaggaggtggaggttgcagtgagctgagattgtgccacggcactccagcctgggtgacagagtgatactctgtctcaaaaaaaaaaaaaaaaaaaaaaaaatttatggagacttagccttatggcctagtattgagttggtacaatcattttatcttttctgtttctttttccccctttgcttgctttcctctggatttcttatcttctacaaggacctgagcacattttttccagccntgggtgacagagtgatactctgtctcan

SEQ ID NO: 267967 - DNA, 389 bp, Homo sapiens
attatggagttagaagtcaaaatcatagagttgaggaatgttatttgctttgaagatgattttttgctttctgaaaacaaagtcacttgcagaagatctttagtaggcatcttatcctctaaataatcctacatacgtgatgttgggatgatttccatttaagctgtatgggacatttgtttggtcacttttataacctgtaagtctgttagactcagagacattacttttaaaaaaatgttcaaatttcaaattctatattgctatcaaagaaactctacttagaaagtttttaaaaaatattctcaaaatcatgagtttctttaaatacttgtagcactctttgttgacattttgcctattgatatttgcctatctctgattgcaaa

SEQ ID NO: 267968 - DNA, 201 bp, Homo sapiens
ccacacataatctgttctttctacaaagtaatgcatcacctgtgtgatgaattcagcaagcatcaaatgagtatgttcttcatgccgggcgctgtgcaggtgctgaattaaacacaaagactctgcttgctttaaagcaaaaagtttgaagaaggaagccaaccgctagaaaaatacattaccaaataaaaagtagtaagt

SEQ ID NO: 267969 - DNA, 292 bp, Homo sapiens
ttccattgcatgaaaaataattctaatttcttcttacacagtgaagtggagatattgaaaccctcgtgcatgctttatgtaaaatttatttgtaaagataactgccataaaatggaagccaatttatttttaaaacttaggtgaaaagataataggcagagtatgtaataaaaagagaacattcagttttacagagcagtgtttcagagataggaagaaaagcaattccatcaaaatttccagattttttttttccctcttaacctgactaaactactaattcatctataag

SEQ ID NO: 267970 - DNA, 961 bp, Homo sapiens
gggcgagagagctccccaggtcccttttataagggcattagtcccattcagactaatgggactaaatcagactctggctgagtgttgtggattttttgcatgttcatcctccccgcagtttgccaaggcggacaaagccgacacaatgggcctgtccactatcttctttcatatacacaaaatgtcagctcttcctgtttctgactggcaatatcccgcctgatgaccagcttagcaaattagagaccctgcacgggacttcatctctgtcttagttcgggcttctataacaatgtaccataaactgggtgggtgtcccactcagaaatgagagtgtattagtccgttttcatgctgctgacaaatacataacagagtccaggaccaaaaagaggtttaattggacttacatttccatatgactggggaggcctcagaatcatggcgggaggcaaaaggcacttcttacaaggcagcagcaagagaaaatgaggaagaagccaaagcagaaacccctgagaaacccatcagttagtgagacttactcgatatcaggagaatagcacaggaaacacccgcccccatgattcaattacctcctcctaagtccctcccacaacgcatgggaattctgggagatacaattcaagttgagatttgggtgagggcacggccaaactatatcagaaagggatgaagtgacagcatatcctgatgtgtgtgatggtttcatgagttattatctatttcaaaatttattgcaatgtgtggaaaagaacaaggacttgtactatctgactttaaggtttactataagctattagacacaaggcatcaggagtgacaaacggataaacagcctgagttagaagacctgaaattgatccacagctatacggtcaataaatgggttttcaataaaagcagttcaataaaagaaaataagtcatttcaaaaaaaa

SEQ ID NO: 267971 - DNA, 563 bp, Homo sapiens
agtgcttactcaaaacatagaaacatcaatatggagactgcagaccccagaatgataacagggtgagctatatttatatcccacggctggtgatgcctcagcacacttcactctctagaaattccgtcggcttaatttatgtggctcattcctcattccctttcagctgacaggcttcttatctttttcatttggaaacttatctgtaggagttcccaaaccctcactgtcgttcgtttttgaagtacctgcattctgtctcgagtttccggtagataagtagggctcccttagatgctgtctgcctataccccatgactgtcaaaaatgtccccaccctgggatcaggcatcagatcctaacaacactgacagagtgaagggcacgtttctccctttggtgggattttctcttccaagccattaaaacactttaagatgccttttcatatctttgctatctttagattagatgcttaatgcataaatcagcccaaatagagtgatggagtagcggggagaggctgacgcatttcctcacgtacaacccagcgtttgagtaaa

SEQ ID NO: 267972 - DNA, 538 bp, Homo sapiens
ggttcctagcacacagtaggtgcttgatatttgtatagttacaaatgaatgggtggtaagaagtaagaaccaaacaaaaggtttattctctttcccataaaacacccagtgcttggatgggttacacttcaatatgagttcaaaacagtttctctgacggttttaggattgcaagaaagaaagaagaagaaaaagatgattcagaagttagaaacatcagtgagttaggacttactgtaattttatgtattacagatacataattatgtattatgtattacagatacataattgtatctgtaaaatgaatggtagactcttccatgtcacttcttcagccacggaatgaaaagaagtcctcatttatccacttgttcatctgtggtggtgaagagcccagatctgaagcccaaagcctggagaaaaagttctgcccctcactagttagtcttagatcatatttgaccttagatcaaattaattttgctttctctcggttattgtaaaatgggggtaataaaagtacttttcttctaaa

SEQ ID NO: 267973 - DNA, 630 bp, Homo sapiens
acatctgtacttgctggatcaagtctaaagttgttatctctagcctccacccaaaaaatacaggaaatttaattttttcttagataatacattcaagtggcataaagttcaaaaagtgcaaagggtaaacagtgaaataagtccagcgtatccctagtgcagccacctagttcccatgcactaaggcagacatctttgccagtttcatgtgtattcttccagagatcttatatgtaaaacaattatatgatgaattattttggcttgatttcttttatccaagtggtaggacactgtacacactgttcttcactctagttgtttaacctagcaattgtgaaatcatgtttgatgtttgcaatgactcactttctcctcctgtgtagatggagtgtatgagaaattcattgttataacccactgggattttgcagttgttaatgcagaaaatctaactcatatagaaatacatttattgtatatcatactcaaaaatatattttgttgtttttaatggctaaatggtattccagtatatgggtgtaatataatctatttaatctgttcccttgttgatgaatattgaggttggttctaatttatgctgtttcaaacagtgctgccgtgaat

SEQ ID NO: 267974 - DNA, 275 bp, Homo sapiens
ccagaaccttagctggaccggaaaccaggctcactctacagattaggagaggagtagatgcctggaagtattcaacacacaactactgagctctgctgtgggcagcccatgattggtgaccaagatgctttccctgtctttgggaagcttggggtctagtggagtgaattgacagagggaaataattggcgatgtatcgtgctaggtgctattatagaggagaatatgacacacggtgaaggcacagtcgaagaatgtgtcattaactctgtcct

SEQ ID NO: 267975 - DNA, 561 bp, Homo sapiens
agcagtggatgcagagattctgaaactgggcagaggttccagaagacaagtcatttttctagacctcccatagacgccatcgttgatcaagccattttcattttcacgaagtattttattatggaactcctaaagaccatcagccctacctggcactggctttctggttgaaaagcagcattgtggagcctgaaacatcatcagaggcaactgcttcccctccctgtggatttaggaccgctatgtgcagagttctcctgtttgttagtttgctgtcccagttgaattctgagtttccgggaatccctagtgcaatgagaaatgatggagaaccaattctcattatctgatgaaggaaagagccatgtacctacaacagcaaaggctcagacaagccttctcctgccttgggttcatggtcacgtgctgtaggtgtcttgtcttcccatgtgcacctgtctgcatcctcatggtgcatcctcaggatgtcccgtacagtgtcttacctatggttatgcttttataacaatgtgctaataaaagcatggattacaaaacaaa

SEQ ID NO: 267976 - DNA, 803 bp, Homo sapiens
agcagtggatgcagagattctgaaactgggcagaggttccagaagacaagtcatttttctagacctcccatagacgccatcgttgatcaagccattttcattttcacgaagtattttattatggaactcctaaagaccatcagccctacctggcactggctttctggttgaaaagcagcattgtggagcctgaaacatcatcagaggcaactgcttcccctccctgtggatttaggaccgctatgtgcagaggtctgtattagagagccagctagagtagccagcagtgacataactatgtagggagaagacacagttgtcaccttgaccccactggatacagaaatgtcaatggaaaaacaaattctgcatctgctgaattgttctgtcaatgcttgcactttcttgtcatttactatatagaaagaattattagtatcttttatttgtcagttattgatccaccttttttttttttttttttttggtggcagttctcctgtttgttagtttgctgtcccagttgaattctgagtttccgggaatccctagtgcaatgagaaatgatggagaaccaattctcattatctgatgaaggaaagagccatgtacctacaacagcaaaggctcagacaagccttctcctgccttgggttcatggtcacgtgctgtaggtgtcttgtcttcccatgtgcacctgtctgcatcctcatggtgcatcctcaggatgtcccgtacagtgtcttacctatggttatgcttttataacaatgtgctaataaaagcatggattacaaaacaaa

SEQ ID NO: 267977 - DNA, 430 bp, Homo sapiens
catttgatctccaatcattatttatcatctgagagattcagatttctccctcagtctacttttggacgttcacaatgtctgcattttggagtcagaagagaaagccatgaggagaggaaaaagtaacttcaataaactatttaacacaaagaactggatggcagccgtcagcctgaatgaatcatggagtgagagactaaggtgaatagtaccttcaaggatctccaaggctccatacaaagtagtgcatggctttcagattcttcaccagagcaagggtattaaacaaaagggccccaggtgtccccctgtaagctacccaattagggttattaatttgtaaaattattttagggatttaattatgttatctttcttcagagttcatttgtattccctaatttctgtaaaggtctgctgaatatttaga

SEQ ID NO: 267978 - DNA, 259 bp, Homo sapiens
ttctttattttaggtgatggccctgtgaggtgcaattatctgtagtttaaacctcagggaattacatttaagactctcaaaatggtacatttggcaaatcatgaaacttttacattgtattaccccatcattgacctgttttgaattgtgaagataattttagctcgtttctgtcagccatatttaagacaccatgcatatacttgtgtgaagcttgtagaatgaaaataaagctgcttgggatgattatgttgacata

SEQ ID NO: 267979 - DNA, 340 bp, Homo sapiens
gactaagtaagctatggtgcccagatgtttggtcaaacatcagtctagatggtggtttttagatgtgactaacatttaaatcagtaggctttgagtaaagcagattaccctctataatatggatgggccttagccaatcagttaaaggccttaagagagaaaagactgacgtcccctgaagaagaaagaactgtctccagactgccttgggacttgagctgcaacaactcttccctgggcctgcagcctgctggcctgccctgcagaatttggacttgccagccaccagcccacacaagcatgtaaccaattccttaaaataaaatcaatgtgtatcatt

SEQ ID NO: 267980 - DNA, 450 bp, Homo sapiens
tcagtccattaaggcaacaccccacagtaaagttaaaagttcacgagcctattgactctcatccagaaaccagaaccaaccaaaccccaccatataacagggaaggcctgaggtcgcttcggaggagttagcaatcaaaggagaacagacttttggtgactcagttaccaacacacaacactcataaaactaaaattaggtgttttattttttgtctacacgggtggcgtgccactttcctttcctgattagggaagcttctcccagccctttctgacgttcatctgtgtgcctttatgttcaaacagtttaggaagcagcagccctcctaacagtcgacgcggaagcacaaatctctggaggtatttttggacacacttaaatcctatcccaagagactgaacgactgtggtgacaaatgcccacgggtaaaactgagcaagcctcatt

SEQ ID NO: 267981 - DNA, 564 bp, Homo sapiens
tctgaattacatttccccatgtgtttgtgaagtaactactgttattcccatggagaaagatgaagaaagtgatgcataatgcgggtaagtagccagggtcattcagctagccccaggagtcggatgggacccaggtttgggggactgctgcttgtgctacctcctgattactaattcagattcttcaggatcttgatacatggaagagatgtcctggttggcaggcaggagtatcctggtcaatagaaagttatatccttccattgtaagttaatgaatttggtaagcaagagtcagcccttgagcccaagcacctcttaaaagcacctctggccactgaaaaagagtttctcaactgccatcttttattcaacaaatacttattgagcagctactatgtgccaggccactggaaataaagcagagaacgagatggacaaagagctcacattctagtcggggtggacaaacatgcaaccaaataagcaagactagttttcgatatgtgagatgctatgaagacaataaaatggtatgataaataatgactaagggagtcagtaa

SEQ ID NO: 267982 - DNA, 552 bp, Homo sapiens
cagcaaactgtaactttatatgaactcttaacttctgtaatagccacattttaatttcttaaaggtgtggtcaattcagtttaacatgagttaataatttaatattaattttcttctgcatagttagtaactttctaaagtatatattatataggagagataacaaatatgtaatatgatctctagggcctgtagcaaatagttattattaatcaggagacaaaattgttagctaggcagccactacaaatcaatttaagttggtacttaaaatgtaacttcacagtagcttacacctataattcttgggatgccgaggcagaaggattgcttgagactaggagttcaagaccagcctcggcatcatagagctacaaaaaagttttaaagattagctgagcatggtggtgcacacctgtagttccagctacttgaagactgaagcaggaggatcacttgagtccaggagtttggtgttacagtgagctatgatggcaccactgcactccagcctgggccacagagtaagaacatgtctttaagaaaaaaaaa

SEQ ID NO: 267983 - DNA, 493 bp, Homo sapiens
cagcaaactgtaactttatatgaactcttaacttctgtaatagccacattttaatttcttaaaggtgtggtcaattcagtttaacatgagttaataatttaatattaattttcttctgcatagttagtaactttctaaagtatatattatataggagagataacaaatatgtaatatgatctctagggcctgtagcaaatagttattattaatcaggagacaaaattgttagctaggcagccactacaaatcaatttaagttggtacttaaaatgtaacttcacagtagcttacacctataattcttgggatctacaaaaaagttttaaagattagctgagcatggtggtgcacacctgtagttccagctacttgaagactgaagcaggaggatcacttgagtccaggagtttggtgttacagtgagctatgatggcaccactgcactccagcctgggccacagagtaagaacatgtctttaagaaaaaaaaa

SEQ ID NO: 267984 - DNA, 486 bp, Homo sapiens
cagattgacttccaaagattgcggggaaatatggcggcacatcagaggcatacgaacattcacctgcattgagaagagaggctgttctaggggtggcaggaacacatgaaagcccagtgtctggggtagttaagtgtacaagcaaatagagttaaggaacctggcacctttcagatacaggagttctgatgacactgttatcaagaaaagttttgcctatgcttagtattttctatttaagagagttggaaaatctatatctttgagggtttccaataaaagttattttggctgtttatgtgaataaatatccaaaaacttcagttcatcgagcattatgtttcatgttaataccaatgtaacacagtatgactggctaggttgctgaagacagttgaaaaatgtatttttgtggagttcactattttctgaaatttattcaatttatttattataaatagtaaagttcgtaaaagtctggttttt

SEQ ID NO: 267985 - DNA, 112 bp, Homo sapiens
atgtcttcaactctacaagatactacctagaattcaggttttatagttaactatttatcagtccgaattactcccaagccaagaatatagtcagcagaccaccccccccacc

SEQ ID NO: 267986 - DNA, 470 bp, Homo sapiens
acattaggcagggcaatttttgagtgagctaaattctaatttttttaattttaatttttatttatttattttttggctgttcaactaaaccagtcttttgaatgttgggggttttacagttagagtcctgatgactttttcttgtttactgttgttaaaaatcactacctccagtggtcacagagaatgagtaagagaactggctgtgcatatcaagatgaagtatggtgtaagaaatatttcagagcatgtcctttggcccaagattgagccatttggacacctaagcaggattggctgaatgttatcctttctgctgaggcatcagtggagatgatcattagtggtggccgaaaagtgttgtcgaaggtgctcttgcttgacacacttccaatgcgggacatagtttgagtgatagatggctaattcattgataatgtacttgttgccttgcagtcttgtgtactgct

SEQ ID NO: 267987 - DNA, 419 bp, Homo sapiens
tatacatcttactcaaggcccactattattgtagaattcttttacaccagtgatttctgatcatttctatgatatattagtttgggagagattagaaattgaagaggaaggccaggcatggtggctcatgcctgtaatcccaacactttgggaggcagaggcaggatgattgcttgaaccaggagtttgagaccagcccgggcaatacagggagcccccacctctacaaaaaaataaaataaaataattagctgggcatggtggtgcatacctgtggtcccagctccttcaggaggctgaggtgggaggatcccttgagcccaggagggaaaggctgtgtcgagctgtgattgtaccattgtactccagcctcggtgacagaaagagatcctgtatcaaaaaagaacgaaggaacgaaa

SEQ ID NO: 267988 - DNA, 569 bp, Homo sapiens
gaaaggagagctcgacaaatcaacaattacggctggatgtttcaacacccttctttcaacaataggtagaataactagatggaaattcagcaagaacataaaggagcaccatcatcgacaggcagggcctaatgatgtttatagaatatgccacccattgcactgaatgacatgtcacattttctgggatgtagttaaactagtgatgagagagaaagcaccaaatgcatacattagaaaagagacctgagattttagaaagaggaaggatctcaaatcaataatctgacatcagctggatgccgtggaagcacctgtagtcccagctactcaggaggctgaggtgggaggactgtgtgaacccaggacgttaacgccagcctcttggcatcaggcagcacaggaagaccccatcgcttaaaaaataataataatctagctcaagatcacatgaataactaggaaaaaatttaaagcaaggagcagtaagaaaatagtaaaaagcagaaaatgaaactgaaaacaaacaatagagaaacttattgaaacaaagagatggttcttttaaa

SEQ ID NO: 267989 - DNA, 386 bp, Homo sapiens
ctagtttgtagataccaaactccaagtcttacagctcccttagctgttaaattcaaatgtatgcctctgcaaaataacaaataactacatattgtgagcatcgatgtttaagtatgattaaaacattgtcaatgagcaactacagacaaaattgtgatgacatgatgcatctggaaagacgtagaacagctttgttttctgaaaatcaatcatgtgtcagtcactgtgctaggtgttttcagatgtttctcttatttaaatatccacaatgtggactaccaccaataaccaacatttgtgaagcaaaaactaggatattatactttcagtgctctatatacagtatctaattaatgttcacagtaacactgtaatgtagttattat

SEQ ID NO: 267990 - DNA, 1240 bp, Homo sapiens
tgccaacttaactgagattctgagtgtgcaaggataacccccgtcatggccccgggtgccaaggaaatcccttttagcctcctcttggcagacttggccagccttccccagtgacagcctggctctttggattcaagctgcctggtcagactgcaagggtcatctgtacaaagaaggaagcaacagtgccaggttccagcgtgcgttccaagttccacattctgtgtgcagactcccaacgccagagcaaaggcaggcccctggcaggggactgctgagaaagtggaactccagagacactcctgaaattgtcctaagtcaaaggagccaaacggtgtacgagctccctctctgccgtcccctctgagagcagccatggccctgagtgatgtcgatgtgaaaaagcagattaagcacatgatggctttcattgagcaggaagccaatgagaaagcagaggaaatcgatgccaaggctgaggaagagtttaacattgagaaaggacgcctcgtgcaaacccaacgactgaagattatggagtattatgagaaaaaggagaagcagatagagcagcagaagaaaatcctgatgtccaccatgaggaatcaggcgaggctgaaagtcctgagagcccgaaatgacctcatctcagatttgctcagtgaggcgaagctgagactcagcaggattgtggaggacccagaggtctaccaggggctgctggataaactggtgctccagggtctgctccgactgctggaacctgtgatgattgtacgctgccggccacaagacctcctcctggtggaggctgctgtacaaaaagccatccccgagtacatgacaatttcccagaaacatgtggaggtccagattgataaagaggcatacctggctgtgaatgcagctggaggtgtggaggtctacagtggcaatcagagaataaaggtttcaaataccttggaaagccgactggatctctcagccaagcaaaagatgccagaaatacgaatggccttgtttggtgctaacaccaacagaaagttctttatataagcctctgggaagtgaagctagtgttgaaccactaaaccataaaagtttaagttttttggggaaaggaaactagtagtgtttcctcctctttgatgctctgatactgttctgtttttcttcacgaaataccctttggatagctaaagtgttaactttgaaataaagcccaaattaatgctcagaa

SEQ ID NO: 267991 - DNA, 912 bp, Homo sapiens
gtggtggcggtccttgagctggaaagcaggaaccctggcttattgcgtggtcccccccaccaccaccaccccacgccttccgtagcacgagctttaatcatttactatgaaaccggtaactaagggagatacagcgtgttgaaccactgaagcacgcccctccacacacacaccagccagaaaaaggataccccgtcggctccggacccggcaaatgtacctgggctccccctggaggccacattctccgaggtcgcctttcggtccccaatgttcctcaaaggtattccgttgtaatcccggagaactgatacacactagtgctctgaaacttggcctgtgctcgaggcggcaacccctgcccctctgcctggcgatgccggaacacacccatctggccaggtcctgttcactggccaagaatgcagcattgaacactgggcattggggcgggggtgcactctgcgctgacaccgcacccctcccctcaacttgctgactagaggaggcctgaactctcaaactccgaatctgatttccactctcccaggaaggcttcggaaatcactgtggattgtcaatacaggagtccatactgactgaatccctaattttggcctgtattcttctccctctgtgaaccatcttcttagaagtcactgaaccaagagtgccagaaaaccatcccaagactcacacagagttgttcttccatagtggatgttttggccactggacatcagaaccacattttgggtttgaagaatcttctacatggtgagccttggtgggaagaaaagaatatcccttccttatagaagctgaagttacagactcttgctttccttgtctgacttaaaagctagtgtgagccagagttaaatacagggcacattgtctctggaggctgca

SEQ ID NO: 267992 - DNA, 1169 bp, Homo sapiens
  misc_feature (670)..(670): n is a, c, g, or t
gtggtggcggtccttgagctggaaagcaggaaccctggcttattgcgtggtcccccccaccaccaccaccccacgccttccgtagcacgagctttaatcatttactatgaaaccggtaactaagggagatacagcgtgttgaaccactgaagcacgcccctccacacacacaccagccagaaaaaggataccccgtcggctccggacccggcaaatgtacctgggctccccctggaggccacattctccgaggtcgcctttcggtccccaatgttcctcaaaggtattccgttgtaatcccggagaactgatacacactagtgctctgaaacttggcctgtgctcgaggcggcaacccctgcccctctgcctggcgatgccggaacacacccatctggccaggtcctgttcactggccaagaatgcagcattgaacactgggcattggggcgggggtgcactctgcgctgacaccgcacccctcccctcaacttgctgactagaggtaatcgcttcctttcatcgattcacagcgttagaaaaatgcagcattgagaggcagcgcggaggtcaactggaccatcacccttaggttgtagggaagaaaactgagacctagaaaggtgaagcggttgtcccaaaggcttccagctgctcccagtactcaagnacttggagcacacttggggaaatgctcactgttgtattcccgttcctcactatccaggaggcctgaactctcaaactccgaatctgatttccactctcccaggaaggcttcggaaatcactgtggattgtcaatacaggagtccatactgactgaatccctaattttggcctgtattcttctccctctgtgaaccatcttcttagaagtcactgaaccaagagtgccagaaaaccatcccaagactcacacagagttgttcttccatagtggatgttttggccactggacatcagaaccacattttgggtttgaagaatcttctacatgtgatgatccagtaaatgatttcatagtccaccaaacggtcacggttcacacttggagacacccaatgcaggtctctgctggctgagtgcactggcttgtggctggaggtgagtgctcaggaccacagagggataaagaacctctataactcaacaacaacaaaaaaaaaa

SEQ ID NO: 267993 - DNA, 1175 bp, Homo sapiens
  misc_feature (51)..(51): n is a, c, g, or t
  misc_feature (1065)..(1065): n is a, c, g, or t
tattaaattattctttttattggtccggaattcccgggaaggcaggccccnggcaggggactgctgagaaagtggaactccagagacactcctgaaattgtcctaagtcaaaggagccaaacggtgtacgagctccctctctgccgtcccctctgagagcagccatggccctgagtgatgtcgatgtgaaaaagcagattaagcacatgatggctttcattgagcaggaagccaatgagaaagcagaggaaatcgatgccaaggctgaggaagagtttaacattgagaaaggacgcctcgtgcaaacccaacgactgaagattatggagtattatgagaaaaaggagaagcagatagagcagcagaagaaaatcctgatgtccaccatgaggaatcaggcgaggctgaaagtcctgagagcccgaaatgacctcatctcagatttgctcagtgaggcgaagctgagactcagcaggattgtggaggacccagaggtctaccaggggctgctggataaactggtgctccagggtctgctccgactgctggaacctgtgatgattgtacgctgccggccacaagacctcctcctggtggaggctgctgtacaaaaagccatccccgagtacatgacaatttcccagaaacatgtggaggtccagattgataaagaggcatacctggctgtgaatgcagctggaggtgtggaggtctacagtggcaatcagagaataaaggtttcaaataccttggaaagccgactggatctctcagccaagcaaaagatgccagaaatacgaatggccttgtttggtgctaacaccaacagaaagttctttatataagcctctgggaagtgaagctagtgttgaaccactaaaccataaaagtttaagttttttggggaaaggaaactagtagtgtttcctcctctttgatgctctgatactgttctgtttttcttcacgaaataccctttggatagctaaagtgttaactttgaaataaagcccaaattaatgctcagaaaaaaaaaaaaaaaaaactcgagactagtcgatgccntatgtgcttcccaagctgtatgtgaagctacattactgtgtgagttgtgcaattcacagcaaagtagtcaggaatcgatctcgtgaagcccgcaaggaccgaacaccccc

SEQ ID NO: 267994 - DNA, 1716 bp, Homo sapiens
  misc_feature (1606)..(1606): n is a, c, g, or t
gccggcgcacccgagccccactccctgcgagggccgcgcggaggggcgcgcaggaggaggaggagccgaggaccgcggaggggaggaggggagtcgcctggggagccgagggctcctcgcgcaagtgcccgcagcgcccggaagcgtccaaaggccccgatgctgggagaagacgtggaggcctctcggggaaccacgacgacctccacgatgacgcaatagtcatgccaaattatacatgcatatttcacctccacccggaaggccagagccatcctctcggcctctaagtgcacaacggaactagaaatcaaggaggagagaccaaaagggaggcctgaactctcaaactccgaatctgatttccactctcccaggaaggcttcggaaatcactgtggattgtcaatacaggagtccatactgactgaatccctaattttggcctgtattcttctccctctgtgaaccatcttcttagaagtcactgaaccaagagtgccagaaaaccatcccaagactcacacagagttgttcttccatagtggatgttttggccactggacatcagaaccacattttgggtttgaagaatcttctacatgctgagaaagtggaactccagagacactcctgaaattgtcctaagtcaaaggagccaaacggtgtacgagctccctctctgccgtcccctctgagagcagccatggccctgagtgatgtcgatgtgaaaaagcagattaagcacatgatggctttcattgagcaggaagccaatgagaaagcagaggaaatcgatgccaaggctgaggaagagtttaacattgagaaaggacgcctcgtgcaaacccaacgactgaagattatggagtattatgagaaaaaggagaagcagatagagcagcagaagaaaatcctgatgtccaccatgaggaatcaggcgaggctgaaagtcctgagagcccgaaatgacctcatctcagatttgctcagtgaggcgaagctgagactcagcaggattgtggaggacccagaggtctaccaggggctgctggataaactggtgctccagggtctgctccgactgctggaacctgtgatgattgtacgctgccggccacaagacctcctcctggtggaggctgctgtacaaaaagccatccccgagtacatgacaatttcccagaaacatgtggaggtccagattgataaagaggcatacctggctgtgaatgcagctggaggtgtggaggtctacagtggcaatcagagaataaaggtttcaaataccttggaaagccgactggatctctcagccaagcaaaagatgccagaaatacgaatggccttgtttggtgctaacaccaacagaaagttctttatataagcctctgggaagtgaagctagtgttgaaccactaaaccataaaagtttaagttttttggggaaaggaaactagtagtgtttcctcctctttgatgctctgatactgttctgtttttcttcacgaaataccctttggatagctaaagtgttaactttgaaataaagcccaaattaatgctcagaaaaaaaaaaaaaaaaaactcgagactagtcgatgccntatgtgcttcccaagctgtatgtgaagctacattactgtgtgagttgtgcaattcacagcaaagtagtcaggaatcgatctcgtgaagcccgcaaggaccgaacaccccc

SEQ ID NO: 267995 - DNA, 1889 bp, Homo sapiens
  misc_feature (1779)..(1779): n is a, c, g, or t
gtggtggcggtccttgagctggaaagcaggaaccctggcttattgcgtggtcccccccaccaccaccaccccacgccttccgtagcacgagctttaatcatttactatgaaaccggtaactaagggagatacagcgtgttgaaccactgaagcacgcccctccacacacacaccagccagaaaaaggataccccgtcggctccggacccggcaaatgtacctgggctccccctggaggccacattctccgaggtcgcctttcggtccccaatgttcctcaaaggtattccgttgtaatcccggagaactgatacacactagtgctctgaaacttggcctgtgctcgaggcggcaacccctgcccctctgcctggcgatgccggaacacacccatctggccaggtcctgttcactggccaagaatgcagcattgaacactgggcattggggcgggggtgcactctgcgctgacaccgcacccctcccctcaacttgctgactagaggaggcctgaactctcaaactccgaatctgatttccactctcccaggaaggcttcggaaatcactgtggattgtcaatacaggagtccatactgactgaatccctaattttggcctgtattcttctccctctgtgaaccatcttcttagaagtcactgaaccaagagtgccagaaaaccatcccaagactcacacagagttgttcttccatagtggatgttttggccactggacatcagaaccacattttgggtttgaagaatcttctacatgctgagaaagtggaactccagagacactcctgaaattgtcctaagtcaaaggagccaaacggtgtacgagctccctctctgccgtcccctctgagagcagccatggccctgagtgatgtcgatgtgaaaaagcagattaagcacatgatggctttcattgagcaggaagccaatgagaaagcagaggaaatcgatgccaaggctgaggaagagtttaacattgagaaaggacgcctcgtgcaaacccaacgactgaagattatggagtattatgagaaaaaggagaagcagatagagcagcagaagaaaatcctgatgtccaccatgaggaatcaggcgaggctgaaagtcctgagagcccgaaatgacctcatctcagatttgctcagtgaggcgaagctgagactcagcaggattgtggaggacccagaggtctaccaggggctgctggataaactggtgctccagggtctgctccgactgctggaacctgtgatgattgtacgctgccggccacaagacctcctcctggtggaggctgctgtacaaaaagccatccccgagtacatgacaatttcccagaaacatgtggaggtccagattgataaagaggcatacctggctgtgaatgcagctggaggtgtggaggtctacagtggcaatcagagaataaaggtttcaaataccttggaaagccgactggatctctcagccaagcaaaagatgccagaaatacgaatggccttgtttggtgctaacaccaacagaaagttctttatataagcctctgggaagtgaagctagtgttgaaccactaaaccataaaagtttaagttttttggggaaaggaaactagtagtgtttcctcctctttgatgctctgatactgttctgtttttcttcacgaaataccctttggatagctaaagtgttaactttgaaataaagcccaaattaatgctcagaaaaaaaaaaaaaaaaaactcgagactagtcgatgccntatgtgcttcccaagctgtatgtgaagctacattactgtgtgagttgtgcaattcacagcaaagtagtcaggaatcgatctcgtgaagcccgcaaggaccgaacaccccc

SEQ ID NO: 267996 - DNA, 1468 bp, Homo sapiens
  misc_feature (670)..(670): n is a, c, g, or t
gtggtggcggtccttgagctggaaagcaggaaccctggcttattgcgtggtcccccccaccaccaccaccccacgccttccgtagcacgagctttaatcatttactatgaaaccggtaactaagggagatacagcgtgttgaaccactgaagcacgcccctccacacacacaccagccagaaaaaggataccccgtcggctccggacccggcaaatgtacctgggctccccctggaggccacattctccgaggtcgcctttcggtccccaatgttcctcaaaggtattccgttgtaatcccggagaactgatacacactagtgctctgaaacttggcctgtgctcgaggcggcaacccctgcccctctgcctggcgatgccggaacacacccatctggccaggtcctgttcactggccaagaatgcagcattgaacactgggcattggggcgggggtgcactctgcgctgacaccgcacccctcccctcaacttgctgactagaggtaatcgcttcctttcatcgattcacagcgttagaaaaatgcagcattgagaggcagcgcggaggtcaactggaccatcacccttaggttgtagggaagaaaactgagacctagaaaggtgaagcggttgtcccaaaggcttccagctgctcccagtactcaagnacttggagcacacttggggaaatgctcactgttgtattcccgttcctcactatccaggaggcctgaactctcaaactccgaatctgatttccactctcccaggaaggcttcggaaatcacttttttcttcttctctatgagtcaactttctactcagcataccttctttcctggaagcaaaatggttgcaccaagtccaggcatcaccatccatataccatgttttccagaaggaaagagagcttctcttgacccactcattgaacaaagtcttgaacttcttctgattagctcaacttagttcatccctgaaccagtcatggtggattgtcaatacaggagtccatactgactgaatccctaattttggcctgtattcttctccctctgtgaaccatcttcttagaagtcactgaaccaagagtgccagaaaaccatcccaagactcacacagagttgttcttccatagtggatgttttggccactggacatcagaaccacattttgggtttgaagaatcttctacatgtgatgatccagtaaatgatttcatagtccaccaaacggtcacggttcacacttggagacacccaatgcaggtctctgctggctgagtgcactggcttgtggctggaggtgagaaagggggactccgagaaacccccgaaaaggctaaatcaaagggcccaacgggggaaggacccctctgggggcctgggaaagcaaggcccaagagggggaacgcaaacccaggggctagggaggcgaaaagaaagcacgggggaaagaaaaaaacc

SEQ ID NO: 267997 - DNA, 1386 bp, Homo sapiens
  misc_feature (1276)..(1276): n is a, c, g, or t
tgccaacttaactgagattctgagtgtgcaaggataacccccgtcatggccccgggtgccaaggaaatcccttttagcctcctcttggcagacttggccagccttccccagtgacagcctggctctttggattcaagctgcctggtcagactgcaagggtcatctgtacaaagaaggaagcaacagtgccaggttccagcgtgcgttccaagttccacattctgtgtgcagactcccaacgccagagcaaaggcaggcccctggcaggggactgctgagaaagtggaactccagagacactcctgaaattgtcctaagtcaaaggagccaaacggtgtacgagctccctctctgccgtcccctctgagagcagccatggccctgagtgatgtcgatgtgaaaaagcagattaagcacatgatggctttcattgagcaggaagccaatgagaaagcagaggaaatcgatgccaaggctgaggaagagtttaacattgagaaaggacgcctcgtgcaaacccaacgactgaagattatggagtattatgagaaaaaggagaagcagatagagcagcagaagaaaatcctgatgtccaccatgaggaatcaggcgaggctgaaagtcctgagagcccgaaatgacctcatctcagatttgctcagtgaggcgaagctgagactcagcaggattgtggaggacccagaggtctaccaggggctgctggataaactggtgctccagggtctgctccgactgctggaacctgtgatgattgtacgctgccggccacaagacctcctcctggtggaggctgctgtacaaaaagccatccccgagtacatgacaatttcccagaaacatgtggaggtccagattgataaagaggcatacctggctgtgaatgcagctggaggtgtggaggtctacagtggcaatcagagaataaaggtttcaaataccttggaaagccgactggatctctcagccaagcaaaagatgccagaaatacgaatggccttgtttggtgctaacaccaacagaaagttctttatataagcctctgggaagtgaagctagtgttgaaccactaaaccataaaagtttaagttttttggggaaaggaaactagtagtgtttcctcctctttgatgctctgatactgttctgtttttcttcacgaaataccctttggatagctaaagtgttaactttgaaataaagcccaaattaatgctcagaaaaaaaaaaaaaaaaaactcgagactagtcgatgccntatgtgcttcccaagctgtatgtgaagctacattactgtgtgagttgtgcaattcacagcaaagtagtcaggaatcgatctcgtgaagcccgcaaggaccgaacaccccc

SEQ ID NO: 267998 - DNA, 378 bp, Homo sapiens
ggcttcacatccagtaaagtaaaaaggtaaacagaatttttaaagaagagggtgaaggccgggcgcagtggctcatgcctgtaattccagtactttgggaggccaaggcgggcagatcatctgaggtcaggagttagagaccagtctgaccaacatggagaaaccccgtctctactaaaaatacaaaattagctgagcgtggtggcgcatgcctgtaatcccagctactctggaggctaaggcaggagaattgcttgaacctgggaggcggaggttgcagtgagccgagatggcaccattgcactgcagcctggatgacagagcgagagtccttctcaagatatctttctacttatccattgaccaatttgttttggt

SEQ ID NO: 267999 - DNA, 520 bp, Homo sapiens
cgccactacgcccggctaactttttgtatttttagtagagacggggtttcactgtggtctcaatctcctgacctcgtgatctgcccgcctcggcctcccaaagtgctgggattacaggcgtgagccaccgcgcccggcccccttttgttattatctccccacctggcttctttgcacactggatggacttcctcctggttctccttggagcctcagcagactcggaagcctaccctcgtaagaaacccactgctgccaagccagaattctgagaggcggaatcctcttctctccctaagactcacgaaagggatgcttgttgccagggaagatgcttgagtcccctcctctccctcatgctcacagaagatgaagttggagcttcatcttcagcgggaggagggaggtgcaggatcacgtggaccaccggagaggaaaagcccctctctttaaactggagtcttaagaggctatgcttgagatctcaccagctcctagctttacctggtgaaatgagcct

SEQ ID NO: 268000 - DNA, 552 bp, Homo sapiens
ctaagggggaaaaagaggaagcaggtgggtttgaaagaaggaaaaaaggagtatctagcattttctttttaaaatgtcattcttgatttatttggtggcacaaagtgattttcttacgtttctcagactgcttgagtcagtctatatagaggctattcctggatcttagttgaaagctgttgcctttctaattgtttaactgatcacttctgaacgacaattacagttcattgttattccctgttaaaaaaccattgacatccatccaaaagttatagcttacaggtcagggaatatttatgtgatatttatagtctgtgaagaaaaccctggggaactgccagtagggaggattatttaccaatttctttttcttcaagtttgaatttatttgagatttatatccaaaagacattttgtaatcctgtgtaactctgatgtgtgactataattgtgcatgttggtcaagttcaaggaaaaaaaaaatcttttttctttttaatagtgggggctgggaaccctggttgattccactaaaaacatcacagacca

SEQ ID NO: 268001 - DNA, 519 bp, Homo sapiens
cataaacagattttggtcctggactgctgcacggcctaagaatttctttgttttacaataaagcaacttttaacgaatatctccatagaatggtacaaggctggatggctggatttaagagcaggggctaatgtcacagggagcaaattctatagatgcctgttctatgaggcagtatagcttaacgataaggagtagacagacaacctaatgttaaatcctagttcagtaacttgttaacttgataacccccggcaagattcttaacatctgcatcttcatctgtaaaatggtagtaaaatggtagtaaaactaatgattgtatctattttacagggttgttattaagggatgatatggtttggctgtgtccccacccaaatctcatcttgaattatagctcccataatccccgcatgtcatgggagggacccagtgggaggtaattgaatcatgggggcaggttttttttcatgctgttctcatgattgtgaataagtctcatgagatctgattaaa

SEQ ID NO: 268002 - DNA, 634 bp, Homo sapiens
ataacttcctctcctcccacctcctgaagtatatacgtccctaccaacaacttggagaaggaaataagagtcaaaaatcattttttaaataatgaagtagataccataataatccctttttgtcaggtgataaaactgagacacagagagaaaataacttatttcaacttatttcacacagataataagtggtccagctaggatttgaatccagacggcttggctccagagcctgagcacttcactggtacaccctgaaggaagggggcaaccaaggccaaggccccagagtactctacctacatttctctaacacaaaactgtgtgaggcaggtactattaccgtgcacactttttagatgaggaaacaaaatcttggagaagttgctatgggcacagggtcatctgaatacaagtgggcaagtggagtgtaatttagttattttgctatgtaggctgaggtcagaattaaaagcaaaaaattagctggaagaagacttatgcctaggccgggtgtgatggttcgcggctgtagttccagcactttgggagcctgaggtgggaggatcgcttgagcccaggagttcaagaccagcctgggcaacatggcgaaaccttgtctctactaaaaata

SEQ ID NO: 268003 - DNA, 725 bp, Homo sapiens
gtgaaggcggagccaagaaggggaagagccatcactagagcccacggggcgttctgcttgcttcccctgggacccacgcggctcaggcccagggagtcgcggacccgggcgtttcctgggatgctgggtctgccgcctgcgagggtcaggacggggcgaaggccattccgctgcccttccagcttcggaatcacccaatgcacggcaagatgtgccggcaagatgtgcctctcaggttttccgaggctttggagcctgcacagttgttctacaaaaggcagtagctccgccgaacgttggatcgtcccttgctgtctggtgataccagaacgagagttgactgtgtgtctcagtcggttggtatgcttgcttccaagcctggagaagcatgccatacctaagacctactaccctgagaagcagtgaagtgctcctggggcccaccaaggccacacaagtcaaggagtggatggccttgctccagctactgctcagatcacctttgcaagatgacattgtgttgggagatggtcatcagagccagggccatggaagatgctgtcaggaggcacgaggaaaggctatgggagcacaaagcaagaaagtggccttctgcaagccaggaagagaggcctccccagaaaccaactctgtgagctcatcgatctttgacttttggcctccagaacattgagaaaataaaagtctgttgttaaaccacaaaa

SEQ ID NO: 268004 - DNA, 671 bp, Homo sapiens
gtgaaggcggagccaagaaggggaagagccatcactagagcccacggggcgttctgcttgcttcccctgggacccacgcggctcaggcccagggagtcgcggacccgggcgtttcctgggatgctgggtctgccgcctgcgagggtcaggacggggcgaaggccattccgctgcccttccagcttcggaatcacccaatgcacggcaagatgtgccggcaagatgtgcctctcaggttttccgaggctttggagcctgcacagttgttctacaaaaggcagtagctccgccgaacgttggatcgtcccttgctgtctggtgataccagaaaagcatgccatacctaagacctactaccctgagaagcagtgaagtgctcctggggcccaccaaggccacacaagtcaaggagtggatggccttgctccagctactgctcagatcacctttgcaagatgacattgtgttgggagatggtcatcagagccagggccatggaagatgctgtcaggaggcacgaggaaaggctatgggagcacaaagcaagaaagtggccttctgcaagccaggaagagaggcctccccagaaaccaactctgtgagctcatcgatctttgacttttggcctccagaacattgagaaaataaaagtctgttgttaaaccacaaaa

SEQ ID NO: 268005 - DNA, 397 bp, Homo sapiens
gcattaaaaaacaaagaatcagagaatcataaaaaatgaggcacatgcatattatataattttttaagaaaataaataatagaaatcaagtgatgattaactctaggcaaaaataaagaggttctacaagaacgaaagcatggtcatgtacactacttggctctgtagtgcacaatgtttgcataattatcataatgtaaacactgaccaccagattcaaccaaaatttatgatagaatcacaagaggaatgataggtggaaagtatgatgtatgagagttaagtcctcatttctcatggcagtaaactaacagatgctacctaaaattaaaagatcaagaaatctcattatacacacattgttgagaaacatggagataaataccagaaaaaacag

SEQ ID NO: 268006 - DNA, 360 bp, Homo sapiens
gccccatctcctcctatcatcacatttggagttaggatttcaacacatgaacttgagggtggacacatacattcggtccataacaactcctattaaatcaaatgtccagaatgagtcaacctatggagacagaaggtggatgcgtgggtgcctgtggctgggtgtgcgtgcctgtggggaatggggagtgccgcttaatgagtttctttttgaggtgatgacgctgtcctaaaactgattgtggtggtggttgtacaacttcattactatatatacaacattgaattgtagacttatgtgggtgaattgtgtggtttgtgaactatatatccataaagccattattttaaaaatctaatc

SEQ ID NO: 268007 - DNA, 449 bp, Homo sapiens
ggaatgcctgtggggtgtgacagcagcccctgagtgaagagctgtgcccaaccccagctaagccctcaggacccaggacaaggggccttcttctacataggagagtggcctcatcagcatcccacatagagggaggcagacaggccctgcaaaccttcctctaaacttcacgcatctcctcggaagtccctataataatgacaagtaggtttattgagcactaatgggctgggtgcttggctaagtggtttatgtcagcatctcatttaattctccgaagaaccttgtatgctagtattatggggagcctgtctagtgggtcagaaaatatgaccgacaataaaaatttgaagacaataacaacaataataacattaacaaaggaaacaatgcttcccagagatctaaggaagggaaattaatgtctgatgaagggatgattaaagtga

SEQ ID NO: 268008 - DNA, 585 bp, Homo sapiens
gtctcccccacattaggcttttgcatcccagcagttctgacacttcagacttcattgcacagcctagtttccctttagaagaagggaacggtcccattccagttgatggtggcctcgctccacttggttctgattgccatctccactggtgaaaaccgtcgtcttggtccatgtttctcttcctgttggtctctttcccagtgatgggagtgagtatctgaagaaggaatagccagcatttagacccaagcctatgaacaccattccagaggaaaccactaaagaaggacagaagggtgggtgggcaggagtcaggcttggaaaattgtgctcctacaactggttaagcagatggggattcaagcaggtagtgtgttgaaatgccccatacagaatgagtcagtggtagcctgggttgttgtgcatattaggacgtagtatgtgtgttgaaacgccccatacagaatgagtcagtggtaacctgggttgttgtgcataactgttgataagctatgtaatacaccttcccgtaccatgatgtgacacctagaaccaggtataggttactaaatattgtcaggaaaa

SEQ ID NO: 268009 - DNA, 858 bp, Homo sapiens
cgcgaccctcttctttgcgtagagtttttcaggttgctcctggaaaccatgccgaaagtagtgtctcggtcagtagtctgctctgacactcgggaccgggaggaatatgacgacggcgagaagcccctccatgtgtactactgtttgtgcggccaggtggtcctagtgctggactgtcagttagagaaattgcccatgaggccccgggaccggtcccgtgtgattgatgctgccaaacatgcccataagttttgtaacacagaagacgaagagactatgtatctgcggagacctgaaggcattgaactacagtacagaaagaaatgtgcaaagtgtggactgctgctcttctaccaatcccagccgaagaatgctcccgttaccttcattgtggatggagcagtcgtcaagtttggccagggctttgggaaaacgaacatatatactcagaaacaagagcctcctaagaaggtgatgatgaccaaacggaccaaagacatgggcaagttcagttctgtcactgtgtctaccattgatgaagaggaagaggagattgaggctagggaagttgctgactcgtatgcacagaatgccaaagtgattgaaaaacagctggagcgcaaaggcatgagcaagaggccactgcaagagctggctgaatgggaaccccaggaaaagtgaaaatgaaggggacccttgattgacaaccagttcaaataaccaggctttttttctgagccctagactggaggcaagcatttagatcaggagacaaagtaacttcttgattacatagactggttcctatttatatcccagcagaaggctttatgttgtttcccattgattctcctacat

SEQ ID NO: 268010 - DNA, 386 bp, Homo sapiens
aactattccataaaaagcactgtgatgctacacataatatgactttgtcttaattcaggagatgtattacatttttcttgtttttaatgcaaattccatgcatgggccagctaatgtgaaataatttaattaccttgctaggttaacactatcatctaaaaaacagaagttatttttaaaacattctgtgagagtttggacttctctcagcctaaccctaattctacaaatccccaaaattccaactgcagagatccaacatgcagctatctaactcatcccacatggctcaaatctttacatgacttagaagtatagattatcaatcaaagcaaatgggagaatggattgatttgtgaaatggcaacaggtccctcatgggagac

SEQ ID NO: 268011 - DNA, 678 bp, Homo sapiens
gaaagtcacatttctcagctggattccatttcactctcacttaagtggaaccagccaatgtgcacccaggacaggatccaaggtggggacccatggaaggagcacaggcctccagcgctgcgaaggcatgggcaccactccaggcccacatcctcttggagaagagcaagagagtggaagaagcaggaaacgttatttacccgcctcagaagtcacccaagagctcgtgaaattgggcagggactgtggtaacataaagtttcaagttcaaagtttatgtgtccttccttactcccggtggagtgggctcatgagaatatccaagtgtttataaaggataaagaacccacattttctttgcacatctggctggaaagtgagaaatgtataaatttttgaagaaactgaagggactgtcatacatctgtaataatgatacacgtaaagtctgtggaataacatgaaaaatctgtaagatgtaccattaagcgagcaaagaataaaacttgtgtgtttgattttaaccgtgtaaaatcaaatacttttgagtaaaacctggaaaaaacatgaggaaaataaaaccaactatcactgtggtaggagtgtaggtggatttttaaaaaatcctctcgtcttatttattaagaataaaataaggttgttaattcatttttttga

SEQ ID NO: 268012 - DNA, 446 bp, Homo sapiens
atggtctcgatctcttgacctcgtgatctgcccgcctcggcctcccaaagtgctgggattacaggtgtgagccactgcgcctggcccgcatgtattacatttataattaaaaattcacaactcaatgtcaagtgtgaaccttgtgttgaccctgatttgagcaagcaataaaaagatatttttgagacatttagattatgaatttcacatttgatgatagttactattaattttgtgaggtgtgatattggcaatgtggttagatgacttcagagaaaaaggaaggtatagttaagcaagtatggcaacatctaataacttgggtctaggtgatgtgtatgggtttcattatactgtcctctttactgttgtatgtatttgaaaacattcatgacaaaaaaactttttaatcagttaaataaaccatgaagaacggttaaagaagt

SEQ ID NO: 268013 - DNA, 415 bp, Homo sapiens
aatgtctcagcatttcaaaatattaattataacagtagtcaattagaaatgtttctggcaactttctaactctgaaagtgttttctaataataactattggtgatattaataaagaatcttgggaaaaaggaacaactatataaaattatatttctcaatacacattactattatctcttatgtctgttgcatatttttatttgtttacttagtgccaaaatcctggaactgtgcttgtgggacatgtacaaagaaagtgtctctcgtctctgaggtctttcctgattcatcaaaatgtattaggaaagaaaagtgactgtcttggcaaagaaccacagtattttgctgcatttgtttgtttttattaacacaactcatatttgaaataaaaacacattttataccataaaaaaa

SEQ ID NO: 268014 - DNA, 534 bp, Homo sapiens
ggacgtgtctcccgatggatcatgccaactctgtgtgctagtgccagtgcccttgaggaaaagaagagaaacatccaattgaaaaaaaataggcacactctttgttggggggtataagtttaaggggtacaagtgcaattttgttacatggttatattgtgtagtggtgaagtctagtcttttagtacatccatcaatcgaataatgtacattgtacccattaagaaatttctcagtacccaccccctgccactctcccagcctcccaagtcttcagtgtttatcattccacactcgaagttcatgtgtacacattatttagctatcacttgtaagtgagaacaagcaggatttgactttctgttcctgagaagtttcaattaaaatacagacatattcttttaaatttattttctttagtaaaacaaaaacaatgcaatttatttccaagaatttttttctttttgacttacagggtatatgtgttaggacttagagaaattgtgagtaaatgtgctagatgaccttctgttt

SEQ ID NO: 268015 - DNA, 495 bp, Homo sapiens
gctgcttttagttcatcagaatggtcattttcacatattgattctacccatccatgagcatgggatgtgtttccatttgtttgtgtcatctgtgatttctttcagcagtggtttgtggttttacttgtagaggtctttcacctccttggttaggtatattgctaagtatgttttttgtttgtttgtttgttttttgcagctgttgtaaaaggggtcgagttcttgatttgatactcagcttgctcgttgttggtgtatagaagagctactgattcgtgtacattaattttgtcttcgaaaactttgctgaattattttatcagttccaggagttttctggaggagtttttaggatcttctgggtaaacgatcatatcatcagcaaacagcgagaatttgactttctctttttttttttaattaattaatttatttatttattttttttttttcctgagacggagtctcgctctgtcgcccaggctggagtgcagt

SEQ ID NO: 268016 - DNA, 443 bp, Homo sapiens
gctgacacaggagaattgcttgaacctgggaggcagaggttgcagtgatctgagatcgcgccattgcactccagtgtgagctacaagagtgaaactctgtctcaaaaaaaaagactacacattgggtacagtgtacactgcttgagtgatgggtgtaccagaatctcagaagtcaccatttaagaactttttcacgtaactgaacactgcctgttccccaaaaacctattgaaataataaataaataaataaaacaaagttatggttccaatcatcagaacatagtatagtaaaattaatataacaaaaattaaaagatggataaccacatgaaaattaaaattccgcacatgtaaagcaaaagagaaatctataaacaataagaggatggcttgtaatcaatgaactttataatgatgtagttatattttcatgagttttta

SEQ ID NO: 268017 - DNA, 425 bp, Homo sapiens
atttttgtttacttgataaactcagtgctttagctgggaggatgtcagacttaaatgcaattttacagtctcttcgaaggatacagttagtcaaacatcaggcagctaaagtatctgtctggctcctgaatgtcttcaggtcatggaagtaagtgccctggttacaggtttctccaaatgaacgttaggaatatttccttttctctacgtccatgttgaaagttttttctgttttgttttgttttgtttttactttttcctggcattatatactgaactccagaagatgaggatgtggatggttgagatatgcttttggaacttggaattaataaaggcagatgctaaattgctgaaagcattaaaacctgacactgcgtgttaaatcattgtaagcaaggtcctaacagagcgtttgtgattcg

SEQ ID NO: 268018 - DNA, 641 bp, Homo sapiens
cccactttttacagacatgagacaacgcgggctcagagaggtgtgaggcaggctggaggcagcacagccagtcactaggccagctctacccagactgcagagctggagctgtaagcgggaagcagagcaccttgggaccgccatcctcatgcacacacgtgcacacacatgcacacacgtacacatacatgcacacacatgcacacacgtttacttctgcaagtccctggatgtcttttcaaaagctgtataatttgtttttaaaactgtatatttcaaagaattttcctgaggttttagaatatttttaaataaatgaatgccttaccttgcctatcactaaacctcaatatgtttctaaaattaaaaaaaaaacaaaacaaaaacccggcccttctcacatgggtcagccctgcataactggagttgctctggaaagaccttctctgccacttctcccttgtcaggtgcactcctgcctgggacaggtgggtgcagagcctggggtgagggaaacaaccctgtctgacctctcttctcaggagtatgggtcgccaagaggctgtgccctgttctcctagcctaggagagaacactggtgcaggccagcagcagaggaagtggcagagagaatctgctgg

SEQ ID NO: 268019 - DNA, 335 bp, Homo sapiens
aacattaatatcaataatgtttaaattgaccttacaaatttacaagaaggggacacacgactctagaaaaatgggcaaagaaaatgaataggcagttccaaaaattataaaagcatatattttggctcggcattctcacttctggaaatttatcctacacatatatttaacttctgtgcaatattattattgcagtattacttataatagaaaaagactgtgaaccctgaaaatttgagacatgtcttagttaattaattaatttatttatttatttgagacgaagtttcgctcttgttgcccaggctggaatgcaatggcggggtctgggctca

SEQ ID NO: 268020 - DNA, 354 bp, Homo sapiens
tctcaaaaaaattcttccagatccctagactttaaactttaaacaaaactttgagtattgactatttatcttactagtttttaaaaattaaaacctaactagttactaggttatttgtttttctttctccctgtctctcttttttttttttttttttttttttgagacagagtctctctctgttgcccaggctggagtgcagtggcacaatctgggctcactgcaagctccgcctcccaggttcacaccattctcctgcctcagcctcctgagtagctggaactacaggcacccaccatcacgcccggctaattttttgtatttttaatagagacaggctttcaccatgttagc

SEQ ID NO: 268021 - DNA, 445 bp, Homo sapiens
tgccaaaatgaatggggaaactctgctagcatttaagggtgggagccgtggtgccacaatgacctgtatgaggaaaaccagctccaggcccgcatgactagtgagtgtactgctagacattcataaacatgaaaaactcttttgtgggaaaacagcctgttgcatagcaagagtgatccatcttgaagtaaaactgccatgatgaccaatgtttgacgcctacaattcaaggtggtccagtagcacagataagccctcacaacctccccgtggtcatgagtttctaaaggaagtcagggatgatgagcttcctgtgtctttaccctaaaagcttgctatataaaggatactttctggaggttggttgtgagaatccaccatctcttggcctacctagacatcgtttctgtttctaagtctctattaaatatttctttctgagaaa

SEQ ID NO: 268022 - DNA, 505 bp, Homo sapiens
agaatggggccccaaaacagaaaagtcaaactaactctgaggaagcaggcactaagatttcatttatcaggaaggacttgttgacctcaaaatagttcttagcttgtgaccctgaagtttgaattcccatcagtaaaaaacaaaacctttttctttcattccacatttagagggaaagaaggagggacactaaaatgtggctccccttctgtcattgaatccttataagaattcctgcagagtgtcataattcccattttaccaatgaggaaactgaggctcagagaggtgtgggagtggtggaggcaggatttgaacctgggtctcatcccaaaggtcatgcatgctttttccactacactagacattcccaaaccaggccgctcatcgagttcattgggggaagcctacaaaagcgtacctgtttccagatcctacctttgacctattcaaccatatttcttcagtagggcccagaaacctgtactttaaagaattatttgtg

SEQ ID NO: 268023 - DNA, 392 bp, Homo sapiens
tttcccagcattacctttactcttcacatttttccaagatcagtagaaaatgaacagatcccaggtacctgtgtgggttccctcagacctggccccagtacttttgcctttccttgggagccatctgattcactgctggtttcagcagccaccaacatgccagtgactccgcagtcctcagcttcattacgggcttcccttctgagctccagaaccactcatccagctccctcctgaagatccctgcctgcccgttccacagacacttcgagcacaacatgtccgagacccctctagcccttaccttttgcccagcctctttctttgcacttcccagtctttgcaaatggcacctggatttacctggaggctcataaagaaactctgggaga

SEQ ID NO: 268024 - DNA, 347 bp, Homo sapiens
tacacacaaacacacacaaatgaacattggtaaaattggtgaaatctaattaaagttagtagactgtattgtcagtttccggttttctacattatagttacgcaagatattactatgctattttctaacaactacgtgcaagtctaccatcatctcaaaatataaagcttaataaaagtgaagctctgaaaagtatctatagaatctgaatagtaaagggacataattctttttttctttttttttttgagacagagtctcgctctgtccacaggctggagtgaagtggtgtgatcttggctaactgcaatctctgcctttcgggttcaagttattctcctgcctca

SEQ ID NO: 268025 - DNA, 413 bp, Homo sapiens
gaaccacattctgtaacaaaatgactggcagctgttttcaacagacattctcattaaaatatacatgaacaataaacatgttaaaatatgtcaaaactggaagtactaataagatgcaaatataaatcttcaagagaatattatgtggaagaaaaaagttgcaaaaaaaattagtactgtgattcacttttggaacagattgtgtgtttgcgtgcacctcacctacagggacacatctggagagtatgcaccattctgttgacaacagacccttttgggtcagagggtaggcttcaggccagtgagatatgcagattcatttcaatttataaatatacttttatacattgtttgaaattttgtatttagggaaaaaagcatttcaataaatacttttgaatagattggcaaca

SEQ ID NO: 268026 - DNA, 636 bp, Homo sapiens
gcggcggtttccaggacctcagactttttgccgaggcggcagtccctagacgaagcgaaggaggcggcgcctgccccgcccacaagagctgccgcgcgcgggtgttatagctccaccccatctgcaaaggaagggggagcggaaagagcgggatctagcgtgggataaaagtgggactactacagtgtaactgggcatgcgcccctcctagaaatgatgggaatgcaaaagcccttgactgctccaggactcgagggatcctcggtgccaggatgctgggtcaagcgctccgccgggacagaggactcataccagggaaatggagcccagcctcgtgataaactacgacccaagctgggggaggaacctagttttcgaaaggaaaataatatgcgcaagctttaactgagcagtgggatggtgtaagtcagaggaaacagatgacttgaggggctctacaaacttttagttccttcccacaaccccaccccctgagcccaagtcgcggcagcatccttccagtcggccagtccccttgctgcagttcatgaaaactggcactattctatggcttcccccaaataaccgttacttcagttaattagaaacaaaacataaatggttcctgatgacaaa

SEQ ID NO: 268027 - DNA, 536 bp, Homo sapiens
agccaaatgatatggtcagacatggtgagtcctgccaacctcataggaggggtcttagacactaacagagagtgaggagaaaacaccagtagtgttactcttatgacagacccagctgattaaagatttcatcagcgtaaaagattttgctatggcttatgccccccagtggtcatctttaagtttaaaaggaaacaaaacaagtatctactatgagccaagcgaggcaatttactcatctcatttattcttcacaaaaaggtgagattattcctttttttaaagaaaagaaaactgaagagaggttacataaggctatggagctagtgactaaattcaacagaatttaaagcgagttcactgggaggcctgttttctttccattccttgaaaatttggcctcccttgtcaatggttggcttttagtactcctgcactcacttgcacactgcacacttgacaagtaggtcaaaacttaattccctgcatgacaggcaggtacagcacttaaacactcctaacaatgagtgctgaca

SEQ ID NO: 268028 - DNA, 123 bp, Homo sapiens
caaatctcaggacgtcagcaagatcatgacagacatgcaggcccaatatgacaagctggctcagaagaacagagaggagctggacatgtactgatctcagtagattgaggagaacactacaga

SEQ ID NO: 268029 - DNA, 404 bp, Homo sapiens
cctctaggagcgacttccctggggccaccgtcccgggcctgcgcggcgccttgccgcactcccagcgccggaagcccctgtcgaaggcctggggccaccttgaaagccggaatttcagagcggaggcgagccacagagaccacccagccccttccttgtgccgaggggaacacaggccagaacagggaggggacctgccaaaaggcacgtaagcatttggccctaagccagagctggagctcaggcccccagagttccgtccagggcactccaggactcttcttaacaaagctatagaaattccgagctgaaaagacccataaagactctaccgcgaacattttttgctccagacattgtaaaggattcccagacatcgtaaacgctttgctccagacattgta

SEQ ID NO: 268030 - DNA, 350 bp, Homo sapiens
cctctaggagcgacttccctggggccaccgtcccgggcctgcgcggcgccttgccgcactcccagcgccggaagcccctgtcgaaggcctggggccaccttgaaagccggaatttcagagcggaggcgagccacagagacctgccaaaaggcacgtaagcatttggccctaagccagagctggagctcaggcccccagagttccgtccagggcactccaggactcttcttaacaaagctatagaaattccgagctgaaaagacccataaagactctaccgcgaacattttttgctccagacattgtaaaggattcccagacatcgtaaacgctttgctccagacattgta

SEQ ID NO: 268031 - DNA, 353 bp, Homo sapiens
ccttcaggggaccctgtcctatcccttcctctctccacagctccctcagcccctctttcctcccactcccattctgagtgtcactagcaagtcaagagcaagactagatggcagccactagctgcacgtggccaaccacatcattacaattaattaaaattaaagctccaaatctttggtggttaaacttgctccatgtggccagtggctaccgtatcggacagcacagacaggaaacatttccatcctcctgctggtctgaacttaaagggcggtcaggaggtagagggaatgggagagaccagcccaaggggcccagggacagagctgcctttgtgaggagatgaggtttg

SEQ ID NO: 268032 - DNA, 468 bp, Homo sapiens
caggacgtgctcactgtgacctggctgggcatggctgaggcagggattaggattttctgataagcagccacccgatcgttcttcgtatgtttgtttctattggtaatatggttgaaaaaaatccaggagttatagtcttttctaaaaaaccatgtaagtgctactttaaatggaattatcaccacccacaaaacagtggaaggccgcccagagcttggaagtcggggttggagccactgttgctcctgacggaagggagccttctctggagatcctgctctggggagtgtttctccaggggcctcgagctgagctgaaggtggagaacctgcttcaaacatccaggaaagactcgtctagaaactgtctaccgaagggcatgaactgttttaaattgtagtggcagtaaacatagaaacaccatctagatggacataaataataattttcaggaaaaataagttctca

SEQ ID NO: 268033 - DNA, 405 bp, Homo sapiens
tgcgtttgtgtgcctgtgcatgggtggtgtgtggtgcatgcatgtgtgtggggtgcatatgtgtggcgtggtgggtgtgtgtgtgcctgcacgtgtgtggcatgtgtgtttgggtggttgtctttgctggcccagttgtagcagctcttcctgaggtggggacctctgccccacagctgcctgcctggagctctctggtaggcggtccccctgccagccctgcaggctgtatgaggttctccatggttctccccgtctgccatttgccctttgttattgctcttagtgacaggcagttatttaacattctggccaaagtggctttcgttgttttcttcttcctaaagcctttaaaattaagagttaaaaaataggaaagtaatgcgtgatgattataggcatgtt

SEQ ID NO: 268034 - DNA, 394 bp, Homo sapiens
tctgcctagtccccatcttgggagaggagaccacactacctgactaatccaatctgctccctcaaacctgttccttttccatttttttctctttatttattcttttatatatttcaaactcattttactgccacatcaaacctgttcctaaaggctgccctactgtcttggggtcaccccatctattcctatccctcacttcctgccaaacagcaagcactaactatatctaccttgtccaccttgttccacccatggtcctagcctcatctttcgctcgtcttgtcctcacagtacagtgctcagagactatggggttatgaacacttcagccaatgcaaacgtgtttacctatgtgtaaatatcagtaaagcactcagtcattcctggcatg

SEQ ID NO: 268035 - DNA, 434 bp, Homo sapiens
atcatatctgcatattattcccaaatggttcagaaaggccaataattggggaatctgggtgaaggatataaggagctctgtgtactatttctgcttttatgtaaatctgaaattacaggtcaagcatcctaaatccgagaatcagaaatccaaatgctccaaaatcagaaactttttgagcaccaacatgatactcaaaagaggtgctcagtggaacacttcagatttgaaattttggatttggaatgcttaactggtaagtatagtgcaaatattcacaaatcctaaaaaaccccaaatctaaaacacttccagtcttaagcattttggataagggatactcaatctgtatttcatatatgtaaatacaaacacagaaaaccaaaaaccaaaacttacaaacagctgacaatctcagtgagaagctataggtt

SEQ ID NO: 268036 - DNA, 440 bp, Homo sapiens
cccaggatggctttttgcagcccaacacaaattaataaactttcctaaaatattatgaggttttttgctatttttttttttagctcatcagctatcatcagtgttaggatattttatgtgtagcccaagacaattcttcttccaatgtggcccaggtaagctaaaaaattggacatccctggcctagagaataaatttttagtttcatagttgttggttccatttttctttataatagaaaatatagcccagaaaggaacacttatccaagtatacaatttccaaatacctaaaggactttgcccagtattgtactctttgagaaacaaaaaagactaaaggttgggttagctgacttataagccacagaaataatttaatttctgaaaaaaaaattaagaataaaagattaaaactgacctaaacattatgaactgaat

SEQ ID NO: 268037 - DNA, 819 bp, Homo sapiens
  misc_feature (75)..(75): n is a, c, g, or t
cacgaggcgggccagggccaaagcgactttcgctacttggattggtcggcgtagctttgggcggccggaccttanaaagtcacacatctgcgcgcctgtgcggcccctgcttctgcggatgctgaggcacgtaaaaaaatttgaagaagggaatttcgcggcattcttggcctggcttcctggcgtagccagcaagttcggaggtgttaaccgctgctgtcatgtttcttttgctaaactgcatcgtcgctgtgtcccaaaacatgggcatcggcaagaacggggacctgcccaggccgccgctcaggaatgaattcaggtatttccagagaatgaccacaacttcttcagtagagggtaaacagaatctggtgattatgggtaggaagacctggttctccattcctgagaagaatcgacctttaaaggatagaattaatttagttctcagcagagaactcaaggaacctccacaaggagctcattttctttccagaagtctagatgatgccttaaaacttactgaacaaccagaattagcaaataaagtagacatggtctggatagttggtggcagttctgtttataaggaagccatgaatcacccaggccatcttaaactatttgtgacaaggatcatgcaagactttgaaagtgacacgttttttccagaaattgatttggagaaatataaacttctgccagaatacccaggtgttctctctgatgtccaggaggagaaaggcattaagtacaaatttgaagtatatgagaagaatgattaatatgaaggtgttttctagtttaagttgttccccc

SEQ ID NO: 268038 - DNA, 606 bp, Homo sapiens
cacctctaagcctcattgtgaaatctggacagtagtacccatttccgaggactgttatcaatattaaataagatgtgaagtgtttagcatagctcagatcctggcaaaatgcgtgcttaattaatgtcaggcagttttattaatcacatactggcatgtattactaattgtgtttataatatatgacttgttattgcaagtagattttagccgttccccttctttgtatttccagcaggactgttacaagcatttacagctgtacgatacttgatacatgtctgttcattaatggatatatcttaaagtagtaatgaatagaaaattattttttaaacatttgatctttagctattgtaatactctattatacttaaacgttaaaatataatattgttcatctcattttaactacattaaatgtgagatttttaatggtaagggcagactataaatggaattttgaaacttctttctcggtctgacttgtaaatcacaaatgaaaatgtttggctgggagctgtgtctcaggctgggcgccatggctcatgcctgtaatcccagcactttgggaggccgaggcgggtggaccacaaggtcaggagt

SEQ ID NO: 268039 - DNA, 345 bp, Homo sapiens
gattagtgatgtcgagaattttttcatatgctttttgacagatagaatgccagctagactagtaaagagaaaaagtagagatgacccaaataaacacaaccagaaataacaaaaggacattaccactgaccacacagaaactaaaaaaaaaaaaaaagaaatgcatacattcctggacatatacaacctctcaagactgaaccaggaagaaactgaattcctgaataggataataatgagttctaaaattgaatcagtaataaaaagcctaccaaccagagaaaacccaggaccagacacattctaattctaattctaccatagccgaattctaccagatgtaaa

SEQ ID NO: 268040 - DNA, 919 bp, Homo sapiens
gcccttcaggatgccagccttggcaacattgtgagaccctgtttctacaaaaagtaaacgtgtagtggtgcacgcctgtagttccagctacttgggaggctgagatgggaagatcacttcagcctgggaggttgaggctgcattgagctgagatcaagccacggcactccagcctgggagacagagcgaaaccccatctcaaaaaaacaaagaaagtggatgcgcgctgctcctgccattggatcatcgcagcatttttcttttctctgatatgcgcctttttcctcaccgtgggggctcatgttttcgtagtttcttctcgctactagattgtgagctgcgtgaaggaaggttcatagttgtgttgtatgtacaggcacacaaaatttgtccttggatagacacatatcagtccgcttccttctcctctctgaatttctttatttaaaaaaaagaattagagatggagtctcactgtcttgcccaggctggtctcaaactcctaggctcaagcgatcctcccgcctctactaatatgaattattagcctatactaatatgaattcctatactaatatgattgaaattagtttgacttgtataataattgttctcccagattgggcttctgttttgatagtagaactaaattattaggctatttcaagaaattaatatattactggtagaaaaactgaagctacaaaatggcctggtttctcacttcagttaaatttgtgcttctgagtgcttgtattgtaggtgaaaccgcactgagaaggtatttgtggcccgtacgctggttcattgatgagacttctttgcacaggagagccgctaaaaattactgtggtgaacaggtatgaagaagactgttctctgcccttctttttgcaataaaatgttacaaactaaatga

SEQ ID NO: 268041 - DNA, 1468 bp, Homo sapiens
gcccttcaggatgccagccttggcaacattgtgagaccctgtttctacaaaaagtaaacgtgtagtggtgcacgcctgtagttccagctacttgggaggctgagatgggaagatcacttcagcctgggaggttgaggctgcattgagctgagatcaagccacggcactccagcctgggagacagagcgaaaccccatctcaaaaaaacaaagaaagtggatgcgcgctgctcctgccattggatcatcgcagcatttttcttttctctgatatgcgcctttttcctcaccgtgggggctcatgttttcgtagtttcttctcgctactagattgtgagctgcgtgaaggaaggttcatagttgtgttgtatgtacaggcacacaaaatttgtccttggatagacacatatcagtccgcttccttctcctctctgaatttctttatttaaaaaaaagaattagagatggagtctcactgtcttgcccaggctggtctcaaactcctaggctcaagcgatcctcccgcctctactaatatgaattattagcctatactaatatgaattcctatactaatatgattgaaattagtttgacttgtataataattgttctcccagattgggcttctgttttgatagtagaactaaattattaggctatttcaagaaattaatatattactggtagaaaaactgaagctacaaaatggcctggtttctcacttcagttaaatttgtgcttctgagtgcttgtattgtaggtgaaaccgcactgagaaggtatttgtggcccgtacgctggttcattgatgagacttctttgcacaggagagccgctaaaaattactgtggtgaacagacggaggcccattgaggcttctctgtcctccacggggaccagcattgggctaaacctgcagacaccattgcaaagggaattcaggcaaacccggtggtgaagaatgattccagcgcgaggacagaggctgacatttcttgcctgggtgatttaatgttgcgcatcaatttttcactccccccgtaagagtatgacatagccacaaccttgccagggcccgagggagggtggatggacttatccatcccataggtgttgctcgtggctgggtgacttgcttctgccaatgagattttcacagacacggtacaagcagaagcctggaatctgtgggcactgccaggcctgccctctaaggctcttgattttccccacgagatgtgcgtgctccagggaacggcggctctggctgtgggatgagaggcgtgtggagcaggcatggttcccatccttagcctggagtcaaggccagactagatcagcctaagcccagccatgccacaggtgcagtagtgaagagcaaatgctaactgtccatggaattgactttcaaaggggcgtgtcatgtgcctcatcccagcaacagggaaggcatttctctatcagcc

SEQ ID NO: 268042 - DNA, 823 bp, Homo sapiens
agaaaatgaaaaaaagaaagcagagatggggcaagcaggggagagggttggtgctggggtcacagtggaggggctggggatgcacgggaggggctggggatgtgagctttcctgagctcccacagttctctgcccctctcctgtctcatggcgcaagggccccctggggcttgcggtggttttgcgccaagctaatatcttgttcttcccaacagacggaggcccattgaggcttctctgtcctccacggggaccagcattgggctaaacctgcagacaccattgcaaagggaattcaggcaaacccggtggtgaagaatgattccagcgcgaggacagaggctgacatttcttgcctgggtgatttaatgttgcgcatcaatttttcactccccccgtaagagtatgacatagccacaaccttgccagggcccgagggagggtggatggacttatccatcccataggtgttgctcgtggctgggtgacttgcttctgccaatgagattttcacagacacggtacaagcagaagcctggaatctgtgggcactgccaggcctgccctctaaggctcttgattttccccacgagatgtgcgtgctccagggaacggcggctctggctgtgggatgagaggcgtgtggagcaggcatggttcccatccttagcctggagtcaaggccagactagatcagcctaagcccagccatgccacaggtgcagtagtgaagagcaaatgctaactgtccatggaattgactttcaaaggggcgtgtcatgtgcctcatcccagcaacagggaaggcatttctctatcagcc

SEQ ID NO: 268043 - DNA, 401 bp, Homo sapiens
acggagggaccggtggcctgtcgagtctgatggctgtcccggcctagctggggcggccactcccgcgtggcttctgtgctcctgtgaaccacaccccccttgctcccctggccgcaggaaaggttaggtggtgcctgtctggacccagcagtgtccactctgtgcccgcccagggctgggcactgaagtttgccaagatgaaccccagccctcggcctgggctatcctgcccagggtggccttggggacagggcttgggcgcaaggcctcagcagcagccccctcccactgccctgcatccacacagcccccacagcaccccaggccaacaatggcctgaaggatgggctgggacaccaagcactgtgggcaccctggcaacctactcggggcacaggcct

SEQ ID NO: 268044 - DNA, 233 bp, Homo sapiens
aactgtagcagtaggaaaagtggaccaaccctctggcccccaagtggtagacacaggcagcagcaggctgggcaagccagtcctcaggaccccgtgtggcatgcatgtgccacaccctgtgtggcactgccctgccatggcagtggcaggcaggcactagcagcaaagggcatggtggacctgtcctcaggccccttggaggcatgtgtagatgtgtcgtagtcctgctgcta

SEQ ID NO: 268045 - DNA, 597 bp, Homo sapiens
atttgaccttggccctatgtatacattttaaacaaatataaaacaaaaaataaatgtagaagcaattctgaaaaattggaagcattatttgtagatagtataattaataaaaaacgtcccagcatagcctacataatagagttaataggaatgtttaagtttgccaattgtgagatcaatagacataagcaacaaacagaaaacaatgtttaaaaaatgataatatttatcatagcaacaaaataatatatgccacctagaaataaatctaaccaaagatgtgcaagacctttacatacaaagtaggaaacatattaaaaggccttaaagtattattattattgagacacagtctcactctgtcaccaagattggagagcagtggtgtgatcacaactcactgcagccttgacctcctgtgctcaggtgatcctcccacctcagcctcctgactagacggaaatacaggaacatgccaccatatccggctaattttttgtagagatggggtttcgccatgttgcctaggctagaaagagttattattatagagtcagtttttcctaaattgctccaaagatttaagcaattctaatt

SEQ ID NO: 268046 - DNA, 406 bp, Homo sapiens
gcaaagctgtttgacctcaaggtggagatctgagccacctggtcagtccatgcccagttaatttctatggaggtttggtaaagtaggttagggagttggatccaatgttcctgaagtttctgttggtaatatggcaggggtcgggtcgggtgtggggagggttggatcattctaagggcagtacaagacctaatcccaaaggtgagaagttcctctctgtggaggacagcatttagaactcaatacatacatggcttgttcaaaaatggggaagagattagaaaaatttatcctaatgtttgcttgtcaaaccaagccattctctcagcaaagtagtgaaacccttacataagtcctttgaagcctagcagcagtatcctactcaaacacaaaccaccaaaaaaaa

SEQ ID NO: 268047 - DNA, 454 bp, Homo sapiens
ttattaagagggttatcacttacatgcctggcagttgatgtaagtcatcagctgagatgtcagctggggacatccactgaaatacctactcatggcctgtccatgtggtgccttaggcctcgtcacagcatggtggctgggtcccaagagtgagcatctcaagagagcaaggtgaaagtgcatgacattttaatgagtcagccttgaaagtcacataatgttagttctgcactattcttggtcaaggcagacactgagatctgcccagcttcaaggggacgtggcaaagaccccatcatttgataggaggatcgtcgaggtcacattgtagtgaaagcctgtgagacgagtggtgatgtttctgccatgttggaaaatgcaatctgctacactgctcttttcatttaacatatcataccattaaaataatccatcaactctgtgaatacatcca

SEQ ID NO: 268048 - DNA, 409 bp, Homo sapiens
cagaaagtctgcacagggtgcaggtcgaagctcaaaccttacttcctcaaagagacatgtgggggtcaccctgtttttaaggcactttccaaacatgcactctcccacaaaaccatacacacatcttcagttactctattcacattattttgttttattgtcttcagagcattgacattgccttgtctattctttaccagacatagtttcatgagaacagagaggttgttggttttattcacctctgtatccccagtacctagaacagtatataggacacaaattgcaccccaaaactttaattgaatgaatgatttcacttattgtttttattataaatatcagtagcaacaatttttattgactggtttcctgtgttcctttctttgcagtaagtatgcattttcta

SEQ ID NO: 268049 - DNA, 651 bp, Homo sapiens
ccacccggactcagttgactttctgcttactctggcttatttattctccatatgctccccatcatcactgaagtatcctggatcattcatttatggagggaaccacatttttaccttataggctagagctctctgtgggagagcggtggggttttataatttatcaactatgaggagctcactatttcatacccatggctgtttagaatgcttaagagaacacagaagctccctgaggtgcggcccttttttatgctggatctccaacactggaagcaaaaggaagtcccaaacagaaactatatgcagtgctgaatctacagtggctctgagaacttttaactaatgggcacttgtaaatctcacaacatttcctactggcgtgaatgccctgggtaaaatgctcattaaactgtcagccagcagagaggtgtcgttgctggaaagagagtcacagcatccaggggtggaaagaggcctccctgggccaccagggccctcctctcccccattcacccaccaccaaccccagactcaaaccctcctttcaaagcctttcagaggatgttacaactctccttcacctccaccaggaaattattctttttctccaatccaaatatatatatatatattcatgtttaaaaacta

SEQ ID NO: 268050 - DNA, 565 bp, Homo sapiens
atcactgaggtcaggagtttgagaccagcctggtcaacgtggtaagaccccatctctactaaaaatacaaaaattagccaggcgtggtggcgggcgcctgtaatcccagctatttgggaggctgaggcaggagaatcacttgaacctgggaggtggaggttgcagtgagccaagattatgccactgcattccagcctgggtgacagagcaagactccgtctcacaaaacagaaatacattaattaattaaaataaaattataccactgcctcaaccagattctgcactcaggttgagcctctgtctcataacttcagctttggaaccagacagcctgggttcaaatcatcagctctgcaatttctttgctgtgtgcctttgagcacgtggcctaacatctctgtgcctcagtttcatcatctttaaaataggaataaaaatcatatctatctgagctgggctctatggcatgtgcctatagccccagctacttgggaggctgagacagcaggaccgcttgagcccaggagttcaaaaccggacaacatcgtgatatcctttttca

SEQ ID NO: 268051 - DNA, 443 bp, Homo sapiens
cacgaggccaggtcacaacatgtaagtgacagggctggattggaacccaggcctgtctaaggcccagggtctttccaccattccacatttacagaaatagacctccttgaccttctggatactattgtcttttttctcctcctacctttccagttccgtctcacttctgtttcttacatgtagatgtttcccaggattccggctccatataacgttttcccagccataactaactactacactgaacatccaacagctttatggtgtcttttttgtctgaaaaaactttctctatttccttgtctttcacttgtcttttttcttttctttttctttctttctttcattctttttctctcttttcttccttttttgatatgggtcttgctctggttgcccaggctgaactcagactcctgggctcaagcagttctccctcctca

SEQ ID NO: 268052 - DNA, 237 bp, Homo sapiens
gatttgggatgctgattagacatccaagtgtggaagttgagcaggctgctagagctaacaggggaggttcggttagagataatcaatgtgagggtcttcggtggacaggtgacatttaaagctgtggattgggtgagttcctagaagcctaagagatgaaccttggggtacttgagagttagaagaggagtcagccaagtgtcctgagtatgtcagtttcctcatctgtaaaatgag

SEQ ID NO: 268053 - DNA, 331 bp, Homo sapiens
cagggcctctcaaagaccggctttggatgatggcatcgacccccacagagggccaggcatggtggctcacgcctgtaatcccagcactttgggaggccgaggcgggcggatcacctgaggtcaggagttcaagaccagcctggctaaaatggtgaaaccccgtatctactaaatacaaaaaatggccgggtgcggtggctcacgaccgtactcccagaattttgggaggccaaggtgggcagattgcctgagctcaggagttcaaaaccagcctgggcaacatggcgaaactctgtctctactaaaaatacaaaaaattagctgggtgtgg

SEQ ID NO: 268054 - DNA, 235 bp, Homo sapiens
agcttaaccatatttgaattaaacactaatatctaaactaactgttttgtccaagaattcagagacattgtgctctcatataaataagcaatattgggtggtattaggtggtatcacagttccagtggttttgaattggattacccaaccataaaaatacatatacatatttatatttatagtaccttattgttttacagactctgtaaaatatgttctttctgttaggcttcaa

SEQ ID NO: 268055 - DNA, 431 bp, Homo sapiens
ataaaaaaaaaatcctctaaaaaccatagcctttggtaaaggttatagaagtgcaagcatacttttttaaccttagcacacaaaatggatatggttgaaagtcaaatgacagtgtgccaccaggtaatgtgtctaagttgtaactgccttacgggaagaaatttgtgttctatgtttgcaaagtactaaacatctagtgtgtttcttgtgtatcagcatgcaacatgtgtatttgaaaatgttcgttttgttccaaaaataacttgatgtagtttagagaagtagtagttttaatttttctatttttaaattttttctacttgatttcaaaaccaggcctagaatttaggttctaggtgtaaactattggcctatcagatgtatgtctcttaaaaaactggttctttgaataaaactttttatctctttta

SEQ ID NO: 268056 - DNA, 489 bp, Homo sapiens
tgtggatactggcagaagacacaggactcttgggtcagagacaaaagacttcagcactcatgggattgaagttagcctgctactgttttgtggatactggcagaagacacaagactcttgggtcagagacaaaggacttcagtattcatgggacaacagtggccagagcagatactattcatcctgtaggtttgcatcacagtcaaggaagagtaagtttgaataattaactggtttttttcagcaaatggaagcaagcttgttctttgtctggtgagacaccttacctcaatcctcaaggttgctcactgcaaatataaatctcagcaatggcccaactaaagggccttgcattcttggcataacagcaagaatatgcagctgaaggacaaaggcaaattgcgtttcccgacacccaccaagaaagggaggactggagttataattaaaagttataattaaaagtatttcatatttactacatgcaaa

SEQ ID NO: 268057 - DNA, 436 bp, Homo sapiens
ggggagaggacccccccccctttttttgttgttatcacaggaaaaccacacaacaatatttttggggggcaagaaaaacaacctttttctttgggcaagaacccccggggcccaacaaaaatcacattccgagcggaaagtacccccccccgggcggagagagaattttcaaaaattacttttttttaccaaaaaggaacacaagcttgttctttgtctggtgagacaccttacctcaatcctcaaggttgctcactgcaaatataaatctcagcaatggcccaactaaagggccttgcattcttggcataacagcaagaatatgcagctgaaggacaaaggcaaattgcgtttcccgacacccaccaagaaagggaggactggagttataattaaaagttataattaaaagtatttcatatttactacatgcaaa

SEQ ID NO: 268058 - DNA, 282 bp, Homo sapiens
gcatgaatagcttgctatatgtaatttggttaggaacaattcacaggttttgacagctttattagagttccattttagtaagattcaggtgaaagtgaggtcatcactttaaaacaaaaatcctgagaacatacccagatggactcacataaatgatgtatactaatgtcgtcaagtaaatattttaaagagttaattgctttctttattaaaaactggatttaaatactccattatttcataagaataaaacaactacaacaccgccacaacataaaaagt

SEQ ID NO: 268059 - DNA, 488 bp, Homo sapiens
acggtcattcactagatgctgtgaaacacctgaaacagacatttacaaactaatctctgttgctggcaggtgtgaccaatggtttccacatgtcttagaatgtcctggcctagagtaaactgtactcccaaggcccctcccagaagcaacagaggacccaggggcccagtccatggggaaggaaggaagtcccagaccaagttcattgcactgatgacaacccctttccaaagtcaccagcatgggagaaaataatgttcctcttaactcacagccaaaatatttccaggaaaagaggtgactcttcagaatcaactggtttctattacaatagcagttaaaatcacagaaactccttctcacataaagaattctggggccaggagcagtgactcatgcctgtaatcccagcactttgggagggcaaggcgggtggatcacctgaggtcaggggtttgagaccaacctggccaacatggcaaaaccct

SEQ ID NO: 268060 - DNA, 609 bp, Homo sapiens
acggtcattcactagatgctgtgaaacacctgaaacagacatttacaaactaatctctgttgctggcaggtgtgaccaatggtttccacatgtcttagaatgtcctggcctagagtaaactgtactcccaaggcccctcccagaagcaacagaggacccaggggcccagtccatggggaaggaaggaagtcccagaccaagttcattgcactgatgacaacccctttccaaagtcaccagcatgggagaaaataatgttcctcttaactcacagccaaaatatttccaggaaaagaggtgactcttcagaatcaactggtttctattacaatagcagttaaaatcacagaaactccttctcacataaagaattctggggccaggagcagtgactcatgcctgtaatcccagcactttttattttatttattattttgagatggagtgttgctatcgccaggcgggagtgccgtggtgccatttcagctcactgcaacctccacctcccgggttcaagcgattctcctgcctcaggaggcggaggttgcggtaagccaagatcatgccaccgcactccaggctgggagacaagagcgaaaccctgtctcc

SEQ ID NO: 268061 - DNA, 356 bp, Homo sapiens
ccctccaattaagtcaggaactggccctctcttgggtgtggatttatagtccccaacactagagggtcaattttagagatttttaacaaactggaaggttgactttcaaaatgtctccagttccttctaggtcaattccagcatgagatatactttatctttcaatcactagtaggcaaaaaaggggtgctaggaatcagtcactggcttgacttctggcaacaaggaaagcctgaggtgaattacagttgcaacatctgtcagctcaaactgcatggcgtccgtcacaaggagttgaaatttcaaagtgtaataatttttttaagtataagaataaaaaatgtccatccaaagta

SEQ ID NO: 268062 - DNA, 333 bp, Homo sapiens
gcctgattagggaagagaaaagataccagctgtaagtgaaaatgaaagaaagcaagagtctgaatttaagcagaaacaacagggatggaaagaaggggagagatttgagaaatatttattaagtataatggagagatacagttattaattagatatgggggtgctgaaattaaaaagagggtttattcattaaatatttatgtagtgtctactatgtgccaactactggaataggttttggggattaggctttcaacacagagataaaaatgtatacatgcttggagattagaatctagttggaatgggaacgtgagcaaaataaatgctatg

SEQ ID NO: 268063 - DNA, 448 bp, Homo sapiens
ttgtccctcgacagagctccactttgatcagaccaccttcccaaagcagcatgttgccccattctgaccctgagagcacctggcaggtatgtggaaaaaagaaatgtgcattaaaacagagacaggaggaatgtacacagcctgcaatactctagcagtaagtactactactggctggaagataggaagcagtcatcggtgagcatggaaggaagagccattatgcccacgtgcatcaggagtaaatgctgagttctggtcggtcatggcgcaacagtctccaaggggaactcccaattacttccaaaggaaagttgaactcccactaatctgtagtggagcagtttttataccttcttaaaacccagaagaatgagtatcagagtactctatgtgatcctcagaaataaaaaccacaagtctagggctgctaaagtaccctaccaaa

SEQ ID NO: 268064 - DNA, 444 bp, Homo sapiens
gactttcatttttctggttaatcccaaggccagcaggcataggggttggttcaagactctggcatcgtagcatctagattcctgtcctgggtatcaccacttcctatctcagagatcttggccacggtactaactctccaagctccagtttcattatctgtaaaaggagttaattatgcttcccatttcatagttattcagaggattaaatcctcacaagaaatactagctcttgcgggacttcatgttgttttttgttctatgaactatggagaagacagatgatgacctgtggtaaaggaaggagaagcatgaggttcaacccaaagatgttgtcaaggtgaaatgtagacagggcctcttggcttgaaccgataaatacaatctatagttgtaaattttgaggccatccattaataaatcctccattcctcccaaaaaaaa

SEQ ID NO: 268065 - DNA, 595 bp, Homo sapiens
ctgtggctggaaggattttcagtcctgtgggttgtaaccagaggccacaggtggattctgccttaggctcatgagatttccgacttgctgttgaagaaaatgccttgtgaagtgacaacagtagctctgacccaactgccggtgcctcgctagttcctatacgtcccactggatcctcacagccccgggaagcaggtgctactactcttatccccgggaggagacagaggccgagagaggttaagtgacgtgcccaagtcacacagctcggcagcggccgggttgagcatcagcagtctgtttgcagacccctcactgtcaccccctgagccagtgcgccttgggccctgcggtcaggatgtctcaagcgtggaggcatcaccggttcgtggcagtctctggaaggtcactgagctctgtgcccagaatcgagtcgggggagtctgtgcagaggtggccctgtgtgtggggacagtgtgtgacacagacactgctttggatggacacctctcccgtgacctcctagcatccaatcccaaaggaacaactgttgcagagatggaccgctggacacaaacccacgtgcgtttctctg

SEQ ID NO: 268066 - DNA, 460 bp, Homo sapiens
cagaacaggaagggtcacctccctgaggcacctgacctggagaaccaactgcataatcccagaaatttccaaggaaactatatttcttacattgatggaaatgtatggaaagtgtacagttggaccgagaaactaattctcagagaaaataacttgactgaattacacaaggattcatttgaaggcctgctatccctccagtatttagatttatcctgcaataaaatacagtctattgaaagacatacatttgaaccactaccatttttgaagtttataaatcttagttgcaatgtaattacagaactcagctttggaacatttcaggcctggcacgaaatgcagtttttacataagttgtaagtgaaatagaagatgaatacatgtaaacaactatttatctacaaaaactcatacaattattgggtagctgggtataagcccattatcaactctgaaa

SEQ ID NO: 268067 - DNA, 434 bp, Homo sapiens
tgagataaaaaatgtgtatccaatattattctaaactcttgctattattcataccaatcaacatttaataactaatcaaggcaatattttccttttccttttcctagagatttatcctgcaataaaatacagtctattgaaagacatacatttgaaccactaccatttttgaagtttatgtaagttacaaatataacttgattacatttggaatttttataaaacttaattataaacctctttgctattcttgaaatataattaaaattttaccagtagaaagctactaaaattatacagcaaatcctttttgtctctagcaaggattattgtgagaattattacacagatcttagtgaatcatcagagagcagtggttctcagctggtgtgattttgtactcaggtggcatctggtaatgtccggagacagtt

SEQ ID NO: 268068 - DNA, 669 bp, Homo sapiens
aatacaataaaatatatcataattgttttaataaagtcaattcagctgtgcaaattcttttctattaattaaaccagaaaaagatctctatccatgaatttgctatagtcatgcctacatatctatgtttatgcacaagtgtgtttgttcctaatatccagggtggaatttttgctgaaatacagtgacaaagttgtccttcaaacttcatcatcactttgactctcttagtgccattccttctttatcctaaatcatcttctttttcccccccaacctttttttatgatctgagtccattttcaggaaagtttgttgataatcacttataaatattagccactgtgcttattccccaaggagggtggagtttttagttgtctcttaaaacctgactgactgaatctcagcaaagcaatggtggaaaagtttgaaggccaatgcctcagcaagtccatcatgtggaccatgagcttgtccgcttaatcataaccatggacttaactcccaagtctgaggatatcttcaaacatcaaatattttggagttctctggtatggagtcaggaacccaacatctatgaaaacattctgaagagaaaagcagaaatactccgttagatgagaccttatgctccattctcagcaggcatgcagctcaaggacttct

SEQ ID NO: 268069 - DNA, 398 bp, Homo sapiens
caccgtccggcctctagagggcagtgtatggatacatttgtccagattgggggactaggtttgataaattttgtcctgcatcaaatgacaaaagggtaataggaaatgtattatatttatgccccttactttgagataagagactacaaccttcatacttcggggtgttaagctgccattgctcttgttaaggggcagtttgttttttaagagatggggtcttgctctgttgtccaggctggagtgcagtgccgcgatcttggctcagtgcaacctcgaactcctgggcttaagcgatcctcccgcctcagcctcccgagtactgggactacaggcgtgtgccaccaaggggcgattattattttttttttctacgcaaaataaaagacggctattca

SEQ ID NO: 268070 - DNA, 462 bp, Homo sapiens
gagctttttgcaaaataaaatcgcactttttattcaatgcctaccttcccatgcaggcctagttttaagcttctgaactttctgctaattactgtcacattaattaaaaaataaatcctttttaatttcctaacaggtggtttgtgaggctggaagaggagttgaaacttgtttgtaattattgtgtggtgtatttgcatttctaattgcgctgagggacactgaaggccaagcttccagtctctgggctgtctttcacctgcgccgcggtgctgagttgttggcggcggcggcagcgtcttttctccaagcagcacctgtgagagcagcagctccagctggagtcccaagacttccaatcaacatagagagccacagggcctgtgcctgcgtgggtttgctgtaaggagcctgtaacgcatcgaggagcccagcgcccaaccccacacctggcattggctg

SEQ ID NO: 268071 - DNA, 527 bp, Homo sapiens
cagtggtacctttaccttacttcatcagagaaagatgaatttttgaatctgaacttcctctgcaaatatttattgttggtgtctcatcattaccaaaccaagggaaaattgctaagagaaggtgaatagctgagaatcacacacagtggtgaatcttgtaatgttttagtttggagcaagtgacaggaagttataggggctagttaagaaataggagcaaggataacattagattgttgctcactgagaattgatgaaaggattgacttacaaatcaatccttgattgggggctaagtggcagttgaaaggaacattatagacctctgttgccctgttttataacttaagctgggtagctgtgcagaggaacagagagccaggctgtcctcccaaggtattaaattggagcctaagggttatagatttgaagacatgagagcctaagatacagcagaattcaaatatttaaggaattctgcctgccggtgactattactaagctctatagaagatagaagaagcaaa

SEQ ID NO: 268072 - DNA, 430 bp, Homo sapiens
gcttgtctctactaaaaatacaaaaaattagctgggcgtggtggcacatgcctgtaatcccagctacttgggaggctgaggcaggagaattgcttgaacctgggaggcagaggttgcagtgagccgagatcatgccattgcactccagcctgggcaacagagcaagactctgtctcaaaaaaaaaaaggaagaaagaaagaaatttccaatcttaccttgtacttttcctgccccagccctggaacaagtcatttctcaataaggcctgtttccttttagaggaaaacagtatttaggaaccaaaatctgaatattattagacgtgctcaaaattcaatccaatactctgagattcattctagctttcccatgttccatatttgtgtctacttgtctctagcaatgagaaacctggttctaagaagaaag

SEQ ID NO: 268073 - DNA, 450 bp, Homo sapiens
gtatgatatttccttgtgattagattcaggttatgcattcccaggcaaaatactaagtatgtggcaggcatgtacttcccaaggctttacaccctggagcacacagttttcatctgccccttctttatctgttaattttgtcaacctagccaagagattgtttgctttctccactcatatagttaatattttttctccttgctacaattaataagcagtctgtcgggggagatactttaaaatcatgccagtattctaattttgttagaatttcccctgggattgttttgcttttaactttgccatacccttaatgttttaggcacatgtcttataaaaacctagaatttgttttttgttcaacctgacaatctctttttaagatgtcaattttagcctatttattatgaataacaaattcataataaattcataaataataaactcaat

SEQ ID NO: 268074 - DNA, 679 bp, Homo sapiens
gttctttcagctatttgatattggcagttaggagaaataatgggttcaaggaaatagaatttttcaataggaggacaagagtacctttgggtcccgatacagggcccagtggccactagtgatgatatcttaccacagaggcaaggaaagtttactaatacctggagtatgggtgtgattcttaaaaacaggacaaaccttggaggaatgggtctctcaggagatcagttctttatttggcccaaagagccaaggaggcagttcctgtgtcagtgcagaataggcggatgcccacagaaggctcttcagagtccagataggtgaaggcgtgtggtaacagagcccaggaaaggatctgcagggcccagagccaagaagagtaagaactggttttataggcacaaagagattagtgaggctcctgccagatgtggaaacaaccgtaccagttcatctgcaccttgagccaggtgttaagcgtctttgcttcagtaaagcattaatattttcttgcttgtaaagctgctcacctgtgactgtttgggtcttcttttcattttttcactaagaatattggatacctactgtgtgccagtcatcattctaggtagctaataagacaaataagatatcttccctcctggagcatatagactagttagggaatctagacaatagt

SEQ ID NO: 268075 - DNA, 329 bp, Homo sapiens
ggctttctttttccattccttcagttctttacttaaaagcccctttctcagtaaggacttttctggccatcctagaattcccactatccctcctctcaaacctgtaaacatttcattttcctgctttagtttttctcctttaacactgtatattttgcctaatctatctatggttattgtgtttatttcactcccatgagtaggatgtttgtgtgcctagaaaagggcctagcttgcaataagtagctactcaataaatatttattaaatgagcaactgaagtttacccttcggtgtattgttttaaacattagattgattctcaggta

SEQ ID NO: 268076 - DNA, 164 bp, Homo sapiens
catgtaattgaagtcagattgatttctttactttgtaatatgcattttactttattccattttttgtgtgtgtatggcttgatagctcattttatttcagcattgaataatatttcattgttagaatgtaccacactattcacttacttgttgaaggacgtctt

SEQ ID NO: 268077 - DNA, 422 bp, Homo sapiens
gttatagtcagtatcttctctagcctcaaattaatgagatgttgttgaggatgacttaaaattttctttgaaagtctgaaacatgatgcagaatgcttgcaccaaaagagttttacattttccccacgcttgtacttactagagccaagtacatcaaaggtgtgagttaaaacccgtgatgcagggaactctgacacttgtgataacatggatgaacctggaggacattatgttaagtgaaataaaccaggcacagagagacaaataccatatagtctcacttacatgtggaatttaaagacagtgctcacagaagtagagagtagaatggtgtgaacccgggaggcagagcttgcagtgagccgagatctcaccactgcactccagcatgggcgacagaacaaggctctgtctccaaaaaa

SEQ ID NO: 268078 - DNA, 174 bp, Homo sapiens
tcatgctcagttgcagtaactacaccaagccttagaacataacacattggctttctcgctattgttctagttttatcttcttatttgcagtgtaacatcccattgcatgtcccgtatattgaaagctgcctctacttctctctggtaataaaaagtatgtatgttttcacttga

SEQ ID NO: 268079 - DNA, 464 bp, Homo sapiens
ttttatttttttgtagagataaggtcttaactatgttgcccaggctggtcttgaactcctgggctcaagcagtcctcctgccttggcctcccaaagtgctgggaatacagacaagagccactgtatgcagcccctgccccccttttttttaatcatagccattttgacggatataaagtggtatcttattgtggttttcgtaaacacattgggttttaaatgttctgaagacagctgaatacacaaatgttaaatccctcaatgtgagcagtttatctgttaattttggaaatacacttattttctggaaatgacacttgcaaggttaactgcagaaataccaggaaaatccagggtatttatatctataaaaaaattaataagatttactttcactttaaagtttacatgaaattagagaatagaatttcttgaattcatgtatattctaattgctaaatact

SEQ ID NO: 268080 - DNA, 574 bp, Homo sapiens
ggcaggggccacaaaagcaggtgtaaatgggaggaggtgttaccttgttggaaatgtctgagaagtactagctgtgggtctcttttagtgtaagatctgtcatcccaacactcgtcaccactctacctccaataccactcttcctccagatggagcacttctatcattttgaaaggaactaaagacaagatttcactgggaaattacattaattccaactggtatagatggaattgtgtcctccaccaaatccatatggtgaagccctaacgccaaggtgatgctatggtggagatgaagcctttggaagacaatgaggtttagatgaggtcatgagggtagccctcataagatgaatccccttataagaagcacaagaagctgggcacagtggctcatgcctgtaatctcagcactctgggaggctgaggtgggtggatcacctgaggtcaggagttcaagaccagcctggctaatttttgtattgttttgtagagatggggtctcactatgttgcccatgctgttaggggagacctactttatacaggagactttttgcttcgtttgtttta

SEQ ID NO: 268081 - DNA, 311 bp, Homo sapiens
attctagcaggatcgcctctctccacatggtatagatggaattgtgtcctccaccaaatccatatggtgaagccctaacgccaaggtgatgctatggtggagatgaagcctttggaagacaatgaggtttagatgaggtcatgagggtagccctcataagatgaatccccttataagaagcacaagaagctgggcacagtggctcatgcctgtaatctcagcactctgggaggctgaggtgggtggatcacctgaggtcaggagttcaagaccagcctggccaacatggtgaaactccgtctctactaaaa

SEQ ID NO: 268082 - DNA, 506 bp, Homo sapiens
acctgtaatcccagcacttcgggaggccaaggcaggtgggtcacctgaggtcaggagtccgagaccagcttgtccaacaaggtaaaacctcatctctactaaaaatacaaaaaattaaccaggcatggtggccggcacctgtagtcccagctactggggaggctgaggcaggaaaatcgcttgaacccaggaggcggaggttgcaatgagccaagatcgcgccactgcactccagcctgggtgacagagtaagactctgtctcaaaaaagaaaaataaaaaatagtagaatggatacatcaatcattgtatgttaattcaatggaatactaagcacctggaaaatgagtgaactacagctacacgaatcaacatagataaatctcaaatacaggatgttgagccgaagatgctactcacagcaatttgcggagtatagtttccattctgatatattttttaggggtgtgtacacatgtactgctgtgaaaaatacaataaaaaaca

SEQ ID NO: 268083 - DNA, 696 bp, Homo sapiens
aatgttatgagagggaaatcaaagggcccccgctaagcagaatcgttcccatcagccacaggcaccagtgcactgtgctcatgaccttttgtgctaaacaaacccacagacacacatacgcattcctgcttcttggagcccgggtgtggatggatgcctgacctgccccatcaccctttggctactggccacagagttcacattgtcacagagttcacattgccatctacaaaccaaacatgaacattaggactctcgtttttgttttctttgtcccttttgggtgtagctgaaaatgatacttgcagctcatatcaaagatggatttatgtctattgcaaagatggcgacgtgcaccttcctggaggtgctggcaaattccaggcagtgaagccaaaccactctcgtgccttaaataatgttggatcaagatcatgtgaaatttattctaaaacctgtggtttttatttcttcctgcaaagctccattctctgcttcacatgagagaaattagcaatgaagcacctcgtcaggatccaaaacgcctgccacccatctgtgcaaaaccctggcagtcctggaggagacaaatcctcaccttcctggaaaacttccatgaaacctgcagtgagggcagccagaccttaacttggcaaagaaactgtgaaggcagcctggagtgccaaactattaact

SEQ ID NO: 268084 - DNA, 436 bp, Homo sapiens
gaagacagtgagaaatttacaaacagaaaagcatgccgtaaaagctagtatgtttgaaatagttgcaggatgaatttgaatctagcacctgtaatatctgaaatctaagaacttgtaagagtttgttcttttgtccaggtcctttcagtgcttcactctgtgtttctaaacatttttgagatggcataaactttctaaaatgagtcctttttcatggaaacccagaaaaattgtttacagtcttaatgcagaagaccacttagctcaggcctcttactcttccttttccagcacagcactgtacagtgggtacttgacttgaatttaggaaattatttcccttacttggacttaaattgtggcagcacaaatgtatttccggataaactttttctggttatacttaatgtttaataccacctttaagcaggagagg

SEQ ID NO: 268085 - DNA, 319 bp, Homo sapiens
aaccaccaggcctctgcagacactgctctcacctttctgcccttccctccatctgtttacatgtgcatgcataattccacattcactgaagtcctcccaggcactgttctaggatctgagcacgacgctgtggcgctcgtggaatctacattcaaatcaattttgacctatctgaaagagaggatacctttgtaggaggctctagacccacactgtgtgtcacagaaagcacttagcccttatggctattgaatttaacttaagcaaaattcaatacaattaaaaattcagggccgggcgcggtggttcacgcctgtaa

SEQ ID NO: 268086 - DNA, 1731 bp, Homo sapiens
tccactagtgtaggcacagagacagaatttcccagcttgaagggatttgaaacatccataaagttacagaaattcatatctggaggagtcttaacggtcattcagaccaacgctttctcgggtatctataacatccaatgccctagtttccctgctgtctttttttggccactccttttcaatctcctttgcaggctaccctttacagggctcagtctccacactcttttgttctagattttcccctggtgacctcaccgaggcctacagctttaaataccatccatatgctgataattcccaaatttatatttccagtcccaagctctccactgagtttcaggctcatatatccaaatgtctacttcttgccttcagtataccttacaaacctctcaagtttgacgtgcctagaactggactctggattttaccttttgcccgtatcaacaagttcctctcttagtcttccaatcacagaaagggctccaccatcaagatggacacgagcctaaaacccaagaattcttgtttcctgccttcctttccttctctcacattcagtctcctggtagacttgttcatttacttccaccatttctatctacttcttttcatctccagtgccaacattcttgtccaagccatcactctctctccccaaaccactccaatagcatcctaactggttttccctacccttatctcacctcaatccattctctgcatattagctggagtgatcctttcaagaagtgaatacaaaccttaaatctttcaacagccctcactgcatccagaataaaatccaagcacctataactgcctaatatggcttctgtccacatctaacctcaaatcttaccttctgcccttgctgtgctcaagcctttctggcctttcatttccttaaacacaccaagcctttccagcatcagagactttacaattcttcctggaatgctcttccactaatttctttaggtcatagtttgtggtcatttgaaaacatgtccacaaattcttttctatcctaaaaaaagggggaatccaattcccctcctcttgaacatggactagcctcagtggcttgctactaatgaattaaatggtatagaagtgactgtaacttcttagactaggtgaccaaagatggcacagcctccacctggttctctgtcttgtgaggctcacccttggaacccagccatcatgctgtgacaaagccatgtaccacatgcaggtgtttcggggaacagacctgtcagaggtccttgccaacagccaacatcagtcagcatcaaccactagacatgtaagtgaggaagcctccagatgattccagttcccaccttcagctgatgttaggtggagcagagacatgctgtccccacctgcctaaactgcagattcatgagtaatgtaatttctgtcattgttttaagccattaagttttggggcagtttgtcacacagcaatagacaactggaacacagctcatatgccccttctcagaactgccctccctgatcatcctaagtgcccattggcattatccataacctgaaaattattatgattgatcctaaagtccagcctggtgcctggcacgtaggagatgctcagtgaatatttgtggaatgattgaataaggaaatgaatcctcttgtcacatttgaagttatcagtcatcaataaaatggggatttgtttcatcgtttgcagggtga

SEQ ID NO: 268087 - DNA, 963 bp, Homo sapiens
tctagaggatctctgtgcttgggacggcgcagaataaaatccaagcacctataactgcctaatatggcttctgtccacatctaacctcaaatcttaccttctgcccttgctgtgctcaagcctttctggcctttcatttccttaaacacaccaagcctttccagcatcagagactttacaattcttcctggaatgctcttccactaatttctttaggtcatagtttgtggtcatttgaaaacatgtccacaaattcttttctatcctaaaaaaagggggaatccaattcccctcctcttgaacatggactagcctcagtggcttgctactaatgaattaaatggtatagaagtgactgtaacttcttagactaggtgaccaaagatggcacagcctccacctggttctctgtcttgtgaggctcacccttggaacccagccatcatgctgtgacaaagccatgtaccacatgcaggtgtttcggggaacagacctgtcagaggtccttgccaacagccaacatcagtcagcatcaaccactagacatgtaagtgaggaagcctccagatgattccagttcccaccttcagctgatgttaggtggagcagagacatgctgtccccacctgcctaaactgcagattcatgagtaatgtaatttctgtcattgttttaagccattaagttttggggcagtttgtcacacagcaatagacaactggaacacagctcatatgccccttctcagaactgccctccctgatcatcctaagtgcccattggcattatccataacctgaaaattattatgattgatcctaaagtccagcctggtgcctggcacgtaggagatgctcagtgaatatttgtggaatgattgaataaggaaatgaatcctcttgtcacatttgaagttatcagtcatcaataaaatggggatttgtttcatcgtttgcagggtga

SEQ ID NO: 268088 - DNA, 340 bp, Homo sapiens
tgtcactgtttgatgcaacctttttctgcattaatctgctacaaggagtttgaagatttgtgttgtgcccccacctaatcaaaaccagtagatttcccattatggctgcatatactctgtattgaaataggagttcacataagcagagtaatataagcaaagttcctttgtactcataagaagaaatccaagtttttattttactttaactagagttttgatgtgatactgaattttactactgatttatttgcatatgttaaactatccttggctgatgttgagaggatgattgtattgtaaaacagattaaaataatatatgtacccccaaaaaattt

SEQ ID NO: 268089 - DNA, 576 bp, Homo sapiens
agcttagagaccagactgcaaggtgccaggcacacccaaaataatgtaccttcttttcacctcaggaaactggttagtgtggtacatgtttggattttagtatagtggctaagccaaagctctgttagtaaattcctacaggagctcattggcaacttggtgcatgacagaaagagcaagactttgagccaaacagacctgggctcaaattccagctcaactacatagcagccttgtgaacttcacctctgcctcagcatcctcatctataaaattggtgatagtggcagagatttcacaggcttgttgggaggattaaaggaaatattacctactatggagcttctcgaagggaagcaattttgactttgtttttacttctttgttcaaactctcacttcagtcccaaaatgattgagttggcagcttagatattattacagttgtttgccctacttcatgtcttttttaaacattggagcatctgaaacttcactttggaaaaagggaagcagagtaggtatttttggcacaatgacctctatcctatgtggggtttgtttaaacaaaaaaaag

SEQ ID NO: 268090 - DNA, 547 bp, Homo sapiens
atagtggttaccagggataaaggggggaggcaatgggaagttattgtttaattggcacggagtttcagtatgggctagggaaaaatttctggagatgaatgatggtaatggttgtataataatgtgaatgtacttaatcccagtgaactgtacacttaaagatggttaaaatggtaaattaaaaaatttttactttttgtgggtacatagtaggtgtatatatttgtggggtacatgaaatgttttgatacatgcatgcaatgtgaaataagtacatcatggagaatggggcatccatcccctcaagcatttatcctttgtgttacaaataatccaattatactcttttagttataaaatggtaaattttatgtatactttacacaataaaaaatttgtccaaaaatattgaattgttttaagatactaaataaaagaaaaaggaactgaagaaagtcatgattgtttttttccccgaagttttataataatcactaaaaagctgactgttactgcctgttgattcttttaatcaagtaaaaaaaaa

SEQ ID NO: 268091 - DNA, 347 bp, Homo sapiens
caaaaccttcttatgtacttttgatgaagcttgaaattaggtttgtaggtaccaaaagcagagcctcagaagagggtgaactgatgacagcaacttctactgagaagaaaacaccaaagctgagataacgctgacctcaaatgcaacactgtaggcaataaagaacaatggcattcgaacataaagctgtttccaaaatctacagttatgtatcggccgtacttgcatcttcagaactgttagagggaaatcaccaacacttgatgcctctaacctactcatacacgctaaatttcctttctcttaatcttaaggaataacagataaataaaaagagaaacagcttt

SEQ ID NO: 268092 - DNA, 328 bp, Homo sapiens
tatctgtcctcagggagcttgccagccacttaaaattgtcccagatgggccaggaatggtggctcacacctgtaatcccagcactttgggaggctgaggcaggcggatcaacttgaggtcaagagtttgagactagcctggctaacatggggtgaaaccgtgtctccactaaaaacataaaacattagctgggcagggtggcacatacctgtaatcccagctactcaggaggctgaggcatgaagattgcttgagcctgggaggtggaggagtcgagattgtgccactgcactccatccagcctgggcaacagagcaagactgtatca

SEQ ID NO: 268093 - DNA, 242 bp, Homo sapiens
tggatttaatagtcttaactcagcatgaaaaagatgctgggatgctcctggctatttatgcaccctaagtgccatagagacatgctgttggcaaggcatggtggctcatgcctgtaatcccagcacactgggaggctgacgcgggcagatggctggagtccaggagttcgagacaagcctgggcaccatggtgaaatcctgtctctactaaaaataaaaaattagccaggggctgtgacgca

SEQ ID NO: 268094 - DNA, 353 bp, Homo sapiens
ggaaagaaggccgcctttgttgtcaaatctggatgtcttcatttgccccctccatctgctctccacctttctctcccctgcctttgcatcaacagccatccttgctctctgacttgtctgctaatctgggtagtggtaggaatggaggcaggacacaagaagatcaggccacacgaagctctttttttcccctgtgttatacacactacatatgtgcacttgagggacttccctgtcaactttcttatggatagcctgtgaaaatgaaggcacagagaaggccatttctcacccaccaccggtacctaatagcagtaaagaaaataaagctcaattcttgcaaatgacaacca

SEQ ID NO: 268095 - DNA, 398 bp, Homo sapiens
tcgggatttgaaaaaattgctgagcttgacagatttttttttcctcctagcgcttgctcggttccagaaaggggtggggggaaatcctgtacgtgctctgttctgtaaaagacgtctggcctcagcagtcaacctaacccgaaaagaaatgtctggacccggagaataattgacgatttgatcctctaatcaatgggacaacttgggagattgacaaaagctttatccaatcataaggaagcttgggtgtacaatagttctcaatagccagagggggcggggcagaggagatctgaagttctctgcagctctgaaggggatggtgtggttcaagctgtcaaagctacaagcgcttccggatttagcaagcacaataggaaagaattttcgcgtttaag

SEQ ID NO: 268096 - DNA, 453 bp, Homo sapiens
ttccaggaggcccattgtcaccagaagtgtatagtttctaacagatttatacattggaagttgattttgctcctaatttcaacatgcctaatgaaataaataatcaaaacagtctaaaattcttcctcctctctgcctcctgcaaaaagacagcgtctggtattgtccacccaagctggagtgcagtagtatgaacttggctcaccgcaacctccgcttcctgggctcaagccatcctcccacctcagcctctcaagtagctgggactacaagctcacataaccacaccctactaatttttgtatttcttgtagacatgggttttcatgttgcccaggatggtctcaaactcctgagctcaagcgatctgcctgccttggccccccaaagtgtggagattacaggcatgagccactgcacctggctgatttaataaaatatcttgtaatcaat

SEQ ID NO: 268097 - DNA, 468 bp, Homo sapiens
agtcaagattttaaatatttcatttttatattataatgaaactaatggttactttgagagttgtcttctgtgagcaaatgttgtggaattgtatatagtaagggaatcatagatttcttataattcaccttagtgagatagatgattgagaacatggaggagtctgctcgtactttttcacttattgaagacaagtatagttttaggtttttaaatgtcgtgtttactttggaattttgggtcaagagaattcttgtgttctagaccagtctggccaacatggtgaaaccccatctctactgaaagtaaaaaattagtcgggcatggtggcagacacctgtggtcccagctactctggaggctgaggcagcagaatggcttgaacctgggaggcggagtatgcagtgagccaggatggtgccactgcactccagcctgggagacagcccgagactccttctcaaaaaa

SEQ ID NO: 268098 - DNA, 503 bp, Homo sapiens
tgcttcactgcagtaaccattttgctttctatatgaatcccataacatcatgttgtatgctttaaatatatacaataaaatttatttaaaaaatgaaataaaatatatggttgatataaaaagaataaaagctcaccaggtagtgctgatgtccacctagagttgagaatcacttttctagagcaagagtgggcaggtgtttcctgtaaagggccagatagtaaatattttaggctttgcatgccatatggtctgacacaattactcaactctgctattgtagtaagaaaaccatagatgatatgtaaggaatggatgtggctatgttttagtaaaatgtaggtgaggggtaagaaaatagcaagtatgtaggatgaaagagcctagagatctaatgtgtaacatgtagctaataagaggactgtagctaataaaattgtactatatttggaattcctgctaaatgaatagatttttagctgtccttgccacaaaaacaaacc

SEQ ID NO: 268099 - DNA, 499 bp, Homo sapiens
ccgattgtagaggagagattcctgggcaagtgcagagttatatagagtgccctttctacctgacacacgaaagaaatgagctgtaacagacgccagcggcaggtgcaggacctgtgagcttcactcactgtgccccagtgtttgggttcctgcgctttgaaccgccttactttaagaagccttgtcattggaaaattgaccgcagctgatggcttctgtcatttgtgctgttgtttggagggcagggctctgcgtcgctttgtcaggccgcacagggaatgcgccacctccggcccgcactgtctgcctacccagacccacaaggctcctcaaagcctcctcaccaagggctgactcttttgccttgttctttctttttctttctgtttattctttcaaaacatgtactccttttaggcagttgcgagaacttctacaataatctgtgttctaaattttaggagccacaataaaaacctctctttttttcctgcattga

SEQ ID NO: 268100 - DNA, 469 bp, Homo sapiens
tagtgttggccaattaataataataataggccaggcaaggtgcaaggggacaaaaggctgagtgtgattaggcattgagcgtgcatgcatatagaacaaaattctggaaaaatagtcagaaactatcagcaacgattacttctgagggaaaggcctagagtgagacaacctcttcattgattgccagtttgaactgtttccccgccacccatgtgcttatattacaaaatatccatgttggaaaaatatattcttattcaaaccaaaccctgctcgtcaaagcattgcaacggcctccccactgattcttgtagactgagcgctaagacctgttaagccctgttgctctgcttcatgcaaagttctgctacctaatgtgcattttcatataggaggtaaggaggtaaggatcagtatctcaattttatagctgatgaaacgaacttgaaaaaattaagtgaaggttagt

SEQ ID NO: 268101 - DNA, 333 bp, Homo sapiens
agctgagattgtgccactgtactccatcctgagcaacagagagagaccctgtctcaaaaagaaaatagtactctgtttggtgtatggtatgtaggagttactgaaaagatgctgttgaattcacaggacagtaaattgaaacaatttatgtgaatatactttataaactaaaataacatacaaatataaatcattaaaaaatcttgaaatgtacttttgctgatttaaatgctatagtggttttatgactgaattctgtatatttcactttattcatattagtctttaaaggtctactcttagtcataacattctttgagaatatacatgttt

SEQ ID NO: 268102 - DNA, 593 bp, Homo sapiens
caggctggagtgcagtggtgtgatctcacctccacctcccaggttcaagcgattctcctgcctcagcctcctggtagctgggaatacaggcgtgcaccaccatgcccggctaatttttatattttcagtagagtcgcagtttcaccatgtttcccaggctggtctcaaactcctgacctcaagtgatccgcccgccgcagcctcccaacgtgctgggataataggggtgagccactgcacctggcctttctgtactctttattctatttcactggtctgtttcttttggtttcagtatcatagtacttttgtttctgtagcttaaaatatatatattttaagactggaggttgcagtgagccgagatcatgccattgcactctagcctgggtgacagagcgagattctgtctcaaaaaagaaaaaaagaaaaaaaatacaaaaattagccaggtgtggaggccagtgcctgtaatcccagctactcagaaggccgaggcaggaagaattgcttgaacccggaaggcagaggttacagtgagctgagatcacgccactgcactccagcccggtgacagtgtgagactccatctc

SEQ ID NO: 268103 - DNA, 280 bp, Homo sapiens
gggatcctctagagatttcagtctgagtcaggccccactttctgtccaagtgtcgtttcctgcctggtggcaatgagtatcttcactccaatggcctccttcaaccatgcccctcatccatgtccctttgcccatacctgccctgctgtcaacctaagcaacagcctcagcccctggtgtgtgtctggtttaggagagcaacacccaaggttcttctcaccatgtagaaagtggggcctgactcagactgaatcgtcgacctgcaggcatgcgagcttcc

SEQ ID NO: 268104 - DNA, 529 bp, Homo sapiens
gttgttgctacaacaggtgtttaataaaagccttttaaacaagtgaattgcaaaatttctagggagtatgattttctgaaataatccttgattattcagccgctaaccttgaatatttgacttacagttcagtagtgactggctctgttagtagcagatttagcatgaaatgaaagaacagctttggaacatagaagactttgcatgtcccatttgttctgttcctaagtccctccttatctcagtttcatcattacaaaaaaaaagtgatgagatgccgggcgcggtggctcacgcctgtaatcccagcactttgggaggccgaggcgggcggatcacgaggtcaggagatcgagaccatcccggctaaaacggtgaaaccccgtctctactaaaaatacaaaaaattagccgggcgtagtggcgggcgcctgtagtcccagctacttgggaggctgaggcaggagaatggcgtgaacccgggaggcggagcttgcagtgagccgagatcccgccactgcactccagc

SEQ ID NO: 268105 - DNA, 416 bp, Homo sapiens
catgtcattatgctaaaataatgttatagtctgagcttgcttgactagtagaccatgtcctaccttctcctcataaatacacagtctatgaaaatctaacaaaagcacatatagtagatattaaattgctcctaattctactcctgtatttacattatttctgggttatgtggacacactttagctaacatagtattgctttgtctaaagaaaataatttggttgtgtttgctttgtcttcttaaaaactttgaaagatgcttcagctgcctcgggttatacttcatagcaaaaatagagtgcatgttattatatgaatatattgtggaaaattttgaatgcacaaacttagtgtgttcaacatttattttgagtgaatatttgacatattaaataaaactctctggtgcacaaca

SEQ ID NO: 268106 - DNA, 640 bp, Homo sapiens
ccatgtagaccaaggcctgccctcggcgccccccactcttgcctctgctctgcacagtccacgtgcactgcaggaccggagcgacacatgtcttccctgaagggtgttcagtacaaggcgtgtcagtttgtccgacgagttgtccgagttactccttgtctaacctgactgacatatatttgaatactgtggttttctttctttttttttctatttgctgcccttcctggaggcagtgggttccagaagccaactgattgtccccctgccaagtcaccaagggaagctgctaagctgcttagtcccctcggtcctgcttgtagggtcttcctgattgtcaacagctgtctgggatgcttcagtctcctaaaactggaaacgcagggtgcgagcagcacacactgcctcccgccactgccagccggagtgagcggcccgagagtctctgcaggttcccctgggggctgggggccgctgaggcctaatatcaagagccaggaatgtcatgtacatggaggtgcctacggacgtgtctggtgtggtttgcagaccatcaacaagatttcaaggctttgaagaaaggagctgcttcaggaagagacaaaataactcggacaactcgtcggggatcctcgaagtt

SEQ ID NO: 268107 - DNA, 267 bp, Homo sapiens
tagagacggggtttcaccatgctgcccaggctggtctcaaactcctgagatcaagcagtccacccagcttggcctcccaaagtgctgggattataggtgtgagtgagctactacgcctgtcctggacatgtaatttttaaaagaaaatgtggccacaactctcctagagttaaatggttttctttttgttttttttttgttttttttttttgagaccatcaacaagatttcaaggctttgaagaaaggagctgcttcaggaagagac

SEQ ID NO: 268108 - DNA, 385 bp, Homo sapiens
tggtcaccaacctgggccgagcccacctcgccccacccctgcttgccggtcctcagctgccatgccagggctgcccttactgtcggcttccacagcccgcctgtagggaagcctgggcggggctgtgtcagaccgtgtagtgtgcggtgaaagcacagcgggtgcgttagtgtgcaggggctcccccgcacctcccctagcagggtcctgcctctgatgaggacttcctgtctggttggaggccccagacttggccccagggccagggaggcatcagagagcataggccttgtttccagcaccagctggggcacctgttgccgcagagctggcccaaggtgtcaccccctcctgccgcagccacccatccccaggaggcggccgc

SEQ ID NO: 268109 - DNA, 630 bp, Homo sapiens
aaataaagccaaaagaactataaagagaaatcaatagtggtaaagctgtgagtaatgcctatttttgcctcgttagtcattatttccacaaaatttattgcacaatgtcttatttcatgtttactttttgcgtgcaatttttgttggctattccttagttggtcactaaaatgttatttttttaaattgaatgtagaataaaaagttgataaatatttgcctagacggtttatcattatttgctcatcccagtagacattgttgtaccttttactcacattcactaatatgcatttacgtagtgcaggtcctttgtttcacagttactaataaggcagaagtggtgtgactgttgcaaaatatgtttacactttttaaaaagcaaggtacttagaaagggataaactatctaaacaaaaattaattaaaattaaaaattataattaaaaatcagaaaagtcataccaggatacacagacatcatcaatatgtgaattactgatcagaaacaagaaattctggaccattttactttcagttagttcatgtagagctggagataaaaatgtaaagcaaaaattattgccagacagagtggacagaactggctaaaggtaaaccaaatatgta

SEQ ID NO: 268110 - DNA, 365 bp, Homo sapiens
cattataggtactgaatacataatatttgtcaataaggactgaattagtgaatacacaataaacaaaaatataatctgctatagaagagctatctgtaagagtaatacaaacattttttcctgtgtacagctgtgtgtccattttttctcttgcttatttcttttctcacgtcctctgttacttgtatctttactgtttcctatataacaactagcttttcaatttctattttaataatttctcagactttgaaaaattgacatttcaataccctctacgaaattattatgcttttgcacatttatcttataaaagaaactatagttgaaatgggattactcaccatagaaaagccccttttctt

SEQ ID NO: 268111 - DNA, 409 bp, Homo sapiens
gcaactgtttgcagaacgcctcatttttcgacatctcacttgaatagacacctcctcaatcggcctgtacccacctgctgccacggcaatgaataccatccagctaccatgttgtacactggatgggctgggcaagcccgtcggttgcaggtctcttccaagtccagatttggtttcttaatattacggcatcttcgctctgggaaagttatcagctttccctggaagcccttctcgctgcacttcatctccctcttcctcacacccaaaccacaggttgcagaacactaggagccaagacaggatgtgtaaaagtgaagactgccaggatcacatcttctggacagaggcagtttgacataaggttgcaccatccacatgaaataggagggatgggattacacaaggt

SEQ ID NO: 268112 - DNA, 1289 bp, Homo sapiens
agacaaatcatttgaaccaagttgcggacatgaatcttgttatttgtgtcctacttttgtccatttggaaaaataattgcatgactacaaaccaaaccaatggatcttctactacaggagataaacctgttgaatcaatgcagacaaaattgaactaccttagaagaaatctactcattttagttggtattatcatcatggtttttgtctttatctgtttttgttatctccattataattgtctgagcgatgatgcgtccaaagcaggaatggtcaagaaaaaaggcatagcagccaagtcatctaaaacatcattcagtgaagccaagacagcctctcaatgcagtccagaaacacaacccatgctatctactgcagacaagtcatctgattcatcgagtccagaaagggcatccgcacaatccagcacagaaaaattaatcagaccctcaagtctacaaaagccatccataccaaacagtgcaggaaagttaactaggccatcatatccaaaaaggtcatccaagtcatcatgctcaaaaaaattaagcaagtcatctcacctggaaaaggcacataagaaaggcagcctagaaaaattatgtaagctagactatgcgtgtaagctagccagttcagataagccagtcaggccacctcagctattcaagccactttattcatctcatccacaaaatgaaatctcaccatccaagccattcggtccacaggaattggctaagcctcccaaacattttaatccaaaaaggtcagtgagtctaggcagggcagccttattatccaactctgaattagctgaaacttgtcaaccctacaagaaaaaacatcttgttgccaaaacttataggcctttggtcaatgatatttctgaggcaaaggagaaaaacactcaaaacctacatgtttcaagcaaagtcaagtcctcttccaggtcctttcgtaagttagattccaggaacaatgcatacggtgatcatgtgaatgacagtgatacgatgaaatattatagtgaggttgacagtgataaagttataatcattacgtgtgacagagggtacaatcaagtcacctctgaagtaaccctaaatgattaggagctcaacaaaaataaaatccaagtgtgaaagagcaaacttataccaactattttatgctcatcatcccttaagaaaccagtagagggaaaaatcactatcaagatcacccatatctgtcttggaggcgatttattttaaaaatatcaataaaatgcatgacataaattacta

SEQ ID NO: 268113 - DNA, 491 bp, Homo sapiens
aatgccctgattgaagcaggggcccacatggacgccaccaacgccttcaagaagacggcctacacgctgctggaagagaagctgctggccaggggtaccatgcagcccttcagctatgtgaccctgcagtgccttgcagcccaggccctgggtaagaacaagatcccttacaagggcttcatcccggaagatctagaggcattcatcgaactgcactgacctgcccagaacatctgcaccctcacctctcccctctcctgctgagacgggggaaatcagcctggggtatagcagatgctcgttcttgcctccttcaggcaccaatcaggagaagggttctgcctcccatcccctttacctgaagacaggctctgaggtgttagcgagcctttggtgctagaagccttcagggtcacatgccaagaggacagtctttctccgggagcccactgactcagaaattctgagttaggaaaagtcacaagaccttc

SEQ ID NO: 268114 - DNA, 342 bp, Homo sapiens
gtcactcttctgcctgggtcctgcataaagagggaattatgacacactgctggccccagcaccctgatgatgtgactctcctgcatgtgctggagccacagaaggaattaaaattgacctgcaagacgtctttacttcatggagatctgtagaagctgaagtccaaaatgtgacgatgaagctcggcaattacaaaatctatagataaagaaagactgccaaggaagagtaagatattcattgacacaaatgctgttgtatgaaccatgtcccaatgaaagtagacaactgtaatgtccttgagaatattttctgcaatatttgtggcaaattcagtgggca

SEQ ID NO: 268115 - DNA, 281 bp, Homo sapiens
aaaacaggagaaaaaggccctattactttcgtttatgttgctgcaattctcatgaagtatctagtagagatttcaacatctatgttaattcataattctccaagtagacatagggtaggtagatctgaaattagaactctttttttaatttgaatttttatttaaggatatctggaagaatgtttcaaattctgattagagtttattatgtgaaataatggaacacaaaaaataatgtcaataacagaataaaaacagaatcatggaaccaaaaaaatgaa

SEQ ID NO: 268116 - DNA, 263 bp, Homo sapiens
ctccccgacgctctctctggtgggggacgcttccgacgaccctgagacacccttaagaacaccatggagaccatagacgggaaggtcaggctgcagatgctggggtgagccaggccttggagctgagaagggtcttcagctggggatgcctggtactctcctccctctccttaatcctacacaaggcagattcctggccccgcccttttcccctcctcgttcctccccagagtcccccacagagagcgtcgggtaccgagctc

SEQ ID NO: 268117 - DNA, 1711 bp, Homo sapiens
ctatgctttcacccacctcagcctgcaggagtttcttgctgccctgcacctgatggccagccccaaggtgaacaaagacacacttacccagtatgttaccctccattcccgctgggtacagcggaccaaagctagactgggcctctcagaccacctccccaccttcctggcgggcctggcatcctgcacctgccgccccttccttagccacctggcgcagggcaatgaggactgtgtgggtgccaagcaggctgctgtagtgcaggtgttgaagaagttggccacccgcaagctcacagggccaaaggttgtagagctgtgtcactgtgtggatgagacacaggagcctgagctggccagtctcaccgcacaaagcctcccctatcaactgcccttccacaatttcccactgacctgcaccgacctggccaccctgaccaacatcctagagcacagggaggcccccatccacctggattttgatggctgtcccctggagccccactgccctgaggctctggtaggctgtgggcagatagagaatctcagctttaagagcaggaagtgtggggatgcctttgcagaagccctctccaggagcttgccgacaatggggaggctgcagatgctggggttagcaggaagtaaaatcactgcccgaggcatcagccacctggtgaaagctttgcctctctgtccacagctgaaagaagtcagttttcgggacaaccagctcagtgaccaggtggtgctgaacattgtggaggttctccctcacctaccacggctccggaagcttgacctgagcagcaacagcatctgcgtgtcaaccctactctgcttggcaagggtggcagtcacgtgtcctaccgtcaggatgcttcaggccagggaggcggacctcatcttccttctttccccgcccacagagacaactgcagagctacaaagagctccagacctgcaggaaagtgacggccagaggaaaggggctcagagcagaagcttgacgctcaggctgcagaagtgtcagctcctaggtccacgatgcggaggccctcatagccctgctccaggaaggccctcacctggaggaagtggacctctcagggaaccagctggaagatgaaggctgtcggctgatggcagaggctgcatcccagctgcacatcgccaggaagctggacctcagtaacaacgggctttctgtggccggggtgcattgtgtgctgagggccgtgagtgcgtgctggaccctggcagagctgcacatcagcctgcagcacaaaactgtgatcttcatgtttgcccaggagccagaggagcagaaggggccccaggagagggctgcatttcttgacagcctcatgctccagatgccctctgagctgcctctgagctcccgaaggatgaggctgacacattgtggcctccaagaaaagcacctagagcagctctgcaaggctctgggaggaagctgccacctcggtcacctccacctcgacttctcaggcaatgctctgggggatgaaggtgcagcccggctggctcagctgctcccagggctgggagctctgcagtccttgaacctcagtgagaacggtttgtccctggatgccgtgttgggtttggttcggtgcttctccactctgcagtggctcttccgcttggacatcagctttgaagccaacacatcctcctgaacgggagc

SEQ ID NO: 268118 - DNA, 1663 bp, Homo sapiens
ctatgctttcacccacctcagcctgcaggagtttcttgctgccctgcacctgatggccagccccaaggtgaacaaagacacacttacccagtatgttaccctccattcccgctgggtacagcggaccaaagctagactgggcctctcagaccacctccccaccttcctggcgggcctggcatcctgcacctgccgccccttccttagccacctggcgcagggcaatgaggactgtgtgggtgccaagcaggctgctgtagtgcaggtgttgaagaagttggccacccgcaagctcacagggccaaaggttgtagagctgtgtcactgtgtggatgagacacaggagcctgagctggccagtctcaccgcacaaagcctcccctatcaactgcccttccacaatttcccactgacctgcaccgacctggccaccctgaccaacatcctagagcacagggaggcccccatccacctggattttgatggctgtcccctggagccccactgccctgaggctctggtaggctgtgggcagatagagaatctcagctttaagagcaggaagtgtggggatgcctttgcagaagccctctccaggagcttgccgacaatggggaggctgcagatgctggggttagcaggaagtaaaatcactgcccgaggcatcagccacctggtgaaagctttgcctctctgtccacagctgaaagaagtcagttttcgggacaaccagctcagtgaccaggtggtgctgaacattgtggaggttctccctcacctaccacggctccggaagcttgacctgagcagcaacagcatctgcgtgtcaaccctactctgcttggcaagggtggcagtcacgtgtcctaccgtcaggatgcttcaggccagggaggcggacctcatcttccttctttccccgcccacagagacaactgcagagctacaaagagctccagacctgcaggaaagtgacggccagaggaaaggggctcagagcagaagcttgacgctcaggctgcagaagtgtcagctcctaggtccacgatgcggaggccctcatagccctgctccaggaaggccctcacctggaggaagtggacctctcagggaaccagctggaagatgaaggctgtcggctgatggcagaggctgcatcccagctgcacatcgccaggaagctggacctcagtaacaacgggctttctgtggccggggtgcattgtgtgctgagggccgtgagtgcgtgctggaccctggcagagctgcacatcagcctgcagcacaaaactgtgatcttcatgtttgcccaggagccagaggagcagaaggggccccaggagaggtagggcccgatttcaccccaactccatgctcagtcagggacattcccctctctaccctccacagctgggcagtgccagtcagtcaactgccagggtgacctggacaaattcacggaagagcgggaagtgagcaggcacagcaggtggccaggaggcaacaggagcgaaaggctgtgtcaaagaggagccctgaggctccacagccagtgatagctatggaagagccagcagtaccggccccactgcccaagaaaatctcctcagaggcctggcctccagttgggactcccccatcatcagagtctgaggctgtgaga

SEQ ID NO: 268119 - DNA, 792 bp, Homo sapiens
ctatgctttcacccacctcagcctgcaggagtttcttgctgccctgcacctgatggccagccccaaggtgaacaaagacacacttacccagtatgttaccctccattcccgctgggtacagcggaccaaagctagactgggcctctcagaccacctccccaccttcctggcgggcctggcatcctgcacctgccgccccttccttagccacctggcgcagggcaatgaggactgtgtgggtgccaagcaggctgctgtagtgcaggtgttgaagaagttggccacccgcaagctcacagggccaaaggttgtagagctgtgtcactgtgtggatgagacacaggagcctgagctggccagtctcaccgcacaaagcctcccctatcaactgcccttccacaatttcccactgacctgcaccgacctggccaccctgaccaacatcctagagcacagggaggcccccatccacctggattttgatggctgtcccctggagccccactgccctgaggctctggtaggctgtgggcagatagagaatctcagctttaagagcaggaagtgtggggatgcctttgcagaagccctctccaggagcttgccgacaatggggaggctgcagatgctggggtgagccaggccttggagctgagaagggtcttcagctggggatgcctggtactctcctccctctccttaatcctacacaaggcagattcctggccccgcccttttcccctcctcgttcctccccagagtcccccacagagagcgtcgggtaccgagctc

SEQ ID NO: 268120 - DNA, 1137 bp, Homo sapiens
  misc_feature (15)..(15): n is a, c, g, or t
  misc_feature (68)..(68): n is a, c, g, or t
  misc_feature (72)..(72): n is a, c, g, or t
  misc_feature (81)..(81): n is a, c, g, or t
  misc_feature (92)..(92): n is a, c, g, or t
  misc_feature (97)..(97): n is a, c, g, or t
  misc_feature (111)..(111): n is a, c, g, or t
  misc_feature (202)..(202): n is a, c, g, or t
  misc_feature (223)..(223): n is a, c, g, or t
gcctttgcaaaaacnctctccaagaacttgcagaaaaaggggaagctgcaaaagctggggttaaaaanaaanaaaaaaaangaacgaagaanaaacnaaatggtgaaaaanttgcatctctgtccaaaactgaaaaaaataaattttcgggaaaaaaaaataaataaaaaagtggtgctaaaaaatgtggaagttctccctnaaataaaaaggctccggaaanttaacctgagcagcaacagcatctgcgtgtcaaccctactctgcttggcaagggtggcagtcacgtgtcctaccgtcaggatgcttcaggccagggaggcggacctcatcttccttctttccccgcccacagagacaactgcagagctacaaagagctccagacctgcaggaaagtgacggccagaggaaaggggctcagagcagaagcttgacgctcaggctgcagaagtgtcagctcctaggtccacgatgcggaggccctcatagccctgctccaggaaggccctcacctggaggaagtggacctctcagggaaccagctggaagatgaaggctgtcggctgatggcagaggctgcatcccagctgcacatcgccaggaagctggacctcagtaacaacgggctttctgtggccggggtgcattgtgtgctgagggccgtgagtgcgtgctggaccctggcagagctgcacatcagcctgcagcacaaaactgtgatcttcatgtttgcccaggagccagaggagcagaaggggccccaggagagggctgcatttcttgacagcctcatgctccagatgccctctgagctgcctctgagctcccgaaggatgaggctgacacattgtggcctccaagaaaagcacctagagcagctctgcaaggctctgggaggaagctgccacctcggtcacctccacctcgacttctcaggcaatgctctgggggatgaaggtgcagcccggctggctcagctgctcccagggctgggagctctgcagtccttgaacctcagtgagaacggtttgtccctggatgccgtgttgggtttggttcggtgcttctccactctgcagtggctcttccgcttggacatcagctttgaagccaacacatcctcctgaacgggagc

SEQ ID NO: 268121 - DNA, 669 bp, Homo sapiens
gatggggattgagggaggactccagccccacaatacagtgcattgggccccccgtctcagcctctcagggaaccagctggaagatgaaggctgtcggctgatggcagaggctgcatcccagctgcacatcgccaggaagctggacctcagtaacaacgggctttctgtggccggggtgcattgtgtgctgagggccgtgagtgcgtgctggaccctggcagagctgcacatcagcctgcagcacaaaactgtgatcttcatgtttgcccaggagccagaggagcagaaggggccccaggagagggctgcatttcttgacagcctcatgctccagatgccctctgagctgcctctgagctcccgaaggatgaggctgacacattgtggcctccaagaaaagcacctagagcagctctgcaaggctctgggaggaagctgccacctcggtcacctccacctcgacttctcaggcaatgctctgggggatgaaggtgcagcccggctggctcagctgctcccagggctgggagctctgcagtccttgaacctcagtgagaacggtttgtccctggatgccgtgttgggtttggttcggtgcttctccactctgcagtggctcttccgcttggacatcagctttgaagccaacacatcctcctgaacgggagc

SEQ ID NO: 268122 - DNA, 371 bp, Homo sapiens
catttaaatgattgactgcaaggtttccagctttgagatgaataggataatgatgtcatcatgaacacagaagtaaatgcgtgtttggcaataaaagagatgggttcaaaatgaaaataataggctgggcgcagtggctcatgcctgtaatcccagcactttgggaagcagaggcaggcgtatcacttgaggtcaggagtttgagaccagcatggccaacatggcaaaaccctgtctctactaaaaatacaaaaattagccaggcatggtggtgggcgcctgtagtcccagctacttaggaggctgaggcaggagaatcacttgaacccagaaggcagaggttgcagtgagccgagatggcaccactgcac

SEQ ID NO: 268123 - DNA, 469 bp, Homo sapiens
aactagccaagcggagtgataatgtgcctgtagtcacagttactcgggaggctgaggaggaaggatcacttgagccggggaagttgaggctgcagtgagacgtgatgatgccactgcactccagcctgggtgacagagtgagaccctgtctcaaaaaaaaaaaaatatatatatatatatatattatttttatgaggtgaagtgcatcaaacttgggaaagatttgaggaggctgggaacctcctggaaaaccactccttgaagaaagatatgagagacatttagaagtgattcctgctttcagaaggaggtggattcaaatacatcaaaagtcccttcctctgctaagtgtttatagttcaatgaataatttcaatatttttatgtgttcttgtcattttatttttttctgaaaaacttccaaaaatttgaaaataaaattacagccttttcttcttaaaaaaaaaaa

SEQ ID NO: 268124 - DNA, 1048 bp, Homo sapiens
gcgaaccccaaatgtgtgcgctgagccgaggcctctaagcggtaggagagaatctgacctccgacattcttttcaagacacgcgccggtggaccgggtcctgggattggcttactcccgggctggaccttggggttcgcatatttgaaagcgtaaacttgaggaatgacggcggggtgatgggtattttatagagtgggactcaatcgtgctcagcaacagatttctccaaattcccttttaaaaagagcctcccagagctgtcgaaatctccgcggggtgaaagctaaacttttggagtcgctgtgtagccgggtagaggacacggcggcgcgagccggaaagataagtgtccaggcgaatgggaaaggaaagatcttaatttttgttcctactgttagctgaatgtccataaaaatcaaagggaatgcggggaagtttttattccagagcgtttccatgacacccgcagagatttaaaaaattacattcctccccctacgcaggtttaattcggaaagaagagactgcagaggagagggaagaccgtgagtctgctttcacctaggtttaaagcgaatcaaagacggctgtaaaaagggaaaccgggaccaaaaacagatttggagcctcgaaactctccattgaaggtttggaagatacgttgctgcagacttgaaaccggctccaaatccggcccaaacatgggctgaaaatatggcgcgctaatctgctgcttcccctcctcctcaagttctttctgactcttcccacctttcccagtttcccttccagacgtctgcggctccccactccacccccaggatagctactctacatcccgacaattcccagcttctacacccaggaggaggaattctggaaccacccagagcgaactcgtgccggggcggggtggggaccggaggaaggtcctgctccggaattctctccagagcagaaaagaattctagaggctacatgtgggctgctttccccccttcttccttttttccctcgcaaaccaacaaccaaaaagtgtttggtga

SEQ ID NO: 268125 - DNA, 402 bp, Homo sapiens
ctctgaagtgagactaaaactatattttcaagtgtcactactgttttgaaatcaatgatgtctcacacttgacttcagtcttgcctccctgtgtctaagtcccagtcctggtgacattcttaatatgcaggtaatttagataggcagttttaaaataccattggctgagaaggtaatttactgacaatttccagttagttaaatgcttcccctgccatgaacaacaatgactaacatttattgggcattactgaatgacaggtacttaacatcttttacctcatttaattctcagaacaatcctatgaaggtggcacaactattattattgtaccctgtttatagatgaggaaattaaggtcaagatcacaatgctaataaatggtagagttgagactcaaa

SEQ ID NO: 268126 - DNA, 623 bp, Homo sapiens
tatgcctatgtgtgtatgcaaatacatatttccatatatctgaattacttgaggatatgtttctattttttattttatttatcttatcttttggttatttggccctattttctggtatgcctgttaatatttgattgaatgcccgacattgtataggaaaaaattgcacactctgggactctggttgatgtgatctttcagcaaatatctaaatatttttggtaaaaaaataacttttatctcagtataattagtagttaagaataattgaggctttatctgaggaagaagagcctattaatgatttgctcttctaggatttcaattgaaaacctggcatgtataccaggaccccacctagactctaattttttgcctgtcttttttttttccctaagactatgcaatagaggaattaacaaacaaaacagaaggaaaaacaaagataatttaaaaggctcacctacatggtttttcttatatctaggatcttgatcccacaagtcctagaagcctttgttactcacttatgtctttaaccatatttttgagaaattttttccagcttctatttcttttctcagcaggaggattttttgatatgcttcatagctggagacaga

SEQ ID NO: 268127 - DNA, 679 bp, Homo sapiens
gctctccatctgtacctgaggccctactaagactcattcagttgtgactcataaggaaaatagccattttcattttctgactcatgaacacagtgtacagcttgtagttcaccttctatcttcctcctgaaaactcactttgggacacttttctatcttgagaaaactaggaacactaccaggcaatagttacttgtgtctttttcctaaggagacttgaagaagttaaaaaaaaccctgcacatctttataatttagtggaggttgtttagcagagtacaaaaaaatctctgttgactttaaccgtaatacccatctaaggcttccttcgtagaatctgggcttatcatcatctgcaaaggaagttctgcttttgtggccatgaccagtttggactctctgatagactgaaacccatggctgtaggtccgctatgtgctttggatccagaaattgtgattcatttttatgcaaggtttctgtgcattaaatatacagaaatatttgagcaaatctgaattgaccatcacctcaaaacatgttcaagagctgttcccttttccttacttgcatatacttgtgaggaaattatagatatgacacataagaatacccaggaatagatttacaacctagaaatctgatggatagctgatgataaggtaggtaagttccttta

SEQ ID NO: 268128 - DNA, 571 bp, Homo sapiens
gtgtccaaaagtattagaaacattagtattttgggataaataataatagccaaggatcaaatcttgctttatggcaggggatagtataatttatgaaggagcagcctggtgtagtggagtgaatgtggacttcagagtcaagctgactaatgtttgaaattcatttttatacttattagctatgagaccttgaagaaattactttagatcctgacagataatgtatgtgcttgacacatagtagatatttaataaatggtccttctttacctgtacctcttactgatctttgtaactccactatctaaaacatgttagacaatgtatatttcttgaatgaatagaatggataaatgctagtttatagttgattaatttgttaaatatttaatagtatctattaagtgctaggccctattttagctgctgggatagaataaataatctctgcattcttagagtttaaactctaaaagcagtaattggacactgatatgtgatgtaagaaaaagtagagtatgttaaaagaataaaagtgtatggaggaaaaagtagagcagggtaaagagga

SEQ ID NO: 268129 - DNA, 219 bp, Homo sapiens
gccagtgcagtacaaaccttagtcatgaacataacagtatgtggtttactgggttgtttgtctcatgaggccaaacagaagctcccaagcttctgcataaatggctttatatcttccttttagggtagggaatgataagagggcaggttagaagcaaaatatgcttttatgagcaattgggaggatgttggagactcctgagagtttcctgtgtctcct

SEQ ID NO: 268130 - DNA, 309 bp, Homo sapiens
cagctaataacaaaagaaaggatgaacattggcactgtagatgttgacagcattatgcaaacttttcaatattcccttgcatgctcaactttaacttttgtttataaattccacttagacataatttacaacttctgttaacttaagctgggttctgtaaatctgtctaaaaaaatcagggcagagtgctttgagatgttacaaatatatctagatatcaaacattgagctgcacaaattgtatccactttggaaactctaagtttgtatttatgtccataatatattttagttctgatgtttttaaaa

SEQ ID NO: 268131 - DNA, 170 bp, Homo sapiens
tcttcagtccaagtctctttgtttgagaaagactcttggcagagtgtgaggggtgaggacatcactgttggcctggaagaaacagatgatggtaatcatgttgggaaagggttatttccattcttttgttgtgcttgtcttcctaattaaaggctcctttataaagcaac

SEQ ID NO: 268132 - DNA, 381 bp, Homo sapiens
gtgcttcccacagcagctctaaccacagctgtatctcagtgcagaacactcaaatcagatggaagtccagtggtctcaaccttggcctgttttcaggaaaagcagagaaagagattcaagaactcttagtaaaagagatgtgagggacaaaatggacttgaggtgggaagtcatcagacagcagctcctgccactgctttacctatgttccatcccctgcctccggctaagaaatggagcttgcgctggtgtgcacagttgagtcctctagaagagcggctatttcagagaatgtacacattgtggggtcagcctcaaattgtaccacagattaactgctgctttgagctggattaaaatcacagcctctgactgccaatt

SEQ ID NO: 268133 - DNA, 271 bp, Homo sapiens
acctcagccaatccccctgcctcagcctcccaaagtgctgggattataggcgtgagccaaagtgcccggctgcagattactttttattttgtatatttaaaaaataatacatgacttaaaaacattcctgctagaacgtctgagtggggctgggcacagtgactcactcctgtaatcccagtactttgggaggctgaggctgattgtttgagcttaggagttcaagactagcctgagcaacatagcaagatctcatcgctactaaaactga

SEQ ID NO: 268134 - DNA, 698 bp, Homo sapiens
aacagcatactttgtattaggtgaacccacaaagtacaggggccaattgtaggtagtccacaaacacttttaaatctttgtgcatttattgtatgttagaaaaatttatacatagcatattaaagcattaatataaaatatcttttaaaaattaaggtatatcttcaaaagaaaggaaaacatcaagtaaacaattatagataaataaagtacaggtaaaaggcagatgtggtaacaattgtatgaagaggaatacaagtgtctagggcttgggggccacacactaaacctggcatcagaaggcccagatctgggacccggctcatttgttttctagcactaggttgtttttcatccttgtataacaccatggcccaggtactactctaagcactttataaaaattaactcctggccgggtgcggtggctcacgcctgtaatcccaacacttttggaggccaaggtgagtggatcacctgaggtcaggagttcaagaccagcctgaccaacatggagaaaccccatctctaccaaaaatacaaaattagccaggagtggtggtgcttgcctgtaatcccagctactcgggaggctgaggcaggagaatcacttgaacccaggaggcggaggttgcggtgagccgagatcgcgccattgcactccagcctgggcaacaaaagcgaaactctgtctcaaa

SEQ ID NO: 268135 - DNA, 375 bp, Homo sapiens
agccgagatcacaccactgcactcagcctgggcaacggagcgagaccctgtctctaaaaaagaaacaaaacaaaaaatacacacaaaaaaatggaatgactgacagacactacagcagtgctgcagctggaagacatgctactgaaagaagccagtcacaaagggcagtgtagcgtgattccacttacgtgaaatgtccagaataggcaaacccatggagacagaaaggggattagtggttgccgaggactgggggccggcgatcactgttaggaggttcagagtttcttttggggatgttgaaaatattctagaattgattgtggtgacaggtgcacaaccctataaatacactaaaagccattgaactgtacg

SEQ ID NO: 268136 - DNA, 474 bp, Homo sapiens
gaccaaagccagcaagacagatttcattctgaggctttttcttttggcttatactggttaccctctcatggtatgctcatatttacctcttttcgtgtgtgcttggggttgggtcagggtggagagcaagatctctggtgtccctttttataaggccactgttaccatcatgacctcatctaaacctaattatctcccaaagattccatctccaaataccattttattgaggtttagagctgtaatatatgaaatctgggggacatagtccatagcaatcaatatacaaaaatatgctctagtctattatagcaatgaataatctgaaaataaattaagaaaacaattctatttaccatagcatcaaaaagaaataaatctaacaaaataagtgtaacacttgtacactgaaaagtattaaatattgttggaaatactaaagatctaaataaatagacatttcttatttaatga

SEQ ID NO: 268137 - DNA, 955 bp, Homo sapiens
cagataaggaaacacacctcgtctaggaagcaaggggaaatatgacaaagcacacagaaactagaaataaaagtcaaaaatctacaccatcgaacccaaataatcttcttcagttttaatgatggacccaaaccaaaacagttctcacgttcacatgttagaaactaactccatctgcatcacttacgataggctgtagtaaactgaaccaaataagaaaaatcccagcagcaaacttgctgacaaaactttagccgattgccagggtagtccggtacaggaacgtcaaatgaaaccaatgtgctgtaaataaacctttattgtattttgtgatacggtttgaatttaaatccctaggtagcgccacgaaacaaaagacatattgatgctactgccatggagcagcacagtttgtctagaaaataaacgagacgaaacagcagtctagaagtaggcaccaaatccaagttttcatgtgcgatccaggtattagggtccatccaggaacagcctgctggaattgctagcctggcattcacagaagattgtgccacccacgaggaatgtgttttcagccctgaaattcctgggagtgagaggtgaagccagctggatttctgggttgggtggggacttggagaacttttcttacaagaggattgtaaaatgcaccaatcagcactctgtagctagctagagttttgtaaaatgcaccaatcagtgctctgtaaaaacgcacctatcagcactctgtaggtagctagaggtttgtaaaatggaccaatcagcactctgtaaaatggaccaatcagcagggcatgggcagggacaaataagccaataaaaactggccaccccagcctgcaggggcagcctgcttgggtccttttccacattgtggaagctttgttcttttgctcttcacaataaatcttgctgctgctcagtctttggg

SEQ ID NO: 268138 - DNA, 397 bp, Homo sapiens
ggaggtgattgggtcatgaaggctatgccctcatgtatattttaattcattaatggattattggattaattggttattgaggaagtgggtttgttatcacaagtagatctgttgtaaaagccagtttggccatctctcgtgagctcctcctgcctgtgatgacttctgccatgttataacatagtagagctcaccagaagctaaccataaccaccttcaccagaagccacctgatcttggactctccagcctgaagaaccatgagccgaaatacatctcttttcttcataacaaacagagtacctgtttgttatataataccagtttgttataacaaacaggtattgtgttataacaacagaaaatggactaaaacagtctgtcttcaaatttcccc

SEQ ID NO: 268139 - DNA, 381 bp, Homo sapiens
gagctggaacccttcctttcacagatacctggaaattgagccagatctgcatccgagggacactagaagggatggggaggagcgcttacccctgaactctgttttgtctcatgtttggaggcccaaggtcatttggttcttcagatttccagcaaactatagctctcactcccttcccgcatgccctcaccccacggcttttacacttaagaggaatggccctgccttctctgggcccacagctcctgtggcttgaggttccagccgtcttgttaacaatttttctccctgcgatgtaggaatgatggctgtgttaacaggtcggggggcggttggggagacactaacaagatgataaaccttggtatttggctctgctgc

SEQ ID NO: 268140 - DNA, 199 bp, Homo sapiens
agaaagtgagttctgccaacagtctgcatgagccttgaaacagttctcctctggtccagcctctagatgagagtgcagtatggccgacactttgactgcagcttcatgagaccctgggcagaggacccagctaagctgtgcctggatttctgatccacagaaactctgagataataaatatgtgttgttttaagcagct

SEQ ID NO: 268141 - DNA, 332 bp, Homo sapiens
atgaaattatatatatatggggccatatcctaaactggaccactatgctactgggtattaatagttgtacacatgttcaggtgtttggaaagtgctggattatgtgttaacagatgccttttgttttaaaccacagggcacttcagccattaatgaatgtgctctccagaggggaaggatgtgatttgtagtatatcccaaacttaactacatttttttgtgtgtgtgtatggcatgcattttaacacttcacacagaccagcgtttgtaaaagctgacccagaggtattctgtatcatctccttcctgtggttttccataagaattaaaaa

SEQ ID NO: 268142 - DNA, 204 bp, Homo sapiens
agagagcagggagacaaatgaacccagaacacaaatggtaaagaagaaaaatgagagaatttgtaaaagacagcattcgaacatgccgaacaagagcagggtactggtgttcaaacacctgtatctcccccgtgtaacccgtcaactaatatctttccatatttgctccagatttgtctttagaaataaaacccacgttctgaa

SEQ ID NO: 268143 - DNA, 457 bp, Homo sapiens
ctagtaataatttggtttcctataaagggttcagattccattgactttctgaagccaccaagtcagcaaaacagattatgatcattacttctctaccatttaactgtgagcaatctcaaagttagtctgaaagagtctgatggtattaaatctgaaagttttaacaactattaaagatctccttcataggcagtaggagctcaaaatgagtctgaaggttgattcttctgtctcatgaactttatcttagataagtgattaggtagaatcaccctcagctgaaatcctgggagggctcagtgtaactctttctctacagaaggtgacagcaactttattctgatctcaaaagactgaatttagtagggaaaggaacgctctccccattttagagcaggtaggccagctggtaggggtagaacaatagaaataatgaaaaacaacaacaacaacaaca

SEQ ID NO: 268144 - DNA, 377 bp, Homo sapiens
tgcctaggaattattctttgttcactattgaacactatgtgtagctaccagcaaaatgctaaataatacagcaagattgtataattgtggtgtaatttccagaaatccttcttcttcttaagtttctttaaatgacttttttttttttttaccatgaaaagactaccaaatgactcaaagaactcagtatcctccctactcttgcctccaaaaatgcatattaatctcattgtggttttaaactaaggagaaagtgtagtcagacagaagctgtagggtgcaggatgataatagcataagaagatgaggaaagctgtggggataacattagtgtttcaaagatctgtttccattatcattgcttttgttattataat

SEQ ID NO: 268145 - DNA, 337 bp, Homo sapiens
actcagtataatttgacactgaatatgatctaaccagaattacaatatcagggagatgggtgagaggaagtaaattcatggtgggcaggaggaagagaggattcaaaagataatggtggccgggtgcagtggctcacacctatattctggatacacattttttattagacttagctttgccaaaatttcgtggttagtcttttaacagtgtcattggaaagcagttttttattttggtggtctaatatattagtttggtctttcatggatagtacttttggtattatatctgaatttttgcttaacccaaggtttagggttacatttcttctagaag

SEQ ID NO: 268146 - DNA, 264 bp, Homo sapiens
tgttctctttttgttttgctttgtttattacaaaaaggatttgaggatttaaaaaaaagaagaaatgtgaaaatagagacaaaggggaactaaagataaggaaataaggccaggtgcagtggctcccacctgtaatcccaatactttgggaggccaaggcaggagaatggcttgaagttggagttcgagactacagtaagccatgatggcaccactgcacccactctgggggacagagcgagaccctgtctctaaaaaagaaaa

SEQ ID NO: 268147 - DNA, 399 bp, Homo sapiens
caacatggtgaaaccctgtctccaaaaaataacaaaaaaaaaattagctgggagtagtatcgtgtacctgtagtcccagctactcaggaggctaaggtgggaagattacctgagcccaggaggtcaaggctgcagtgagccgtgttcatgccactgcacttgagcataggtgacagagtgagacattgtctccaaaaaaaaaagttaaggacacttccactaaaaccacatataggaaatcttaagtcaaatagcaaatattaataaaatctggcagaatattgaaagattcctaaatgtgaccagttaagatttggctcacgcctataatcccagcacttggggagcccaaggccggtggattacctgaggtcagcagttcgagaccagcctggccaa

SEQ ID NO: 268148 - DNA, 497 bp, Homo sapiens
ctctttgttatttgagcagctggatgagattcctgatttccataatctgtacctggaggtttatacaggagaggatcactggggcagacttgaaccatggtgcccacaagtggggagggtgctccagcggccatggaaagaacttccttctgcagttggagacagccttctgtgtgggctgaaggacagagtgtgattttctacttggaagagactccagggctctgcagagagggaagccctgctgacccatttcagcagactgtgacacttcagcgacctgcaaattctacacattagagttcatattttatacaaactccgtacacctagatgtggacttaacatttctaccaacaacatccaacttccaacaaaagatgcaggcccatcagaagatgaaagctactaatgaagatgcattaaagatgatatttatggccaccccttagggaaaaaaagattcataaataatttcatggaaattacacccaaaa

SEQ ID NO: 268149 - DNA, 177 bp, Homo sapiens
gaagaaattacctcaatataataaaagccatatatgagaagcccacagctaacatcatactcattgatgaaaacataaaaccttttcctgtaagattaggaacaagacaaggagatgtccactttcatgacttctattcaacatgataatggagttcctagccagagcaattaggca

SEQ ID NO: 268150 - DNA, 522 bp, Homo sapiens
cccagctattctggaggctgaggcaagattgctcgagcccaggagttcaaaaccagggcaacatagtgagacccctgtctctataaatccacccctcattgttatccctgttttatttttatttttaatgtatcaacctacctgagctggaacaacatttcccaaaatccttccctgagttagcatggctgcatgaggtttggaaggtgagaatgcagcatctgccatactctttttgtgctggaaaatcagtgcagagccacaggcactgttggagatcacctgctcgatcaccttgttagtgtggggcagcagccgagactttagtcttttggctcccaccaattttcttctagcttctccaactcctgggctaggtacatgctgagtttcaggaagaaagacagaagtggtgggagattgtcgtgggttccagttcatcatcattctcccccacttcacatccatctttttttcctgattcccatcccactgacttcaagctccagcatcagacacaaa

SEQ ID NO: 268151 - DNA, 454 bp, Homo sapiens
ttggaaagacctaaagtgggaatgctaattcctgtctctatactgtcattagaatctatggagaaaaattgagtcaatatgtatcgatctatttcagaactactaatcttcttacaaagacatcaaggaaaaattacatagaatataaattgctgaaacatgaattggattttacttaacataatatacaagaaagcatgtaagactgcaaggttaggatacaggagttttacaattttgctacagattatgtaacttcaggtagaatgacactcaatacttggatggtgttactatgaaattcatgggtaagaagttgggctagataatttctaggattattttgggttattactcaatttctaatcctcagagtctatattaatttcctcttgctgctataacatattaccacaaatttagtggtttaaaacaacacaagtttattatcttc

SEQ ID NO: 268152 - DNA, 495 bp, Homo sapiens
atcgactccattttccatttccttgcaatatgtattgagcttttcagtcctgttttgtcatcatgcaaacaagtaaaattcttcaggatgcagacccacctaatagtactaaaaaggaatctttaaaaaatatggagatgtcttctccctatggagctacaggggaaaagacaccactctgtgtcataaaatctatttaaatggttgccgggcgcggtggctcacccttgtaatcccagcactttgggaggccgaggcaggtggatcatgaggtcaggagttcaagaccagcctgaccaatatgatgaaaccccgtctctactaaaaacacaaaaattagccgggcgtggtggtgtgcatctctaatcccagctactcgggaggctgaggcgggagaattgcttggagccaggagatggaggctgcagtaagctgagatcatgccattgcactccagcctgggcaacagagcgaaagcgagactccgtctcaaaa

SEQ ID NO: 268153 - DNA, 880 bp, Homo sapiens
tgtcctgttatattgactggtttcataggagaatatatttttggattgagttttaattcttcagtagcagctgaataataaaataacgttgttacatttatgattcagcttaatgaatgattacattattagtattcctgcctgtgttttttgtttaaacatataacgtctttcaagaatagtgtacatatctgtctgggcactgtggtgcatgcttataatcccaacattttgggaggccagggtgggtggattgcttgaggccaggagttcaagaccagcctgggcaacacggtgagaccttgtctctacaaataattttttaaaaatcagctgggcatggtggcatgcacttgtaatcctagctacttaggaggtggaggcgggaggatcactctagcccaggagttagaaggtgcagtgagctatgattgcacagctgcatccatcctgggtaacaacaagaccctgtctaaagaaaaaaaaggaacatacatacattattttagcttcttttataatcccctagcttaggaactggtcagtaaatatagagtgaataacagatttatactggaattatctttactagtttgttatacttcctctttaagatgttttgtcaaagaaattctgaatttattttgtttctctacatgttagctagactcatgtatcatttagcaacaacaaaaacttatttcatgtgatagactgactgtttacttctagctattgttggctatgtcagagagaccagataccttagccaagaatggttatcaagactggagaaactgaatatgtgtgtgagtaatcttttgagaacaggctggtattatctttttgtaaagggatcatattacatttctagaatttc

SEQ ID NO: 268154 - DNA, 377 bp, Homo sapiens
gtctggaaatgggaccgccttcacctttcccaagtgaaaagtcaaatttcaacccacccctattattcactccatccagccttcactgagtacttacattgtgctggggactagggacacaagaactgataagacaggaccctgctcattgtcctctgctcattcccctccaaaaaagtctaggatctgaatgcatgccagtctccacctcatccagtgtataaatctattccaaccctgtggttatgtcactgtgctgagagtgcattgtgctatgtcttgaagacgtctgtcttgtacgttttaaaacatgtcaaggttattataaaataaatgcatcaaagcaatacttttgccagctttcaacttatgaatat

SEQ ID NO: 268155 - DNA, 722 bp, Homo sapiens
aataagtgttttaaaaggtgatccaccttaagcggcaatacttgttttaaaaggtgagcaactttaaaaggtgcttagctttggtcatcagtaaaatacaaatttaaacaacaatgtaattttttacacacctgataagatggctaacatagaaaattacagcaatacaaaggtaattgaagatgtggagccattggaatttcatatggtgttagtggaagtgtaaattattgcaaccacttttgaaaactggcaatacctactaaagctgaacatgcatatttcctacaactctatgacctatgcatctaaaacctagtataagactatttcatagcatcactgttggtaatagtccacattaaaaacacctcaattcccatcaaccatagataaaagtatggcatacacatacaatggagtactatatagcattaaactaacataaaaatttcaaatctcacacagaaaaggaagttcaaagcagttacttttaaatgttaaagtcttgagtccaatgttgaattttatttttggtgaaaagttggatttgacatactcttataacctaaaatcatcaagcactttctattgtcatatatgttatacattggggatagtgtaaaggggaataattttggagaaaaatgctcaatacctatttctgataaatgttttgtttaagtgttatacacaagtccatggagaaaatcatgtttcat

SEQ ID NO: 268156 - DNA, 318 bp, Homo sapiens
gatttattttctgaaagcctggagagtagggggttggggaatgacttataagttaaccagggattatgtgtatataattataagctgcaatcaccatgattcaatgatattcaaacttttaaagtttttttgtcaaagaaagaaggaagggaggaaggaaagaaagaagaaagaaggacagaaagaaaattaggtcttgcctacaagattacttatgagacttaaggaatttacacattcatggctgagtgctcgataatacattcccagtggaatggtctctagaaatgtctacaattaaaaacagaacagtagaaa

SEQ ID NO: 268157 - DNA, 383 bp, Homo sapiens
tgttttgttttgttttttgcttgtaccatagaccacaagggcagaaaaaccaaatagatgagaagggaatcccaatagggaaattcctgaggcgagatgtgagggaatgaggactttgctacttggcaaatttgaatgaggtgggagcccacatccatagccttgtctgacctccctcaggtggggctgcctggggcacagacacactttctactgggacatgctctgcttgctgctgggaggaagtggtgggtcttgaagaccatattggggaccagctctgacactaactgtgtgatcttaagcaaaattactcacccatctgaacctgttttctctcttctgtacaataagcaatacttgtcttgtccaacctacagagt

SEQ ID NO: 268158 - DNA, 595 bp, Homo sapiens
tcttcaccccacatctttctctccaccacggccctagccctgatgcactgcaggcctctctgtccccctgcctcacactagaggtccaccaagagcgggcactgtcgcccttttcacccatgtatctatcctccaagccaagccgcagcctggtataaacctggttcctcaatcagtgtggactgaattggatgcgcatcctttcagtcttcaaaagcaggtgtggggcagcgtggccggagaacatggtggtgcagtttgtggacaatccgaggcagcaggggaaacgtgtttccccaacttcccccaggaaattgtttttcagtgggaagtgcaataaaattgctcaaagcacctgctatgtatcagcatatgtaaactgtaaaatacacgtttttttctttgttaagagtataaaaaaatagaatcacaattttttcatgaagactgaaagcaaagcaaactataagcccggagaaagacagggagaagcctcagccccagagctcccggggccgaaaacaggactggttgaattcctaaagtctgctccctcctgggattggttctattctgccgggtgggataccagata

SEQ ID NO: 268159 - DNA, 465 bp, Homo sapiens
  misc_feature (34)..(34): n is a, c, g, or t
  misc_feature (48)..(48): n is a, c, g, or t
gcgtgaccaaggccacagagctatggtgtcagcnaccaggatttgagnccaggtgaatcgagccccttttcccatatcatctgtttgttctgttgtctaaaagcacactgcaagccgggctcagtggctcatgcctgtagtcccagcactctgtggggccgaggcaggcagactggtctcaaacccctgacctcatgatccgctcacctcggcctcccaaagtgctgggattataggcgtgagctaccacacctggccggaactggtggttttaaatgtttcctgtggctactggctgcagaaggggctttcctgggcactggtggagatggaaagaaggaggaagtgaggtgggggtggaggacagtgtcaaggtgggagggacaaaaatgagagcccaggtgtggaaagaaacatggatatttggtctgcgtagtggctcacacctgtattcccagtgctttg

SEQ ID NO: 268160 - DNA, 400 bp, Homo sapiens
cagatcagacaaggaactctgcacattgcagagatgtcaagaagaggaggaatacaagcatctatacagttaatgtcctgtattcctatctgtaacaagggtaacaactgtataattaacactgccctatgctaactcttaaaaccctgtttacattaaaattcctttaacatgttatccacttattgccaatagtttggtgagatatgattttccagacagaaatggaaaatatctgaaatactcaacattgcccaaaaactggtttctttttgagtcagagtctcactctgtcgcccaggctggagtgcaatgacacaatcttggctcactgcaacctccgcctcctgggttcaagcgattctcctgcctcagcctcccaagtagctgggattacagg

SEQ ID NO: 268161 - DNA, 417 bp, Homo sapiens
caatcattattaaacctctaaagtgctagataaggaaaattcttaagcttgaaaaaataaaatgggagcaggaatttagagaagcaaataagctgcctgagggcagaagttatgctggagaaatccaccagtgaattccgagctagttctttgggtttaccattttcatacttcatatataggagacagcttctaaggcactcaagcggtagagaaggctactgctcagtaaaacagtaaatgagaaaataaaaatctagcctgcaaagggagatagaggggaaacttttctggcttagcattggcttcgggtgaaggaaacaaataagcagtaaaagccttccgtgagtcataaccttaaaccaaacatcatacaggtttgcaacttcagtttgttatccacttatgtgatttaaa

SEQ ID NO: 268162 - DNA, 535 bp, Homo sapiens
gcgcgtctgcgcctccggccgccgcggctcccggggcctccgcctgcagccggcggcggaacgagggcaggcggctgagacaggcgagctatttgcattccccggcagtcatttttatatgcggagaaacccaacacacagctattctgtcaggctgccgagaaaaggctgttcggcagttgcagccctggtgaggcaatgaggaggaaaggtggacgcacctgcctggagtggttgaaggaaggcagtgaacatccacgctcctggggttggttttcctgaacctctgtagctgtgctgctcactggggcagccactgaccacaagaggctgccgagggcttgcagtgtggccaggccagaccaggatgttctccaagtgggaaatacacaccccattgtaaagaagactgtatggaaaaaagaatgtgaactggctcattcatcatttaaaaacattgattgcatattgaaatgataatattttgggtatatggggtgaaataaagtatcatgaattaaatctttttttaaaa

SEQ ID NO: 268163 - DNA, 818 bp, Homo sapiens
gcgcgtctgcgcctccggccgccgcggctcccggggcctccgcctgcagccggcggcggaacgagggcaggcggctgagacaggcgagctatttgcattccccggcagtcatttttatatgcggaggtaatgaagttgtcagcggcgccccgagtgtggcagagcctgatattcaaatcgccctgcccgctccgcctgctcccgcccgctggtcccgggagccccaggctgcgcgcgcccgcaccgcatcgccgctttgccccgcgaccgcgcgcgcctcctcgtcctcccccgcgcctttgtttccgtctccttctcctttccctcctcttttgtgtcgggccagactcagccccagaaaccagccaccctgccgcgtccgactgccagggatccctcacgccgcgagaaacccaacacacagctattctgtcaggctgccgagaaaaggctgttcggcagttgcagccctggtgaggcaatgaggaggaaaggtggacgcacctgcctggagtggttgaaggaaggcagtgaacatccacgctcctggggttggttttcctgaacctctgtagctgtgctgctcactggggcagccactgaccacaagaggctgccgagggcttgcagtgtggccaggccagaccaggatgttctccaagtgggaaatacacaccccattgtaaagaagactgtatggaaaaaagaatgtgaactggctcattcatcatttaaaaacattgattgcatattgaaatgataatattttgggtatatggggtgaaataaagtatcatgaattaaatctttttttaaaa

SEQ ID NO: 268164 - DNA, 271 bp, Homo sapiens
tacccagtagtggaattttaaaactgtaatagaaatacaaaaagccaaaaaaaaaaaaaaaaaaaaaaccaagcattttaagatcaaacaagcaaaaaaaaccaaaaaaaaaaaaaaccccacaaaatttcaagatacttcaccaaaaaaaaaaatatatgaaaagcaaataggtaaatgaaaacatgtgcaacatcattaaccattaagaatgtgcaaattaaaaccattaagacaccactacacacctattagaattgttaaaaataaa

SEQ ID NO: 268165 - DNA, 894 bp, Homo sapiens
agcatcaagtcacatataatatgggtactttctattctggaatttgtaatgatagtccaaggcaatgtcaggagacctgtgttctaactctagttccaactctgtgacattgttgggatcactaaaagatctagcaccaggtctatcttggaatctctgggctctagggttcagccaactccagaagtctaaggtagactgtgagagatattgtggcagcagtagcttcaaaggtttcaacaataagggaagagttaaaatttgtatgggtgggtggatgagactcaattgtaaagctgtgttatcttactactcctaaactcctaaagactcagataattcagatattactcggagggttaagtttaaccactgctggttaatgcagctttctataaagaataaagtgctaattgcaggcaatctttgacttctagcacttcgactaaaactatgtggtaactgaagttatgggagtagagttcagaggtgtttgaaatgaaatgggctacttaactggaagtgacttccaagtctacagagatgttcagatagaagctagatgcccattactcaggagatttttaagagagattaaagtatctgataggggttggactagatgacttaaaagaatctcttctaggtctatggttccatggcaggaatcaattcacatagtgcatcttcagtcacttataatgagatcaacctcatgtcaatttgttttctaaagtgttctgtataaagatccctgtcctctggctcagtctaattccaagtggccttaagccaccctttgcactatcaatcaacactggtaactcttactggctcaagtatgctggcagcaagaagaggtgacagatataagctaacatatgcaaacagaaa

SEQ ID NO: 268166 - DNA, 453 bp, Homo sapiens
gcaaaactccatcccccccccccccccaaaaaaaaaaaaagagatacacaaagcttcagaataaaatttgatatggtttggctcgtgtccccacccaaatatgttgaactgtaatcccattaatccccatgtgttgagtgagggacctggtgggaggtgattggatcctgggagcggtttcccccatgctgttttcatgacagtgagtgagttatcatgggatgtgatggttttataagtgtctgacagttcctctttcataccctctctttcttgcttgccaccatgtaagacctgtcttgcttccccttcaacttccaccatgactgtaaagtttcctcaagccatgtagaactgtgagtcaattaaaccgctttcctttattaattacccagtcgctggtagtatctttacagcagtgtgaagatggactaatacaaagctttatttaaa

SEQ ID NO: 268167 - DNA, 515 bp, Homo sapiens
aattcaggggacccagaataaccaaaataatcttggaaaaaaacaaagctggaggactcacacctccagattttaaaacttactgcaaagcaacagtaatcaagactgtggtactagtataaaggtggacaatatagaccaatggaataggattaatccaaagtaaaccctcagttgctaattagttgatttctcaagtgtgccaggaccatccagttggggggaaaatagtcttttcagtaaataatgctgaggtgactagatttccaaatgaaaaagaatgaagttggaccccttacctcatatcatgtatgaaaattaactcaaaatgaatcaaaggcctaaagtgtaagacttaaaactatagaaagaagcatatatattttttttacgaccttgaatttggctgtggtattttagatatgccaccaaaccatcagtaaccaaagggaaaaatagataaatttgacttcaacaaaataaaaaacgttgtgccccaaagggcatcatcaaaa

SEQ ID NO: 268168 - DNA, 347 bp, Homo sapiens
tttttttttgtgtgtgtgtgtagagaccatgcctaagctggtctcaaactcctgggctcaagcaatcctcccccttcagtctcccaaagtgctaggcatgcctggcctcatggagtacgtatttctttttttttttttcagacggattatcgctctgttgcccaggctggagtgcaatttctaaaaaggcttctatacgtcaaggcagttgtaaaagttttacttaccagaatcaagtccacttatgcttaggcccaggctctatctaaaaatattgactaattatagaaagtgtcccaaatgtagctactgtcgagcggccgcgaatttagtagtagtagggtcgc

SEQ ID NO: 268169 - DNA, 600 bp, Homo sapiens
cgtgcccggcccaaaattattttttatatatggtgactttcccccaccctttcatcttacagtagaggcagctcagaaaaaaatcactgaattaagtcattcagaggtcgtttataatagctattcagcagtgagctggttctcagtcctggttatccattacaatttcccagcatttaaaattctgataccgtgaccatacccaagaataattaaataagactttctgtaggtgggacctaggcatctgtttttaaagcccttcaggtgatcttaatgggcagctaagtatgagagctactataggacagtgttgtatggcctgattaggtaggaatgagagggagaggaagaaatcaggacaggagatgtagacttattttgataagttttggtagtgaaaggcagaaaagagatgggactgtaacttaaggaattagcaggaaactccatctctactaaaaatacaaaagttagcagggcattgtggcttgtgtctgtaatcccagagaattgcttgaacccaggaggcagaagttgctgtgagctgagatcgcaccactggactccagcttgggcaacagagcgagactcagtctc

SEQ ID NO: 268170 - DNA, 610 bp, Homo sapiens
cgtgcccggcccaaaattattttttatatatggtgactttcccccaccctttcatcttacagtagaggcagctcagaaaaaaatcactgaattaagtcattcagaggtcgtttataatagctattcagcagtgagctggttctcagtcctggttatccattacaatttcccagcatttaaaattctgataccgtgaccatacccaagaataattaaataagactttctgtaggtgggacctaggcatctgtttttaaagcccttcaggtgatcttaatgggcagctaagtatgagagctactataggacagtgttgtatggcctgattaggtaggaatgagagggagaggaagaaatcaggacaggagatgtagacttattttgataagttttggtagtgaaaggcagaaaagagatgggactgtaacttaaggaattagcaggaaacacaacatacctgagaaagaacattctagcatatatatatatattagcatatatagtagtgagtctcagctactcccctagggcagtgtatcagcaatttaggaaccagggatgaacatgcatttggcaaaacttcctaattttgatacacctttccctttct

SEQ ID NO: 268171 - DNA, 459 bp, Homo sapiens
gaggatgctggagcaggctgggggaccagaaccacaaaccagccctggcttagctctggcttagctagctgtgccccagaagagctgggtcctcagggagtcttcttgcggcccggtttggatgttcctaagcatagaagactctgccagtgtgtccctcattcgtttcacatttggaaatgtaccaagagaagtgggaaccagctttactctttctgatctagatgggaatcctttcctttgcattcaagctctctgtgtacaggtgtaacttgccagtgagagacttgggatttctcacaaaatagaatgtgataacgacataatttgatatgaatatttgaggaactttatctctggacaatatatactttaaacatccccctccccaagtcacacacacaaattgtttttatgagaaccaattaataaatgctaattcattgaggcaaatcttca

SEQ ID NO: 268172 - DNA, 456 bp, Homo sapiens
acctagttagtaacatcagtcacgactatcaaattatcagcccaatcagagtcactttatgtcataaaatgtctgacttcatttttgaatttaagtaaatggactaatagacgtttcagaaatattgttaaaaattactcaaccatatatcgtggaacttgtgttttttaaggtagcatactaaaagcagtcaaatcaagattatgctgatacaaagcgaatatagtctattcatataatttataaaaacaacaaacacttatgctgcttctcactacttaatttgaagtaatgcagtgtaatctgcagcaaatatgtgttatttatggaccaagaagtataaaactctcgttagtcctttggtaaatatgggtgcatgtatgaattgaatctgtctctcagcttttgaaaatcattaaatcacaattatgaataaaatttcagaaataatgccat

SEQ ID NO: 268173 - DNA, 707 bp, Homo sapiens
gaaaaaattggaaaaatgctctggactttaacatctgcttactgagattcttttaaaaaaatttaactcatctggtagcatcactaaaattataattttaaggcaactgaaaattcatctaggagaagaaatggaacacttaaaaatttaagtctgtacctagtaattaacttaaactcctgaagttcaatgcggaaaattattttaaattaacttaatcaatgcactttgacaagctttcagattacatattgttttattctggtaacatgggataatgctcccttgaatcctaatatttgccaatttttattaggtggaatgagcagattttttttggctaacaatgaatgttttaagaagtgttttctaatatgtagtaagaaaaaatttaagttcccagacttcactgattaaacctgaaatatgctttataggccttaaaagaaaaagtgtgtgctccttgtagttcacatcagaagactgataaactcgttgctctgtttgtaaagcatgggttctgacagcagggctcttccagattgcgatagaggtctgtcctaaaagggcttcagattgggatagaggtctgtcctaaaagggcttgaggtgcaatttgcaagatgtgattttaggaccatacccaaattgcatctgactgttgggtgactccctttcttttctgaactctcaatgcacctgtaatt

SEQ ID NO: 268174 - DNA, 515 bp, Homo sapiens
atgtatttgactatagtatttagttctgaaaggaattttttaatacagtgaaacattagttaaaaataaatgttaactccaaaaagaataataaaatcattattttttaatcagaggctgccagtgtttttctgcttaatctatacagcatcttagctgtaaaaatgatagaattcatgttattttactatgcattctcagtaacaataaatgtgttgctcacttctacattttagatagctgacataaggcctaacatggaaagcaaaaagctatccaggaaatatttccctgctcatgcatatttcctttggcatacaaatcattgtaaatgatggtgagttaacttcaaacatttcaagctacacaactaatgtaattaaaccctaagtccaatttactattggcccttggtacttctgcaggctgatgttaagtgtcatttttcaagtctttcattccctataaacaagatggtggcaattttctttattttctgaacacttgcaatttcc

SEQ ID NO: 268175 - DNA, 181 bp, Homo sapiens
gaggcattagaaatacctaattgttgagagtaagaaatcttcttgacatcaatattcataaaacttgatttcttttaaagaaaagattcagattacagacagaaaacaggtatcacaatttttaaactattatacaaaaaaaaccactactttatctaaaaggtatgaccacaaaaatgta

SEQ ID NO: 268176 - DNA, 267 bp, Homo sapiens
cgccccgatatgagtacctaattgaataaatatcaatcatgggggagtacagaaaaatctcctgtgcaaaataattttaactaatctatgttgccacccttaccctcaagaagcataactcctcacttcttaggtatggcctatatatggtgacttccttctaaagagcacagtgtggaaagtggggagtggagggaggaacttcccagtggggaaactagataaacactaccagatgaccaggtgaccaaggtcaacagcaacagt

SEQ ID NO: 268177 - DNA, 575 bp, Homo sapiens
aaaaataccatagtggaaacttcaccagaattgagtgagttacaagcttaaattaactgtaactagttgagtattagaagcctttaaaatgtaactttttaagagtcatcaaaatactaaatgaatcataatgtatttaacctggctttgtgcaaggaggctgttctttatcagagccctctcctgcagcgcacatgtgcctgcgtctgacagcacctctcgggtgggagccttcctcctccaggttgggtgggagagaagagcacagcaaagccaggggccttgtccacagtagcgggttaggatcctccaggggaagtgccttcatccaatgtgaacaatgcctaaaactaatgcaggagagctgcagagactggtggctgtgaccccacccctccagagccctgctgacttcctttgatctctttcataatgtaccctatgaaacatcattatcttagagaactcatacaagactgctactctaactataaagataaaaatttcacaacacttaaaggacattaccgtaagtcacaaataaaactgatctaataaaaagtgagttggaactg

SEQ ID NO: 268178 - DNA, 690 bp, Homo sapiens
gttctgcccaaaacattctaatttcttattacagatttttctaggagtgggttaaagaatatgactattcttaaggctcttaatcctgtgaccttatgccttctagaccagtggggccagttgacactcccaccagctgtctggacataacatagatttggttgaagactcatggttcaatcacaaccatcagttctgtctcatctgttctcaactgtcacttcaggtgtcagtgggcccctttcattttgctgtttttaatccatttctgttgtttccaaactcagaaagtccggtttgtgtttgggacttgttgggcagattgacccagtgtggcaggtgtgaaagtgcaggaagccagagccagctgccggggccacatcctggttctgctgcctatagtggcacgtccctgggcacatggcctaactcactctcctcgccttggttccttacctgtaagtggaacttgctggagtcacctcacaggattactgtgatgatcagttaaggaaagcgtgtaaggcgcagggcctccgtcaggattggcagtggcagtcactggggatgatgttgatgttcccagtgaaaacctgagggcccttctgctgagcccagggcagaagcagctacagactcttgctgcttcagcccctaggcttttgaatctctcccgtcttgacctcattc

SEQ ID NO: 268179 - DNA, 313 bp, Homo sapiens
taaatggaaaattctagaaatactaaggtttaaatactgtgctgttctgagtaatgtgataaagtgctgtccctcttagtcctggctaggatatgaatcctccctttttctagcatatccatatgctatatatgctccctgcctgttaatgacttagtagctgtcttggttatcagatcaactctcatggtattgcattgcttgcattcaagtaacccttgttttactctcaccccaaagtttgagagtagtgatgccggcaatctgaatatgccagagaagtaagtcataaagtgcttcctctaagtgaaaa

SEQ ID NO: 268180 - DNA, 172 bp, Homo sapiens
cctctccttaaaactgattacttcctaaaggcttgtaacaaaattgttatcagctatcagtactaccattatcatgcttagataagatactgcaattttagtctttcaggttgtatttctggatgacattccattaagaatagggttactcacttgtcttggttttagcact

SEQ ID NO: 268181 - DNA, 505 bp, Homo sapiens
tttgaagcaaaacaaccatttactcctctcctaaagattccagttaatgaggtgcgcacaggcccctttgcagagcgccagccatttccagggaggcacagtggtagcatttcagtgccgttctgctcaggaaagacgaccaaacagccctcctgccctcacctttgcacaccacacatctcagcttcaactcgccatcacggtggtcccaggcacggtcgctgcaacatcagaagggcggcatttcagcaagcatttgtttttggggtaggggtagtggtaattaccagcacatgattattttattttgtctgaattatttacaatggaaggaagcagtttggagggaaggggatattagggaatgagttcaatcccacttgcattgattctacccagagcaagaagagcaagcctattgagaagaaaaatcacttccttttcttcctctttcctctccacccctaagtcttagaaataaataaataatgcaaagaaaagccct

SEQ ID NO: 268182 - DNA, 461 bp, Homo sapiens
ctcatattgtgcattgctcgttttatttctaagacttataatgagtaattattcaaatattcatcaaatccttgatcatccaaaaaccaaagctttcataactcatggtggagccaacggcacctatgagaggatctaccatgggatccctatgtggagggggcttcctttgtttgcagatcaacctgataacactgttcacatgaaggctaggggagaagctatcagactggacacaaaaacaatgtcaactacagatttgctcaatgcattaaaagcagtcattaaagatccttcatgaatgtacagggtttttttaaactacatagcatggattgatgagttcttacatgaagaccgagggagcagcagtgactctgaacatgaacacaatgctgagtacatgtatgtattttctaatgcttgaagacaatagtcaataaaccattgtgagtgtcaca

SEQ ID NO: 268183 - DNA, 413 bp, Homo sapiens
aaatgtttgtcacctgttctagaatataaacttcgtgaagacaaggaccatgtctagcatgggagaaggcacgttgccttgtgtgtaagaggtgattagaaatatttatggatagataattgaatatgtggtatcttcaggaaggttcagagaacaccatgtttcttactttagtatcattctagacctgtagattagcaataagtaatcttactgatggaggaacatagaaacttctcactggaccatggcttaaaaactagagtcttgagtctggttttgtgattctcactacagcccttagtcctatcatgagaatattttccacttttttcttttcttttttcttttttagtaaaaatatgtaagaggagcttatagaaagttttgtgaacttcagcaataaaaaatgt

SEQ ID NO: 268184 - DNA, 538 bp, Homo sapiens
caacatattccacacacatttaacatgtaaattagcctgaacccagaacccaaccagccagacctggcaagtaaggtgagagctgtggaaggtaactgagttctagttttaagtggctgcatgcagagtgatgctctgactgaaatgactgggttgacatgagaagaccaagttggagcattgaggataatgagttctgcatcagaaatgctgcacttgggatgcttctggaatagtcaggtagagatatctaagctgcagtaggaaatatggttttgaagcatgaagaataaattagggctaaaggtaaatggcaacatcatttcatcattccagcaattatgaaagcctacagttctatcactgcttttatgttacaatgcagtgtgagggtttcccagactggaagggataaaagtgcagttgaccttgtattctagacttacttatcattaccctggcacttcaatctcagaatgattcatcaacttaggaagagaagagcgcaggacagctgagaatgctgatcattttctac

SEQ ID NO: 268185 - DNA, 393 bp, Homo sapiens
cacacatatacacatacacactcatacataaatatgtaatgtgtgtgagtgtgtgcgtgtgtgtgtatgtgtagttttatcaactggaaaggggtacaaacaatgaccaacacaataacaatgaacatgcttactgcccagattgtggtcttgaaataccatttctcactaaaaatcagggcttcttgaaggagtagcttgtattagtctgttctcacactgctaataaagacatacctgagactgggtaatttataaaggaaagaggtttaactgactcacagttccactccccagtggaactggggaggcctcacaatcatggctgaaggtgaaggtggagcaaagacatgtctttgcaggcaagtgagcatgtgcaggggaactcccctt

SEQ ID NO: 268186 - DNA, 391 bp, Homo sapiens
acaatattatgctccctcataactggatctccctggtgtttttacctccttgagttgtccatatggaaccttcagcaattcaccagttatagttcaagattttctactccagcactggttcctaaggtggtttcagtagtgagtctctgttcctgtaagccataaattcccatattcacttctctatctctccaatcttgggggcagtggtttgccctatgtcctctcttcacattcaaatccaaaaaggattgttgatttttcagtctcttcacttttcatgtgttgttaaggtggactgattacttccattctttttttttttcttcctttttttgagatggactctcactccagcctgggtgacagagtgagactccatctcacaaaa

SEQ ID NO: 268187 - DNA, 565 bp, Homo sapiens
cccctctcccccggagctccggtggtctcagcgtgaccgcagcaggggctttgcctggacggcctttctaactcgtgctgaaagcaggacccagtattccgtcacgttctgtcccagcaagaacgtgtctcacttcaagaaaatgagggtgcccactctgccctgccctgcggtgccccagtcactctcaccaaccctgaagccctgggagggccacacgccttttgacagatgcagacttaatacagctgactaaagtgtggctttatttctctatgacaagcagaggaaatctgaaatgaggtattgcactgtttataactccatggccacctccagtgaggacgtggggccagtggtgaatggcacactaggttcctctcacccaggaccacatcagacactaggacacatcagacaccaggtcccgtatcttctcggtgtctggcaacgatcaaaagactcaatttacatgggaaagaaatgaatgactcgtttttaaactatttttcccttggagttcatttaacaaaattaggaaagaaaataaacgttaagttgaggg

SEQ ID NO: 268188 - DNA, 483 bp, Homo sapiens
ggtacacatttgaatactcaaccatctgtggctataaatgggcagctttctcccaatattcgtgtctttttttgttccccttcaccaaactcttttgtgctgttcagaaccaagtcattagaatgatgattcttctccttccctccaacatgaggtagcatgcagcaagagcttgctaggtgttttgttaccagctgcaggaacttctagcggaaaatggctcagccatgttagtgggcatgttgcctcctgtgtgctcagctctgtaggaagactttacttgcctcattccagctaatccttacaacgatcttaggtagaatagactcctgtttctgctttacagacagacaaactcaggcccagaaacttgcttaaggtcctctagtcctctaataagttagccgatagaaccaggattggaacacagttcttaaccaatactctatgaaatctagtttctgtgctggtttggtaaaaaaa

SEQ ID NO: 268189 - DNA, 1106 bp, Homo sapiens
cacgagggcgataggcacagaggaaggtagatgaagccccgcgccccccgggcggagcccagccctgttcaccgcgtgctgtgcgggtgcctgtgccaggatcagctggctggacggctatagccccacgcctgcaggccacatacctgggagagtgtgggccttccgagccttctggctcccggccccacagaggaattacggtcccatgtccctcacaaggacccttgcagagggagcagtgcatcggcacagagcaggacacaggggagccgggctgaggctgcgggtcccttgtggccgccaggtgctcacgcgtgcctcggtggggatctggcagccagatttggggtgaggatttgatgatgtgggtatccctagctggtcccacagtgacgatgggtgttgcgttgtgagcatgtaaaacggcagtgacgtctgagggtccctggacgtctttcacacccagcctcaaagcggagcctttccaggcagagcagcagctgccgccactggattgacagccccagagcagcgggatcaggccacgcggacgaggaggtgcgaggcctcgggtcggggcctgtgttctgcgggagccgcacccatcattgctgtggcggtggcagtggagcagctgctctcgtgtctgagctgctccggcgtctctgtccacagtatagggtcttctgatgcttcctggaggtctcggaggggcttgctgcgtgtagtacccacacagcccacaactggggtgttgtcaagtgttatgacgtaggttgcctgtggagtaaaagttggccgctaagaaatgctctagacaggccgggcacggcggctcacacctgtcatcccagcactttgggaggccgaggcgggcggatcacgaggtcaggagattgagaccatcctggctaacacggtaaaaccctgtctccaccaaaaatacaaaaaattagctggacatggtggcgggcgcctgtagtcccagctattcgggaggctgaggcaggagaatggcatgaacccgggaggtggagcttgcagtgagctgagatcgcgccactgcactcccgcctgggcgacagagcgagactgtctcaaaa

SEQ ID NO: 268190 - DNA, 692 bp, Homo sapiens
  misc_feature (390)..(390): n is a, c, g, or t
  misc_feature (692)..(692): n is a, c, g, or t
cacgagggcgataggcacagaggaaggtagatgaagccccgcgccccccgggcggagcccagccctgttcaccgcgtgctgtgcgggtgcctgtgccaggatcagctggctggacggctatagccccacgcctgcaggccacatacctgggagagtgtgggccttccgagccttctggctcccggccccacagaggaattacggtcccatgtccctcacaaggacccttgcagagggagcagtgcatcggcacagagcaggacacaggggagccgggctgaggctgcgggtcccttgtggccgccaggtgctcacgcgtgcctcggtggggatctggcagccagattttggtgcctgctggcgatgtccttttggcacatgtatgtgcanacacactgcattcctgcatctcggcccctccactgcccacaaatgctgccacaactgtgtgaccatgccgtgagccagcctggaaagcttgaagcggggatcaagacacgacagactgggcgacggtgcattcgctcattgggccctgatgctgtgggaccactgccaccgtgcatgccggtaacgtggaacacacgggttgtccccagaactatgcggaccggtgagcagctttttcctttaagcgactatcaagctcttgttggtggccaaacagggagacgtcggctctccctgccaan

SEQ ID NO: 268191 - DNA, 448 bp, Homo sapiens
cttttttcttttcctccctttcctctccttccctccccaatgctcctcaccacacgcaagtgtatgtcttaaaagtagttgaagcttaagttcatctgtctatccatccatctatccgtctatctctacagatctatcccctgatcccctgcactggggaatttttgtattttttgtagagacgggggtttcaacatgtttcccaggctggtctcgaattcctggactcaagtgatccgccctcctcagcctcccaaagtgttgggattacaggcctgagccacagcgcccggctggctgttgcttcttaacacctttattacttttgtaatcatgggtatgagttgattttctggtcagaaatttcagtagagctaatttcatttaaatgtgtgagatgtggtaaagttttgacaataaatacaaattttgacaaagcaaaaaaaaa

SEQ ID NO: 268192 - DNA, 271 bp, Homo sapiens
aaagattggtcagaaaaaataggttgaagatagctgtacttcaccatgatacagtaagaggaactaaactaaattctttacaaaacaaacaaacaaaaaacaaaaacacacacacacaaataaaaactaactgcagacaaaatataatcaacagtgattttttaaccattgacaagaagctgaggatgctgatccctgacaaaagaaaaaataaaatctgacttatcccaagctttctctcagtttccagaaaacacagtgaaaggataat

SEQ ID NO: 268193 - DNA, 351 bp, Homo sapiens
tgaagtcatctgaggtcgggaagcagtttctatttttgaaaagtgagagctgggccgggtgcggtggctcacgcctgtaatcccaacactttggaaggccgtggcaggcgaatcacttgaggccaggagttcgagaccagcctggccaacatggtgaaaccccgtctctactaaaaatacgaaaatcatccaggcgtggtggcgggcgcttggaataccagttactcgggaggctgaggaaggagaattgctggagcccagaggcggaggttgtagtgagctgagatcgtgccactgcactccagcctggggaacagagcaagactctatctcataaataaataactaatt

SEQ ID NO: 268194 - DNA, 514 bp, Homo sapiens
ccaccaaaccacaaagagaaaaagaaacaaagaatttatcaaacaactagaaaataattaacaatatcacaggagcaaaacctcacttatcaatattaaccatgacataaatggattaaatgctccacttaaaaaatacagattggcagaatggatggaaaaaacaaaacatgatttaactatatgttgcttacaagaaactcactttacctataaagacatatatggactgaaagtgaaagggaggaaaaagacatttcatgcagatataaagcaaaagtgaacagcagtagtgatacttagataacacagactttgtatcaaaaacaggaaaaaagacaaagaaagtcactacataataataaaggaatcagttcagcaagaggctaaaacaattctaagtatatatgcacccaacaccggaaggctcagattcatgaaacaaatattactagacctaaacaaatattactagacttattactagacctaaagagatagacagcaatacagt

SEQ ID NO: 268195 - DNA, 2058 bp, Homo sapiens
  misc_feature (1592)..(1592): n is a, c, g, or t
gtaaatttaaacagaaaattatttagcagtttccattttcaaatgtcctgcttagaaaaaaaagataattgagtccaggattattaaacatacaggacatcatttttgcaaaccagatgggatggtcatgataaataaatgcttactgctgtatttcactgcttgtctgtgcttctttggctataggctaaaaacatggaatgctctctcttgcctaaggacacaaaattgtgcagtaaacaagggttcaaataaacctttggtctgaacaatttgagcagatgcttatgtttggatttccaaacacctgccaattactttgaagtcaaatagacctcataacttccagtagggttaaatgtagtcaaggtagcattaaaaattaatgagtaagcctggataatatggtgaaactctgtatctacaaagagtacaaaacttagttgggcatggtggcatgcacccacagtaccagctacctgggatgctgaggtgggagggtcgcttgggcctgggaggtcgaggctgcagtaaaccacggtcacgctactgcactccagcctggcatgacagagtgggaccacgtctcaagcaaaacaaaacaaaacaaaacaaactaatgagttaataaatgaggtagagagaaacagattttggaaatgcagataaaaatctttggagtttattttaaagtaatcattctagatgaaagtagtggttcataaacaaagagcatgcaaaccaaaaatgattttaatcaggataaaaagtttttcttttctttttctttttttttaaaaaaaaaaaacctttgaaaatgtggctttcaattatcctcagaattcactataatacaaatactataataatcccatctcttaaagagagaaatctcaaaatgagctcagaaattatatgatcttccacctttaaaagaatcacaaagatataaaaatcctttacaaataaatgctgcttacttggacttgggggaaagaggaatagtgtatgtttctatgaactcagactttagtttcagcttttgcatcctatttaaagtgtaaattgtcacgcttccactattctgagaacatgaatatctctggaaaaatgggcaagtattctttgacaaagttttcaaatatgtgctgctaaaaaggagacactttttactttaacaatcttagcaaataaagattatatatttaccaacaaaacaaactcatttaaaatgcatgaattgcacatacttgatatacatgtatatacatataagtagacatgtgtatgtttgggcatatgcatgtataatatatgcatgtgtacttatgtgtctgttaatatgcacgtatatatttgttataatacatgcatgtttgtatttgttataggacgctataagtaactttttgttgcttttgatttggggagtggggcccaaagctgaggacaaaaagaagctaaatatattcatgttctgtagtgatccagcaacaactggatcaaatattacccaatttttgctaattgacacgatctttggccttgtggaatttgtagtgcttattctgcgaggcagttccttttcttcngtatgagtgtatgactgcacctaaacaggttcattcagagagatagggatgcctccaagagtggcattttattccttctcattggtagcctccttgttgggtatcttaatagaaattttcctgttcagcctgtgctttcctaaggagtgaggaagatagtagcagcaggacacagagagggaatgacagaggagcagtgtgtagtcccctgtttgacagggctgggacaggtgaaatttctttgagcctagtggttacttgggaagttaactaagcttgggtggttttgccagtttcttcctccccacacaggaagattgctccaaaggaaagaaggtcaagccagaacctctagagaattggaaggtgaaaaatgttgagtccagtttgtttcccaaatcagcggactgagaagttggaggcactaaagggaatttgaagaattatctctctcacacactccaca

SEQ ID NO: 268196 - DNA, 352 bp, Homo sapiens
tgctcatttttggaataaccatgtatcatttactaaaggaaaaagtgccccaaatgttgatagaattctctagagaaatgtgtttaggcagtgaaaggattcctggcagtgattgagaaatacagtaatggggaactgcacttgatctcttttgaggttgattctgatgtgtgtagtctttacatcctattaaatttttgaaagataaactgatacaagaatgatttgccaaggccatatgaggttaactgaattcaaatagaaggttctctcaagttattgcattccttagaaaattcattgcgcatatggttaagattgatcaagtattctgtatgcctgattacttccc

SEQ ID NO: 268197 - DNA, 384 bp, Homo sapiens
gaaaaacttttgatgatgtcctgttcgtttgatccctgtggaggaccactgttttcaaacctccagaaaagatgagctttagatacaatataacttattttatctcctcccaacttctctttttcctccagagtctgccttttctaacattgctcacatactgcttgtggttttaggtcttcgagtagcactggaggccaagaaatctccagattctaacctacagacatgtggttgatttttggaagataacttccttctgtctttatctacctcgggaaaatgtattttcaaataccaggcttatgttattgcctcaagcatattatatgtcataagcttcctaaatggatcagtttttgatcaaagatttctgaactctga

SEQ ID NO: 268198 - DNA, 463 bp, Homo sapiens
aaacgtgctttttctcccctagggaagggcattttctcagccacagctaagcaaagagttgctccactctgggttagcagccctagaaggaaatgctgagtcagtcatttgctagctgtgccacctgtggcttggatcccagctgctctgagacagccctgcaccctttatgcaggcagggaggcagggcacaatttataaatacttctgtcttctgagccttcgctttctcctgtgcaaaatcagaatcatgagaatgccagccctacctagattggtttattcagcagatatgtaaagagcacctactgctgcactgggcactatgaatatacagccaaacaaaactgggcacaaaagcaagtaagccagagtccctgcctgaggtccacatcgggaaatgcataggaatgtgctgtgaagattaatgttagttaataaaggcctaaaaaccaaaaaaaat

SEQ ID NO: 268199 - DNA, 436 bp, Homo sapiens
gccagccctgttgacatttttgtattaccatgacttccaaggaaaggagcagtatttccaggcaacttctgctatccctgtcttggaatccagtcaccatgtaaaaaatgccactgccctgagaccacccaccatgctgttaagaagcccaagcaagtgaagtcaccgtatactagaatgaatacagcttggaattctgaacgtgtgatgctggagccaggaccaactgcaaagatcctttggcattgtgccgtcgaggaaactgaggtatgctgttctgaggtaaatttatatgcctcttcagaagtcctggtgggattgtgcaccagctgtctgcagtgagggtcaactcaataatatgtctttacaatccctttttctctgtctctaacttccttcagtgaccccctcactctggctctctgaataaattcct

SEQ ID NO: 268200 - DNA, 424 bp, Homo sapiens
agcaagcgaaaagcataacacatttatttaatataagttttatataacatgggagcctttagaaacgaagaccaaaagccccagaaatgaagacccaaagccccagaaacaaagacccaaagccccataactattcttatgtttaggcttgataaagaatggacagccatatagaactatgattggacaaagggtgtgacctaatggcagtatgactgaggaggaacctcagcaagggctgttggttcagattcttattggtctgtctgtgtagcatgtcttcctcctggatatagggcaggactcctctggaaagagggtctttggggagaaggaagaaggaagagagtgaccttcctaggtttcatggtttactttggtggagataggttctagtttctatgacccactttgtggaagagga

SEQ ID NO: 268201 - DNA, 2267 bp, Homo sapiens
  misc_feature (19)..(19): n is a, c, g, or t
aaagcaggctggtacgccnggaagtaaggattgattgtgaagccctctttttctctccttctatttctctctagagcactcaagactttactgacgaaaactcaggaaatcctctatcacaaagaggtttggcaactaaactaagacattaaaaggaaaataccagatgccactctgcaggctgcaataactactacttactggatacattcaaaccctccagaatcaacagttatcaggtaaccaacaagaaatgcaagccgtcgacaacctcacctctgcgcctgggaacaccagtctgtgcaccagagactacaaaatcacccaggtcctcttcccactgctctacactgtcctgttttttgttggacttatcacaaatggcctggcgatgaggattttctttcaaatccggagtaaatcaaactttattatttttcttaagaacacagtcatttctgatcttctcatgattctgacttttccattcaaaattcttagtgatgccaaactgggaacaggaccactgagaacttttgtgtgtcaagttacctccgtcatattttatttcacaatgtatatcagtatttcattcctgggactgataactatcgatcgctaccagaagaccaccaggccatttaaaacatccaaccccaaaaatctcttgggggctaagattctctctgttgtcatctgggcattcatgttcttactctctttgcctaacatgattctgaccaacaggcagccgagagacaagaatgtgaagaaatgctctttccttaaatcagagttcggtctagtctggcatgaaatagtaaattacatctgtcaagtcattttctggattaatttcttaattgttattgtatgttatacactcattacaaaagaactgtaccggtcatacgtaagaacgaggggtgtaggtaaagtccccaggaaaaaggtgaacgtcaaagttttcattatcattgctgtattctttatttgttttgttcctttccattttgcccgaattccttacaccctgagccaaacccgggatgtctttgactgcactgctgaaaatactctgttctatgtgaaagagagcactctgtggttaacttccttaaatgcatgcctggatccgttcatctattttttcctttgcaagtccttcagaaattccttgataagtatgctgaagtgccccaattctgcaacatctctgtcccaggacaataggaaaaaagaacaggatggtggtgacccaaatgaagagactccaatgtaaacaaattaactaaggaaatatttcaatctctttgtgttcagaactcgttaaagcaaagcgctaagtaaaaatattaactgacgaagaagcaactaagttaataataatgactctaaagaaacagaagattacaaaagcaattttcatttacctttccagtatgaaaagctatcttaaaatatagaaaactaatctaaactgtagctgtattagcagcaaaacaaacgacatccaattgtcatgctgcatgcaaaactacacagaattcatgttttgcagagttttgccaaaatgagtaatcatataatatttactgtaatttttaaaatacattatcgttcacaattttattttttcataatcaactaaggaagaacgatcaattggatataatcttcttaccaaaaatgatagttaaaatgtatatatatcctagtcccctaaccaaatcctgacctattgggatacttataaaaatttaagtaagtgggatacacaaagaataataactattaacttttcattattagcaaaaacctaagggatttaaactaattgaaactgtatttgattggacttaattttttatgtttatttagaagataaagatttaaagaagacctttacaataaagagaagaaatatcgaagtcattaaaataaggagacttacttttatgacattctaatactaaaaaatatagaaatatttccttaattctagagaaactagttttactaattttttacaacttcaataataccatcactgacacttacctttattaattagcttctagaaaatagctgctaattaggttaatgaacattttaccttagtgaaaaaaattaattaaatatgattacaaagttgcacagcataactactgagaggaaagtgattgatctgtttgtaattacttgtttgtattggtgtgtataaaatacaaaatttacattaaactctaaatcattaaaaaaaaaaa

SEQ ID NO: 268202 - DNA, 2258 bp, Homo sapiens
atcacaatcagaagacaggagctgcagaacagaacactttctcatgtccagggtcagattacaagagcactcaagactttactgacgaaaactcaggaaatcctctatcacaaagaggtttggcaactaaactaagacattaaaaggaaaataccagatgccactctgcaggctgcaataactactacttactggatacattcaaaccctccagaatcaacagttatcaggtaaccaacaagaaatgcaagccgtcgacaacctcacctctgcgcctgggaacaccagtctgtgcaccagagactacaaaatcacccaggtcctcttcccactgctctacactgtcctgttttttgttggacttatcacaaatggcctggcgatgaggattttctttcaaatccggagtaaatcaaactttattatttttcttaagaacacagtcatttctgatcttctcatgattctgacttttccattcaaaattcttagtgatgccaaactgggaacaggaccactgagaacttttgtgtgtcaagttacctccgtcatattttatttcacaatgtatatcagtatttcattcctgggactgataactatcgatcgctaccagaagaccaccaggccatttaaaacatccaaccccaaaaatctcttgggggctaagattctctctgttgtcatctgggcattcatgttcttactctctttgcctaacatgattctgaccaacaggcagccgagagacaagaatgtgaagaaatgctctttccttaaatcagagttcggtctagtctggcatgaaatagtaaattacatctgtcaagtcattttctggattaatttcttaattgttattgtatgttatacactcattacaaaagaactgtaccggtcatacgtaagaacgaggggtgtaggtaaagtccccaggaaaaaggtgaacgtcaaagttttcattatcattgctgtattctttatttgttttgttcctttccattttgcccgaattccttacaccctgagccaaacccgggatgtctttgactgcactgctgaaaatactctgttctatgtgaaagagagcactctgtggttaacttccttaaatgcatgcctggatccgttcatctattttttcctttgcaagtccttcagaaattccttgataagtatgctgaagtgccccaattctgcaacatctctgtcccaggacaataggaaaaaagaacaggatggtggtgacccaaatgaagagactccaatgtaaacaaattaactaaggaaatatttcaatctctttgtgttcagaactcgttaaagcaaagcgctaagtaaaaatattaactgacgaagaagcaactaagttaataataatgactctaaagaaacagaagattacaaaagcaattttcatttacctttccagtatgaaaagctatcttaaaatatagaaaactaatctaaactgtagctgtattagcagcaaaacaaacgacatccaattgtcatgctgcatgcaaaactacacagaattcatgttttgcagagttttgccaaaatgagtaatcatataatatttactgtaatttttaaaatacattatcgttcacaattttattttttcataatcaactaaggaagaacgatcaattggatataatcttcttaccaaaaatgatagttaaaatgtatatatatcctagtcccctaaccaaatcctgacctattgggatacttataaaaatttaagtaagtgggatacacaaagaataataactattaacttttcattattagcaaaaacctaagggatttaaactaattgaaactgtatttgattggacttaattttttatgtttatttagaagataaagatttaaagaagacctttacaataaagagaagaaatatcgaagtcattaaaataaggagacttacttttatgacattctaatactaaaaaatatagaaatatttccttaattctagagaaactagttttactaattttttacaacttcaataataccatcactgacacttacctttattaattagcttctagaaaatagctgctaattaggttaatgaacattttaccttagtgaaaaaaattaattaaatatgattacaaagttgcacagcataactactgagaggaaagtgattgatctgtttgtaattacttgtttgtattggtgtgtataaaatacaaaatttacattaaactctaaatcattaaaaaaaaaaa

SEQ ID NO: 268203 - DNA, 2204 bp, Homo sapiens
atcacaatcagaagacaggagctgcagaacagaacactttctcatgtccagggtcagattacaagagcactcaagactttactgacgaaaactcaggaaatcctctatcacaaagaggtttggcaactaaactaagacattaaaaggaaaataccagatgccactctgcaggctgcaataactactacttactggatacattcaaaccctccagaatcaacagttatcaggtaaccaacaagaaatgcaagccgtcgacaacctcacctctgcgcctgggaacaccagtctgtgcaccagagactacaaaatcacccaggtcctcttcccactgctctacactgtcctgttttttgttggacttatcacaaatggcctggcgatgaggattttctttcaaatccggagtaaatcaaactttattatttttcttaagaacacagtcatttctgatcttctcatgattctgacttttccattcaaaattcttagtgatgccaaactgggaacaggaccactgagaacttttgtgtgtcaagttacctccgtcatattttatttcacaatgtatatcagtatttcattcctgggactgataactatcgatcgctaccagaagaccaccaggccatttaaaacatccaaccccatactctctttgcctaacatgattctgaccaacaggcagccgagagacaagaatgtgaagaaatgctctttccttaaatcagagttcggtctagtctggcatgaaatagtaaattacatctgtcaagtcattttctggattaatttcttaattgttattgtatgttatacactcattacaaaagaactgtaccggtcatacgtaagaacgaggggtgtaggtaaagtccccaggaaaaaggtgaacgtcaaagttttcattatcattgctgtattctttatttgttttgttcctttccattttgcccgaattccttacaccctgagccaaacccgggatgtctttgactgcactgctgaaaatactctgttctatgtgaaagagagcactctgtggttaacttccttaaatgcatgcctggatccgttcatctattttttcctttgcaagtccttcagaaattccttgataagtatgctgaagtgccccaattctgcaacatctctgtcccaggacaataggaaaaaagaacaggatggtggtgacccaaatgaagagactccaatgtaaacaaattaactaaggaaatatttcaatctctttgtgttcagaactcgttaaagcaaagcgctaagtaaaaatattaactgacgaagaagcaactaagttaataataatgactctaaagaaacagaagattacaaaagcaattttcatttacctttccagtatgaaaagctatcttaaaatatagaaaactaatctaaactgtagctgtattagcagcaaaacaaacgacatccaattgtcatgctgcatgcaaaactacacagaattcatgttttgcagagttttgccaaaatgagtaatcatataatatttactgtaatttttaaaatacattatcgttcacaattttattttttcataatcaactaaggaagaacgatcaattggatataatcttcttaccaaaaatgatagttaaaatgtatatatatcctagtcccctaaccaaatcctgacctattgggatacttataaaaatttaagtaagtgggatacacaaagaataataactattaacttttcattattagcaaaaacctaagggatttaaactaattgaaactgtatttgattggacttaattttttatgtttatttagaagataaagatttaaagaagacctttacaataaagagaagaaatatcgaagtcattaaaataaggagacttacttttatgacattctaatactaaaaaatatagaaatatttccttaattctagagaaactagttttactaattttttacaacttcaataataccatcactgacacttacctttattaattagcttctagaaaatagctgctaattaggttaatgaacattttaccttagtgaaaaaaattaattaaatatgattacaaagttgcacagcataactactgagaggaaagtgattgatctgtttgtaattacttgtttgtattggtgtgtataaaatacaaaatttacattaaactctaaatcattaaaaaaaaaaa

SEQ ID NO: 268204 - DNA, 429 bp, Homo sapiens
tttgacctaatttgacatactttatttcaagcagataccctttgctaaagctattaaactttaagattacattttgttttaaagggaacttaaaagagcattgatttaaatttgttatccctcagagcgtccatttaaagacttagcatttctcggccaggcatagtggatcacgcctgtaatcccagcactttgggaggccaaggcaggcagatcacttgatgtcaggagttcaagaccagcctggccaacatggtgaaaccctgtctctacttaaaatacaaaaattagctggtgtggtggtatgcaccagtagtcccagctactctggaggctaaggcatgagaatcgcttgaacctgggaggcagaggttgcagtgaaccgaggtcctccaacctgggtgacagagtgagactccgttatattta

SEQ ID NO: 268205 - DNA, 467 bp, Homo sapiens
ttatctcatttcctcactatttctgagaagggcaagacctgccaaggagactgggcctgaaaatagttctgctcctatgacgattccaaagaaagatgtctcacatttcctaatgccacttggctgactgcttgaggggaaaaaattgtcacagtctatgggggtgctaattagcatcaattaaaactcagctagcctgccctggcactgaattacctgcaggacttgctcagtccttgtgaaaatcaaagggaaatccagagacaaagagattctgcggtgataggaatatcaacttactttccccactgaacatttcaaccaacgcttggctagccagtatcctttcattcaggaagtaaaatctctgctggatttgtcaagaggataaaatgctcaaagttactaaggccattacaaactattcccccattaaaaataaataaaagacgtacaatattcttttt

SEQ ID NO: 268206 - DNA, 485 bp, Homo sapiens
acaaagaagcccagaaggtacaactgaggggctctcccaggagacagagggaagaaatctttataataaatggactgtccactttgcctctaccatgattacaagctagaagaaatatataatgaatagaggcaatgcacagctattagagaaacaaaaagaggggtcagggttcaataaaatgtcatcgggagaggtgagcaagaccagaagcaatggatgaggacagaaacacgacaaaaatgggaagtgtgaataataaacattattttaaaaaaactatactccaggtgctatgttatgtgttccaaaatcagcctaatcctcatgacaaccctgcaaggtacccacaggaggctccgagaggtttggtaacttgcccagagtcacacagctaaaaaactgcaaaactccattttgaactcaagtgcagctgattccaaaacatgtacttttagtaacgacaccaaactaaactatttaaa

SEQ ID NO: 268207 - DNA, 211 bp, Homo sapiens
ctctggcagttcagcaagtctcagtgatttgcaggcccctcagtgggctcagagctccagccacagcagtcagggttttctatttcaggattccatggttgctttgccttttcctaagtgctttcaggcagccggcccaaattaacctctttcctcttattcttcacttatggcccaagcaataaataaagtgccttatacactgaggtaa

SEQ ID NO: 268208 - DNA, 382 bp, Homo sapiens
aagatataccatattcatgggttgaggactcaatattgttatgatttataagtccttgttatggactgaattgtggcccctgcctaccaaattcctatgtcgaagccctaacctccaatgtgactttatttggagatgaggcctttaaagaggggaacgttaaatgagattctagggatagagccctcatctgataggactgatgtcctcgtaagatgaagagactcctgagatgtgtgtgcacaggaggaagtccaccacgagaggtacacagtgagaagggggccgtctgcaagccgggaagagaggcctcaccgggagccaaccctgccagcatctcctctagaaccgtgaagaaataaatgtccattgtttaaacccg

SEQ ID NO: 268209 - DNA, 587 bp, Homo sapiens
ttttcttctccctcctcctgaatacctgcatcttcttcctgactgacatggctttaggaaacacagcacattcacaaacatctgaagccaactgcaaggcacccgtcactcagcgagaaaagcagaaaggtgccaattcagatggctgagctacttcgcctgggtcccgacctgtatcaccacagggtcacagaaatggaaccttctccgtcacacctcctgatggcagtcagctgtgacccgctgaatccaggacatcatgcattccagtttcatttgcgagaacatttccaggtccggctgaagcctagtggctccagcagaggtctcaacccctttgggatgctcagtgggagacagaatcaagggccaatgatccatgacctagtcctagtgcccatgtcagtttgtcaaaggccctcagagcagattgtgttttccctggcgggggcttgacttctttgctttaaaaaggattcttaagtatttattgcagtaaaattaaccaccttcaaatttctgccagatcccctggaggtatataccttattaacacaaaacaaatgtgacacttgaaaggcaggaga

SEQ ID NO: 268210 - DNA, 467 bp, Homo sapiens
gcctctgcgcggcgctcgcccgggactgggacgcagagccgcggacggctttggggacgccagggctccggacttccccggcggcgcctcacgggcggcaatcgcccgcgagccttggggcgcggcacccagggcctccccaccgggctccgagggacgcagcggcctcgccaccgcattaggccgaatccggtgccttctagaaatggcctcctgcagctccagagcgcctgcaggatattatcagccaagctagaacacaaggcagcccaccaacccagcacagatttgaacaggcagctgaggagagagcctgggatgccagctctgaagtgttcaccgctagaagtgttcccttgtcaaagaaagaagccatcccttgtcagtagatggtcaggagttcaagaccagcctgggcaacatggtgaaaccccgtctttacaaaaaaatacaaacattagccaggc

SEQ ID NO: 268211 - DNA, 545 bp, Homo sapiens
gagctagcctgacaaagccagcccctaaactcaccaaaaataaatctataatagttgtcttccgtcacacctttgagtcaaggtgtggtatcctgaaagaccttgataaaatacggataaattagccagaaaggacatcatactagctactctataccaagaggagtatagtgaggtgaataagagcaaggactctaaagctggacacacctggcttcaaatcccagctctgtcactttctgctctgtgacctcagccacaatctctctgcttcatttttcttcctcctctgtaaatagagaggtaaaagtagtatcttcatcaggggattgttggtaggggttaaagacttcctagatgtaaagctcttagatcagtgcctggctcactgtaagcacattttcatcatctcataataaatcctgtacccattagcagtcactccccatttctacctccttccaatgcctaacaaccacaaaattactttgtgtctctatggatttgtctatcctggacatataaatggaatcatacaataatgt

SEQ ID NO: 268212 - DNA, 1001 bp, Homo sapiens
ggaatattcgaaaccccgagcttttacaacataaagcgcatggtgtggccgcggcgggtaatggcgctctgggagccctgcccaggcggcctctgctcgccctcctccacttccagctccgagctgggtgtgttgcaagtttcatactcctacatattataagtgacactaatatcagggacaactaagtgctggggaacttcaatgaaaacctggctggtaaagtcaacacccccagacttctctgtgctacatttctttaattaattccggagtggtgtgtggacgggcgtctttgcagttattatacacgtaagtgaattaggccatttgaagctacgaagtcatacccaacattttccattaagaatattatttttttagctactgctggcaacttttagaatttaattatgataattttcctcttttcctcattatcccagatatggctggttgtgagatactttttcactaaatgtgtctttttaatgattttggaattaagcaagtatgccaaatgcgccaagacatttataactttagaaattgctgtatagtatatatttttggaacaccacaggtttagttgggaaaatattttgcagctgagttagaaacttgaaagttaggcttataatcaagatgctgattttcaaccttagcatcggggaaggtaatgatagtttagttggcaaagactttttgcagcaaactgtatttgagacagcagaatccaaggatatctttcaagattcacttatactacattctttttagccccctctctaggggtggagggggtggcttagaaaaaccaaaggtaatctggtttcaattacatgctgtaaaaatagaatttgtggccagaaattaatttggaatattttttatgggggcaacattgtgggttgtatgagtctttcaccaactttattgcttttctttggttctggatctaaaatatgaatgagtaaataaaatacagtttcctttttcaa

SEQ ID NO: 268213 - DNA, 406 bp, Homo sapiens
gcttgacagaaaatggagccgatgttctcagaggtgttacagcagtatttcctaatgagcagccggagcctctctctagcatctcagaaaaccaaatgggaatggaggataagaaagtggaagtaaagacaaaagggaatatttatttgggattaacttgtagttacttgagctgatacacctatactaaaggaacaaaggaaatgatggatcttttaaccatcaggcttattgtgtaaacatcattctctttcattccacggtgggaaaaacaaaccttttcctcaaatttgactttgtatataaaatgtgttaataaaactaaatgtgttttaacaaatgtgttttaataaaaactaacatatttaataaaactaaaaataaatgatcatatttgttcaaaagt

SEQ ID NO: 268214 - DNA, 446 bp, Homo sapiens
ctcagcctgtccctggattccctttcatggggaatgtaaaagctccctatttaagctaacgtgtaggctggtggggctggatgtgagggaggggcaggtggagaaggaaagggcagcatccctcagatctgtgtggagcaggatcggaaggaaaggcacactcgagtcggccaggacccggggaaatgagcgagaatggtcagctctggggcggtatataaaactgggggtgggaatacttccatatactcccaattccacagtgggtgaactgagtaagtttaaaaataagataaagacataacgaggtgaggcaggtaagttcaaaaataaaaatgaaggccaggcactttgggaggttgaggcgggcgaatcacaaggtcaggagctcgagaccatcctggctaacacgctgaaaccctgtctctattaaaattacaaaaaaa

SEQ ID NO: 268215 - DNA, 386 bp, Homo sapiens
acctaataaactttggtcagaccggttgatctcaaaaccctgtctcctgataagatgttatcaatgacaatggtgccaaaacttcattagcaattttaatttcaccttttgcatctccttgaaatgtctgcctttgcacactctccctgaaagaggagggcaagggagccaggatagaaagtgaggtggagaagtgtagagctctggacggacaagcaggagatacgcagcacaaggaagcacactaggtaacacaccaagcaggggaacctgtctttcactacataggcaagatgctacgggaaatgggctctgggtttacacagattatgactcagttctctactgttgtgaagctgtgtttggataaatccctcaacttttct

SEQ ID NO: 268216 - DNA, 390 bp, Homo sapiens
gctgacattcagcgcacatttaaacgagtagatcaactgctccatcttcccccagaagctctgtctgtccctccacaacttggctcatgccatctcttccataagcgccgtgtgctcttctctctcagaaaaaaactatttgtttcttgacagctcagctcaaatatcagcttctctcgaccccaggcacgagcgtgggtcccgaaaccctggtgccctccacagtgtgtgttcagtaaatgactctacgtttatccctgtagctgccagtgttatcaactttggcctatgttttctgaattatttttgaatctttattttgtaatccaatctattagtgacccataacaggccgtgtcatccacaattaaataaatgtgcactctctat

SEQ ID NO: 268217 - DNA, 509 bp, Homo sapiens
tatgtcctgtgcttgtgagaagtatgttgctttatttgatgatatggaaactgttaatgaaggaaggagttaacattggtaactgacaaatagtgaaagaggccaaactaaaaatctctttcttcctgagaaaaagaggaggaattgatttgcttttctcaaaaatgatggcgttctcatttgtttccctaaaacttaaagtagaagaagttatgaaggaatttcaatgtttcttggtgtctcttcaactctgagacttttgtgaaaataatatggagtcccagaagttttaaaatatttatttctttgtgaaatgagataattcctgactaagcaatttgggtggaattaaaaaacaatgagacatggttggaggaactaggtgtgggtatataagactttttatatttgcatcttgttcggtgcatagtttttacatccatgaatttagaaaatcattgcatttaatactgggaaataataaagctgaaaatatgtagcagcaaaag

SEQ ID NO: 268218 - DNA, 458 bp, Homo sapiens
agctcaacatcactgatcattagagaaatacaaatcaaaaccacgatgagataccatctcacgcaagtcagaatagaagttattgaaaagtcaagaaacaatagatgctggtgaggccgtggataaataggaattttttacaccattgggcactgtggctcatgccctgaggctaggagtttgagaccagcctgtgcaacatagcaaggccctgtctctagaaaaagatttaaaaatcagcctgtgtggtacagtagtcctagctgcttgggaagctgaggtgggaggaacgcttgatcccaagaatcaagcaagaatgtaaatgtaaattagttcaaccattgtggaagacaatgtgacaattcctcaaggatcagaaccagaaataccatttgacccagcagtccgattactgggtatatacccaaaggaatataaatcattctgccataaagaca

SEQ ID NO: 268219 - DNA, 301 bp, Homo sapiens
tgaggcctgccttctccccacccctggccttggtgctatgtctgttttggggtgtcccaagcctgagggggcagcttgaagtcatcgaaggagtagggatcctggagccagctgattcagggttgaaatcctggctttgtcacattcctgctgtgtgaccttggtgagttcacctaacctctctgaacccgcagtctcctcttctttaaaatgggacctcagggttgcttgagaattagtaatataaagtaataaagtaaataaagtactaaagtaaataaggagcgggctgctcctgcaa

SEQ ID NO: 268220 - DNA, 599 bp, Homo sapiens
gtgtgatttgacagtgtctgagcaatgagatggaaagggcctgggtctccaacattatggatgtcccatatcagcctgggacttctatgctctgctgtgacataagggagaaatgaactgctctcttgtttagaccactgttgctttgacatttgatatgataggaaaacctatattgtaatacatataactgtttatgaaaattaagtcaaatgcattggagagagtaagagtaagttgctaatactacttttttttttaagtgtggacaaaactaaaaaggtttggggggatgagcagaaaaatttagaatgatcctttacttgggtttgacttctgtcattaaatccttgctccttttttaaataaataaaactagaaatcatgcctaatacatcaatttatttgaagccctaaatcaattggcaatttgataaccccctcagtccccgcacctaagtgaagatttattggattgaatcgaataccacaggggtggactgctaggtttgttagtccccagtcagctacttgggaggctgagatgggagaattgtttgaacctgctgcattccagcctgggcaacagagtgggactc

SEQ ID NO: 268221 - DNA, 600 bp, Homo sapiens
ttgaatctccatggctaatcatatgccaatacctggctctcaggaagggtgggatgttctgtatagcaggactgcatcatgtccagctaaaaactggggttctcaaactaaggaaggaggggaaaatagctagcagaaggcgactagcaaactgccacacctgcaaaaggataattaatggaaggcaaaaatgaaggggggaaaaaataagaagtatggtaattagaaagcatgttagaacatgtggaaaaagggggaaaaaaaagaaacctgaaataaggaggctggtctcgaacttctagcctcaagtgatccgcctgcctcggcctcccaaaatgctgggattacaggcataagccacggcgcccggccaaaaaaaatcaataataggccaggtgcggtggctggccaacatgctgaaaccccatctcttaaaaaatagaagaaaattagcccggtgcagtggcacatgcctgtaatcgtagctgctggggaggctgaggcatgagaatggtggtggggattgcagtgagcctagatcgtgccactgcactccagcttgggcgatacagtgagactctgtctcaggagaaaaaaaaa

SEQ ID NO: 268222 - DNA, 735 bp, Homo sapiens
ttgaatctccatggctaatcatatgccaatacctggctctcaggaagggtgggatgttctgtatagcaggactgcatcatgtccagctaaaaactggggttctcaaactaaggaaggaggggaaaatagctagcagaaggcgactagcaaactgccacacctgcaaaaggataattaatggaaggcaaaaatgaaggggggaaaaaataagaagtatggtaattagaaagcatgttagaacatgtggaaaaagggggaaaaaaaagaaacctgaaataaggaggctgaattaaattcagtgaagtctaataacagcattagaatcactgtagatgagttaaatttaccaaactaaagacaaactctcagatcagactttaaaagacaaaccacaccagggatacagtggtatgtgcctgctggtctcgaacttctagcctcaagtgatccgcctgcctcggcctcccaaaatgctgggattacaggcataagccacggcgcccggccaaaaaaaatcaataataggccaggtgcggtggctggccaacatgctgaaaccccatctcttaaaaaatagaagaaaattagcccggtgcagtggcacatgcctgtaatcgtagctgctggggaggctgaggcatgagaatggtggtggggattgcagtgagcctagatcgtgccactgcactccagcttgggcgatacagtgagactctgtctcaggagaaaaaaaaa

SEQ ID NO: 268223 - DNA, 543 bp, Homo sapiens
acactcaggggttttgtttttttgtttttttaatagacggagtcttgatctgtagcccaggctggagtccagtggcatgatctcggttcactgtaacctctgcctcctgggttcaagcaattctgtgcctcagcctcctgagtagctgggattacaggtgcatgccacccatgcacagccaatttttgtatttttagtagagacggggtttcaccatgttggccaggctggtctcgaacttctagcctcaagtgatccgcctgcctcggcctcccaaaatgctgggattacaggcataagccacggcgcccggccaaaaaaaatcaataataggccaggtgcggtggctggccaacatgctgaaaccccatctcttaaaaaatagaagaaaattagcccggtgcagtggcacatgcctgtaatcgtagctgctggggaggctgaggcatgagaatggtggtggggattgcagtgagcctagatcgtgccactgcactccagcttgggcgatacagtgagactctgtctcaggagaaaaaaaaa

SEQ ID NO: 268224 - DNA, 352 bp, Homo sapiens
cggggtgactctagagtatcccttatccccaacacattgatattctgccctgaaaactaagtaaatgatgctttattaatataacaaaccaatcattgatcattgtctagatggaaacatactgatatgagaaaatcatggaaaatctgagagctaggggccctggaaggaccagtgctgtgaacaacatgagcttaatgaggtcatggtcctaacacaagaggaaagctctgaagtgctggttttaataccctagagccttgctccttctggaattcttctgtccccatcatgaaataaattaggaaacctaggtgtttgtgttgggcgataacatcacggaacctctaga

SEQ ID NO: 268225 - DNA, 515 bp, Homo sapiens
gcggccgcttcgcactgtggctcctgccgaccgccaggcgctgttacagtggatgcgaactaaccgtaagtatgcagcagcagccggaacccacagttcaccttggtgcattcctttatgatgaagacttattgattcattatatgagaaaggaaaaatgagcagaaactactgtatgatgtgcagctcacaccagacagcaactttagggttatctttccagttcagcagtgcaactctatggagtagaattgaaaggagacttttcgccaattgcaggaaatggtcataaaaaaatacctgctcactgacagaataaagagtaatttatccctacttacagagagattgccctacgtgtaacagctgcatacaaaaaagttataaaattatcattggtttaacaaggataagtgaaaaacattaaaattctccaactgaacaaggtgtgtctgtttcattgattggctgactgtcaaatcggaatctgatctgccccattgacaatgccttgg

SEQ ID NO: 268226 - DNA, 678 bp, Homo sapiens
gcggccgcttcgcactgtggctcctgccgaccgccaggcgctgttacagtggatgcgaactaaccgtaagtggtaatagatgagatactcaagttcagagaggtgtggaagtcatttgacagagcagtcgggcccgagtggtttccttatgccaaggcagcacgtcatcctttttcctcaaaaataacagcaacaacattcctgcaccttgcctctgcagcattatatcgtactgcagaaaccagctcaactatgcaaaactaccaccaggactggccgacaccaggagggattccagagaccacactgcagggagcatacagaaagaaaattaagagatcagatgcagcagcagccggaacccacagttcaccttggtgcattcctttatgatgaagacttattgattcattatatgagaaaggaaaaatgagcagaaactactgtatgatgtgcagctcacaccagacagcaactttagggttatctttccagttcagcagtgcaactctatggagtagaattgaaaggagacttttcgccaattgcaggaaatggtcataaaaaaatacctgctcactgacagaataaaggtaccttttaacttagtcaaatctcttttgcattgttttccaatctgttcttggttgccattgtatagaaacagattgaattctc

SEQ ID NO: 268227 - DNA, 318 bp, Homo sapiens
acagaaagaaaattaagagatcaggtcagttagcattcactgatgagcaatgggaaagtctcagcttatggtgtcacaccagaatgcacctgatgtgcattctgataatgcaacacttagatcaaaaagcaagaggagaagtgaatgtctgacatcattgactgaggatagttcatgaagagacaaataaaagtaaatatgttaaatttactgtgagtgcttcttaaagtttctcctattcttcctaaccccacagtctctttagcctaatcagccctaaatttggttttaaacagtttttcatgtagtgcttcagcc

SEQ ID NO: 268228 - DNA, 316 bp, Homo sapiens
atcccagaattactttaaactaaatttacagcttgaggattcctggaccactccactaatgtgagacagggctgaaaatccatgcaagagttcacttgtggttaccagttttaagggacaactttttaaagattcgatttcccccttctctgctcagcatgaaatctcacccttagaaagttccctacatgtggattgtgattaggaaagtgcatttacttagttcagagttttagtttaatgtgcttgtctcctatttggattctcatggatctggaccttgacttatataccccatgccccttgaggccctcta

SEQ ID NO: 268229 - DNA, 333 bp, Homo sapiens
taagattagattaagattagattaagattaatcttaagattagattaagattaattttaagattagaaaaagattaataattagattagattagaaaaagattagaaaaagaaagattaaagattacgattagattaagattagaaaaagaaattcacgcaagtcatgatgcatgattgggtaaataaaaatattctattgaggccgggcacagtgactcatgcctgtaatcccagcactttgggaggctgaggcgaggcggatggatcatgaggtcaggaggtcgagaccagcctggccaacatagtgaaaccccgtctctactaaaaatac

SEQ ID NO: 268230 - DNA, 141 bp, Homo sapiens
taacatctggttccagccttccctttgggattccttcatgcttcctggtccctgaggggttcctgttttcaaaggcaggtgacagaatcatccaggcactgggacttagcggcccaggctctggcccagccgacccactga

SEQ ID NO: 268231 - DNA, 585 bp, Homo sapiens
gtaagattcatacctgcttcaccagtgattttcaaaggaggcaaatcctatttgaagctaaagtcacataaagagatttggaatgaggaaacaaattatagcagcctgcaagttgtagaatgaagaaatgcaaatgtaaagtactgaactttgtcatggatggatttaccaaagagaattactctgcataacatgaataatggagttcagaaggaagcccatatcccagacttcctcggttgtgctgttttactgaggttgggtggagtcaacacatcatggataaagaagtccctaaaggcagtcccagggagcccgcactgaacatcaagaagtcagacaaatccttcaaacgcaagaagcccaccgaaaatgtgctgatctttttaatcaacagacaactgggcaggcacagaagtgacatcgacctgtcaagatgggtgtggatgctgtcataaagcaactctagggtggacatggccttggacaaaaagtcatgtggcttacatgctgaagcctgcccatatttttgagaaattaaatataattagaacaataaactcctcccatgtttgagtcattaaa

SEQ ID NO: 268232 - DNA, 550 bp, Homo sapiens
aagcatgcctggagtgttaaagagataagagaaagctcttgtggctggaaaattgaagaagagggtaagtcataggaactaagatcaaaaagatcatagaagtgctagattttataggaccttgtgggcttttactttgagtaaaatggaaagacattggagaggtttaagcagaagaataacattgtttaacttatgtcttaatagggtaacttatgtctgtggagtgttacatggagaatgaatgaagggcacaaggagagcagttaagagactactaaaatattctagaggagaaaagagaatggcttggatctgttggtagcagtagaaatgataaaaatggatcacattctgaatctatttgaaaaatagtacccagaggagttagatactgggagtgagagaaaaaggcaagttaaggataattccaaggatttgggcatgaagttgcctttttaaaaatagataaagaactctttttgaggaaaaaaaagaagtaaagaaggggaacagaaaatgatggagtcagtataaaactgaacttgaa

SEQ ID NO: 268233 - DNA, 462 bp, Homo sapiens
gctaccactcctccatatgcacaggcaataagtcaggtattccttccagtaattggggctacaatgtaaacttagcaaagcttccagattaacacatttgtaaaaacaagacttcctaataacctgtcatctgctttcccaatttctctataattttagtctgtagatgacattcttgtggagttttaggtgactgtcatattgcagccatctggcagcctgtttaagaagcacaactctgacattataagatgatgaatcagtggttaaaaacaaaacaaaaggtggttgatgtttattgtaatacaatcttataaaatctgagagtattaactaattagtatttataaaagcatcttcaaactgaaatatccattaccattgaaaatcattttaactagataaaatatttccccaagttgtttttttgtgacacaaaataaaatagtggacattcaatga

SEQ ID NO: 268234 - DNA, 439 bp, Homo sapiens
ttggtagaaatagaaattcagttaaaattttaacagaatttaattacacaaataatacacaaatgtaatctttaaaaaattcattctacacaaaggcaaatttccttgatgccaacccaaacccccactctctcttgtggaggcacctgctattgtcagtgtggtgtataagtttccaggtctttccctcttttacacatatagatatcctagaaacatgtagcttttatcttttcataatatacattttttattttttgcaaccaacaccttgtttgccttttatcttttttaaaaccataaaatgttacacaattacattgtttgcaatttttttaaactaataataaagtgtggagcattttccatgtaactgtggttcacttcctcgtttactgctgtagaacattccatagcatggggttcgttctgccataat

SEQ ID NO: 268235 - DNA, 677 bp, Homo sapiens
  misc_feature (672)..(674): n is a, c, g, or t
gtctgtgggaattatttcctcccattggtattagattatatttttccaagtcaactcttcctggctgcccttcaaggttctaaagattttctactgttgtagtgtaactagtaagaggcaaaaccatgagaatcagagagaacttcccttcatgatgctatgcaatccccaggagaagcacgttgaaagctgaaaagaagactgactgagatgtgttggcgggcttctcaagatccctatcgatggcagaatgctgacatgagttgcccatagtccaggtttcccaatgtagcagatgactctagcggctccagcttcagcatcatcttaagttcaagtgaaaaggaaaagagaatctctttttcttcaaacaatttcaaactaaaatcttgagtctgacttttcctggccagaattaagcttgtacttatccctgaaaaatcatcaatgctacagtgatgaatttaccaattgaggcagaatttaggtcacatgacgctccaaagcctcttcaaaaccgcatgactcagagtgaggcagaagtatttgggatatttgcaacaggagaagggtaaatgaatggagagtgccaaaacaacttatgtcaattatacaattataaatacaaccaaaataaagtatggaaatcagtattttcacctatcttaaaannnaaa

SEQ ID NO: 268236 - DNA, 748 bp, Homo sapiens
  misc_feature (743)..(745): n is a, c, g, or t
gtctgtgggaattatttcctcccattggtattagattatatttttccaagtcaactcttcctggctgcccttcaaggttctaaagattttctactgttgtagtgtaactagtaagaggcaaaaccatgagaatcagaggtaagtgcttatcaaaggaatagaaccaagaggacaaattctacttaaacaatgccatccttaaatgagagagaacttcccttcatgatgctatgcaatccccaggagaagcacgttgaaagctgaaaagaagactgactgagatgtgttggcgggcttctcaagatccctatcgatggcagaatgctgacatgagttgcccatagtccaggtttcccaatgtagcagatgactctagcggctccagcttcagcatcatcttaagttcaagtgaaaaggaaaagagaatctctttttcttcaaacaatttcaaactaaaatcttgagtctgacttttcctggccagaattaagcttgtacttatccctgaaaaatcatcaatgctacagtgatgaatttaccaattgaggcagaatttaggtcacatgacgctccaaagcctcttcaaaaccgcatgactcagagtgaggcagaagtatttgggatatttgcaacaggagaagggtaaatgaatggagagtgccaaaacaacttatgtcaattatacaattataaatacaaccaaaataaagtatggaaatcagtattttcacctatcttaaaannnaaa

SEQ ID NO: 268237 - DNA, 456 bp, Homo sapiens
gaggtttatagcaagaacgcgaggttggtttactcattattcaatgtaatcatcatcattcaatgtaattcaccatattaacaataaaggagaaaaaccagacaattatttcaatagttgcagaaaaacatttgacaaaattcaacacccactaataataaaaattctcagtaaattaggaacatacaataatttcgtcaacctgataaagggcatctataaaaaacctacagctaacttcatactcaaaggtgaaatagtgaacacttacctcctaagactaccaacaaggcaaggatgtctactcttgccacttctcttcaacattgttctgatacccacaataacgtgggtgaatctcaaaattattatgttaactgaaagaagacagacataaaaagagtttatagtatatgattccattaatacaaaatacagactaatctaaaatgacaa

SEQ ID NO: 268238 - DNA, 393 bp, Homo sapiens
taagagctagggtgggcaaccccactgggcactgtggccaggcctgccatgtctccttgttcagctgccacattctgatggggagggcgggaggtgtcgagagaccacaatctaagttcttattacctgattttatttcacctccactgagtgctcactctcctctcacctaacggatttactctcatctgcaggtggtttaagtgtgaaggtttactgaagatttaaagagtgttatcacagttgggatgatttaaactaacagtacacgttgcattttaagaaaataattaatcctcagaggagatatgggttatggagccatgacaaattttcagcattacttcccttacttgttgtttccaaataaaagatttttgattccccattgat

SEQ ID NO: 268239 - DNA, 717 bp, Homo sapiens
aagcagctggtacggtctgggaatgtacggatctggatccctgcctgccttccacctacctgactcagacctgccaggaatgccctgccccagggccctgagtcctgctgggtgagccattgctctgcctgagccatgccagtgcatgtgtgactggccctggctggggtcagcaagggcatgtcgacagaaagaagcatgccaacaggctccttgggtgctgacggccaggtagggtttggtgcaggagaaggcgggcagctagcaggaggggacggtcaccaggcttcagaagcccactgagcagtgcccagagtcttagctgtgcttgctggacatttttccttgccccagcttctcttccttgtgtgtgtggtgtagtagagcctgtctgagctgtggagtcagacacacatagccaggtgctgcttcacctgtaagcctcttcgtttcatctgtaaaatgggggcattccaccccttctcagaggcaggtggcaagggccgggtgggaatgtaaacaggtgccaaggagcatgcctttcctccccttttctgtgggagacacaccctcaaaggagcagggcagggtaaggtggccgcaagctgacctttgccctggttcttggcagaggaccttcctggggactgggcagccttcgcacttaatctcagcccatccctgttccccctcccagtcagctttcagcgcagccaa

SEQ ID NO: 268240 - DNA, 970 bp, Homo sapiens
tggaggctgggttgtgaatcggccgaggctcccctgggcccacccctctttccccactcctgcctgagctgttaggttggcccaggaaggctggttgccctgtgggcagacacaccccttcagtgcctgtggttgtattgtccttggcattgaagcatggccagtggtagtgggatcaaggggaggaggtgggtgctagaaatccttggggcagttggggcatggactgcctgggtcctggagagtgcctctagaactgggctcccatgtgggctctggttccgcctggatccctgcctgccttccacctacctgactcagacctgccaggaatgccctgccccagggccctgagtcctgctgggtgagccattgctctgcctgagccatgccagtgcatgtgtgactggccctggctggggtcagcaagggcatgtcgacagaaagaagcatgccaacaggctccttgggtgctgacggccaggtagggtttggtgcaggagaaggcgggcagctagcaggaggggacggtcaccaggcttcagaagcccactgagcagtgcccagagtcttagctgtgcttgctggacatttttccttgccccagcttctcttccttgtgtgtgtggtgtagtagagcctgtctgagctgtggagtcagacacacatagccaggtgctgcttcacctgtaagcctcttcgtttcatctgtaaaatgggggcattccaccccttctcagaggcaggtggcaagggccgggtgggaatgtaaacaggtgccaaggagcatgcctttcctccccttttctgtgggagacacaccctcaaaggagcagggcagggtaaggtggccgcaagctgacctttgccctggttcttggcagaggaccttcctggggactgggcagccttcgcacttaatctcagcccatccctgttccccctcccagtcagctttcagcgcagccaa

SEQ ID NO: 268241 - DNA, 398 bp, Homo sapiens
cacaagtgagggtgtccacagccctggctgggccccaagctgcaggctaagcttctgcctgaagcctagggacttgcctctgtcccctccctttctccaaaaccactcagtcagcacattcctgaagcagccaagtggaccccctccccctgggcccacccctctttccccactcctgcctgagctgttaggttggcccaggaaggctggttgccctgtgggcagacacaccccttcagtgcctgtggttgtattgtccttggcattgaagcatggccagtggtagtgggatcaaggggaggaggtgggtgctagaaatccttggggcagttggggcatggactgcctgggtcctggagagtgcctctagaactgggctcccatgtgggctctggttc

SEQ ID NO: 268242 - DNA, 646 bp, Homo sapiens
aaaaaggccctgagtggaactgtattatccagaagtaagctagtttttacatggaggattatgcagtttacataattgaaatgtgtttttctctgtgtgctgttctcatattccaatattcttttttcctctcatggtcatgatgttttcttttgagatataattcacataccataaaattgatgcttttaaactatacaattcgttagctgggtgtggcagcacacacctgtagtcccagctactcaggaggctgaagtgagaggatcacttgaactgggaggcagaggttgcagtgaaccgagattgcgccgctgcactccatcctaggcgacagggtgagcccctgtctcaaaaataaataaataaacaattcagtggtttttagtctattcacaaagttacacaaccatcaccactatctaattccagaacattttagttaccccaaaaagaaacctcatactcattagcattctctcccctttttctcttccatctagcttctggcaaccagtaatctactttctgtctccatggatttgcctattctagacatttcgtacaaatggagttgtagtattgtggcgttttgtgtctgccttctttcatttagcacagtgttttcaaggttcatccacattgt

SEQ ID NO: 268243 - DNA, 505 bp, Homo sapiens
tgaggtgaagagcaattgggtttctcagagtctgagctggtaatggagacagggtgggttagaaccatattaatcatgtgaaagtatttagtgttaccattctctgcacttgttccttgcttgctaacttttgcttttgctggttaatgttttcttccttgaaatgtaatttttctgagtttattactgaaataactcttgaaatcttgtctttggtacagtgtctttcctgacactgcattacacacagacacaggtgtttttccctatattctacttccaaagaaaccctgtggtgaggagagtaacatatttgtacattttataaagttaacaatttacttactgtgtgttgacatttagtcataataaagatggcttttaagttctcctctagttctaacactgatgatacattcgtaacatcatggcatgtaaatgttctttacccagactgtacactgctcagattaaccaatgcattgggctgtgacctctaaaactg

SEQ ID NO: 268244 - DNA, 360 bp, Homo sapiens
cagcctggagtgcagtggtacgatctctgctcattgcagccttgacctccctgttcaagcaattctcctgcctcaacttcctgagtagctgggattacagtcacccaccactatgcccagctaattttttgtattgttagtagagacggggtttcaccatgttggccaggctggtctcgaactcctgacctcgtgattcgtccacctcggcctcccaaaatgctgggattacaggcgtgagccatcatgcccagctacatctctgtttctttttgcaaaaataaatacatatatttgtttttggactaatgtaaacatactgttaactgaaatagtaaatggactgtactgttaaagaga

SEQ ID NO: 268245 - DNA, 418 bp, Homo sapiens
gtaggtaaagatgagttcatgccaacgtaggaggcttgaagatgtttgccagaagacatacttcacaattccagtcgttaagtagcaacatagatgccaagtaagaagaaatagtcactgctgttaaagaactccagtctacctacattctggtgagaaaagaatgaatgagccagagtcactgtcctcagagaactcacatcctagccaacagaagcttctgtagaagaataacttcaggtctgtagatcatgatacaacagtttcttacagtatgtagtagtgaaactctagacaccaaagttataatgagatgtgattagaaaaaaatgtaatttgcatgaattgtttttaagatcaaatatttttaaaaagaacagatttccagttaatgaaataaatacatttggatatgaca

SEQ ID NO: 268246 - DNA, 537 bp, Homo sapiens
gagagtataaaggagaaaagaaactaactttgaacaattattcatttatctaacaaaatttattaagtgctttttgtgttccaggcactgtgctatgccctgtgaattcagggatataatatgttttcagattagatatcaaagtattgtttaaatacaggcatacctcattttattgtgtttcgctttattgcagtaaaaagtagtgtgtgttctgactgctccgttgagtggccgtttctctgtctgtctccctttcctcgggcctccttatttcctgcaacacagtgatattgaaattaagccaattaattaccctacagtggcctctaagtgttcaaatgaaaggaggagtcatacatctcttactttaaattaaaagctagaaacaattaagcttattgaggaagggggcatgtcaaaagctgagacaggccgaaagctaagcctcttgcatcagttagccaagttgtgaatgcaaaggaaaagttcttgaaggaaattagaagtattactccagtgaacacatgaatgatt

SEQ ID NO: 268247 - DNA, 1874 bp, Homo sapiens
  misc_feature (919)..(919): n is a, c, g, or t
aagttatgctctgtacttactcaaaaaacgtacaatctaattggcaataaacaaaggaatgaccatgtggacctccctaagttagtgagccctggtttgcaaataagtgttgcttacatcctaacacaggtttgcctccgccccacccacacttccttcaggtgccaagtcctgcagcttggcagccccagaggcctgctggccccagcttttcacctccatggcctccttacacaggtgaccgcactggactggccggccatgggggacacacttttgttcttccatcagttggggttgattaattgaaagacaatgacttctcgactgtgcttgtttatcttcttaagtcctcttccccgccggctcccgtccccctgctttctaacctcaggaaacattttcatgatcaattcattctcttgtatcctactttggtaacatgactttttttttttctaccgcttttcagctgagttgtggagtaggcagaactttattatctgacctgggaagctaaccactatgtgatactgttttctgaggaaaatatgttagattccacatggtaacttgacaaacaaacttgaaacatggctgtttgaaagctgagatggtttgtgagaaacattgtgaggcagtgtggcgtgattaattgtcagataacaccagtaagtacctttgagtttaggggaagaagtgattagtggctagagaggtctgagaaggttccactgaggcaatgaaactagctagttcttaaaagtagggtggcatatagaagagaaaacagagtttctaggcatgggagaagggcaaatatgtgattctcagctgaggctgtatcttttaaaatgttttgaaaatacctttgtacagaaagcaacactggccacacctaagaaagcgatgcttccantccccctccttgccctcacttctctttcccctctcacacagtccctttctctcaaagccattccccatgtctccacctcaatggcctgtggtagtttagagcaggggtccccaacccctgggccatggaccactaccgtggcctgttaggaacctggcccacagccagaggtaagtgacaggcgagctctgcctcctttgatgtaagcagtggcattagattctcataggagcacaaaccctactgtgaactgcacatgtgagggatctaggttgcatgctccttatgagaatctaaatataaatgtgatgcacttgattcatccagaaaccatcccctccatccccatccatggaaaaattgtctttcatgaaaccagtccctggtgccagaaaggttagggaccactggcttacaggagaaatgaatggttgagatatcatggatgggagtagcctgcacttgtaaatagtgtagaggcagaaaaaaaggttgggaaaaccttgaactagatagagatcaggagaagccagcattgtttatgttactcttctgcttaaaggccaattttagatatttccttggggattttagttatttcctgtgcctttgcaggttctaaaatgattcttttcagacttagagtcaaagtagctaaagaatattaaattctggctggttgcagtggctcacgcctgtaatcccagcactacgggaggccgaggtgggcagatcacgaggtcaagagatcgagaccatctggcaaacatggtgaaaccctgtctctactaaaaatacaaaaaattagctggatgtgctggtacgtgcctgtagtcccagctacttgggaggctgaggcaggaggattgcttgaatccgagaggcagaggttgtagtgagctgagattccatgccactgcactccagcctggcgacagagtgagattctgtctca

SEQ ID NO: 268248 - DNA, 298 bp, Homo sapiens
cctctaggactagataatgactaaatgaaatcatattcaacagtaggggaggattcaaaaataattaactcctggcaatgatttcttgaatatgacagcaaaagcacaaaaaaacaaagcaaaaatagaaaaatggcactacaacaaacttaaaaacttatgtgcatcaaatagcaccatcaacaaagtgatgaaaaggcaacatataaataggagaaaacatctgcaaatcacatatctgataaggggttaatatccagaataaataaggaactcctacaactcaacaaaaaaaaaa

SEQ ID NO: 268249 - DNA, 628 bp, Homo sapiens
aggagctctaggcaagagacacttaggagatttgcttttctgagtggtaaaaatgtttgaagcaactctaaatagctttgaaatgttagtaatagtcttactgtcttcatgacatttaattagccttctgtaagagtttgtttagcaaaggtaaaccataagcctagccctctatatgcatgtgtggttgaatgtgtgtgtgtttttatataaagcaattttcagttaaatcttccacttaatgaatgtagtagaggaagatgtctcatgtcattttggtgaccttgacctatgtctattcatgtatttattcctgctgtgttccaattcatatcttcaggataaatgctgtatctttattgtctttctccaatttttttttgaaggaaccaaagaccctatttaaatgcaataaggttgtaatactggtgcccacttcaccctggtcatgttttttctgaacaaatatttcatagcttttcctcatcaaattccagtcccactgctaagatacccatctatgacacagtctttgggaaaacccaaggaaaggataacttaaaaatgatttgtattggaatcatgacacttcagagctatgaataaataaatataacatagtctttaa

SEQ ID NO: 268250 - DNA, 506 bp, Homo sapiens
tcagcagacagcccttgttagatggcagaggtcgccagatgttcctgaggaactggcatcaggacttctgggacgtaaccacttcagtttccaatcactgacttccctgaacctggtatcttcagatctgggttgaagctgaaggctcagttggggaatcaggaaaacaagggaatcggagccagcccaagccaactgacaataactttcttttagtgactgcattagtttggggtaatgctgtaacaggcagcatttcaaaaacggatccaaatttgggttgaaaataactcacctgggtctccaatcagacctaacagagccagaaagaggcctgtacacggggactgggcagaagatctaatgccgtttaagactcctcccttgagaccagagaaaagaaactgcagacacagcctgaatgatacaaaagtgcatcattgatgaaaaaacaaagcctactgttccttcaaggtgtgggaataaacaagctctgctaaaacaaa

SEQ ID NO: 268251 - DNA, 310 bp, Homo sapiens
agttacctgcctctgaagggcaaggccctagagagatgcttaactaggcaggtatgatgattgcagtgcccttagggcaagagcaaaggcagagattgtcaacacataggcaataaaggctgcctactcaaactctgggcactcttacttggcttgttaagttgtatcctacgtgcatgagtgttttggctcaggagaaaaactctagtgctattagaaaatgtctctttcacatagacagtatcaaaacggctttattagtcttaaataatgaaaaagtagcagaaacagatttagaatttaatctctt

SEQ ID NO: 268252 - DNA, 363 bp, Homo sapiens
tggtgaaccattttcacctcaggccatttaggggaagagccccaaacatttttgaccataaaactctcttctctcagagctttgctgagactggagttgaaactggactaaaagtttaaaccttgctttcttttagttccattctgttttggttgctttgatgtcaaaacaaaacaaaacagtccatactgtttaagtcatggtgatgacttatttccctataccaggaacctgatgaggagagcgaaatgaagaaggggtcctctagaatctgggggtctttggaaatgagtgagttaactggtgggtaaataagtcttaatcttggctgtggaagtctgtagctgggaaggtacattagtt

SEQ ID NO: 268253 - DNA, 659 bp, Homo sapiens
gcggccgccggcgacctgggcctacttccacttccggggtcaccagggaagagacgggaaggaaaagaaatagcggttggctgagaggcaagccaatccagctagggctgcgtcgactccaaggaggcggtcctaaggaagtactggccccgccatttaaaggcccctccctccgcgtgtgggaatgggattcccgcaggttgcaccgcaggaagcaagacaaaaccagggagctcagaagagtcactgccctgatcccttccgtgccggcagctgcgaggacacaggcccctttgtatcctgcggtgcggaggtggagcagaggagagggtgccccggctggccccctccctcgccccgcagcactgcccctcctttcacagcaacccacggcctcccccgcgcttgacccagctggcgagctgccccttatacctggatccgcccctcgggtcgcagctccccaggcccgatcaccgagcggtgcctaggaactgggagcgtaacttggctcggctcagaactttgcccgtgagccaaagaacactgaactcatctacctgctgcttgacatctcatctgcataccaagctatttggtggacgtccacaagcgcccccgcccccacgtagacccagttgggtccccgttccgtcggt

SEQ ID NO: 268254 - DNA, 793 bp, Homo sapiens
gcggccgccggcgacctgggcctacttccacttccggggtcaccagggaagagacgggaaggaaaagaaatagcggttggctgagaggcaagccaatccagctagggctgcgtcgactccaaggaggcggtcctaaggaagtactggccccgccatttaaaggcccctccctccgcgtgtgggaatgggattcccgcaggttgcaccgcaggaagcaaggcaggtggactctgcaccaatgcctgcagactaagggcagactctcaggattgctctgggtgtattcctaggctttgtattcctgggagatggagggcagccaccgagccacatatagtctttttcccttgcagacaaaaccagggagctcagaagagtcactgccctgatcccttccgtgccggcagctgcgaggacacaggcccctttgtatcctgcggtgcggaggtggagcagaggagagggtgccccggctggccccctccctcgccccgcagcactgcccctcctttcacagcaacccacggcctcccccgcgcttgacccagctggcgagctgccccttatacctggatccgcccctcgggtcgcagctccccaggcccgatcaccgagcggtgcctaggaactgggagcgtaacttggctcggctcagaactttgcccgtgagccaaagaacactgaactcatctacctgctgcttgacatctcatctgcataccaagctatttggtggacgtccacaagcgcccccgcccccacgtagacccagttgggtccccgttccgtcggt

SEQ ID NO: 268255 - DNA, 418 bp, Homo sapiens
cacaaacaggggcttttagtccctaaagacctggggaccatgggcatgtggctggctcagggctggctgccccaccctcctgagccagagttcaggtgtggccaccaaaggtggctgtcaggactgtggtattcctgcacaaaggacagcccaaggaggggagccaccacagggtgactgcaatgacagaaacccaccgctctagctcctagctgttccctgcagctgccccatctcacaatttgcacattcatccgtggctcattgccgccgccttcctttcttccctttccagtaacttctctcaggctcctgtcccccgacacctccctcttcgggattacttccttcagagaccccaggactgtgcagggtcatcattgagaaagcaaagccttccctggcagtcagaactcct

SEQ ID NO: 268256 - DNA, 276 bp, Homo sapiens
catgaatgctcttcccccaaatggaaggcactgcaagaattgacagattctggcattattggagtagcagcagtagaaacataaagagatatttgtttaggtatggcataattaaaatgaacaggggaaggggggccaggaaaaaaaacccagaaacacttagatgctgtccttggtcctgaaccagcagtacctggtgaatggctatcttacttatcccaagaatctggtaacttctcttctagggcttagactttcatttttacccttttacca

SEQ ID NO: 268257 - DNA, 448 bp, Homo sapiens
gaaaattagtaaaattaaaaactaaaaaccacacatagttttgctagaattaaatgaaaaaaaaagttattagccctgttcttatctgaatacatgatacagtagttattttttggagtgtaaatcctgtcggtatatattgagcacatatattgtgttgaagattactagaaggaaaagtcatcaaaaagcaacaatttaccccaggaaaaggggagggaaggcatgctgatatgagttgcctcatgggacagtgatagccattccctgccttcccatctccatggtacagcagatcttatatcatgttaacttagtaatatttccaagagagtagaaaaatgagtaaggaaatggggaatctgatattattctctctcatctccagagcaacattggtgctgttgtaaagatgtactgtagaaaagtattcttcacccagcatgac

SEQ ID NO: 268258 - DNA, 1320 bp, Homo sapiens
ctgcaggggctgaggcagaagaatcgctcgaacccgagaggcggaggttgcagtgagccgagatcacgccactgcactccagtctggggcagagcaaaactgtttcaaaagaaataataattttattctcttgtctatccattcggtagacaagtgtagcgttactgcctcctttttgcaaataataaggatttaggagacagacattatcagttcgagagcccacaggcactggactagagacacagaacctacactcagacccaaacaggaaacggaggagtcaaatcaacttgcatttcccctaccctcaccgccccctttccttcccaaggcaatagtgtaggggacgcccagtaagttacggaaaaggcggagacagaggtttcgttcccgcccctccaattcagtctccaaaaggtccgcataattgatatataaggggcttcagtgtgtagcaaagttgcaaaagttaagagttgttgtttgtcttcgatcatgtctggtagaggcaaaggtggtaaaggtttaggaaagggaggcgccaagcgccatcgcaaagtgctgcgtgacaacatacagggcatcacgaagcccgccatccgtcgcttggcccgacgcggcggcgtgaaacgcatttcgggcctcatttatgaggagacccgcggtgttcttaaggtgttcctggagaatgtgatacgggacgccgtaacctacacggagcacgccaagcgtaagacagtcactgcaatggatgttgtctacgcgctcaagcgccagggacgcactctgtacggctttggtggctgagcctcaccccggctttttatttaacagctcacccataaaaggcccttttcagggccacctccttcgtcacacgaagggctgtaactgatgacgacttgggtttcgttttgtaaatttgggattctaactgagttaaaccgagccgtttttagcgatcttcctaagatggcggatgtgctaaggagaaagggaaggcgaaacattagaaacttgttcaggtatttcgatcgcaaacattcacaggaaaagatggtggaaatggtttgggaataccagcagccttttatgacgtatgtgatgtgttttattcccacgtttctgaaatttactcctatgttaggtggctgggacttaactacactagcattacatgtttagtttttgagatggagttgctcttgtccaggctgtagtgcaatgacgcaatctcggctcaccgcaaccaccccctcccgggtttaagcggttctcctgactcaacctcccgagtaactggggttacagcatgcg

SEQ ID NO: 268259 - DNA, 206 bp, Homo sapiens
tgtagagatggggtctccctgtgttgcccaggctggtcttgaactactgactttaagtgatcctcctgccttggcctcctgaagtgctaggattactagcatgggccactgggccttgccttgaggtttagatttcctcattttactattttgtttttaattattgggtgaaacgttttactaaattaaaaaaaattattaccact

SEQ ID NO: 268260 - DNA, 332 bp, Homo sapiens
cgataagctctccctccctaaacccttaaatacccttagtctgtaagagagagtgctcctgacagcaatcggccagaagcccctctcaggtttattctccaaaataaacctgtcttggactgttgagccacttttcgtgtttctttcttctttcttcaactcttacactcaggagttcaagaccagcctggccaacatgcaaaaccccatctctacaaaaaaaaatacaaaaaattagccaggcatagtgatgcacgtctgtatcctcagctacttggaaagctgaagctggaggattgcttgagccagagaaggtgaggctgcagtgagcc

SEQ ID NO: 268261 - DNA, 368 bp, Homo sapiens
ccttgctatgtaattgacgcataaccagtcagccttaccggtggcattgcccaggctccagtatttctcctctggctgcttgcctctggcccagtgttccctcagtcactctcttagcctttcatagaatcccactgccccaaagaagagctgcttacagagccctggggtaatcctctaattttgaatgggcctgtgtagcttacaaagcacttgtcaaaagacaaaattataacaaacttcattatagatctaattggcttttatttgtgattcatgaatctgggcagcctccattctacaaaatagaatgagagctcccactgggcagtggtagaacagcgggttttttaaggtgagatcaagga

SEQ ID NO: 268262 - DNA, 433 bp, Homo sapiens
aaagaacacatgtcacctataaagacacatatagaccaaaaataaagggatggaaaaagatatctatgcaaatggaaaccaaaaagagcaggagtagctatacttatattagacaaaatagattttgagacaaaaactgtaaaaaggacaaagaaggtcattatgtagtgataaaggagtaaatttagcaagaggatataacaatagtaaatatatacgcacccaacactggagcacccagatatataaagcaaatattattagagctaaagagagagatcaacctcaatataataatagctgcagacttcaacaccccacttttagcactggaaagatcatccagacaaaagcgagaaagaaacatcagagttaatctttactatagaacaatgtatctaattgatatttctagaacatttcgtccaatggc

SEQ ID NO: 268263 - DNA, 520 bp, Homo sapiens
acttgcagctatgactcaactggtccttcactgccaaacatacctggggttggatcattggcctgacgtttgcaaattgaggaaccttagggcaaatcaatgaacttctgaactgccttcgtcttcagttatatggggatttccccacttttgaggtacttgtaaggattatatgagatgaagagatgagacaaggtatataaaagtcctagcacagagcgtgtcatataatatggcttcacaagtaccctcatctcctttccagtcgttttttgtttttgtttttgtttttttgagaccatctcactctgttgcccaggctggagtgcctcttcatttttatttctttattctttcaaagctcttaccaccacctgaagtcatccagcctgggcgacagaatgagactccatctcaaaaaaaaaaaagaaaccaaggatatagaataaaacaagagtgtagatttgggcattgaggccttcaaattggattgttctcaatgtccagaagaaaaaaaaaa

SEQ ID NO: 268264 - DNA, 380 bp, Homo sapiens
  misc_feature (296)..(296): n is a, c, g, or t
aaaaagatacttacacacttatgtttatagcagcataatacacaattgtaaaaatatgaaaccagcccaaatgcccatcaatcaacagtggataaagaaattgtggtatatatacaacatagaatactactcagccattaaaaaggaagaagataatggcatttgcagcaacctggatggaattggagaccactattctaagtgaagtaactcaggaatggaaaaccaaacaacgtgtgttctcactaataagtgggagctaagctatgaggatgcaagggcataggaatgacacntaagcttcccaaaaactagaatagatttttactgaatagtggtatatctgatggtatatgtttcttaaaggtccaaatgtaata

SEQ ID NO: 268265 - DNA, 402 bp, Homo sapiens
attgaattgtatacttgaaatttgctgagagtaggttctaactgttctcaccacatacacacacacaaagttgactatgtgaggtgacggatgcgttaactaacttgattgtggtaatcgtttcagtatatatgtaaagcaaatcatcatgtggtgtactttaaatatatacagttttattattcaattatgcctcaataaagctggaaaaaataattggtcacatgcaacgaaaatatagataagttttcatttttcttttccaaataagagaactcacaaaattctagtattttaaagctgaaagcgtttaaaaaggacatttaaactcattattttacaaataaatgtactgaagcccggggaggttagctgacgtgcctggaggtgtcaccctaggcc

SEQ ID NO: 268266 - DNA, 480 bp, Homo sapiens
gagattgcctcttttccaggataggaattaatcatggagaattttataaatctctttgtggcctttacgcgtgccacggccacatcaaaacttagttatttctagtagcaactgacgattgggagctcttaccttttggagtcccttctatcccattgaaagtgtgcgggtggtggtataaaaatgtttcagctgctctgcgcttcagccccacccataatgacatctgctccacaacaataagaccgaggattatattatctccaaagtaaccatcggcctatttttatgcctactttggttattgaaggtgggcttttggatgatttactgtgtccatgaaattctcaacttgagcggggcctccattgggaagacgtttctaatcctggctgagtttacgcctgtcactgagttattcatgcaccctgccctttcaatagatactattcctataaaatgaaatttagaagtttgtat

SEQ ID NO: 268267 - DNA, 360 bp, Homo sapiens
cttagaatgatgagggatttggagtgatagttgggtcctgatatggtttggctccctttccccatccaaatctcatctcgaattttaatccccatcaccccatgtgttgagggcaaggcctggtgggaggtgattgactcgtggggctggttttcccctggctgctcttgtgatagtgagttctcatgagatttgatagttttatgaggggctcttctccctttgctcactgtctctcacctgcgccatgtatgacatgcctttgcttctctctcaccttcctccattattgtaagtttcctgaagcctcccagtcatgcagaactgtgagtcaattaaacctctttcctttataaatta

SEQ ID NO: 268268 - DNA, 367 bp, Homo sapiens
agtgggttctctctggccactccctctacggccagttctgttttctccccatttttggaaacccaaattcttgatgtttctgttattcacattgccattaagaattatgggctttgcactgtgtttttaatttgttgtgtaagggttttacacaaacacagctagatgcctagaaaagacaatgtatatgggcatgcaggctgtgcactgcacaactccagagggcttcattcatgaccaggatgtgagtggcgccctggaatcatgcaatgtggttaccggtattgccagagaggaaatgatgtcttacatgaccccatatccccgggaaaaggccagccatgctaataaagatttgctaactaac

SEQ ID NO: 268269 - DNA, 788 bp, Homo sapiens
agatatgccaaagagaagccatgaagtgcatcttttaaattaaaagcctacctattctcccagagggcatgcattctatggagacagagctgaatgtgtgccatcagaagaccaaaatcaagcgacattttaaaaagaaaacagactcttctgggaaaaatggtgactccacaaagtaagaagccaccaagacttgtaggacattccttcatcttctcctggatggggcaacccagccatggatatatgcctccaatcagcataaatgcccattgcttgataaagtcaacacacgtgtaagatggtatgtagatcttctgggctcctggccttagactcttgcccttgtgtttaccaactcgattgtaaatcctttgagggcagaaaccatattttagatttcttcatatcctttcccttcctccaggtcactaacacttcatgtactcaacaaaggtcaacacctttgagaggagtgacaggagacactcccacagtgctgaactatgtcctgcccttgctcaacatggtgggactctgcctcccaatccaaagaccccgaaaactgccaccaatcctgtccttttcccccaaatgaagctagaagtaagaatggaaagagatctaaacaccatccagcccaatcttgtcatttcacaagcatggaaactgaggccacagaaaagaattgacttaaaatcaagatcatgcatcccattagaggaagctctaactctagaatcagataatatgactctagttcaatgtccataagactctattgcaca

SEQ ID NO: 268270 - DNA, 539 bp, Homo sapiens
tcatatgctgaggttgctaagatctatggcaagaatgaatcttctatctgtgaaactgtgaagaaggaaaatgaaatttatgctagttctgctgcatatatagggttcagtattatctgcagtttcagcctacctattctcccagagggcatgcattctatggagacagagctgaatgtgtgccatcagaagaccaaaatcaagcgacattttaaaaagaaaacagactcttctgggaaaaatggtgactccacaaagtaagaagccaccaagacttgtaggacattccttcatcttctcctggatggggcaacccagccatggatatatgcctccaatcagcataaatgcccattgcttgataaagtcaacacacgtgtaagatggaaattctgtttcttgaagggaactcctcagagaaaaggaccacaagcaaattgctgctgctacaaaatgataccataatgagaatggaaataatcctggattctctgctcatttcgacaagtaaaataaggcacatatttttcaatggataa

SEQ ID NO: 268271 - DNA, 502 bp, Homo sapiens
agatatgccaaagagaagccatgaagtgcatcttttaaattaaaagcctacctattctcccagagggcatgcattctatggagacagagctgaatgtgtgccatcagaagaccaaaatcaagcgacattttaaaaagaaaacagactcttctgggaaaaatggtgactccacaaagtaagaagccaccaagacttgtaggacattccttcatcttctcctggatggggcaacccagccatggatatatgcctccaatcagcataaatgcccattgcttgataaagtcaacacacgtgtaagatgacatattgcaggtatctgtcacatcaagcaaggtttgaagaagaaacaactggagaattttacttatgtggatgaaaaagcaaacagaagttagtccagcatggaagtcacatgctttgggattgtagcattgtgttctcctgtaggaggtgatccattgtcatttatcggaatccatcttcactcaaaaggaacagg

SEQ ID NO: 268272 - DNA, 351 bp, Homo sapiens
ctagcagactaacacagctggcaagtcagaagcctcagactccaagaccctgactgcagtgctatcacacctctgtcagcagagttggctaatgaatcttggaaaaatcagaggtcttctcacaaaataaggatcctgtgaaggagagtaatcaaggaaaagttgcaatctcttcagacctctatcatcaaaaaggaggcccagtgcattattggcaccgagaagttctctgtaggggtgatcataagggaccttcaaatgtttgaggaaacatcatcagtagataatgtagccctcagacaactgcactgtttctctgcagtaaagctacccttggtcactcgggagctt

SEQ ID NO: 268273 - DNA, 1116 bp, Homo sapiens
cgagaggaggaaccaccattggagaagttacaagttgatgattgacccggctctgaaaaaggggcatcataaactgtaccgctacgatgggcagcatttcagcctggcgatgtccagcaaccgcccggtggaaattgtcgaagatccccgggtcgtcgggatctggaccaaaaacaaggagctggagctgtcggtgcccaaattcaagatcgatgagttctacgtgggcccggtgcctccgaagcaggtgacatttgccaagctgaatgataacatccgtgaaaacttcctgagggacatgtgcaagaagtatggggaggtggaggaggtggagattttgtacaaccccaagaccaagaagcacctgggcatcgccaaggtggtctttgccacggtccggggagccaaggatgccgttcagcacttgcacagcacttccgtcatgggcaacattatccacgtggagctggacaccaaaggggaaacccgaatgcggttctatgaactgttggtcactggccgatacaccccccagaccctcccagtgggcgagctggacgctgtctctccaatcgtgaatgagaccctgcagctgtcagatgccctgaagcgcctcaaggatggaggcctgtctgcaggctgtggctccggctcctcctctgtcacccccaatagcggtgggacacccttctcccaggacacagcttattccagctgccgcctggacacacccaactcctatggacagggcaccccgctcacaccgcgcctgggcacccctttctcacaggactccagctactccagccgccagcccacaccctcatacctcttcagccaggaccctgcagtgaccttcaaggcccggcgccacgagagcaagttcacggacgcctacaaccgccgccacgaacatcattatgtacacaattctcccgcggtcactgcggtggccggggccacagccgctttccggggttcctcggacctcccgttcggagcagtcggcggcactgggggcagcagcggtcccccgttcaaggctcaaccacaggattcagccacatttgcccacactccaccacccgcccaagcaacccctgctcctggattcaa

SEQ ID NO: 268274 - DNA, 919 bp, Homo sapiens
  misc_feature (919)..(919): n is a, c, g, or t
cgagaggaggaaccaccattggagaagttacaagttgatgattgacccggctctgaaaaaggggcatcataaactgtaccgctacgatgggcagcatttcagcctggcgatgtccagcaaccgcccggtggaaattgtcgaagatccccgggtcgtcgggatctggaccaaaaacaaggagctggagctgtcggtgcccaaattcaagatcgatgagttctacgtgggcccggtgcctccgaagcaggtgacatttgccaagctgaatgataacatccgtgaaaacttcctgagggacatgtgcaagaagtatggggaggtggaggaggtggagattttgtacaaccccaagaccaagaagcacctgggcatcgccaaggtggtctttgccacggtccggggagccaaggatgccgttcagcacttgcacagcacttccgtcatgggcaacattatccacgtggagctggacaccaaaggggaaacccgaatgcggttctatgaactgttggtcactggccgatacaccccccagaccctcccagtgggcgagctggacgctgtctctccaatcgtgaatgagaccctgcagctgtcagatgccctgaagcgcctcaaggatggaggcctgtctgcaggctgtggctccggctcctcctctgtcacccccaatagcggtgggacacccttctcccaggacacagcttattccagctgccgcctggacacacccaactcctatggacagggcaccccgctcacaccgcgcctgggcacccctttctcacaggactccagctactccagccgccagcccacaccctcatacctcttcagccaggaccctgcagtgaccttcaaggcccggcgccacgagagcaagttcacggacgcagacgcgctaatggacgagctcgan

SEQ ID NO: 268275 - DNA, 918 bp, Homo sapiens
cgagaggaggaaccaccattggagaagttacaagttgatgattgacccggctctgaaaaaggggcatcataaactgtaccgctacgatgggcagcatttcagcctggcgatgtccagcaaccgcccggtggaaattgtcgaagatccccgggtcgtcgggatctggaccaaaaacaaggagctggagctgtcggtgcccaaattcaagatcgatgagttctacgtgggcccggtgcctccgaagcaggtgacatttgccaagctgaatgataacatccgtgaaaacttcctgagggacatgtgcaagaagtatggggaggtggaggaggtggagattttgtacaaccccaagaccaagaagcacctgggcatcgccaaggtggtctttgccacggtccggggagccaaggatgccgttcagcacttgcacagcacttccgtcatgggcaacattatccacgtggagctggacaccaaaggggaaacccgaatgcggttctatgaactgttggtcactggccgatacaccccccagaccctcccagtgggcgagctggacgctgtctctccaatcgtgaatgagaccctgcaggactccagctactccagccgccagcccacaccctcatacctcttcagccaggaccctgcagtgaccttcaaggcccggcgccacgagagcaagttcacggacgcctacaaccgccgccacgaacatcattatgtacacaattctcccgcggtcactgcggtggccggggccacagccgctttccggggttcctcggacctcccgttcggagcagtcggcggcactgggggcagcagcggtcccccgttcaaggctcaaccacaggattcagccacatttgcccacactccaccacccgcccaagcaacccctgctcctggattcaa

SEQ ID NO: 268276 - DNA, 666 bp, Homo sapiens
  misc_feature (36)..(36): n is a, c, g, or t
  misc_feature (38)..(38): n is a, c, g, or t
  misc_feature (118)..(118): n is a, c, g, or t
atttgccctcgggccaagattcgccacgagggagangnactgcatctcgaggcgcggagagagcgaaggagttaattattccaaattattagcaaaaaatattcccaaattgtgggangggaagcaaatattcatccaccaatgaagaagctctataaattttacgtaagataacccaaatgacaaaaaatgtgacacagtttaaaaccacattgcttgaaataaaagaggctttagaaaacagaaagaaaaggaacagatttctcagcagaaggttttcagttcagaaggcacagggattgtattcaatggtgtgtggtttattgacagaggttctttttgagaaatgtgtccctgggcaatttcatcattgtgcaagcatcaagggtgaattttcacaaacctacaaggaataccctactacacacagggtatgtggattagcgcagggttcccagacaactaacctgtacagcgtgttactgcactgaacactgcaggaaatggaaacaccatgattttacagatgaagacttgcttggttgtgcaggctggagtgcagtgtcatctattaattttatagcataaatagtctgctaaaatagtcatatatgataatcttgagatattaaattgaaaaaaataactaatttgaaaatgaaccca

SEQ ID NO: 268277 - DNA, 389 bp, Homo sapiens
attatttgaattaattatcacttgtcttacatcaattttggatgtctgaaattctccagtcattttctatttcgtttgttaatttagttttaatcatggaagaatagtaggtaaaataaaagatccaaaaagttctcagttctgtaaacattaaaaataaagatagtttctatacatgaaactaaatttttttttttttttttttttgagacagccctgggtgacagagcaaaactctgtctcaaaaaaagaaagaaagtaagtaagtaacaattggtcaataagtattgaaacattgtttctcatacagtaagtgttccagagttatttaggttgcagtgagtggacatcgtgcccccctgggcgacagagcaaaactctatctcaaa

SEQ ID NO: 268278 - DNA, 222 bp, Homo sapiens
cagctagctgccgccataaatgtcacatgatgaggtgttgcaagttcatggtaaactgataaactgcctttgtgcctgttcctaactgataaactatctagcggcaaagttaactcccttaagcccctctcatctcacataaacccctcactttgtaagctcagggctacctcttctgattgctgtggaccagcccggtaggttaataaacttacttgcctg

SEQ ID NO: 268279 - DNA, 561 bp, Homo sapiens
ctggcaacagatggtgctggtctacttcacagcaattctgctccatcctggtgccctcataatcctcctatagggaacaagctcagctgtgtgtgctcccagctcaagttctctcttcagtgaatacaaccatgctcagcaattgctcccaggacatagacactatacccatcagaatagctgcatttggaggaacttttataatagcatcagttttgtgctagtccaaaccagctctcttccacaaattctggggactgggctttagtcttggttaccagtttggacacccatttcctcaagataatttttgaaatagactttattttttagagcagttttaagttcatagcaaaatcaagcagaaagtagagagttcccatctagtggtatacagaatagtttactgctcccagaatctttctatgtgctgcctattctttctccctccccactatctgctgatctttttatctctttatagttctgcctttcctagaatgttgtgaaattgcaattatacagtatttagcttttttcgactggctgccttcacttaac

SEQ ID NO: 268280 - DNA, 409 bp, Homo sapiens
ggtgaaggttgcagtgagcagagatcgcaccactgcactccagcctgggcaacagagtgagactcgtctcaaaagaaaaacaaattttggtacatccatccatgcaacagaatagtaacaactaccaatacacccatgactgaatctccaaaacattatgctgagtgaaagaagccagacatcaggagatgtccagcatgattccattcatatgaaactccagagcaagcaaaaccaacctatacagacaatgcagattagtggatgtctggggctggagagggaggtggaaattgactgggaagagagagaaggaatgctttggggtgatggaaatgtggccatccagtccaccagccggtgcactccagcctgggtgacaaagggagactctgtctcaaaaaaaaaa

SEQ ID NO: 268281 - DNA, 491 bp, Homo sapiens
gagaacagattctccctcatagcccttcgaaggatccaagcccatgataccttaattttggacttctactctccagagctgtgagaggatacatttcggttattttcagccacccagtttacggactttgttatggcagccttgggaagcaaatgcactcagtacatgttaatttgtatcttacctactttgtacttgcaaggtgtctctgggtctctggtgtacaccacggcctgcccttgagcatgctggggtgctcagcacgggggtagccctgcagcctgactctctgtagacagatcaggatcggtctaacatggaattatgaagtggagccagggtcagctttgggccacgcctgccttctgtgccggccttggattatgttcaaattcatctcatgctaccccagcagaaaagagtgtcttcaataaattcactcaaaaggaggtaccagtgaagaaattgtccctcccaagtgaatgagtcac

SEQ ID NO: 268282 - DNA, 273 bp, Homo sapiens
cacctctccatacctttccctttctgaagtgtcttttctctttctcttagccttttaagattatttcttgagatcccattaagtgttaacttctttcatggaacattttgtgactgtgtgttcatttatttgtttgaattatttcagcatctcaccaactctggtttgctccatgtgtgtgaaattgtgcactccaattgcatgtgaccttgtattttccatttgaaagctagtcttgtttccccaattaggtttcgtcttttcctaaaaaca

SEQ ID NO: 268283 - DNA, 530 bp, Homo sapiens
cttttttgtcaaagtcggctgtatcaggatttgtcatcttatgcatactgattaggtataacatgattgcttggtgggaacttggatttcttgcccccctgtcccactgacaaagaaccagtaaggagcctactgtggtgggggagtgggagaggacatgcagaagtggtggcagagtgggaactgccagctcctggtattgtttttgacactcagatgctctcctgattcaaagtggactgtgatccttttgtgtttgcgtggagcagggactacctggagcggggatggttttgactcatctttaaatgtttcaaattcctaagccttatattgctaagccttttagtcatggaagtgaagataaccagcctccctcagactgggcaccacatgttggattgattgattgattgattcatttaatcaaaatatctttattgagcacctatttgcatatccaacatgtgcacaatagagacaaagtccctgccctcgtgatctgatatgtctaatgggtgaagatagac

SEQ ID NO: 268284 - DNA, 293 bp, Homo sapiens
gaaaaactcctgtgaatatggcctctcctgaacatttctacaacatgaatggcagcttcccaatacagattccccatcctcttaagtgtgaaaacacaggaatcagcacaacattttctcaatctgattcatacaaatgtgtatttttcccctggtgtctggactgtcttgggttataccatgaatgcctacagaagtttcaaatactcactgaccctgctcatatagcctaaccaaagtgaactaatgctgacccaaataaagtgtagcaataaatttcaaactggattaaa

SEQ ID NO: 268285 - DNA, 838 bp, Homo sapiens
cttgtgaccatgaagagaaggacaccgatggacactgtgagacacagctcacatccaaagggaactatgctgaaaaacggaccctggtgccatccttcgagcttccctgataacgtctgccgttaagaagagcgacttctaggttcctgccatctacagcatggacaattccaactcatcctatggactgacagttacagcatggcttgtggccgcctgaccgcgcggagcatggtgcaccaggagcgaagccctgccgtgttggtcacaggacctgtagcagagacaagttcgttgaaaaggacgtgtagtcacagctttaatagtgcttgcttatgaatttgaaagtagagcaacaagtcgaatgaggtagcgttaggcaataggccccttggtttcattccaaagagtctatcaaaagcaagttatcttccagttctgggccagaccaagtagaggtcaaaagtccaaggccttatttgggttctgtattgggttttcagccaagaataaaaagctggccctttatgggcctcagaggcaatagccttttctctctgttcaccctatattcattctcagggcttagcacatcagcaagtttctaataagagctcagtaaatacatgctgaataaaataaatgctgaaaatgcttttatttaactgtagaatacgttatctagatttttaaaaattctgttataatagcttgtctaatccagtgtcttcaaagcagaaactttgaggcaaatcacaagactggatgcccaatgccaacattttaatggggagctcaataaagttctcaaaactcatcacctgagctacagaaaaaa

SEQ ID NO: 268286 - DNA, 420 bp, Homo sapiens
ggttcaatcttttcctttggaaaatctatacgtggtgttgtggcctttcaccatgagagacataatttccagctgtttctttttgtgatgttagcaaccattgatactaattgcttaggtttgttaatttattggggattgctaaatggtggtattctgtcattttttcttcattttatgctttattaatgctacaaagagacagttcccttcatttactagtgaagagacacttccctccacttactagtgggctacttagtggtacagtggaaaggcaggatcagtgtttgacccccgtctctactaaaaacacaaaaaattagccttgcgtggtgcgtgcgcctgtagtcccagctactccggaggctgaggcaggagaagcgcttgaacctgggaggcggaggttacagtgagcca

SEQ ID NO: 268287 - DNA, 684 bp, Homo sapiens
gaggcttaaagatgaacaaatagcctgctattatctgaaaagcatttctgaaaatattgctttgagcaggatgatagacttgttatagggaagattccattcattgaaagcttacttaaaaatatttccctagttatatttttatttttattaatagttttttaaatgacatttatttctgggttttcacacatgtgctttacatgttcttgttttcctttacaattgaacatacactctatcagccagaggccagtgagcatttgatgggggccaaaaaaaaaaaaaaaacgagttttggcatagctaatacttttcatctttgactcatccatattaagtttgagtcttgggcttattattaatttgagcactttcatttttttctattttccactcgttataaaattacaacaaattttttttttttttttgagacagactcaatttgttgcgcaggctggagggcggtggcataatcttggctcactgcaacctctgcttcccagtttcaagcgattctcatgcctcagctacttggtaggccgaggcaggagaatcgcttaaacccgtgaggtggaggttgcagtgagcagagatcacgcaactgcactccagcttgggcaacagagtgagacttaatcttgaaaaataaataaatgaaaaataaaattcttgtatttt

SEQ ID NO: 268288 - DNA, 402 bp, Homo sapiens
tgtgtccatctttggtgaaaatgtttggtcagattcaaaatggtgtgtcaccaaggcaaccagcacttatttattcaatacaaacttattgaggtcctgctctgtgtaaggttctatactgtctattctctgtgtgtgggagagtattcacattataccctcacaaatttgaagtctgatgataattattaccaagtattttgcacttcttgtgtaccagacactgtgctaagcatttcatggacaataacttttccttctcatagcagccctgttaagtaggtagcattccctttttacccacatgtgtcatgataaatacaaaaccctagttctgtcatggagcagctgctcatcttatccaggttctgaacccagctaagccccagtgcttgagaaggt

SEQ ID NO: 268289 - DNA, 963 bp, Homo sapiens
ttactcacatttacaggtttattgaaaaggatattacaaaggatgtgtagatgaataacagagggaagaggtgcacagggtgggtctgggaggaggggtgcagaccttccatgccttccccagctgttctgccctccaggaacctctgcacatccagctctccaaacccagtccttttgggtttttatggaagcttcattatgtaggcatgattgattaaatcgctggctattgatgatcaactcaaccttcagcctctctcttttcctggaggttgggggtaaggctgaaagtcccaactctctaatcctgccttggtcattccagtggccagcctccatcctgaggcgatctaggggtccccagatccagtcatctcatgaatacacaaaaatcactcttatgactctggaaatcccaagagctttagaagatttttttttgccaggattcaggatgatgaccaggatgatatagacttcacaacatcacagttgttgaggaccctgccaggctccagggagacttgtttccctgggtccgctgtgactccaggcaggactcaggtgggtggctctcggtggcagtgcccctgcttcatactttccttccctcccctatggagtccccatgaaagccagagagtggtggcagcttcaaagacagaggttatttgtggctgcctgttacagtgaacaatgtgagtgatgagtaaccatcgtgaagtcagacttgggtgggtttcacaaagctccttggatgagctgagctctgaggttcctcccagcaataaaacgctatctctacctgctgtttatgagctgtgggaccaaagacaacaagaagaaagtagctgtttgttgctgttaaaactcaaggaggtaacaatggaatcattgccttctgttttttttttatgttcagagccagtttctttggaaataaacactcatttttatcaga

SEQ ID NO: 268290 - DNA, 575 bp, Homo sapiens
aagcatacaaacctcatcaaataaaacggaggaacaagtccactctggcttctgagaactccaggaactcctggaagaaggtgcttcatctctgcagtgcttggaaccctggctgacaaggaaaacgagaatgctgagtgtaacaatgaccccaggaattcaagccaaggagcccaagaggggccagatggcgccttcattcctggtgccagaactgtggcgtttctctgaatcaagtggctttcattttcatggtctccagatggctgctgcatccccaggtgtcatggaggagggagtgaggctgaaaggcagagaatctaaaatattcctggaaatggagagtcctgacatgatggccccatgatgaaaagaacccaggttcctgagtcacgacgtggacatgaggcaccaaggagaaaacacgtgaaccttaataagtttggggtgagagagaaataaaccttaagtatgttaagcttctgtcatttcaaggtaatacagtgtggaaggcagaaaaatgacccactctcccctgatatccattaaagatgtccaaatcctcaaaaaaagaa

SEQ ID NO: 268291 - DNA, 610 bp, Homo sapiens
aagcatacaaacctcatcaaataaaacggaggaacaagtccactctggcttctgagaactccaggaactcctggaagaaggtgcttcatctctgcagtgcttggaaccctggctgacaaggaaaacgagaatgctgagtgtaacaatgaccccaggaattcaagccaaggagcccaagaggggccagatggcgccttcattcctggtgccagaactgtggcgtttctctgaatgtaagactttcacgcagactctaaaatattatcaccaagtggctttcattttcatggtctccagatggctgctgcatccccaggtgtcatggaggagggagtgaggctgaaaggcagagaatctaaaatattcctggaaatggagagtcctgacatgatggccccatgatgaaaagaacccaggttcctgagtcacgacgtggacatgaggcaccaaggagaaaacacgtgaaccttaataagtttggggtgagagagaaataaaccttaagtatgttaagcttctgtcatttcaaggtaatacagtgtggaaggcagaaaaatgacccactctcccctgatatccattaaagatgtccaaatcctcaaaaaaagaa

SEQ ID NO: 268292 - DNA, 654 bp, Homo sapiens
cagtgaagaaatatatatgagatactccagccaaaaatgcacacaagtcaaatcaaaatgaaaagactcagaaccatcatcaacaccaagatcaaaagggcaagaatccttcaagaaacaggaaaaaactgctaaaacaccgaaaggacctagttctgtagaagatgttagagcagaaatgcaagcaaatatagaaaaaggtgattcttttcccagagaggaagcaaagttcatcaattatgtgaagaattgcttctggatgactgaccaggaggctattcccgatctctggcagtggaggaagtctctttaagaaaatcatttaaacaatttgttaaaaattttccatcttatttcattcctgtaacaggtgatatctggctgtcctttttgtaatgcagagtgataaatttccctatcgtgtttgataaatgttgtccaggtttcattgccaagaatgtgttgtccaaaatgcctgtttagtttttaaagatggagcttcaccctttgcttggtcttaagtatgaatggaatgttatgacaggacatagtaatagcagtggtcagacatggaaatgatggggagacaaaaatatacatgtgaaataaaactcagtattttaataaagtagcacagtttctattgacttaata

SEQ ID NO: 268293 - DNA, 433 bp, Homo sapiens
aaatgtttccagatgaaaacttgaagatatgtaggaatgaagaagggaaaatatgcaagtgtggatcaataataatgataatgtcttctaggatataagaatatatatatataatcaaaactcgtgacaataatgtgtaagtttgaagggaggagtgaaggtttgaaatgttctgaagccttgcattgtccaggaaatggtaaagcactactttattttcaactataatgtgacaaggatacagtctgtagtaaaaaaacatagttaacaagacatagaggggaaaaaatggaataattttaaaataaagaaatcaagaaaggattttttaaaagtacagagaacagatgagataaatagaaaataggataacttcagcatgtctattattatgtgaaatgttaaagactaagcactacattaaaaaaaggaa

SEQ ID NO: 268294 - DNA, 580 bp, Homo sapiens
aggcatgcagtgtgtaataagcacatcagggtaaatggggtatccatttcctcaagcgtttatcctttgtgttacaatccaattatattcttttagttattttaaaatgtacagttattattgactttagctacttgttgtactatcaaatactagtttttattcattcttactatttatttgtacccattaaccatccccactcccccaccacctccccactatccttcccaacctctggtagccattcttctgttctctatctccatgattccaattgttttaattttcagctcccacaaatgagtgaggacatgcgatgtttgtctttctgtgcctggcttatttcacttaacataatgacctccagttccaactgtgttgttgcaaatgacaaaatctcttttttatggctgaatagtactccattgtgtatatgtatcatattttctttatccattcatctgttgatggattggctgttgtaatcttgaccctttaaaaaaaagtttatttctggcacttagatggtagagaagtaactgggaccttggaagaatatagcaatgggattctcaat

SEQ ID NO: 268295 - DNA, 382 bp, Homo sapiens
tagaaacttgaggagttatctttacctgccccttcctgttactcacttatataattagtttctaagtttccatcttcccagggacccttgaatttttcctttcctctgtattttcccaatacatccaagtgcaggtccttattatttctcacctagattattacagctgtttcctacctactctgattccctcaacccctaaaccccttgccagttctaacatgtgttttccctactttcatcctacttgctgccaccatagtattcatcttcaaccacaaatgaccatgccagtgccctactgaaaatccttcagtgattttccattaacacaacatgcactgttttcctcctttccctccccctcagttataagccatct

SEQ ID NO: 268296 - DNA, 377 bp, Homo sapiens
aggcgagccctccatttatcaaggcgcctaacagttagaaatggtgtcaggctatctataactctgctaggatgtgagagaaaatagcaaatgacttaaagtactaaatggaactatgagggctctgtgtggtggctcatacctataatcccagcactttgggaggctgaggtgggcagatcacttgaggccaggagttcaagaccagcctggacaacatggcgaaacaccatctctatgaaaaatacaaaaattagctggatgtgatggtgcatgcctgtaatcccagctacccaggaggctgaggcacaagaatcacttgagcctgtgaggcggaggttgcagtgagcagagatggcgccactgcactccagcct

SEQ ID NO: 268297 - DNA, 443 bp, Homo sapiens
gacacggggcggggtttggggccccctaacgtccccctggggtcaaaggtgacagaaaaggcagaagctggggctttctggaggatttaaccacagaggggtgggcttcacaggaggtggctgccacggcggggccgggtgcccgtgccccatcctgaggccgtgcatacgcgggtgccccttcgcctccctcccctccgccagagctgcctgtggccagacacacggtggagggaagtgcacgcgaaacagacacagcggcttcaaatagatgccgcccctgcccgcgctttgcagctagtccctgcaaaccttgatgatggggctgggcgcggtggctcacgcctggaatctcagcgaggccaaggagagtggatcacctgaggtcgggagttccagaccagcctggccaacatggtgaaactccatctctcctaaaaaaa

SEQ ID NO: 268298 - DNA, 477 bp, Homo sapiens
cctgttgtccacctcctcaatatctaggtgggacccctacaatatcttgattttttaatgttgacaattgtggtcagctgaaaaatccccccccccccacccccaccgccctaaaagaaaaacagcccgtgaaggtgaccttatttggaaatagagtctctgcagatatgatcaagttgaaggtctcaagatgagatctttcaggactagtcataggcccgaaatccaatgggaagtgtccatatgtaagagggagatggagggaggttacactaagatgaagtgaagatggaggtggagacgggagtgatgtgggcgtgagccaaggaactggaggctggaagaggcagtgagggctcgtcccctaattccccggagggagctcagccttgccgaccccttgatttcggcccagggatactgatctcagacttttggcctccaggactgggagagcataaatgtctttcttttaag

SEQ ID NO: 268299 - DNA, 610 bp, Homo sapiens
tcagatgggaaagaagtcttttaattggatgttgtagtgatgtctgttttgaacagaactcaaaacattttgtctttaaaatatactggctcttggtgaaaagagtaatttcaaaataaggctttaaaaggaagcaaaagttttaaacaaaaggcaacataatttaccaggcaggttaataacttacattatttgtcatgagattagttttttaaaaggtaatttacaaaagtgtaaagcactcaagtccataggaggcacttgatacatgtagatccactcaacatacacctattttagtattaacagataaagatacttaaaaactgccaaagtgaaattaataaatgtttaaatatgtacctagaaatattaaaaaatggtaagctttccaatgatgttacactgtagtcttttaaatggtttagtcacaaacagaaaagtgtatttgtgatgtttagacaataatagctaatcgtgaggatcagtgaaattgtttacttttatacaccactgtggagttggtaccaccattctacaaagcagtttgactgtatcaagaatgtttgtttttaccctttgacccagtaattgtattaaagttgattct

SEQ ID NO: 268300 - DNA, 544 bp, Homo sapiens
ccagatcagcctgtgagaatgagggctccataagggtggctgccgttctacccccacccaaaccagagtaagccatccctggtttgggtgggggcagaacggcaactaccctcagggaagcttcaatcttcatggctcttagtaggtgctcaataaatatttgttgaatctgcaatatctactcagtttgcacactgtgtagtcagtagcagacacctattcatctctgcaacctacttctaccattttctcttcatccagaacctcaaaagtcacacaactgtagagccaaaagagacctatgagagcatatgaggaacagagaagtcctaagcactttgatgtatttaggcatttcactgtggcacctttccaatcttgaaataagtatctgttttcttctgataaatgataaatatctgggccccttttgattggtgggggttttagtgatatgcagtgttagaaacactcatggctagactcaactggcaaggccaggcagatgaggcagctcagccaatcagtggtgtatcagtagtta

SEQ ID NO: 268301 - DNA, 605 bp, Homo sapiens
cccatgactagattctaagctgaaggacagggcagatcagactcacctctttaatctttaaatttgttgaaagaggaacgttctctcaaatatagtatctaaattaatcctttcacggccattgaaaggattcagccatttctaggaccattctcattttctagatgaggaagcacggattcagagaagcaaatgacctattcactatcaaaataataaaacacaggtcttttgacttcaaattctgttttaagttatctcttttttttctatatagctattataattaccacaagaattacagaaattctgtaagtcccccagtataaaagatgaggaaataaaagtcttatatcattttagtactgtgaaagttttatgctttagagccaaatgatgtttttatttattgattgatcttttcacattggtttagtctgttctcaccctgctattaaagatatacccaagactgggtaacttatagaggaaagaggtttaacggactcacagttccacatggttggggaggcctcacaatcatggcagaaggcaaaggaggagcaaagtcacattttacatggcggcaggcaacagagcatgtg

SEQ ID NO: 268302 - DNA, 315 bp, Homo sapiens
cagtcccaattacaaaagagttaaaaggaataaaatacttaggagtcaatttaaccaaggaagtgaaatatctgtatactgaaaaccataaaacattgatgaaaataaaaggtgtcacaaataaatggaaagataccccatgtttgtgaattgaaagaattaatattgttaaaatgtccatactacccaaagcattctatagattcaatgtaataactatcaaaattccaatgtcattcttcacagaaatagaaaaaaaaatcctaaaatttgtatggaactacaaaaaatcctgaataactaaagtaactttta

SEQ ID NO: 268303 - DNA, 383 bp, Homo sapiens
  misc_feature (64)..(65): n is a, c, g, or t
ttctgcagtccctcgtccagccacccccaggtactgaagaaggagaaaaagggccgggcatggnntgtcacgccggtaatcccagcactttgggaggctgaggcgggcgaatcaccaggctggtcttgaactcctgacctcatgagtcgcctacctccgcctcccaaagtgctgagattacaggcgtgagccatcgcgcccagcccataaacatttttaaacatacagaaaggctagaacaccatatactaaactagattctacaattaacattatttgttctatttttaaagtgttcccaagtttatttactcgtagctgtgtatttagtaaatgtttattgatgtgatcatatctgaggtataataattataaaaaagaaa

SEQ ID NO: 268304 - DNA, 335 bp, Homo sapiens
gtgctttgtataccctagcaagatgaaaatcttagctgcagcatcaggaagaggacacctcactttatcctacattcctatctcagtcaggaaagtagctctagagaaggaactaagaagtcaaggccttttgtgaagttgctctgttatctctgtggccccaaagaccaaaatgatggagaaaatgaaaccaggatgatttctgacatctgcttccactccaccttctttaaccacttcatccacatctctcttagcttctcacataagtctcacctggaatcatcttatttacaccaataaatttacctaccacctgcctgttgattgccaaa

SEQ ID NO: 268305 - DNA, 1146 bp, Homo sapiens
cacaatgcaattaactagaaatataatgtaatgactataaaacctcaaatttttggaaattaagaaacatacctctaaaaccatgagttgaagaaaaaatgacaacagaaatcagaaaaattttgacctgaacaataattaaaatactatatatcaaaacttgtaggatgtagttaaatgagtactttgaggaaaatttgctgtgaggtatgtattacaaacaaaaaaaaaatccttaaaattattgagctaaatattcatcactagaaattgggatatattcaccctagggaagctgactgaaaaaaggaaaaaaaagagttaaaaaaaaacaaagaaaaaatagatgttaggatataggcggaaggagattaaaaaaaggggttggttaatgggtacaaaatacagttagaaggaataagatctggtgttcagtagcacaatacagtgactatagttaataatttattttatatttcaaaataacaaagagtgaaattggaatgtttctaacacaaagaactgataatgcttgaggtaacagataacccaactatcctgatttgatcattatatattgaatacttgtatcaaaatatcacacataccccataaatgtgtataacaattatttatccataaaaattaaaaataaaagaattgtaataagtcagcatatagtaatcacttatcagccttttggctaagatcaagtatagacattatagtaaagataaaagcaaaaataataaagaggaaataaatttttaaaagggtcaatcaagataaaggttgaattttttaaaagattaataaaattgaaaactgtggagttcaatcgagagtaaaaaaaagaagctacaatccactaattttgagaattaaaatgaggatagcattacagctatgtcagatgtcaaaaagagaacaactttattcaatacatttgaaaaggcagatctaatgaacgaattcctctaaaaacatagcttgccaaaactaacaagaaaatagaataccttgttaatcctattcatttaaagacattaaataaataatccaaagcctttcacaaaaaaactcttggcccacatggcttcacctatgaattctactcaacattcaaggaagaaaaaagtctctttt

SEQ ID NO: 268306 - DNA, 211 bp, Homo sapiens
cacaatgcaattaactagaaatataatgtaatgactataaaacctcaaatttttggaaattaagaaacatacctctaaaaccatgagttgaagaaaaaatgacaacagaaatcagaaaaattttgacctgaacaataattaaaatactatatatcaaaacttgtaggatgtagttaaatgagtactggagtatcgtgagggggacctctag

SEQ ID NO: 268307 - DNA, 287 bp, Homo sapiens
taaaatgtattcatttatcactattagagcacccgtaaagttacctccctttccatgcctgaaagatgtcagcaatgctaacttacagaaatcaaatattcactgatttcattactggactttcggctaagaccaagtgaaatattcatggatttcaatcatattaatagctaacattggctggcatggtggcccacacctgtaatcccagcactttgggagacagagttgggcagattgcttgagcccaggagtttaagaccagcctggacaacatggtgaaactc

SEQ ID NO: 268308 - DNA, 215 bp, Homo sapiens
ccttccaagatgcctgggtccagcttgtgggagggactgtgaatcctgaggacagcaccagctgagcttcggatccttctcaatggtgccttttcagttctgcagggccctcctctcctctgagaatatgggttctctgacatccagactgaagtgcagtgagccgagattgcatcactgcactccagcctgggcagaagagtgaaactccatct

SEQ ID NO: 268309 - DNA, 513 bp, Homo sapiens
acaggctaagtccttcccctccctcaggaattcccagaaggctccggtcatcagcagttaaggagacacacttcatattctgattggtgatatggacccagaggaagggcagcaggcactgtggtctgcaaggcttcggaggcagtggctggttcggaccgcatgcaaattctgatgcccttctaataatctaatacccagatgtggatccaagatgcccattaatatctatgcctgctttttagtggtagggggcttgaaaaacaaaagcctctatctggtccagggtgaattcctctagcgggcagaggcagagccaaactgcatcttggagggcgcctgaattttctcatgattgatggcacatccctttcagtcaaaaaaatcaagggaagacagagcttcaagcacagttgtttctgaattacccctaattaatttgtcatcgttgtacagaataacttcagtatctgaattaggccacctattaaaatcctgctttatcagattatg

SEQ ID NO: 268310 - DNA, 396 bp, Homo sapiens
agaagagataggatcaaaaaattcaccaacagaaggatggaagcctgttattctctgcctcaaaaaagaaaacttcaaagctcaagtgcctgttctaagggtttagagatgaaaatggtacttggttagccactgatgattacaaaatttttatgtataaaaaacctggaggcagcaatagtgttggaaggaagcctaaagttggattcacacagcactttacctaagtttgagaaagtcagctgtttctctcaaagaataaggggtgatggagattactggtattggagtaagggtgggtaaagctatcctagtctctttttttttttggtgtgccaacaaggatactcttccctgaagcagattcacatgtctcactaaaatgtccataaaacc

SEQ ID NO: 268311 - DNA, 375 bp, Homo sapiens
ctcataccagatggatttagcagagtgatttaattcttcccatgctgctggctgtagaaagatcttgagtcactttaccgagcgtatgttcttgctaagcttccttgtaataacttatcttcatgagcttgctcagctgggtgggtcaggagggagctgtgtggcaccatctgtttgcatatcataccactgattttgaggccagattataaagaccagaaaggacttgtgtgtatctgcaaagaacctggggccactgtcactttaacccaaactgtaaattggttactggggtaaatgaagagaaatcaatgcattcattttgaccttgatccatgtttcacatacaaaatgtaatcattcccacttcctcat

SEQ ID NO: 268312 - DNA, 465 bp, Homo sapiens
gtacttcaaacgtccccgacctgtgaaatatagtttgagccttcagaaacccaggctacaaaccttaatgctgtcctgaccaaacccaaccctctgctgaacaatttctccttgggttagaagaggaaaatgatccctgattcccatgcatacatgcaggattaaaagagataatgtctgggaagaggacttggattcttatttatttatttttttgagacagagtcttgttctgttgcccaggctggagtgcaatggcgtcatctcggctcactgcaacctccagaaacccagtctctactaataatacaaaaatgagctgagtgtggtggtgggcacctgtaatacaagctacttgggaggctggggcatgagaatcgcttgaacccaggaggcggaggttacagtgagccaagatcatgccactgcattctagcctgggtgacagagcgagactctgtctca

SEQ ID NO: 268313 - DNA, 536 bp, Homo sapiens
tgtaatttataattgaatttatccacagagaaacaagtggtcacagtaaacgaaagtatcttctagggagcaaatttacaggtgtagcttttacaactaccagtggcttagctccaagaaaattcaaattccaaagtgataactttccacaaaaacgtaacttcagagttgagtatttgtattaataaaattctcaccaagtagcatttttgtagctcaatcccccactagtttaatatatactcaagttaggggaaataggcctaatgtgtaaagaaggtggccctaaacagagtttccatcatctcctcctagataatctttaaataacaatggttggatgttgtgtgttttgtatacgaatcaagaaaggtaaaacctacaaactatattcatcttacattaattgattacaaagaaaatactgagaggtaaacattaagaatgtcttaaagggaaacaaattaatatcaacattttatgcagcaaagctcatatgaacagtcataaatgacattgctaaatttaaacattgc

SEQ ID NO: 268314 - DNA, 627 bp, Homo sapiens
gttcaatatatgcaaattgattatcttgatataccacattaacagaatggagcataaatattttgtgatcatctctataggtgcagaaaaaacatttgataaaatttaacagtattttgtgtaaaaactcttaagaaactaggaatagaagaaaattatctcaacataataaaagtaatgtatgaaaaactcagtgaacatcactcaatggtaaaacacaaagtttttcctctaagatcagcaacaaagcaaggatgctcactctcaccacttctgttcagtgtagtactagccagagcatttaggcaagaaaaaaaaataaaaggcatataaatataaaaggaagaagtaaaatgatctctgcagataacatgatcttatttatagaaaactctaatgatttcacaaaaaaacctgttagaataaaatttagtaaagttgcatgacacaaaatcaacataccataataaatttcgtttatatatgagcaacattgaaccatctgaaaaagaaattaacaatctcatttacaatagcatcaaaaagaatactttgaaataaatttaaagaggtaaaaaacatataataaaaactacaaaatattgatgagagaaattaaagaagaca

SEQ ID NO: 268315 - DNA, 423 bp, Homo sapiens
caattttcttcattttaaatgagcattcataaagcatttattaaactgtttagggaggtaaacaaaaaaacatagcacatacaattatatatagtacataataatcatcatcaacagttatatcactgttttatggtatttatactttttattgttattttggagtcaactccttctactgattaaaaaaaaccatctaaattaactgtaagacagactcaggaatttccatcaggaggtattctagaggaaggcactgttataggagataatgctccatgcacgttattgccccctgaagaccttccaatgggacaagatgtggaggtggaagacagtgatattgacgatcctgaccctgcgtaggcctaggctaatttgtatgtttatgttctagtttttaactaagaaaatttaaaagta

SEQ ID NO: 268316 - DNA, 914 bp, Homo sapiens
caaaagcacaagtcaggcatattggacctctccactatggcagagtctgggttactagcttgtggcgtgcctaagaatttaaactcacctattctgcttaagtagctggtccactttagtgggctggaagcatctggccagttgcctgtggctaccatttgtatcactgaaagcgggatgtgctatgctggccgacttgggccaattaggaattttatttaaagcttgatgtaattaattatataaatttgacctgttaaatttgaggaagggttgtttcaaaacactcaatttgtacattaaaaataatgaggccaggcacggtggctcacacctgtaatcccaacacttgggaagctgaggtgggcagatcacttgaggccaggaatctgagaccatttggacaacatagtgaaacccgatctctactaaaaatacaaaaaattagctgggcatggtggtgggcatctgtaatcccagctacttgggaggctaaggcaggagaatcacttgaacttgggaggcggaggtttgtagtaagctgagatcacaccactgcattccagcctgggagatagagactgtcttaaaaagaaagaaaaaaaaaaaaagtctccctactatacccttagatatatgcccttccatagataaacatggttaacaatttcttatgtaaacttccagaaacttcctatgcatattaaagcatatctatattaaaatatgtatcttgtctatcctttaacaaaatagaaatgggggccgttctacatatacatactgttttataccctgctttttggatttactgtcttacagccatctttgtatgctagcacatgtagatgttcttcattctttttaaaaacaatgttgagtaatgttacagctcttttagaatttgtctagca

SEQ ID NO: 268317 - DNA, 165 bp, Homo sapiens
caagggaggccttccatcatggaaggaagaagcagcctggcacatgcatctagctggaaaagtttctgtaagtcttgattggttgttgcttggctggatgatactgatggcaaaagtaacattccaaagcagtaaatataagactctgaataaggcttggcgctg

SEQ ID NO: 268318 - DNA, 308 bp, Homo sapiens
catattcttgaatgcaaacccattttccctatggactttgatataaactgagaagcactggctgccccaaggaaagaatgcagcgatgaaggcaccattcctaaagtccgtcagtcatctcttcctggaacagataactactaagggccaacgatggtgcccagctctaggctggaccctggtggcttagatacctgctcttgtggagcttatgttctagtgaagggaaagatacaaaaagcaacaacaaaattcccagtgttctaggcagagaattattaataaaagactgtgatatgtaaacataa

SEQ ID NO: 268319 - DNA, 2326 bp, Homo sapiens
  misc_feature (448)..(448): n is a, c, g, or t
  misc_feature (1203)..(1203): n is a, c, g, or t
  misc_feature (1243)..(1243): n is a, c, g, or t
  misc_feature (1283)..(1283): n is a, c, g, or t
  misc_feature (1322)..(1322): n is a, c, g, or t
  misc_feature (1363)..(1363): n is a, c, g, or t
  misc_feature (1617)..(1617): n is a, c, g, or t
  misc_feature (1809)..(1809): n is a, c, g, or t
  misc_feature (2007)..(2007): n is a, c, g, or t
gcggccctccacagcagccgaacaccttgtagttgtcaccgtggacgcgggctgcagggaggcccggacgcccatcccaggtttcggcctcaccctcaggctgatgcagcgtgcccagcggggagcagcaggacgggatctccttgctggcgtgcctgcatccagctgtttactgcacgttaatcctgaatctggggggccatctgtttgaaagatgctattccaaggtggcccccttgtgtggcggcccagggatggtgactcaaggctttggttcgggcagatctgaaggacctatcggttattttgtctacacagagggaaggttacaataagctgatgtcattgtgacggccattggtctgttcccgtccgaaagaattcattttcagcagtggggggtatctgttagttctttgtttatcttgcagctgaattctcagccagntccatggaattttgagtcaccaacttgtgtgcaataatccagaggattaaagaattctttttttcttcttgatacaaaaaggtattttttttaaattcacagaggagaaacataatttaatttttgaatattttctttaacattttcaaatacatgtgaaagagagagggcttggctggcttcaacaattgaaacaaatgcagcatctctcatattaaaagtgttacataaaatgtaagcacaatactacaaatgctaatgtaatttattctaattgaggaattactctgattcactataactgtgtataactatatataaattaatggtatttttaaaagagtgtggtaaaaagatatataaataggaaacactagaaatgataatatgatatttatttaatgactatttgatgtgtcggaacattttgattctgaataaatatgagtttagtgtatcagtaatatataaatatagcatcatcaaatatagcaaaactaatataattcaaatataatatataattatattatatacaattatatattttatatataatatataattatattatatacaattatatattttatatataatatataattatattatatacaattatatattttatatataatatataattatattatatacaattatatattttatatataatatataattatattatatacaattatatattttatatataatatataattatattatatacaattatatatttnattataatatataattatattatatacaattatatatttnattataatatataattatattatatacaattatatatttnattataatatataattatattatatacaattatatattntatatataatatataattatattatatacaattatatattntatatataatatataattatattatatacaattatatattttatatataatatataattatattatatacaattatatattttatatataatatataattataaatgtatattataagaaataattatatatcattatatggtatataatataataattatataataacataattataattcaaatatagttcaaattaaatatagtcaaattaatactttgataacaaactaattaaaaataaaaacaagtcncagaggcttaaaatacaaaagaatatttctctgccacgtttggtgagcagaatcaattactaccttaatagcattatatttattaataaagagcctaaataattttctttcattttagaattactattgcatttcaactttcttattcagaaacaataaattagcatggcagagatggctaattgcctcctngtttgggggcattggtctggacattctccattttcttaataacaagaccccaattttattaacatttatttattaagggctaagcatgactgtgtgctcagctacatttcctgcctctcttgcagttcacagtggccacatgatacagttctggtcaagtgagacttctgggaaagcctttacaagtgaacagatttntctagattgtcccttttgccctttgccatagtctttctttgagccaggaatgtggatgtgatggcttgagtgccagtagccatcttgcacacatgacacaaaagctcacaccctgtggactatggatggctacaaaatccctagaaaggagatttagaatgaactagagtccctaataacatctattgcttattttcttgttagtgagacatgaacatgtatcttctatgaacaactgttatggaattttctgttaaatacagccaaacgcaatttccacatgatacaattaagacaaggaataaactactaagatgat

SEQ ID NO: 268320 - DNA, 307 bp, Homo sapiens
ctcagaggcatcggctgggtagctaccacggtcaccaagcaaacatgaagtgaggagcgtctgaggagctggtgggggagacccaaggcaaaaagtttcatgtgcggctcctccacttcccgcaggcagcatccccataagtccatcctaagtggaaaatgcttcgaatacaccgaaactgccaagcgtcatggctcagcctcgcctgcctccagtgggttcagaacacatgcattagcctacagtgggacaaaatcatcttacacaagcctgttttataataaagggttgagcacctcacgtcact

SEQ ID NO: 268321 - DNA, 447 bp, Homo sapiens
ttcagagttgtagaataagtcatagaatcagataaactgcaagagtgtcctatagacaatgtgcttctactgtagcacaatttttttttctgcaatactagattttggataatttaacatatagtttaaagacaactgtgatactttggaaataaaatgaactctgctgtcaaatggaagctagtattgccttcatttgtatcctttttcaatatttgttcaaatcttgttttttgccatctagtatctgcatggagtcatcagtcacctaccgcttctgtggctcagtttcctcctttgtaaaacaaataatataaatgcatgtaatgcaagccctttaggaggaggagcaagggactacatggcacaacatatggaaaataccctaaatgaatattataaaagtatgctacatcattcttacaataaatatttcagttagatatt

SEQ ID NO: 268322 - DNA, 477 bp, Homo sapiens
agcaacacagcccccgaatcagacatcctagaccaggagagagaagacgacttcttcatggcattccacaccctaccgcggagaagcagcccgcaccccttcgcccagaacggaggggaggacggcggcggaggcctgcagggaggcgtgggtgcgcttaagcggagctcgtccatgttcatcccgcagctcttgaccagcatcgacgcccgccccacgtgcagctcctccgtgcagatctccctgcagcgcaaggccacggacggggccacggacgggtgcgggccgcccgagggcgccgacgatgggcctccatgcgcaacgcccgaccccagggaccaggcctccgccactgccaccacgagggcctcgccccagagtggctcccgggagccctcgccgagggacacccccgggagctcccctccgagggcagcccgggacccagggctccaggtcaacggcacgtgcggccgc

SEQ ID NO: 268323 - DNA, 248 bp, Homo sapiens
gaaaggcctggtgcagagccccaattcctacttcatggatgtgaaatgcccaggatgctataaaatcaccacggtctttagccatgcacaaacggtagtttggtgtgttggctgctccactgtcctctgccagcctacaggaggaaaagcaaggcttacagaaggatgttccttcaggaggaagcagcactaaaagcactctgagtcaagatgagtgggaaaccatctcaataaacacattttggatt

SEQ ID NO: 268324 - DNA, 386 bp, Homo sapiens
taacaatagcaacacaaaatccaactctagctcaactcttgactaacctgactctacctccctaatatggtttggctttgtgtccccacccaaatgtcatcttgaattgtaatccccgtgtgtcaagggagggaactggtgggaagtgattggatcatgggggtgatctcccccatgctgttgtcatgatagtgagttctcacgagatctgatggtttaaatgtgtggcatttcctctctctctccctctctccctccctcccctcctgctttgtcgtggtaagatgtgtttgtttccccactttgcttttcgccatgattgtaagtttcccaagacctccctcgccatgcagaactgtgagtcaattaaacctctctccttataa

SEQ ID NO: 268325 - DNA, 421 bp, Homo sapiens
ggctttggggcaagaaaaaatggcagccctaaggcctgaagggatcaatatctctacatgtgtaacccattctcagcgtaagatggaaacctctggactctaaaccaagaagtgcatgtctttcccactgccacaattaccagttcagcgtgggcctatgatcaagcctggccaaggaaactgacaagaagaacttagaccccatcgtatcttcgtctgtcttactagatgagaagaaggacgaccattgccctaattgacaccaaccttaggatgacactaactctgtggatggtagaaaatgtcatctaaggaacctggctctgacaaaactgcagagctgctgcatcagccaaccctgaagcctaccctattctagattccctgttaaggagataataaatgtcttcattgcttaagc

SEQ ID NO: 268326 - DNA, 809 bp, Homo sapiens
cagtgcaggaaagtctgtccagtgcaggaaagggcaggcagagagctggctcccagccccaaatgcatgtctccctccctggggcccaggctggcacagaagtcaggcctgccagtgggaaacttgggggaaacttggtgccctggtccagcagcctgccctgcagcagcaagcatggcctctggaggctgtcgtcctcctggcctccaggattgcttttcctttcttcctagaactccagcccttaagaaaatcagaagccctggcaggcacattgcctctgtgctgtgcttttacccagcgaagcatcagggcagacagccaatttcaacactgctcttggctgggaagtgccctcatctctggcagcccccacagagaaagtgcagggccccggggctgtggctgcctcagggcaggtctcccttgtgacagcctcttgtcatgggcctgggagtggacccctcccatccctgccgtgcatcctgttgagtagacagctcaggctagtacccaagagggtggccagcagatcacaggggatgtcccttttgtcttagctgtttatgggctggaggaaccactgttcagccacatctcctctcctgcccctcctgcattcacccgaggttgatgggagctctgtggggggagacaggcaggggaggggccaggcaacacctgggcatatccccagggtgcctcctctgatccccaggaggggcagcacccaccctcttctttttccaatttgtttttattgtggttaaatatacataacgtaaaatttaccatcttaattatcttta

SEQ ID NO: 268327 - DNA, 394 bp, Homo sapiens
cattaaacagcacacttgataaagccttcaattgtatataatactgttatttcctttgcacaatagtatgtcctaacaaacttgaattataacgggcttatttattttctctaaaaatctccttaagtcacattgtgcatcctcacattgaatggtctctttaatccttcacaccctgaaaaactgcctgtcttagctcacaaaagtaacacggcaaaaagtaccatatgtaatccagttggagtgagggaatattaccacagcaagtgttagaattataacaatttgatttcttatgcccacggacttgttagattctgggcaaattgtcaggaaatttttgttactttaacatgctgtagcatactttttgaaaatagaaaccaaatcaaaa

SEQ ID NO: 268328 - DNA, 440 bp, Homo sapiens
gataaccagtttggagtctactgtagcaattctggtaacagatgatgacgtcggccagtaacagcagaagtgaaaatatgtggtagattatgggtatattgtgagggtaaatctatttgaacttttttatggtgtgagaaggaaagaagaagcatggacgactctaagaaaacttgatttgatatgagctaaaagggggaagaaaagtaaaaagcagatacagatattttgcccttttggaaactgaagataaaacagaaaaagaaaagaattttaagatatgttaatctagcaaaactaacataagaatggccaccgtgaatttcatgaaattttgccacagagcaatactaaaaactgaatgattatgcctttttccatattttaattaaaactgaaatgaaaatactcactgttggaaagtaaagaaattaagccat

SEQ ID NO: 268329 - DNA, 420 bp, Homo sapiens
tagacatgagataaatcaaaagaagtttgacaaaagagttttatgcaaagcagatgtggataaggaagaggaaggagataaagttgaagatgaacaggaaaaagaagacagaggaaagaaggaagacgggagtgaaggaggaggagaaggcctggcatagaagcactgtcattcctggccccagggcctgaagctcatgactaatctagagaaaggtggagcctcaaagttgaaaaactgtgcttatgtaggctatgtgacacttgttatgtgcagcttatttcaatagactgtagtatgttcgatgttgataggtgctatggagtaaatttttcttttaaattggcatgtgaagagcagctgagggaaagtttactattttaaattgtgttaaactttgttatctgttaccacgttttt

SEQ ID NO: 268330 - DNA, 352 bp, Homo sapiens
tctagtaatattatacaaaatagaacaaatgtgtttttacttgtgtagttaacattataatgctggaatgaatgtccccaaaggcaaattattaagatagatgataaaagccagagttataggcaaaagttgctatttcaacagcctttgcgcttttggtgagtttggtaattgaagggtaataaaaaaacaatacctgtatacttgatcttgcatgaggcaggaagcttgaactgtgttccatcctatgtaaaattatccaattctcaatcccataggaaaagatagacttaaaaaaattacctgttcacagacaaaagagcaaggaatgtttgtgccatccttaattcta

SEQ ID NO: 268331 - DNA, 424 bp, Homo sapiens
gacaaaaggaaagggatatatgtctggatgagtccattatgttaccagataacatgcatgtggactaagcgctgacaatgcacttacgattatataaatcaagatattctacacgactctaaaagaaaagtagaatatagaattggaccacacaggtatataactcacgttaaacaaaacaaagcaaagcaaaaacttattctgtcaaaatcaggtgttgtaaagctatagtccatgggccaaatctggtgtacttactgttttcataactaaagtttaattaattaattaatttttggagacaggttctcgctttatcccccaagctggagtatagtggcacaatcttggcgcactgcaacctctgcctcccaggttcaagtgattcttctgcctcagcctccccgtagctggggttacaggc

SEQ ID NO: 268332 - DNA, 623 bp, Homo sapiens
cactgtggctgagctacttattcaataaatatttattaagtgctgctctgtgcctggcagtgagctggccctggggaaacactgacagacagagctgccttaaagacttagtttctgacctcccagagtctgcagcagcagcacaccgagatctagccaggatccaccccaggctcctaacctgcatcctgggccctctccacttcaggtccctgtagtttgggcctgtggcttaggtctagactgttgcagcccgtgagcccttatcctggagcatcttggtataaagcaagccaaggcataagtctctgcaaaccgaacttcaaaagtaacaaaagaggctgggcatggtggctcacgcatgtaatcccagcactttgagaggctgaggcgggcggatcacctgaggtcaggagttcgagaccagcctggccaacatggcaaaacccaatctctactaaaaatacaaaaattagccgagcgtggtggaacatgcctgtaatcccagctactcaggaggctgaggcgggagaattgcttgaacccgggaggtggaggttgcagtgagccgagatcgcgccattgcactccagcctgggcaacagagacaagactctgtctca

SEQ ID NO: 268333 - DNA, 443 bp, Homo sapiens
attttattagaagtgagtaagggcagtgtagaaaatacagtgctgcagatatttgagtgtgaatgaaggcctgaatgcttcattctttatttggttcaatttcccactggaagtctgcctcctatttcttgactctttcagccacgaagttaacataagccctataaatgttaaaaagtaaaatgtcacacaaggccgaagtccagcttctattctgaaggtccacagggaaagttacagaagaaaacaaacctttctatgggaaggcaaaagcaatttaaggctcagctcaaaactgaagagggctggagcctgggaatattctagaagctgaaagtcctagaacttgtaggcaactgcttatcctttcaatttcttcatctgtctgcccgggaaactaaaatggagcactttggaaattaaatgatgaagataacatagaa

SEQ ID NO: 268334 - DNA, 513 bp, Homo sapiens
aatttcctaaaggactgtgttatctgagatagccttggctaaactttagtccctttaggtttcattcactaattcaactaatattttttgggtactgagttgagacaggcacatacagcttctaaactggtggtggataaaacaaatgagattgtgtccactctcctgaagttgcaatgtttgcttcctcaatctgtccatgtttcttttctattgttttcatgtttttatttatttcaaaaaattttaaatagattttattgatgtataatttatagtaaaatttgaatctttaagtgtacagttctatttattttgataattatataagcccatgtaaacaaaatcacaatcaagatattaaatgtcataacccctcatacctgtttgtagtcaagcacaccaacaacctggcattcttgcaactactgatatactttatgtcacttaagcttaaacttgtattttctatgattttattaagatggaaataaacatatctacttggtattg

SEQ ID NO: 268335 - DNA, 444 bp, Homo sapiens
gacagcatgaaccaagggctggcacttaaaacttttactcagaagtcctgcatgccacttccactcacaagccacacagtcacacctaagttcaacgaggcagggatgtataatcctcccacaggaaagagcactgagagggagaagcaccaacctatttcgtgaaaaataatacaatataccactacatatcactggactcagttcactaatattttattttgaatatttgcatcaaccttcataagggagacaggtctatagtttctcgtttcataaaaataatttggaagtgaaaaattactttgtcattaagactgcaaggtgactgatgtggtagctcaagttaaaagataagtgttaaaagataagtgttacatgttttaggtgtatagtagggggtctaatttctgccttggcggcttattatttaataataaaagg

SEQ ID NO: 268336 - DNA, 450 bp, Homo sapiens
tattcattccctgcacttcatcccacatcctgggctcactgcccacacggccaagggattctggctgagacttcagcaggcccatggggcagaaggctcctcctgacccagcagatgggtgggtggggagatggtgaaggctatgtgttccccacccttcccaggtccccagtgcctctctgtcacccctgcttccacatctgcccactgggcttggaaacccaggctctgtattctgagaccctaaggccttctgggagcccatcaaaggctgctttaggggaggggtgctaccgagctttactgtcctgctaaaagccctcataggattttatttaaacagagtgtttcttgactaatagcgatttttttttttgaggcagagtctcattctgtttgttgtctaggctgaagtgcagtggcatgatctgagctcactgcaacctctgc

SEQ ID NO: 268337 - DNA, 997 bp, Homo sapiens
  misc_feature (918)..(918): n is a, c, g, or t
  misc_feature (921)..(921): n is a, c, g, or t
  misc_feature (928)..(928): n is a, c, g, or t
  misc_feature (930)..(930): n is a, c, g, or t
  misc_feature (933)..(933): n is a, c, g, or t
  misc_feature (943)..(943): n is a, c, g, or t
  misc_feature (945)..(945): n is a, c, g, or t
  misc_feature (947)..(947): n is a, c, g, or t
  misc_feature (955)..(955): n is a, c, g, or t
  misc_feature (957)..(957): n is a, c, g, or t
  misc_feature (974)..(974): n is a, c, g, or t
  misc_feature (977)..(977): n is a, c, g, or t
tgtggccacgagagtctagaggaaaccaacccgcaactcactggagctgaagggctggtagtcaggccgaatctcgcgagaattggaactatttcagagccagaggaggatagtggcggcggcgaactttgcccggtagtttttactgactggggtgctggcgcgcgcctttttctcggccagaatccagttattgggatagtcttgacttctacctcagcccaacttctgtggtcgtaatattagtttagcttgggtttgccgtgaagtaagaagactgacttccgcaaacgtactgaacgactgggtgtaggtgccagggcatggacgtgaagctggaaccgcgaaatgagttagttgtgggccgctggcctcaaggagcgaacgtcagcgcgaagaggagaagcttgtgcatacgctctgataagggttttaatagaggtattaccacagtgctgcgtgacacggttgagagagtggtcagaagaagctaatgaaaggaattgaagcagtgccttaggggagtaggagtacttttggagatagcaaaggactttctaggcaaagtggaagtcaaagcacggatgcctgaaaattcatagtgtgatagtgcagtgagtaatgtatctagagaaggggtcttaaacccagatgcctagactggcgagagaaaataaattatcttatgcaagctgagcctaaacaaatggtggaagttactacgatggataagtgagcattaagttcatctgaaaggagaatttgatacccaaatccaacccatttctctaggagaatgagcacccagtttctgagatgtcttcgtttctcaggaaaatccagaaatcctgggttttatgtgaaacttaatttataagtgttgctaactaattaaaattcaaatgtcaaaaaaaaaanctngggcttntnggnggaaagggtntnangccggctngntcggccctttggaaggnaangcgccaaggggatatgacgc

SEQ ID NO: 268338 - DNA, 785 bp, Homo sapiens
tgtggccacgagagtctagaggaaaccaacccgcaactcactggagctgaagggctggtagtcaggccgaatctcgcgagaattggaactatttcagagccagaggaggatagtggcggcggcgaactttgcccggtagtttttactgactggggtgctggcgcgcgcctttttctcggccagaatccagttattgggatagtcttgacttctacctcagcccaacttctgtggtcgtaatattagtttagcttgggtttgccgtgaagtaagaagactgacttccgcaaacgtactgaacgactgggtgtaggtgccagggcatggacgtgaagctggaaccgcgaaatgagttagttgtgggccgctggcctcaaggagcgaacgtcagcgcgaagaggagaagcttgtgcatacgctctgataagggttttaatagagagatggaatctcgctgtgtcacccaggctggaatgcagtgactcgatcataactcactatgacctcgaactcccaggctaaagcagtcctcaagcaatccttccacctcagccttctgagtagctgggagtagctgattaactaatgcgtgtcaccacgcccagctaatttgtgtatgtgtgtgcacaggtgtagagctaggggtcttgctatgttgctcaggctagtcttgaactcctggcctcaagcagtcttgtcttgacctctcaaaccagtgggactgtaggtgtgagccattgctcctggctgagcactgttttttttaggacagactgtattcattg

SEQ ID NO: 268339 - DNA, 577 bp, Homo sapiens
cagaccctctcagcctctttgtacgttctatttgggtctggaaaattttcccctgtggttgagagcttgggctgctgcttggctgtgtgaccttgagccagttcctcaccctctctgggtgtccactgtgtcatctataaaaggagcgtgacaatgacgttgcgggcctcgtcgggaccgtgagaggtgaaggctcgtgagactctcagagctagcgttaccgtgccccctctaacttctgttgttcctataatgttactataatgttgcttatttccccccaaccagatctgcaagggtggtttcatcacccccttcttacagtcaggggccctgatgctctcccctccccgcagcatcacagagagctcaactcttaccaacttccctgcccctcaattcaatgtcctcagcccctatgaaagtttacggcttcattgaccaggcacggtgggtggctcatatctgtaaccccaagcactttgggaggccgaggaaggaggattgcttgagcccaggagtttttgagaccagcctgggcaacatagggagacccccgtctcaatttaaaaaaaaa

SEQ ID NO: 268340 - DNA, 268 bp, Homo sapiens
tataaattttatcattcttgctgttagggaagtcattaatactggctagcagccatactgccttatcctgtcctagcgcatgtattctctcaccgtcctagatgactatttcatacctttcagtgaaaggttttgattgatcatttaggaaaaaaacttttttcagttacatttagttgtattttaataattatcaccttatcatttacattgtagtttactatttttgtcaactttgttgatgtctgataaaggcaggctgtcatta

SEQ ID NO: 268341 - DNA, 278 bp, Homo sapiens
aatgaaccatgacgattcaaatactgctttttactaagtacttacagactaatgacataggagacctcataggcacctggctgtttttaaccaggcaggcctaaatacactgcccaagtggcccttctgtgtggcaacaaaatggctgtcataaaattgtgtctgtgtgcatttatcttatcactgggggtggtgaacatttgagaaggcacttgacctttgaaatgtgaagttttatggatttcagacttgtattttaaaaactatttgttaactgt

SEQ ID NO: 268342 - DNA, 499 bp, Homo sapiens
ttccaaagacttaaaatgagtaatctatacttaacaaaaatagaaatttttagaaagttttgaatgtaatacaaatatatttgttttctgtattaagtgctgtagagatttgagtggtttatcttgttagatttgtttttattacaggaattttactatgggggttttactttttacaaggaaaattttaaattaaacattataagaaaaatgtgattttgccctaaaaaaacactgacaaatatataaaccttgtaatattcatggttcaataggtaattgttcaatgaatgaactgatggtaccatagaggagattggaggaggagacaaaaaatacaaccatggctctcatttgaatctataattcttcctgaattcaatattaaaactctcttgcctgtagaccagactgaagacaagatttgggggtgtcaacgggagtcctgggatacattttttcttataaagtctggattaaactttttagcatggataat

SEQ ID NO: 268343 - DNA, 564 bp, Homo sapiens
aagaattcggcacgaggtttttttttgagacagagtcttgctctgtctcaaataaaaaaaaaaaaaagaaaaaagaaaatagcaagtaagatcagtttcaacaccatgctcagtgaagtcaccagactgtttatgttgaatcaccataaagctaacaagcagaaacatgaaccttagcttttcaagcgatcaaacccctgtcggcaaatggtaaggccaaatgaaaaacacggggcctggtttacacaaacttcccctcatccttcaaaagtctcgaatcagctgtttccttctctaagaaggtttccaggtctgcctttgggtttgggtaacgaggctgttgttttctcatttgtatgtttctccaccagactgttaggtcctagaaacaaggactgtgtcttttcattttgtaccccaagtgaggctggcacattctgagggtgcaatacatgtttcatactttccaaagctcatgcctgttgagtacttactgtttgctaggtcctatgtcagatgttttgtctacattgtctcattaaatcctcacaacagaaaaaaaaa

SEQ ID NO: 268344 - DNA, 331 bp, Homo sapiens
ggttgcagtgagccaagatcgtgccactgcactccatcctgggcaacagagcaagactctgtctcaaataaaaaaaaaaaaaagaaaaaagaaaatagcaagtaagatcagtttcaacaccatgctcagtgaagtcaccagactgtttatgttgaatcaccataaagctaacaagcagaaacatgaaccttagcttttcaagcgatcaaacccctgtcggcaaatggtaaggccaaatgaaaaacacggggcctggtttacacaaacttcccctcatccttcaaaagtctcgaatcagctgtttccttctctaagaaggtttccaggtctg

SEQ ID NO: 268345 - DNA, 404 bp, Homo sapiens
ctttgctgcaatctcagctactcccttccccaccctcactctgtctctcctctgagctatgtttgaatccctgtgtctcctgggcttctcaggaagtccctggactggtcaggcaagttcccaggtgtcccctccaggctctgagcactagagccagagctcccaccagtcagaaaggcagagcaaacacctctcaaaggtaggaggacagcgtaacatcatcacttcctcaagttctgtgatgacgggaggcagccacaggctaactgggcaggaaggtgggcctagatctcatttcccgagggggaaaaaaaagcccaaacaggatgttttaggtgaaatctcccaattttggctgggtgcggtggcttctgcctgtaatccagcactttgggaggctgagg

SEQ ID NO: 268346 - DNA, 440 bp, Homo sapiens
cagctgctcctcagcttcaaaagccacgaggttaacttaggactacaaatcccagaattcctcaagggaagtacaaatctcagccagtcttagctccaaagaacatcaagtaccaaccacaccaaggcctgtgtgactgaccacctgccctgaaggtccaggacccatcccaaacccagtcctgccttgccttatgcgtggagaaatccaccacaccggagtaaaggaagctggccgacctctgatgcacaggactacggccaggcccggtgtgcatggccacccacggaaaccgaggcccaggcaggggtcagcactgtgggaaggaagccctgatggcctgcctctgggttcctctttccctccacagagtagagtgatttgtttttgctgagtgggggcaggacattaaaacaactgtaataggtgaaaatgattca

SEQ ID NO: 268347 - DNA, 617 bp, Homo sapiens
cagggcacctggctgtgctgcttggggtttagtctttcctaaactcttctcccatcttcctttcccttagttcctccaccagcatttgcttcttaatttcttctattgggcagtccatgcctccctgattggttctttcccagcaggaaaattcccaagtactcgcttgtgcctgtctctcgcagtggacgggagtagctggggttcagggtgagtgagagattcgaagggaggtgaactgtagggcacagtgagatagagccagatcccccagggagggcaaatacctggctgaggaatttggactttaatcctaaagtatctgggagccataaaatgtttctgggaggggagaaactcaaggtacttttgataaatgacatggacttggtccataggatctctagggagaggctttgcctaagaatcttggaaagataagtctttaagtctcttgaagataaaaggatctggtcaaatacaaacaacagttaatggctgttgatgtttactgagtatgcatcacagctggcacattcatttattccttgacaaatgcttatgaagtgtcaaccgtgtgccagacacagttctaggtatttgaggtatgacagtga

SEQ ID NO: 268348 - DNA, 1062 bp, Homo sapiens
taaccaccaccaccttgaatgttctacaagaaacattactgtccctttaaaagacaaaggttaagtggaaagctatttgttaattgggtaatgtgtgtgttttggggacaataaggtttttaaaaaaggcagggggaacattcttataatctttaaataagaggaagtttcttcagctatcctacttgttttgcaaggagcagtagaactactcaaataagggcaatgccacgtagattcttctagacccactgtttttactttcaaggagaagtgcaggacactagcccagaacttctgacgtcatcccccaactatttctgctgtgtgttcctttattcgagcttgtggagaggaatatttctttatgtcctggccaggaacattctaactccccactggcaggacttaagttatgtctttatattttcgcctgtcttttgtaaattgtaaacctgtcccctcataaatagggcatcttcttgtacctgccacatgtcgggccggtcagcacaggttttctgcagggcttctggctgggctggcaaaaagcagcagggagcagggcaaagctttttttctggcctgactcccccttggtgcagcccagcgctgccacctgggtggatggtccccggggccctattcccagttgctccagagccactatttaggatccaggttgtgccaccaagttcaaggctggttgtgatggtgagaacagctgctttcatagaaaaatcatcatgtcctagcacagatggccccaagcaggggaagtacaatactgcaggctgcaaatccatgtcacaggtggcaaccttggtcacagagatcgggggaagggtaatgtttacaaaggaaccttttaaaaaagattttgactggagcacattggagttctcgggagttcccaaagctaatttgtgtctcctctctgactactcacgtagttttgagcaagtgcctaccttgatttttctgtcttttaatagaattgaatcatacttgctacactttccctcatcatttagcattttgagaccttgaccttttaccaaa

SEQ ID NO: 268349 - DNA, 326 bp, Homo sapiens
cagagggattgcttcatcctttgagcaattagtaccttttaaaaattctgacatctttcagaccctgtcctgcagaccccactaaagtgcttttgtcagaacagttttagcagtcctagatcatgttttgccagctgctccagccagcggtacagagaaaacacttaagcatatggttcagatgcttgcatttttatctgggtaaaatctgtgtgaaaaggccccagagtttaaaaagccaatcagtgtatatgatgtcagaatgctcactgtttgtctcattttcttaacatcctggtgtgatcttctaggtgtgtctaattgtt

SEQ ID NO: 268350 - DNA, 401 bp, Homo sapiens
tctttgcatcctcagtgtccagcatagtccctggtgaatgatgataaatgaatctagataaagaaaacaaaaaccttcagtggggcaagaatgacttcagaaaagcagcatgtgtcagcagacacaacagtatctcatcgccaaagaccaataccaatacaaccagtgcaacatgaacaggctgctttactcattctttacgtgagattttgtttttactatattaaaatggtaaattcacttacttaaaatgattatatgtagtagatgttaaatcaatgttaattgccttccccttcctttcacctcctcctctttttatagtgaaagataaaggtttatgaacatgaaaattattaatgaatagttttcaaataaattaaaaaatatataaaataata

SEQ ID NO: 268351 - DNA, 303 bp, Homo sapiens
caggcactgtactatattctggggatgcaatgatgatgagcaaaaatgcacatgttccccaccctcgtggagatctgggaccatactggggaggacaggtgaatcactcactcactgcaaacagatgagaagttgtcactgtgaggttgttataaaggagacatgggtcgggcatggtggctcacacctgtaatcccagcactttgggaggctgaggtgggtggatcacctgaggtcaggagttcgagaccatcctggctaacatggtgaaaccccgtctctacaaaaaatacaaaaaaaaaa

SEQ ID NO: 268352 - DNA, 602 bp, Homo sapiens
aactaatagagaaattatgtgcatctttaccaaacaatttgtaagttaacatgtaaccaagactgcaacctttaatcagcattaaatagcaggtggtaattattttgccctataactttgagtggcttttgctttttatgacatttaaaggatgtgctgcacactttttttttaccgtatttccaagtttcaggtcatctttctgacatacttgttagaatccagggaggtggaaataggagcctgagaacctttaattagcctgtaagtgattctaacattgacttgactttgagtaccaccaaataagagaaaactgagaggctttgagtgcccatctgaggctggaacccattactatctgatgacactcatctcctgggttttgtgagttttttctctttctatagtgctcaactctttgacaaagagaaattatttaatgatctagggtggagcttttgccaggcagatatatgctcaagaagaatacagtggctagaaagcgaagatatcagaaagagtgtagttaatgtattggacgtgaggcccagactaggtagagaaagaagtgaggccaggatcagcttaacagatggaga

SEQ ID NO: 268353 - DNA, 436 bp, Homo sapiens
taataaaaatggactaattttaatatacttgttttaaaaatgatttattatgattatcattcaatcagcaatgctgctagaaagctgttatttagcctgaattttagaaaatgtgttaatttttttaaaggtacattgattttttttgataggaataaattgaatgcagtgacggtggcagctttggccatgattatttaggtaaaccacaactaattcataaagtgctgaggaccctttaatacctaccaaaaatgggcaggctgtcaatttggaagtttccatgtgaaacatattctttgacttggcctctgaaaaactttcctgcagttccctgcgtagaatgtagtttatttactgaagggctgatttttataccatgtaacataagtttattttacttggtagtatgtaaattttactggtgaaagcagga

SEQ ID NO: 268354 - DNA, 370 bp, Homo sapiens
cttattaaaaaagtcctttgttttggtgcatggatgagagaatctgggtcttcggctcgtgtggatgattattggaggagtgttccatctattaggataatagttccgtggaattccttttaatataattggatactccagttggtgattttgcaacagatgcacgtggtaaagaggtcctctgcatttgaatagacttttccattaagaaagcatgcttttctggagagagagagagagagagagagagactacagcccacactgaggcttcttaagatcataatgaatgaaaactgataaaagaatggtaaaaaaaaaaaaggaagatgaccacagaggcagaaagcagtcttaaaaaacgaaagaaa

SEQ ID NO: 268355 - DNA, 214 bp, Homo sapiens
gtgcagcggatagggtcccagcttctccaaacatacagccttgcctgttcagcttctaacagcattcatccatttgcaaaagggatccacatgatttctataaaattgggcacaaaaaaatttaactcaaaggagaagatgataagtactcattctcccacaacccaggaatttttataatgcctcatatccctcaagaatttatgcattcata

SEQ ID NO: 268356 - DNA, 476 bp, Homo sapiens
ctcgctctctctcaaaataccataccttagtattttcagactatggttgatcatgggtaattgaaaccatgaaaagggacactgtggatggggggattactttacttagataagcttttggtcacagttgctctatgttagcgaacaacagtcaggtgaccattttaactgaaattaagaaagctataaacaatgccatctacttatttagttctacaatgtgttgccattgaaatctgtagataatctgattatcatttaaatagcaatgactcaaagagtctaaatattgcttattgaggttttctaaggttccaccaagtttgcagcagtggtcatcattttcacagtccggagtgcccctatcttttacactgtttaacacagtgaaaaaatagtactttgaattttctccctcttctgcaagatttgcaagggcaggtaatacataggaaaaaaggatgcttctccttttc

SEQ ID NO: 268357 - DNA, 528 bp, Homo sapiens
acatttctccaaaggtaggctaatcactgttattattttcagctagaaatataaaaggtattttctatttttgatgactttgaaacataacccttggaatataatatctgtgtataatatctgtggaaagcatgaaagtaatattcaaacagtatgcattttttccagaatgaaaatttcctctacaataacattcatccttttttcctgatggacacataaaagtcaacatttctaacattgctggacgttatttacattaaacttgcctcagcttcaggtgttgcagaaactgggcaagaggccacaaggtacacaatacacacacacacacacaaacttgtattattatacttacctaagtgtctaaagaggtggataaatatattagattgctccagaacaaggatttttatggggcctattggaaagtatgactgcagtttgagtgagatgcctgtaagagattcaatttggccactatttattgagtatccaattttaaaagtactgacagaaggctcatga

SEQ ID NO: 268358 - DNA, 447 bp, Homo sapiens
ctctgaacttttcattggcctcctggctccccaaagggtacactgcttctgctggcttaatgtctcagaactttgatgtcgctggtctcagacaccactttgccatccactatcctgggagaggtggtcttctggatggtttgcctggagttgctgctgtctggggtatcaccaagactgaagtcctcaccatcttccagcaggtgacagtaggtggtgatctcagtctccagcttgaccttgatgttcagcagggcctcctactcctgggcctggcgctgtccctctgcagggtctgtgccagctctgactctaggtgcagcaggatccagtctacaggatctgccccatctgcagggtgtagtgggcctccacctccctcaggctgttctgcaagctggccttcagatttctcatgcagtccaggtcaatatccaagaactggac

SEQ ID NO: 268359 - DNA, 409 bp, Homo sapiens
ggagttgaacaatgagaacgcatggactcagggagaggaacatcacacaccagggcctattggagggtgaagggaaagggaaaggatagcattctgacaaatacctaatgcatgtggagcttaaaacctagatgatgtgttgataggtgcagcaaaccaccaagtcacatgtatacctatgtaacaaacctgcaggttcaacacatgtaccccagaacttaaggtaaaattttaaaaaagatagaaggaacattgaggtattaagaaaactattctgaattttggaataatatatattacattgtgagagacctaattataaaattggataatgaaaaggcaaggcaaaacaagaagatgtgcataaaagaatgaaaacaaaagaagctctcctctctttttttataag

SEQ ID NO: 268360 - DNA, 470 bp, Homo sapiens
gactaaactaaaccatgggaattgactccttaacattcactgcagctgtagtagtctctacatcatattcatagttttagagcaacagtccaaagcaagattactctgataatatatatgggtgtatatatatatatatatgtatatataaatataggagcagtacatagcattagtacacaaaacgctaaaggtggaaagtaataagcatacagcaaattactccagagcagatcacttctacagtgacaaaaataaacacgagccaccaaacagacactgactgccaacactggacatccaactccattaagtaggcaaagttaaaacatttaagagtaaagtctctcttaaacaaatatattaactacatttgtggagcttgaagtagtaaataggatgttatacaggcctaaaattgtttcttctcttttttttaaagattaggtgggcctgtaaaagatatcggc

SEQ ID NO: 268361 - DNA, 392 bp, Homo sapiens
gttttctggtattcttggttttatttttagaaataaaaaaaaacaacatagacttgaaggacttcaatagcacataagaaaaataagttgaatcaaaaggatgagaaaggattgaaaaagactagaacaatctttatcagagaattattaaccatgttaagggccaggcgcggtggctcacgcctgtgatcctagcactttgggaggctgagacaggcgggtcacctgaggtcaggagttcaagaccagactggccaacatggtgaaacctcatctctactaaaaatacaaaaattagccaggtgtagtggcaggcgcctgtaatcccagctacttgggaggctgaggcaggagaaccacttgagcccaggaggcagaggttgcagtgagcc

SEQ ID NO: 268362 - DNA, 462 bp, Homo sapiens
actgctgtttttgcaactctggactatgtcttccttcatctatctccttaacacgcttattccattaacacgatatgcgtggataaaagatgaaaccttcagaatctaaggaggtcaatccctgtggctctggctactagccctgtttcccagtttttacgaagaacccagctagagcagccaccctcaacatgagcagcttgtctccaggaacagtttcctatctcaggctgtctgccctttccttcctccctttctttcttccacagtctctggctgccttcttctcctcacacatctgccattattctctctgcctcttctccccaaccccccatgccatccatccagaaaacaaaaggtgctaaccccatgtctccacctttactgccccaaactcagacacatggaactcttctctctttttttttaattaaattaaatttaatttaattttaagtt

SEQ ID NO: 268363 - DNA, 289 bp, Homo sapiens
tgtggagctctgcaacctggagccagccctgcctggggtaagaggaaaaaggactccttccccccagccccacagcctgtacgcaaacacaccaggagacatgacctgctcagaggagacctggaaccaagggaataaaatgagagtgggttgggggcttggctgtttgttatttttttgcttgtaagtggacaatttgtggtgtggtgtgtgaatttggggtcttaaatccagatagctgtctgctgtggacagccactgtttctgaattacagggcatttcaagtga

SEQ ID NO: 268364 - DNA, 1404 bp, Homo sapiens
cccttctctactaaaaacagaaaaaattagccaggcgtggtgatgtgtgcatgtaatctcagttactcgggaggctgaggcaggagaatagcttgaacctgggaggcggaggctgcagtgaggcaagatcatgccactgcactccagcctaggcaacagagctagacttcatctcaaaaaaaaaaaaaaaaattgtctctggaaaccgaatttgtctctgtcttgtaattttgtttgctttctcatttcttctctattgtttcagttattttgtcagggaacctttaatcttttctaagaaaccatcagcagtgttattccacattatcttcttaacagcatttaaaaatatataaacacgtgattgatggatgccttgagaagttaaacatgatacttcctgcagaatcttggagcagtcatttctctagagtttaagcccaccttgtctaagtttgaacattagtcttttgtggttatggcaaatgtttgcttctaatgcttacttaccattatgtccatgtttgagttcaagtttcaataaagattcctcaatttggagtctatatgtggagcccataacttttagcaaatacaaaagcaccacatcagtttctacattgtaattgctcacaatatttaacccatctcctggcctattcgcccgatttgcttgcttcttcctctgtgtggactactgtgtggatatcattcaaataacctatcaagtggttttttggacaatatttcttgctttgggagtgagtggaatttctctttcctgaattgaggaaaaatatgaattcagaacagttaaatgtagattatcccttcgttatatagagttacttaaactaaagaaacattttaataccatgtagaaatacttaactgggtcttaactgaatctatgaatataatacaaatatgaatttatatatgatgttgctaaaggcactaagctaaaagcaattttaaatcttgaagcctgggcatggtgattcatgcctgtaagcccagcactttgggaagctgaggtggaagaatcccttgaggccaggattttgagaccagcctggccagcatagcaagtccccatctcttaaaaaaaaaaaaaaaaaaaaaagactctccatggcggcttgtgcctgtagtcctagctgctgtggaggttgaggtggaaggatcacttgagctaaggggtttggggttacagtgagctatgattgcaccactatactctatcctgggtgacagattgagaacctgtctcaaacaaaaagaaaaaccttctcgagatgattactttaaattttcttttgctatcttattttctacttctgacatttttggacataatggtcaccatgcctttatttgtgaagttttctataactgaactta

SEQ ID NO: 268365 - DNA, 161 bp, Homo sapiens
agataaaagcaaaggtagcaaaatattaacagttggtgaacctgggtgaaaactatatactgttattgcaacttttctgtgagtttgaaatttttcaaaatgaaaacattgaaaaaaatattaaaacctcatgaaacttagtaaaaatttattgaatgata

SEQ ID NO: 268366 - DNA, 555 bp, Homo sapiens
agggaggggttatttattatttacaactgcagaggtgtgagtggagtctaggggagctattaatacaagggccagtgggcacctgggggcagcagcagaactgttcactgctctttcccatgtgggcatccaagtgtttctggagcctagaaggagagttgggtaaagtcagccccagaggagcagtgaccttctgtcagtcaggccatgcagccagttggaggcagctttgcagggaagggggctggggaggacgcactcggaaccttctccgctcctctctctgctctcctgctagggctccccatgaatcaaacccaaccaaaggccagagggcatgaaaggccatcgccttggtttataccaagtcccctggggcagagagcagagaatctggaggggcaaacggaatccctccagcaatcccacctaaaaaataattcagggattcagagagcttgtgagcaaaaagaaaaatgaaaaacattcaaaatcaagcacagaatcaaggcaagatgactctccgaggaacctaatgtgaaatgattactggga

SEQ ID NO: 268367 - DNA, 410 bp, Homo sapiens
  misc_feature (138)..(138): n is a, c, g, or t
aaggcaagactctcttcctgtgagtccttcacaccgcctgcacctgtctaagccaccattccactccctttcccacctacagcctggtgatatctcccttctcctctgcactttatttctctccaggatcttcgcacntcaggccctcacatgcacctgctctcccccgcccccccctgcgctatcccctctcatcgcccttcctccctcccccttcccccgctgcgccccatcctccagccccccccgacccgcctcccctatccttccccctctttaccgcctatgccccatctctctccctcccttcgtccccacttccccccctcccccctccccccccctactctcctccctcttcccctccgcgctctcccccttctctctcctctctccctcccgcctccgcc

SEQ ID NO: 268368 - DNA, 128 bp, Homo sapiens
ggtgccagctgctagggcccctatggaaacaggaagctgcccacaggtgcacctgggctgtggtgggggctggttccatccaggttcagtttgtgcctctgagaaaccaacccagggttccactagct

SEQ ID NO: 268369 - DNA, 496 bp, Homo sapiens
tgtgcttcccgcttctgctactgctgtccggctggtccgggtcagggcgggccgacacacactgtctttgctatgacttcatcatcactcctaagttcagacctgaaccacgatggtgtgaagttcaaggcctggtggatgaaaggccttttcttcactatgactgtgttaaccacaaggccaaagcctttgcttctctgcggaagaaagtaaatgtcacaaaaacctgggaagaacaaactgaaacactaagagatttctcccttctctcccacacaagcacactaagacaaactgaaacactaagagatgtgggggatttcctcaaagggcaactgcctgacattgaaatggagaatgtaatacccatcggtaagtttaaaatagtccaggacagcagagagcagacacagtagtgtcttagaggcatttattggtttcctgtaaaaaataaatcagaagtttgtgtcacccaagaggttgaggagcatgggcc

SEQ ID NO: 268370 - DNA, 369 bp, Homo sapiens
ccatccacaagatgcacagctggccccaggggaagaggcaagcagccttggcttgctgggcccctgggctttgttgctcatggagcaggcaccatcttggcatccttgacgcacagcaacggttactggctcttgacaggccctggacagacctcagtccatgcacttctctcttctctcatgactcactctgctagccaagagtttggcaaacagcttctacaaagggaagtacattcacctttgtgggccacgtggtctctgccatgacctctgaaccctgctgctgtagtgtggaagcagccgtaacaatacctaaatgagtgagcatgctatgttcctataaaactttatttgtggacattgaaa

SEQ ID NO: 268371 - DNA, 731 bp, Homo sapiens
tgggactttttacagttgtttgtagtaagagaactcccattttcatcagtggaactggacaactacactggtccaattcaggcaaatggatagagttcacagcaccaaaccagcagccacaggaaattaatataactgcgaaggaaaagatttcccctgctcgagtctccctgcactcctacccatctgagagaaacagaactgttgagtagctgatgcaatttcatccataatattgtggattcaccattgattcagcatctgatcctcagcactgtatatctaagaactcattctccttggttcatcaggcatgatcagattaaggattcatacacactgacctaactcacaggagagagttataaatcagaacaccaatttattgccttgttcatggaaatagaaacactacatgtgtcagcttactcagatcagcagctaaacactgttcggtgttgattgggaaatataaagccagaatgaaggcagctggttcatcttgatagcaaatgttaccaaatctcatagtctggtgccctaatctccatgggattagaacatgtacatcgaccagagaggttctctttctcctgactatgctgggacattctggcaaattctgactcatcactccctttctagaatccttaaagaccatcatcacgctatttcaagaatattccttcagatgtgttacaaagattaaatgttgatttatggtatctcta

SEQ ID NO: 268372 - DNA, 1085 bp, Homo sapiens
agggaggctaacaagcaactactgaagccattgcagagtgaggtaagccatacaaaggaaataaagagtgctatgacagatcatcacagaaatggtcctgaaaggcctcttaggagggaacttgcaaggtgagaatggaaggatgagttaggaattaaaagacctaggaagtatgggatatagaacaatgcggtaaaggaaatagcaagtgcaaaggcccaagttataaaagagcttgttgtgctgtatcaacagaaagaagtcctgtgtggttgaaagaataaagagcaataaagagagttccagaagatgacattgccagggcaggtagaagcctgatcatgttagacagttagacatagtaaaggttttattttggagtgatggatttcagacttctgacttccagaattaggagataaatgtgtgttattttaagtcaccaagtttgtggtgtttttttacagcagccacaggaaattaatataactgcgaaggaaaagatttcccctgctcgagtctccctgcactcctacccatctgagagaaacagaactgttgagtagctgatgcaatttcatccataatattgtggattcaccattgattcagcatctgatcctcagcactgtatatctaagaactcattctccttggttcatcaggcatgatcagattaaggattcatacacactgacctaactcacaggagagagttataaatcagaacaccaatttattgccttgttcatggaaatagaaacactacatgtgtcagcttactcagatcagcagctaaacactgttcggtgttgattgggaaatataaagccagaatgaaggcagctggttcatcttgatagcaaatgttaccaaatctcatagtctggtgccctaatctccatgggattagaacatgtacatcgaccagagaggttctctttctcctgactatgctgggacattctggcaaattctgactcatcactccctttctagaatccttaaagaccatcatcacgctatttcaagaatattccttcagatgtgttacaaagattaaatgttgatttatggtatctcta

SEQ ID NO: 268373 - DNA, 275 bp, Homo sapiens
ttctctaatgtcaagtatacaatttaatgatattttcagtaaattcaccatacatcagttttagaacattttcatcccctccatcagacccatgcactgttaatacctattctcaccccctgcttgaggcagcctctaatctactctctgtctttatggatttgcatattctggagattttatataatatgtggtctcctgtctggtttctttcacttagcatcatttttagcatgaatgccatagcatgtatcagtactcattccttttcattg

SEQ ID NO: 268374 - DNA, 439 bp, Homo sapiens
ttttgaatattttatgtatgccacacattaccctctcttagacagctgtatgttgggaagcagcatgaaaaaatgcaaagaaattgaacttgcactttaaaaagtgctgagattttgcctctatttagatgtggaatagacaacataacatgacatgctaggtggagggcaatgggttcagttaggattttatcaaagtaaaaaatgaaaaagttgataattactttcaataaagaaatctctcacttgcaaactgtacgttagaatctcaattttaaatacagagaaaagaaaatatacttacaaggacccgtgtattttatatattgcccattgctatattgccgcttggcatatgggcaccaaaggaattattattatacacagcattaatgtagaaataggaaacatttaatttcctgaggtccctctctctctt

SEQ ID NO: 268375 - DNA, 401 bp, Homo sapiens
taccaagagctgaagaacagggtaggtgccacaattctctaaaacagtaacacacatgcctgcttcctcactctgaaaatcagaaatggaccctatctcccaatgccatgtcatcaccaatgaagtcacagaatcttccttaaacccaccaaacaggtttcagaaccaggactgaggtacaaacttagcatcgatggatttaggagaacaggggaaggcacctatgagaatggacagggtcattggtgagggcctggcgcatgtccaccccgagtttctatggaagtcgggcaggtggtaagaacagctagtgtgaggatggcaagcacacgttcagtttctatgacattctggcaacatattcaggcagtagagagaaacgtagccatcacctgcagaga

SEQ ID NO: 268376 - DNA, 631 bp, Homo sapiens
ccctggcatgggagggaagagtgataactgtaaaatacccctaggctttctccatgacaatggttactctccaagggaaaacactttgcaagagccttgtctcagctgggaattcccaagggaattcctcaagttccagcaccctcatcactttatcacttaaaggacaaaaaactcatagtcaacaggggtcagcgcttcaaggaaattgttacagaatggtaaaggggtcgaatatccaagaagacataacaatcctaaatgtgtatgtgcataacaacagagcatcaaaatatgcaagacaaacactggtaagactgaaaggagaagtagacaaatcctgtcttatagttagagattttaatctctttctcacaaaagttgatagaccaaatagataggataaaaatgacctaagcagtactgtcactcaacttgatctaattgacatttataaaatattccattcaacaacagaaaaatacacattcttctcaagctcacttggaatattcaccaagatagagcacattcttggaaaacatgttaacacatttgaaagactaaacgtcataccaattatgttctcagaacacagtataattaaactagatatcaacaacaaaaagat

SEQ ID NO: 268377 - DNA, 401 bp, Homo sapiens
ataacataaaagcaccttattttccaatagaagtagaagtaattgcagtagagttaattttacagtagaagcaattacaatagatttcccattagaagaaactactacaggaagcaactactgcaattttccagaattaattacaatggtaaaattaagttggccaaagtagataaaattataacttaattccacaaaataagctaactaaatcaagcactgacaactttgaaggaataatctaaatagaaatgcacggcataatttgcccctgacttatgatgattcaacttaagattctttctttaatcttagaattttttttttactttatgatggtgcaaaagtagaaattataatttaaattttgaattttgatttttctaggctagtgatatgtg

SEQ ID NO: 268378 - DNA, 449 bp, Homo sapiens
tccagataaaagtttacttttgttaattttgaatatatttctgcattgtggtgttctaaaacccaggaaacagccaaatcacaagttaccatttaacataaacatacatagtggatcctatattaagcaacccatttggaaagcactgatgtacccaacagttacatatagcatttcataaagaactgcacggagtttaccattgctaacacccagtacctatagtcacctaatgtctggaacacagtaatgcagatggcaagtttcttttgaaaatgacttaagtagttttcttgtggaacatcaaactttattattccaagaaattaagatataggtaagaaaaaatgaaatgccaaccctaatttaaattatctacatcttcaagtctgttaacagtaggaggttagatgtctgtggccaattttaaattaggtttcagataattg

SEQ ID NO: 268379 - DNA, 579 bp, Homo sapiens
attctcaaaacaacatgcaacactggcctgcatctttaaatggagctctaaagttcaaaagagagaagagagaaaaattgtgcagtcacttctcaggtggcaacagttaacattaaagctatgggtccaaagtaacgtgaggtgaccctgttgtacaatgagtcctggaagctaagtagactcagacaagcagcagaaaatgtccaaggttcttttctcagctccactaggagccatttgcccctggctttccagtctgtatcttgatgtctccacataccctcctcccctctcccaaggtgaaggcaaacaaagcgaatcacaggggtttgctctgacattctggtgatcccccaacccccacactagtaagtggcaccctgggggaatgaacagtgcctggagagcacagctggctgcagccttaggccttctcatttgctgccttagactcggtctctactcgaggccctgaatgactgcgggactttttaaatagggaagaaaaagaaaacccagatgtggcagtaataggaacatggctaaaagtctagtaaagttttctgagtgaacatgtgc

SEQ ID NO: 268380 - DNA, 476 bp, Homo sapiens
gggtgagcaaaagttaatataacattatgtaaacaattagatagcttttactttctagaccaggggttcccaacccccaactggtagtgatcatggcctgttaggaaccaggatgcacagcaggaggtgagcagcaagtgggcaagtcaagcttcatctttattacagccactccccgttgtgacattactgcctgaactccacctcctgtaagatcaacagcaacattagattctcattggagcactaaccctgttgtgccctatgcatgtgagtgatctatcttgcatgctccttataagaatctaatgcctgatgatctgtcccccaagatgggactgtctagttgcaggaaaacaagctcacagctcccactgattctatattatggtgagttgtataattgttttattatgtattacaatgtagtaataatagaaataaagtgcaaaataaatattatgcattgaaccatt

SEQ ID NO: 268381 - DNA, 562 bp, Homo sapiens
gcctcattcaggcaaatgaagaccaaagctgggctacggtccctcaggacgaggggcacacagggaatgctgcttgcatttcagctcaggcacagcatcatggagttctgcttcagcttgtactgaaacgccttcagaacatgccttgttccttttcaaggcagcagctccaacacgacccagctggtccctccgcagtcatacgccagtccctctcccacctgggtaactagggaagcacctgccaccccagcgctgcacccccaagctcagggcagcttcctggtcccggccacagggggcctctgcagggagtgggtgcagaaggcgcagatgaagacaggcccgagttgccaccacagctgctcattctcaggaggggaggggcggcaggcaaggccaccaaggcctgagcgctggtgcggaggcaaaggcagcccagactcagccgtcatgtgctgcagaatgaaagatctggggaaaaaagaccactgctatgtggatttcacagcaagtggaacttaattccctctaaaataaaaaatgcccacatatagtaaaa

SEQ ID NO: 268382 - DNA, 350 bp, Homo sapiens
gtcgggctggtcccgacctcaggtaatccgcccgccttggcatcccaaagtgctgggattacaggcgtaagccacggcacccatccaggttatcctgccttctatgggttgagaactgccccagttactaagtagaacatagaagtatatgtaggtttctgttcttataggccaaggcaggaggatgacttgagcccagtagttcaagattagcctgagcaacacagtgagaacctgcctctacaaaaaaagaggcaggaggattgcctaagcctaggaggttgaggctgcagtgagccgtgatcacatcactgcagtccagtctgggtgacagagcaggaccctgtctc

SEQ ID NO: 268383 - DNA, 510 bp, Homo sapiens
agcaaatgattatctgatcttttgctgagaccaaatgctaagaatgtgttgagatcttggaacccaaaggtattagatgaacattgagcaagaagcatttaatcgcaaggctggttgcccagtccaaggttctttgaatgttgttccctgctagtgctagtactatagtcttcagaagtccatagtcaaaggtaggtagatgctggagtactcacagtcagatttctgagcagttgaatacaatggcttttcttccctttactatgatattttagaaatagaaatgactagatgctaacatattttagttcaatatatatcacttcttgtcattaattcaattctttggtttattttgtttctaattgcacagataacaagaatttcctaacatttttctcataccctttggccacttaatgttcccatgctatttattcctgttcatttttcactgtttgatgatggttattgttgaaatttagcaaataaaatgtcagctgtggcacc

SEQ ID NO: 268384 - DNA, 418 bp, Homo sapiens
cagtaaatgacacagacatgtagattccatatctgctaatggtgtacataggtcagcactcttgtactgaacctgaagatcctttaattatgccagttccccttctcttccacttatggactgcctctccaagagcagggggtctgtttcccatctgatggaccacttaccttcttttctttaactctactttctatctccaaaaatccactgagtattcacattactgattagctgtgttttccagagccattgctaatcgcacgtcgaccttacataaaaatggaatattcatgcattttctatgtatttttaaagccattatttgtggcacaagctcagtgtgctttcagagacactgaacactctgttgaagaaactcaaatggcttttaaaataaaaagacaaaatcattatc

SEQ ID NO: 268385 - DNA, 803 bp, Homo sapiens
tgctatattaaatattacatataatacatgtgtgcatattcatacgtgaatatatgtgaatgtcagttactccctgcatttggaatagcttttattaaatgatacaatggtagtggcatatttatttatgaaacattaactgaatgatttaaatctttgcaagtctgtccagtggatggagacttaaacacacttgtttctactatcttgatttaagtcttaccaaaaataaaccaatgtgactaaacagtaattattgttaatgtaattaaacattagtgttactgtaaattttacatttacataaaatgttaacatttatattagtgttaatataaacacattaacagtacttaaaaaagattcttgaaatctgcttttagatacctctgctatccaaaaacaaatatccagcaactgtactatctaaactgtagctaaaaagaaggaaaaagatttctttgctgctgaaatttatgtcacagtttatgaatcaactcatactttattaaaagcagagcccctttaggtgttctctaattcaggctatttattttccctcattttacaactttaataagcttagttgtattccctaagcctccaatataataagaacaaactgcaacaagacacaaggaggtaccaatcaataagaagtgtcagttgcgagcaaagaaattgaaaaaagcatacatataaactctcaaagtaatggtctagggctatttcatataagagcaaatagcctgtttagacagtagtaggccctgtctaaacaaaacattttatagtatgataca

SEQ ID NO: 268386 - DNA, 442 bp, Homo sapiens
cctgcggccgccggagcagctcccgcggcggagcaggagccggatggtcagaggagcccggcagccccagcagccgcggagtcgcctggcccccagactgactggcacagtggagaaaccgcctcgaaaacggagaagcaggactgaatttactcttaaagaaatcatgtcctctggaggtgctgaagatgatatcccacagggagagaggaaaacagttacagatttttgttatcttctggataaatctaagcaactgttcaatgggttaaggctggagtgtgatggtgcgatcttgctcactgcaacctccgcctcctgggttcaagtgattctcctgcctccaagcgattctcctgcctccaagcgattctcctgcctcggcacccaccgcccccctaccccgagtagctgggattacaggtgcctgtcaccatgcccg

SEQ ID NO: 268387 - DNA, 910 bp, Homo sapiens
cctgcggccgccggagcagctcccgcggcggagcaggagccggatggtcagaggagcccggcagccccagcagccgcggagtcgcctggcccccagactgactggcacagtggagaaaccgcctcgaaaacggagaagcaggactgaatttactcttaaagaaatcatgtcctctggaggtgctgaagatgatatcccacagggagagaggaaaacagttacagatttttgttatcttctggataaatctaagcaactgttcaatgggttaagagatttgccacaatatggacagaagcagtggcagtcctattttggaagaacttttgatgtttacaccaaactctggaagttccagcagcagcatcgacaagtcttggataatcggtatggcttgaagcgctggcaaataggagaaattgcttccaagattgggcagctatactatcattattacttacgcacatcggaaaccagctatctgaatgaggctttttccttctattctgcaatcagacagagatcatattattctcaagtcaataaagaggacagacctgaattggtagttaagaagttacgatattatgcaagatttatagtagtttgtcttcttctcaacaaaatggatgttgtaaaggatctggtaaaggaattgtcagatgaaattgaagattatactcaccgatttaatactgaagatcaagtggaatggaacttggtgcttcaagaagtagcagctttcattgaggcggatcctgtaatggtattaaatgatgataataccattgttatcacatcgaatcgccttgctgaaacaggagccccattgctggaacagggcatgattgtgggacagttgtctctggctgacgcactcattattggtaattgtaataatcaggtaaag

SEQ ID NO: 268388 - DNA, 583 bp, Homo sapiens
ggacacaggcaatcatatcattgtgatgacttttagaatctgtaatttgcacccctcttgttggtgccctaatgatactgccatgaacttatgtaacagcatgaagaattctggatgttaaaaattaagtctcatatttgttcttatatccaatttaacctgaattaaatgtatgctttgggagaaattgtagttggagcagttttaggttgcttgggtgcatctgaaaagtcacgacataccatagaaataaaacagcttcattttgtttagtaagcacttactaaatgtctgctcagcaaaggtataaggcaatggaagtatgagaatgaatttgtaattacagtaaaatgaccagacagccaatttcctcaatagttttgacttttctttctcctttttcctcttacttggctccgcttcctgctctctctcttactagtccgttttcccgtttatatataccattaatcatgcttatctttctccacttctttttctcctccttttattctcgtcttttatttctctctattccttctcttttttttttgtcttcccccacgtattacctgcccgtccg

SEQ ID NO: 268389 - DNA, 133 bp, Homo sapiens
cactcagtaaatgttagctaatcttgtatgccaggagcattggccaccatatctaatgtaattacaaggcaaattttagccccttttttaccaaagactggatgaacccagtccctggtggtctagtggctag

SEQ ID NO: 268390 - DNA, 304 bp, Homo sapiens
tacagaccagcaccgtccatggcctgttaggaaccgggctgcacagcagcaggattatgctaaagtcgccaggcaagagaccgagatgagcccacctcacaaacccagaaacctcagatccaaggcagctgtataaggtacagatcgttccggactgtagaagagagggttaatccaacttcatcaggagagaaatgccattatccactgaactatttcttgactatctcctgtatgctggtcagtttcactcacattgtctcatttaatctttgacaaactaaataaaagtgtgaagtaaata

SEQ ID NO: 268391 - DNA, 524 bp, Homo sapiens
tgctgtatttgacaatagatgtccataagcagttaaggagttcagtctgcccttagggaagctcaacacaggcccatgtgcatgcacacacttgcactccttcacacccccaaacaccatcccactccatacatgtatacccatcttcccttcccagatccctccccaaacagttaagttaccatggaggtatgcatctaaatgagttatagaaaagatgggaagtctcaagggggaaaaatggctgtaactttggatgatcaggcttgcctttgaaaaaagaatttgaacccttgtagaggatggagatgctttgtgtagaatgaagccaccttcattcctctcccacagagggtacatctagaagaagaaactacttgagcaaagtctgagctcagagatggggaggtgtgacaggtgggaggaacagatgggagaaggcttttaattccaggctgaggaaattgacatttatcctgcaagcagccgagaactttggtacagacaaatgacaaaattgcaaa

SEQ ID NO: 268392 - DNA, 352 bp, Homo sapiens
ttttaaaaaatgtatggccaagaatttccaattccagaaagtagtagtcacttctattattcttttcatagcttagtgtagtaggtatacaaaacataagcacatcaccacctatcaatttggctaaattattttttataaactattttttttttcagagacagggtcttgctatgttgcccaggctagactcaaactcctgggctcaagtgattctcctgcctcagcctctccagtagctgggactccaagcatgcaccaccatgcctggttcttaaacttattttttaagaaaaatataagcattctataggtagttaaaaaaaaaaatcatagttctggatacataaaa

SEQ ID NO: 268393 - DNA, 253 bp, Homo sapiens
gcctatgtaaattaatgttgaaagtctagtatgaatagatcatctcttctttctttctggctgctttaaagattttgctttgtttttaggagtctgtgatttgtttatatctaagtggggaaactccttctctcccaacttttccctccctctttttctccctttctcccttccttccttccttcctccctccctccctccctccctccctcctctcccctccctccctcccttcctccctccctccttcctc

SEQ ID NO: 268394 - DNA, 516 bp, Homo sapiens
gatgacaggcgtgttgagctttttaacactgcctttggatgggcgtgctggaaggtagggccttggctgcctctgctgtgactgcccatcacactgcttctaggcctgggccccaacatcagaatgtatgggctttgtagaccaagtgcagatattggcagactacataagcagcactggaaattgtttttcaatgttacgttacttgtgtataaaatgaaaagagacggctgggtgtggtggtcacgcctgtaatcccagcactttgggaggccaggatgggtggatcacaaggtcaggagttcaagaccagccggccaggatggtgagaccccgtctctactaaaaatacaaagaaggttggccaggcgtggtggcgggcgcctgtaatcccagctactcaggaggctgaggcagagaattgcttggacctgggaggcggaggttgcagtgagccaagatggcaccactgcactctagcctgggcaacagagcaagactccgtctcaaaaaaca

SEQ ID NO: 268395 - DNA, 458 bp, Homo sapiens
accatcgtaagttggggaccatatgtaattaaaaatacagccagtccgtattaacattgtgtactcatataagacttcattagaaaaacaacttgctaccttaactagaacatctgattgacttatcagaaatgatttaaaatattgataatgctgatgatcaatttgttttaaactaaatttattcctgttaattgaaatgattttgataaacttttgattcttttgactggttttgtgttatcctataagagatatggtgataggcctcatagtcaaaacttgttattgttttatttgtttcttagtttcaaatgattcctatatttggactgattttgatggccaaatttataggcttgttctttgtgaagcccttgaagatcttctgaaggaaatactgttaaactaaaagtatcagttttctaagtcaccatagtgtttgcagaaaaaataaa

SEQ ID NO: 268396 - DNA, 264 bp, Homo sapiens
ctgtcctttaaaatatctttaaaatcaaattataatattttcagaggaactagaggacaacattatcttttaatgtaatggttccaaattaacaacatttaaacaaaataacagtatttatgactgtgcaaagtcaaatctacagaacttcattcaaaagggatgagtgaattttagtagttaggaaagattcaaaagcatgtttgtaatgagaattcttctttctcttccacattgaaggtatcacatttatgtacctctgta

SEQ ID NO: 268397 - DNA, 332 bp, Homo sapiens
gttggtgggtataaaggaaaagaatcaactggctttggccaaagtaatgaaaaggtcaaccagttttctttcacctttgttctcttactaatcatgggaaggacacagatggctccagtttaacttcctctgttctcacaggtgccggtccattaacttccaagagaatcccatgagtatatagtatggtttcaaaagaatggaagctagaataacacaaatgtgaactctagtcccaattcttctaattcctgggttgttgatcccaaacacattatataaagttatctgttcttccatttcctctaataaaataaggctaacatacaggt

SEQ ID NO: 268398 - DNA, 430 bp, Homo sapiens
acctctgcagtaatcaaggcccccaggagtcccttggtgagatccggagctcccaagcccagcccaagctcctgcttaaccctgcattttctggaagcacatccccacagactccacgcctggagaggagccggggttgtccctttccgtctctaacaacaccggctgtcaacaattttgtaaagtgagttctgctctcccacagacttgcaccatgaacttggaaatctctgactccacatcactgcccagagtgcaggctccctcctttcccttcaagaatccagtctccaaatccaacagctgggttcgaatcccaattccaccacctagtccctgggtgatctcagataaggttcttcacctctctgaacctcagtttctcatctagaaaatgggatgatagcaaagactacctcataaggttgcg

SEQ ID NO: 268399 - DNA, 555 bp, Homo sapiens
tttggagagctcgtgtggctttagcaggtcctgggcacccaagccacaccccctgtatggggtccacacaccttgctgacgggcaagggaggtttgtgcgaaggtgccggccatatcgcctcccacctacagcccccacaaagagcctgttagtgacagcagtgagtcattgtcatttgattctactctgcagctcctgcttaaccctgcattttctggaagcacatccccacagactccacgcctggagaggagccggggttgtccctttccgtctctaacaacaccggctgtcaacaattttgtaaagtgagttctgctctcccacagacttgcaccatgaacttggaaatctctgactccacatcactgcccagagtgcaggctccctcctttcccttcaagaatccagtctccaaatccaacagctgggttcgaatcccaattccaccacctagtccctgggtgatctcagataaggttcttcacctctctgaacctcagtttctcatctagaaaatgggatgatagcaaagactacctcataaggttgcg

SEQ ID NO: 268400 - DNA, 517 bp, Homo sapiens
cctcagcagtgtcacgacagctgaagtgtcacttattcctcatcctgggcacaccatgatggagtgcagccccactgattgggacccatgcagccagcctggcccagggccactctctctcccagaatgtgcacaagtcaagggatctctacttccatccttattttcctcaaaagctggtgccagcagtaatcaaccagacttctagaaaagaggagataatctgctctcaaggctgctgtgggctccagtgttgtaatctactacttgaatctagttgtttatttcattctataataatttaatacagcagatgtcaggagaaatctttgtttagatattatgtcatatctggatatatctgaatcctgaatgattaatctaaatattaacaatattcacttctgccaatgtcaagagtattttctgctactgggcttaaatcaattttaaaatttgagagttttaaaagcatatctttctgtgttcataaataaacagaacgaagattctttga

SEQ ID NO: 268401 - DNA, 949 bp, Homo sapiens
aaaggcaattcaaaagaaatgtaaatggccaacacatatttgaaaatatgctaaacttcattaatgctcattaaaatgcaacttaaatatatgatatgatatcctctttcatgtagttgagtaacacaaattaaagagactactaacacactgcaatagaagtggaggagacatggccaccttcattcattgctggggaaatgtgacatctgtaactattagggaaaaaaaatctgccagtatccatcaaaaattaatccactaatcacatttttgggaatctagtttatatatgaaaaaaaccaaaaaggctctagtatgacaggatttgcaagaatgtttattatagcattcccgatagagacaaaagttgcaaaaacctccaagtgcatcaatagtagaataaacaccatgaaatatcatgcctttctaaaaagaatgcatgtgatctgtatgcactggcctcgagggatggccatgatatactgcgcataaaagcaaattgtactttgattagtgagtctcattccttgaaaagagaaaaaaaatagacagtgtttatgtatctgtatacatttgggcgtagaaactgcttttaatactgttcctttagaaatggtaagagatcggggttaactattatttatctttatataacttagtactgtctaagctgttttaaaaaaggggtatttttccattcttattaccttatttcaaaaatcagatactctaaactatgattcagagtcaagtagagagaagcagagagagaatgtcatagtctggtgtgctatttctgattctacataaggaatgtgataggtaataggataaatctttataggtctttatgggaagagcgaactctagataaactaaactctattagataaaagtgaaatttctggcttggcttaaaaatatactgtacttgcaaataatttag

SEQ ID NO: 268402 - DNA, 1301 bp, Homo sapiens
agcggagaggcgcagagagagctgggagctaaggggtggcggcgaccggaagcgcagtgcacacccccatggcccgggctttggtccagctctgggccatatgcatgctgcgagtggcgctggctaccgtctatttccaagaggaatttctagacggagagcattggagaaaccgatggttgcagtccaccaatgactcccgatttgggcattttagactttcgtcgggcaagttttatggtcataaagagaaagataaaggtctgcaaaccactcagaatggccgattctatgccatctctgcacgcttcaaaccgttcagcaataaagggaaaactctggttattcagtacacagtaaaacatgagcagaagatggactgtggagggggctacattaaggtctttcctgcagacattgaccagaagaacctgaatggaaaatcgcaatactatattatgtttggacccgatatttgtggatttgatatcaagaaagttcatgttattttacatttcaagaataagtatcacgaaaacaagaaactgatcaggtgtaaggttgatggcttcacacacctgtacactctaattttaagaccagatctttcttatgatgtgaaaattgatggtcagtcaattgaatccggcagcatagagtacgactggaacttaacatcactcaagaaggaaacgtccccggcagaatcgaaggattgggaacagactaaagacaacaaagcccaggactgggagaagcattttctggacgccagcaccagcaagcagagcgactggaacggtgacctggatggggactggccagcgccgatgctccagaagcccccgtaccaggatggcctgaaaccagaaggtattcataaagacgtctggctccaccgtaagatgaagaataccgactatttgacgcagtatgacctctcagaatttgagaacattggtgccattggcctggagctttggcaggtgagatctggaaccatttttgataactttctgatcacagatgatgaagagtatgcagataattttggcaaggccacctggggcgaaaccaagggtccagaaagggagatggatgccatacaggccaaggaggaaatgaagaaggcccgcgaggaagaggaggaagagctgctgtcgggaaaaattaacaggcacgaacattacttcaatcaatttcacagaaggaatgaactttagtgatccccattggatataaggatgactggtaaaatctcattgctactttaatctatgtttcaaactcaaatgtctaca

SEQ ID NO: 268403 - DNA, 1097 bp, Homo sapiens
agcggagaggcgcagagagagctgggagctaaggggtggcggcgaccggaagcgcagtgcacacccccatggcccgggctttggtccagctctgggccatatgcatgctgcgagtggcgctggctaccgtctatttccaagaggaatttctagacggagagcattggagaaaccgatggttgcagtccaccaatgactcccgatttgggcattttagactttcgtcgggcaagttttatggtcataaagagaaagataaaggacccgatatttgtggatttgatatcaagaaagttcatgttattttacatttcaagaataagtatcacgaaaacaagaaactgatcaggtgtaaggttgatggcttcacacacctgtacactctaattttaagaccagatctttcttatgatgtgaaaattgatggtcagtcaattgaatccggcagcatagagtacgactggaacttaacatcactcaagaaggaaacgtccccggcagaatcgaaggattgggaacagactaaagacaacaaagcccaggactgggagaagcattttctggacgccagcaccagcaagcagagcgactggaacggtgacctggatggggactggccagcgccgatgctccagaagcccccgtaccaggatggcctgaaaccagaaggtattcataaagacgtctggctccaccgtaagatgaagaataccgactatttgacgcagtatgacctctcagaatttgagaacattggtgccattggcctggagctttggcaggtgagatctggaaccatttttgataactttctgatcacagatgatgaagagtatgcagataattttggcaaggccacctggggcgaaaccaagggtccagaaagggagatggatgccatacaggccaaggaggaaatgaagaaggcccgcgaggaagaggaggaagagctgctgtcgggaaaaattaacaggcacgaacattacttcaatcaatttcacagaaggaatgaactttagtgatccccattggatataaggatgactggtaaaatctcattgctactttaatctatgtttcaaactcaaatgtctaca

SEQ ID NO: 268404 - DNA, 692 bp, Homo sapiens
tctgctggattaaatccaacctggggttcggaatgtttcacaagatgggatacaaactaaacttgaatttaacgaaaaattctgggaacggctagtgtcttttaaaatacagataggtgtaacattcccttttgaaactacagataaatttgagaattgtccttcattggagagcattattacagagcttagaacattttgttcccaatatattataagtggagtgtgggggtacctgcgagattaactgcacattttcctaagttatcaaatgcttttctgtgtctgaggaaattaaaagacatttttattttcaaaaataaaggtagcagttaagaaaaagcaaagcatacatatctatgtaatataaaaagagaaagcacatacagtgaaagattaacagttgggaccctcaggtgaagggtatctgcgtgttcactgcatgattttttccccaattcttctgtaggtttggagttttatatataaagagttgagggaaggctaaagtcaacagttttaatttagtactcggtctgatgatttgcttcaacctaacatctagctcatgatttaattacttcattactatacatgcctcatgacagatgctcttgtatacacaattcaggtaaaattgacttgaagtccactcagcgtcactgtatgtctaaaaataaagaagcttggaa

SEQ ID NO: 268405 - DNA, 454 bp, Homo sapiens
gaaaattgaaaaatgcagaaaactatgaaaaagaaaagatcccaccccagagataatctatttcctacctagataggcgtttgacaaaaatggctttgtattgttttgtagtatgcttacattttattctgttttcccgtgccaccaaatatccttccaaaacaattgtactgattgcatgatgtttcaaaattaaaggcaccataattaatttccccaaccttttcattgttcaacattttatacactcagatcttcagattccaagtccaccacaattaatgtgggctcctttctccggcctctgttccagtgtaatatgtcaggctccagaataatcttcctcagatgtcattgtccactgtccactaagaacatttagtggtggctttgccttgagtgtcaaatcccttaagaattaccttggccaacaaaagcaaaactccatctcaaa

SEQ ID NO: 268406 - DNA, 273 bp, Homo sapiens
ggcatgaattagaatcaaataatcttcctgtgtacatcttctagcatgacccacatccactgagaatgcctcatacatgcataaagctcaccagcgggtcctcccccttctctgcatgcatgccttatatgaaagtactgagcctagaatgtccggggcacaatcaccatccaataggcattgaaaacagagacaggcaggaccctcgggtctgcagttaggagtgtggacactctgcccatctccattgaattaaattccaaaccacaaata

SEQ ID NO: 268407 - DNA, 461 bp, Homo sapiens
cccatgttttttatattctctttgaactaggagttaggttgtctaagaataagtatagagaacatagagcgggtaaggaaattcatgagtatttcaaaataaatgttgtagaaattgaaagagtaacctatgaatttagggtataatttccttcagaaggactcaacagcctaggtttgtgaattcctaatggtcagacaataaggttgatatttgccctctgcacactcatcctttcattctcttgtttgttccatctttcataaataaaatgtgtgtcaagtatcttctatgtactgggcctgcaggacaacactgagcaagacaaacagcacccctgcctgtagagtcttataacagaagaaacaaacaacagaaaatcacaatagcaatgaataatatataggaggagttcatagtactatggagaaaatgtaagatgattgcctaatcctgactag

SEQ ID NO: 268408 - DNA, 631 bp, Homo sapiens
gcactgctgttggtagcacattttctactgggactcaggtaagctaatttctgtgttagggcctttccagagcttcacctccctcatgttttgtattcataagagagcacttcaggttcttactctgaacctttgcatttttatttttcacctatttttgaagagtcataatgtattaggtcccccttttcaaaagaaattggaaacagctacatttatttttagtactaggactctgctaactgtactctagaagcaagaagttgtatcttgatggcaaaaaatacttaaaaagcaatcctaagacctcacaagcagtttggggccacttagtgtcagagcaaacatcctgacccaagtgtcattcatgtcttaaagggatccctctgttatatcagttttcaataattagtgttgacagtaacatgagtaatattgtcagtaagaagattttaaaagtatgttccatatactctgtttaaggaaattacattcatggactttctttcccaatgatacaaatgttgagtattattcaatgagtgtgtgtacacacacatgcacacacccatgcgtgtctgtattcctctattggttacatcatgttattcttctatttaatttttatttg

SEQ ID NO: 268409 - DNA, 383 bp, Homo sapiens
acgtcgtgctctgcgcaagagggaagtcctgatttttggggtgccacaagcctgagacaaaacaaatttccattttcaaccagaatgaaattaagaaaacagataaaagccacatacaaaatctcattgagagtctttttgctttttaactataaaaatttacaactaaaatgaaaagtgcctcggaatgaaatattaaatccaagctggtgtctgtccacctgtccttaggaagtctcaacttacgaagtccactaaatttctcaaaaaagagttttatcactttgaatttgtcccctgcttaaaatcccccaaaatatacaatatctaataaaaatcagccttttacttataaaataaattcatttatcagcatgagaata

SEQ ID NO: 268410 - DNA, 343 bp, Homo sapiens
tcgcggccttggaagggtggttgatttactagatgaaccagataccaccggagaagtcttagatttcgttactttacttccttccagtttggaatgtacatgctcatcagctgagaaatttacaactaaaatgaaaagtgcctcggaatgaaatattaaatccaagctggtgtctgtccacctgtccttaggaagtctcaacttacgaagtccactaaatttctcaaaaaagagttttatcactttgaatttgtcccctgcttaaaatcccccaaaatatacaatatctaataaaaatcagccttttacttataaaataaattcatttatcagcatgagaata

SEQ ID NO: 268411 - DNA, 505 bp, Homo sapiens
cagaagaaaagaaataattagagcagaaataaaaaatgggacactgatagaaaaaagttatcaaaaccaaaaactaggtttgaaagattaaaaaaaaaaaaatggataaggctctagccaggctaattaagaagaaaagaggaaggacacaaattatctatatcagaaataaataaggagttgttactacagatcccatggatgctaaaatggacagttctatgtccacacagaggatcaatcacttgagagacataatttgtctaaactcatacatggagaaatagatgacctaaatatgtttacatttattacagaagttgaccttccaaaacagaaagcaccatgtcaagatggactcactggtgaattcaaccaaatatttaaggaaaaaattataccaattgtctataatttgttttagaagttagagccgagagaatacttcttaactcattctatgaggccagctttatcctaataggaaaatcagattaagacatca

SEQ ID NO: 268412 - DNA, 857 bp, Homo sapiens
ctggtaagactcacaggaaagcaagtcaataaagtaacttctctgccttgttgtttcaatggaaaagtgatgggagtgagaggaattttgtgagaaaaagattcattttctccctgtggtctggggattgctggcgagcccaaggcataagctgaaatctgttgattttatttacttgctgcttcttactgagccactgttggcagagttgaattgaaaaggtgctaagggaataactttctgattttttttttgagctggatattttgctagccaacctcagcacaggacacccagaagaaaaatgaacctacataaccacccggacttggatgtgaaatgtccactctgccttcgctgtgtgtgtgtatgccagagtccttcaatttgatggcattaaaaaaaaaaaaaaaaaaagacaggagacagctatggaaagagaatacaaaccatgacttttagacgtgagaaaggacagtaagccttcctttaatttaataagctcaggtgaaagaactagaggcaagtccaagtgtttgctgagatcatggaataatcagaactcttatactttaccggcaagaataatcaatttggaaaacagtttaacattatctagtgaggctgacacagacacaaggagatatgtgcaaaaatgtccatagcagcactatctgtagaagcaaaatactgaaaacaacccaaatgtccatcggcagtggaatgggtgaataacacgtatatgatgaaatactatgcagcaatgaaaaagaataagacacaattgagcatatcaacatgggtgaatctcacatacagcgttgaatagcaaaagtatgtttttgcaaaatacatac

SEQ ID NO: 268413 - DNA, 1721 bp, Homo sapiens
cggcacgagggtcttgctgtctgaggggggctgaggcagaagtattgcttgaacccaggaggcagaggttgcaatgagctgagatcgcatcactgcactcaagcctgggcaacagagcaagactgcgtctcaaaaaaacaaaacaaaacaaaacaaaaatccatgaacaagtggacctgcccagttcaaatcattgttgttcaagggtcaactgtatattattttcactggaagttttgaaattccagaaatatgcttggaaatccccgcttgaaatctccttggttggaaaccagtccagtgggtgactggcccagaatgatgcttctcctcggtggaccccctgggctgagcagcctgtgttcctgcctcaactcccctgaaccctcctgaactttctacacacatgtgggcactggctttgatactggcatttggaagggcacttgggaaattcagagaagtacccattattaagataaatgatgttttatcaatgaagcagacttttcatttctttttattgatcttcatgttttcacatcttgagatgcaatttgttagcacaggctgtcattccaagacacacaaatgtcattaaggcaaccgcttaaaggagtgtgatattttattgaggtagacaggacaatagataaatatttaatctgttacatgtttgctctgtgtggagccagggttggggctgcacaactctctggctgctatgtgtcttcctggaaaccctgtcaaaggccttaccgcctgcctggagaaacacagtgcctgcccttggcaaatatatgttggtgtatctgaaaaacagctcctggaagctttttctcattcaggctttaggggttaccccatctttccttatgtgtgtaatattggagaatgtacactctcactgaactggggatgtttgacttaaaatgatggacaataagatagtgagcagtaagtgtgctctaggctaggctacgagaggccatgagctcctcatctcttctctgttctgagctctctgatccactgcacttggggcagggggtgcattctctgtgcctctcctgagtctactttctgcatcattggttctcccagctcacttccataatgtcctcctaggctgcattggaattgtgtgttgtctagacccatggccaagactgtcattgcctgtgagggagaccaagctcaccaccaagggcttttgccagattgctttcatttacagaatttgcccattcatgtgtctttgtgtttatggattaaatggctttctgaccagcatccctttggtgtgctttgtcaataagatacagagctttctctcccattcttttcatgtgattccaattcccacatggcagcacagacccgccctaacactgatgaagtggaactccaaacaccatgggacaagaattcttgtcactgccctgggctggaccccaaacctctcacaatcagaatgcagtcaagtcagcgaatatttgtggaatgtctgttctgtcttcaaccccactctctgcacaaaatgggttgggaaagtctccgcacaaaatgggttgggaaagtccagggtctcttcccaaatgactctcccatcttagtggggatgacaggtgcagctcatttgaggtaattcaatgacatgatgagatagcatcagataccactgagggtccctagttagattcttccagaaaataccccag

SEQ ID NO: 268414 - DNA, 1776 bp, Homo sapiens
aatgggaatttggccctcaagcccaagatttcggcacgaggccaggtgtggtggtgcgtgcctgtaatcccagctactcggggggctgaggcagaagtattgcttgaacccaggaggcagaggttgcaatgagctgagatcgcatcactgcactcaagcctgggcaacagagcaagactgcgtctcaaaaaaacaaaacaaaacaaaacaaaaatccatgaacaagtggacctgcccagttcaaatcattgttgttcaagggtcaactgtatattattttcactggaagttttgaaattccagaaatatgcttggaaatccccgcttgaaatctccttggttggaaaccagtccagtgggtgactggcccagaatgatgcttctcctcggtggaccccctgggctgagcagcctgtgttcctgcctcaactcccctgaaccctcctgaactttctacacacatgtgggcactggctttgatactggcatttggaagggcacttgggaaattcagagaagtacccattattaagataaatgatgttttatcaatgaagcagacttttcatttctttttattgatcttcatgttttcacatcttgagatgcaatttgttagcacaggctgtcattccaagacacacaaatgtcattaaggcaaccgcttaaaggagtgtgatattttattgaggtagacaggacaatagataaatatttaatctgttacatgtttgctctgtgtggagccagggttggggctgcacaactctctggctgctatgtgtcttcctggaaaccctgtcaaaggccttaccgcctgcctggagaaacacagtgcctgcccttggcaaatatatgttggtgtatctgaaaaacagctcctggaagctttttctcattcaggctttaggggttaccccatctttccttatgtgtgtaatattggagaatgtacactctcactgaactggggatgtttgacttaaaatgatggacaataagatagtgagcagtaagtgtgctctaggctaggctacgagaggccatgagctcctcatctcttctctgttctgagctctctgatccactgcacttggggcagggggtgcattctctgtgcctctcctgagtctactttctgcatcattggttctcccagctcacttccataatgtcctcctaggctgcattggaattgtgtgttgtctagacccatggccaagactgtcattgcctgtgagggagaccaagctcaccaccaagggcttttgccagattgctttcatttacagaatttgcccattcatgtgtctttgtgtttatggattaaatggctttctgaccagcatccctttggtgtgctttgtcaataagatacagagctttctctcccattcttttcatgtgattccaattcccacatggcagcacagacccgccctaacactgatgaagtggaactccaaacaccatgggacaagaattcttgtcactgccctgggctggaccccaaacctctcacaatcagaatgcagtcaagtcagcgaatatttgtggaatgtctgttctgtcttcaaccccactctctgcacaaaatgggttgggaaagtctccgcacaaaatgggttgggaaagtccagggtctcttcccaaatgactctcccatcttagtggggatgacaggtgcagctcatttgaggtaattcaatgacatgatgagatagcatcagataccactgagggtccctagttagattcttccagaaaataccccag

SEQ ID NO: 268415 - DNA, 1922 bp, Homo sapiens
gcaggtctgatgcgaagtatgcttaaaccaggcggcagaggatagcaatgagctgagatcaggtggctcacacctgtaatcccagcactttgggaggccgagacggacagatcacaaggtcaggagattgagactatcctggctaatatggtgaaaccccgtctgtactaaaaatacaaaaaattagccaggtgtggtggtgcgtgcctgtaatcccagctactcggggggctgaggcagaagtattgcttgaacccaggaggcagaggttgcaatgagctgagatcgcatcactgcactcaagcctgggcaacagagcaagactgcgtctcaaaaaaacaaaacaaaacaaaacaaaaatccatgaacaagtggacctgcccagttcaaatcattgttgttcaagggtcaactgtatattattttcactggaagttttgaaattccagaaatatgcttggaaatccccgcttgaaatctccttggttggaaaccagtccagtgggtgactggcccagaatgatgcttctcctcggtggaccccctgggctgagcagcctgtgttcctgcctcaactcccctgaaccctcctgaactttctacacacatgtgggcactggctttgatactggcatttggaagggcacttgggaaattcagagaagtacccattattaagataaatgatgttttatcaatgaagcagacttttcatttctttttattgatcttcatgttttcacatcttgagatgcaatttgttagcacaggctgtcattccaagacacacaaatgtcattaaggcaaccgcttaaaggagtgtgatattttattgaggtagacaggacaatagataaatatttaatctgttacatgtttgctctgtgtggagccagggttggggctgcacaactctctggctgctatgtgtcttcctggaaaccctgtcaaaggccttaccgcctgcctggagaaacacagtgcctgcccttggcaaatatatgttggtgtatctgaaaaacagctcctggaagctttttctcattcaggctttaggggttaccccatctttccttatgtgtgtaatattggagaatgtacactctcactgaactggggatgtttgacttaaaatgatggacaataagatagtgagcagtaagtgtgctctaggctaggctacgagaggccatgagctcctcatctcttctctgttctgagctctctgatccactgcacttggggcagggggtgcattctctgtgcctctcctgagtctactttctgcatcattggttctcccagctcacttccataatgtcctcctaggctgcattggaattgtgtgttgtctagacccatggccaagactgtcattgcctgtgagggagaccaagctcaccaccaagggcttttgccagattgctttcatttacagaatttgcccattcatgtgtctttgtgtttatggattaaatggctttctgaccagcatccctttggtgtgctttgtcaataagatacagagctttctctcccattcttttcatgtgattccaattcccacatggcagcacagacccgccctaacactgatgaagtggaactccaaacaccatgggacaagaattcttgtcactgccctgggctggaccccaaacctctcacaatcagaatgcagtcaagtcagcgaatatttgtggaatgtctgttctgtcttcaaccccactctctgcacaaaatgggttgggaaagtctccgcacaaaatgggttgggaaagtccagggtctcttcccaaatgactctcccatcttagtggggatgacaggtgcagctcatttgaggtaattcaatgacatgatgagatagcatcagataccactgagggtccctagttagattcttccagaaaataccccag

SEQ ID NO: 268416 - DNA, 1706 bp, Homo sapiens
gattggcattatcacgaactcttgctcggtacccccaatcaacatccaacccgttgcaatgagctgagatcgcatcactgcactcaagcctgggcaacagagcaagactgcgtctcaaaaaaacaaaacaaaacaaaacaaaaatccatgaacaagtggacctgcccagttcaaatcattgttgttcaagggtcaactgtatattattttcactggaagttttgaaattccagaaatatgcttggaaatccccgcttgaaatctccttggttggaaaccagtccagtgggtgactggcccagaatgatgcttctcctcggtggaccccctgggctgagcagcctgtgttcctgcctcaactcccctgaaccctcctgaactttctacacacatgtgggcactggctttgatactggcatttggaagggcacttgggaaattcagagaagtacccattattaagataaatgatgttttatcaatgaagcagacttttcatttctttttattgatcttcatgttttcacatcttgagatgcaatttgttagcacaggctgtcattccaagacacacaaatgtcattaaggcaaccgcttaaaggagtgtgatattttattgaggtagacaggacaatagataaatatttaatctgttacatgtttgctctgtgtggagccagggttggggctgcacaactctctggctgctatgtgtcttcctggaaaccctgtcaaaggccttaccgcctgcctggagaaacacagtgcctgcccttggcaaatatatgttggtgtatctgaaaaacagctcctggaagctttttctcattcaggctttaggggttaccccatctttccttatgtgtgtaatattggagaatgtacactctcactgaactggggatgtttgacttaaaatgatggacaataagatagtgagcagtaagtgtgctctaggctaggctacgagaggccatgagctcctcatctcttctctgttctgagctctctgatccactgcacttggggcagggggtgcattctctgtgcctctcctgagtctactttctgcatcattggttctcccagctcacttccataatgtcctcctaggctgcattggaattgtgtgttgtctagacccatggccaagactgtcattgcctgtgagggagaccaagctcaccaccaagggcttttgccagattgctttcatttacagaatttgcccattcatgtgtctttgtgtttatggattaaatggctttctgaccagcatccctttggtgtgctttgtcaataagatacagagctttctctcccattcttttcatgtgattccaattcccacatggcagcacagacccgccctaacactgatgaagtggaactccaaacaccatgggacaagaattcttgtcactgccctgggctggaccccaaacctctcacaatcagaatgcagtcaagtcagcgaatatttgtggaatgtctgttctgtcttcaaccccactctctgcacaaaatgggttgggaaagtctccgcacaaaatgggttgggaaagtccagggtctcttcccaaatgactctcccatcttagtggggatgacaggtgcagctcatttgaggtaattcaatgacatgatgagatagcatcagataccactgagggtccctagttagattcttccagaaaataccccag

SEQ ID NO: 268417 - DNA, 2670 bp, Homo sapiens
ctctgggcatcccgtcctcctcctgctgctgctgatggacaggcactcctggactacccccagcctctccacaatgtgtcctgagaagagctaggggaactggacagagtggacgaggctccatgtgtggagggaatgaaataaggggcctaccaggccagaacgctgatccatggagaccagtgcttccagccctctcacctcggaggaggactcctgttttaccaacggcaggagcaggaatcccaccattcagcctgtgggcttgacaaactataagcaagcctcctggatgtggaataatacattttcaaaattcatactaatcagcatgaactataactgctccaatgcccaccacattatataaaatctaccaaaagggggtcacttaatgtttcacaatgtttggtgaaacaactttcatatgaaagtacggttgatccttgaatgatatgggcaccgacccctgagcagctgaaaatttgcatgtaacttgactcccccaaaacgtaactataatactaatagccttactgaacacggtcaattaacacatagctagtatgttatgtgcattatatactatatccttaccatacggtaagctagagaaaaaatgttactaagaaaaacataagcaagagaaaatatatttactattaagtgaaagcaggtcatcataaagtcctcatcctcatggtcatcacattgagtaggcggaggaggaggaggaggaggaggagtaggggttggtcttgctgtctgaggggtggcagaggcagaaaaaaaatccatgggccgagcacggtggctcacacctgtaatcccagcactttgggaggccgagacggacagatcacaaggtcaggagattgagactatcctggctaatatggtgaaaccccgtctgtactaaaaatacaaaaaattagccaggtgtggtggtgcgtgcctgtaatcccagctactcggggggctgaggcagaagtattgcttgaacccaggaggcagaggttgcaatgagctgagatcgcatcactgcactcaagcctgggcaacagagcaagactgcgtctcaaaaaaacaaaacaaaacaaaacaaaaatccatgaacaagtggacctgcccagttcaaatcattgttgttcaagggtcaactgtatattattttcactggaagttttgaaattccagaaatatgcttggaaatccccgcttgaaatctccttggttggaaaccagtccagtgggtgactggcccagaatgatgcttctcctcggtggaccccctgggctgagcagcctgtgttcctgcctcaactcccctgaaccctcctgaactttctacacacatgtgggcactggctttgatactggcatttggaagggcacttgggaaattcagagaagtacccattattaagataaatgatgttttatcaatgaagcagacttttcatttctttttattgatcttcatgttttcacatcttgagatgcaatttgttagcacaggctgtcattccaagacacacaaatgtcattaaggcaaccgcttaaaggagtgtgatattttattgaggtagacaggacaatagataaatatttaatctgttacatgtttgctctgtgtggagccagggttggggctgcacaactctctggctgctatgtgtcttcctggaaaccctgtcaaaggccttaccgcctgcctggagaaacacagtgcctgcccttggcaaatatatgttggtgtatctgaaaaacagctcctggaagctttttctcattcaggctttaggggttaccccatctttccttatgtgtgtaatattggagaatgtacactctcactgaactggggatgtttgacttaaaatgatggacaataagatagtgagcagtaagtgtgctctaggctaggctacgagaggccatgagctcctcatctcttctctgttctgagctctctgatccactgcacttggggcagggggtgcattctctgtgcctctcctgagtctactttctgcatcattggttctcccagctcacttccataatgtcctcctaggctgcattggaattgtgtgttgtctagacccatggccaagactgtcattgcctgtgagggagaccaagctcaccaccaagggcttttgccagattgctttcatttacagaatttgcccattcatgtgtctttgtgtttatggattaaatggctttctgaccagcatccctttggtgtgctttgtcaataagatacagagctttctctcccattcttttcatgtgattccaattcccacatggcagcacagacccgccctaacactgatgaagtggaactccaaacaccatgggacaagaattcttgtcactgccctgggctggaccccaaacctctcacaatcagaatgcagtcaagtcagcgaatatttgtggaatgtctgttctgtcttcaaccccactctctgcacaaaatgggttgggaaagtctccgcacaaaatgggttgggaaagtccagggtctcttcccaaatgactctcccatcttagtggggatgacaggtgcagctcatttgaggtaattcaatgacatgatgagatagcatcagataccactgagggtccctagttagattcttccagaaaataccccag

SEQ ID NO: 268418 - DNA, 2851 bp, Homo sapiens
gctgggctagaggctgagcacctttggaaccaacatttaagggaatgtgagcacaatgcataatgtctttaaaaagcatgttgtgatgtacacattttgtaattaccttttttgttgttttgtagcaaccatttgtaaaacattccaaataattccacagtcctgaagcagcaggaggaggacctcctgctgctgtcctcctcctgctgctgctgatggacaggcactcctggactacccccagcctctccacaatgtgtcctgagaagagctaggggaactggacagagtggacgaggctccatgtgtggagggaatgaaataaggggcctaccaggccagaacgctgatccatggagaccagtgcttccagccctctcacctcggaggaggactcctgttttaccaacggcaggagcaggaatcccaccattcagcctgtgggcttgacaaactataagcaagcctcctggatgtggaataatacattttcaaaattcatactaatcagcatgaactataactgctccaatgcccaccacattatataaaatctaccaaaagggggtcacttaatgtttcacaatgtttggtgaaacaactttcatatgaaagtacggttgatccttgaatgatatgggcaccgacccctgagcagctgaaaatttgcatgtaacttgactcccccaaaacgtaactataatactaatagccttactgaacacggtcaattaacacatagctagtatgttatgtgcattatatactatatccttaccatacggtaagctagagaaaaaatgttactaagaaaaacataagcaagagaaaatatatttactattaagtgaaagcaggtcatcataaagtcctcatcctcatggtcatcacattgagtaggcggaggaggaggaggaggaggaggagtaggggttggtcttgctgtctgaggggtggcagaggcagaaaaaaaatccatgggccgagcacggtggctcacacctgtaatcccagcactttgggaggccgagacggacagatcacaaggtcaggagattgagactatcctggctaatatggtgaaaccccgtctgtactaaaaatacaaaaaattagccaggtgtggtggtgcgtgcctgtaatcccagctactcggggggctgaggcagaagtattgcttgaacccaggaggcagaggttgcaatgagctgagatcgcatcactgcactcaagcctgggcaacagagcaagactgcgtctcaaaaaaacaaaacaaaacaaaacaaaaatccatgaacaagtggacctgcccagttcaaatcattgttgttcaagggtcaactgtatattattttcactggaagttttgaaattccagaaatatgcttggaaatccccgcttgaaatctccttggttggaaaccagtccagtgggtgactggcccagaatgatgcttctcctcggtggaccccctgggctgagcagcctgtgttcctgcctcaactcccctgaaccctcctgaactttctacacacatgtgggcactggctttgatactggcatttggaagggcacttgggaaattcagagaagtacccattattaagataaatgatgttttatcaatgaagcagacttttcatttctttttattgatcttcatgttttcacatcttgagatgcaatttgttagcacaggctgtcattccaagacacacaaatgtcattaaggcaaccgcttaaaggagtgtgatattttattgaggtagacaggacaatagataaatatttaatctgttacatgtttgctctgtgtggagccagggttggggctgcacaactctctggctgctatgtgtcttcctggaaaccctgtcaaaggccttaccgcctgcctggagaaacacagtgcctgcccttggcaaatatatgttggtgtatctgaaaaacagctcctggaagctttttctcattcaggctttaggggttaccccatctttccttatgtgtgtaatattggagaatgtacactctcactgaactggggatgtttgacttaaaatgatggacaataagatagtgagcagtaagtgtgctctaggctaggctacgagaggccatgagctcctcatctcttctctgttctgagctctctgatccactgcacttggggcagggggtgcattctctgtgcctctcctgagtctactttctgcatcattggttctcccagctcacttccataatgtcctcctaggctgcattggaattgtgtgttgtctagacccatggccaagactgtcattgcctgtgagggagaccaagctcaccaccaagggcttttgccagattgctttcatttacagaatttgcccattcatgtgtctttgtgtttatggattaaatggctttctgaccagcatccctttggtgtgctttgtcaataagatacagagctttctctcccattcttttcatgtgattccaattcccacatggcagcacagacccgccctaacactgatgaagtggaactccaaacaccatgggacaagaattcttgtcactgccctgggctggaccccaaacctctcacaatcagaatgcagtcaagtcagcgaatatttgtggaatgtctgttctgtcttcaaccccactctctgcacaaaatgggttgggaaagtctccgcacaaaatgggttgggaaagtccagggtctcttcccaaatgactctcccatcttagtggggatgacaggtgcagctcatttgaggtaattcaatgacatgatgagatagcatcagataccactgagggtccctagttagattcttccagaaaataccccag

SEQ ID NO: 268419 - DNA, 500 bp, Homo sapiens
ctctgggcatcccgtcctcctcctgctgctgctgatggacaggcactcctggactacccccagcctctccacaatgtgtcctgagaagagctaggggaactggacagagtggacgaggctccatgtgtggagggaatgaaataaggggcctaccaggccagaacgctgatccatggagaccagtgcttccagccctctcacctcggaggaggactcctgttttaccaacggcaggagcaggaatcccaccattcagcctgtgggcttgacaaactataagcaagcctcctggatgtggaataatacattttcaaaattcatactaatcagcatgaactataactgctccaatgcccaccacattatataaaatctaccaaaagggggtcacttaatgtttcacaatgtttggtgaaacaactttcatatgaaagtacggttgatccttgaatgatatgggcaccgacccctgagcagcaggaggaggacgggtacagcag

SEQ ID NO: 268420 - DNA, 708 bp, Homo sapiens
cttctcctaatctataagcagcaagagcagatgtgcttgtaagaaacaaagatcttgttttcatacaaatgcgctcaaaataaaacacaaaggaagaaaaatacccagagcacataatgcaaagaacaagaattgcttctaaatagaatgttttacaaagttttccataaagcctcagctgctcctcaagccacaaccggcttgaacatggatggcagacatgaaattacagtattcacaaaattagtattcagtttgcagaatctctctttccaaagccttcaggcatactttatgcatgcacaattacagaagcaggaaaatcacatggagagtgaaaatatcagaaagtcgctaatgttgggcttagaactgatcaaagagttttgtgtacgatagactgcctaatggtaccaggcctgacagcctgcagtgtccccctcacatcaagaatgacctctgaaggcaatatttccaaagacttgcggcttaacaggattgttaagcaagtgattagactttgctttactgtgaaagaattttggtttataaagagttgaagcttctcacaaacactggtgccaatctaggtcaacaggagtaagtgagaccattgttccatatcccgcttaaaaagagaacactacttcaaagacaagaacaacatcacctgacaaaaataaaagaagttatcggttttaaaacatt

SEQ ID NO: 268421 - DNA, 808 bp, Homo sapiens
cttctcctaatctataagcagcaagagcagatgtgcttgtaagaaacaaagatcttgttttcatacaaatgcgctcaaaataaaacacaaaggaagaaaaatacccagagcacataatgcaaagaacaagaattgcttctaaatagaatgttttacaaagttttccataaagcctcagctgctcctcaagccacaaccggcttgaacatggatggcagacatgaaattacagtattcacaaaattagtattcagtttgcagaatctctctttccaaagccttcaggcatactttatgcatgcacaattacagaagcagcctgactctttgatcattctctggtattatcccttcatttcacataggaagaaacaaggacaagagcaatgaagtcacccaatcagagtaaaacagtcaggaaaatcacatggagagtgaaaatatcagaaagtcgctaatgttgggcttagaactgatcaaagagttttgtgtacgatagactgcctaatggtaccaggcctgacagcctgcagtgtccccctcacatcaagaatgacctctgaaggcaatatttccaaagacttgcggcttaacaggattgttaagcaagtgattagactttgctttactgtgaaagaattttggtttataaagagttgaagcttctcacaaacactggtgccaatctaggtcaacaggagtaagtgagaccattgttccatatcccgcttaaaaagagaacactacttcaaagacaagaacaacatcacctgacaaaaataaaagaagttatcggttttaaaacatt

SEQ ID NO: 268422 - DNA, 700 bp, Homo sapiens
tgatgttccagttataaacaatggtgcttagtacatagaaggtctaaaatgatatttattgaatagatgagtggaagcagtgcactgttctccaaatgtctggactctttcatgtttgcattttaaaaatagatgctgttgttttgtagatttgtttaaaaacatcttggtattaagactgacatctattcttttataacactttacatgtggtcatgtacccacagatttaggctgttttattttatagttttcactacagtttatttcacctgattatttcatttgggtctctaaaatcacattatgaaataccttaattatttaaattaggaacagattaattatctccagtgtacaaactcaaattaatttcattataaacctgaagtttaaattgattaatcttggagtgtttaaggaataaaatgggtttttcttcatccttaaggagaaaggcatatttgatttgatgagtctctcttcatcacaccagttatgatactaggcacaagatatttgcaagaaaacttcagatggattttataaaccagccagaaacctgtgtgtctggggcttctgggggaacaatctgtgagtcattttaaaaaacaaacacactcataatcacggtgcatgttgttaccatggtaattaggcctgttgagttggcttgcttatgttcctgcaaaagcaagag

SEQ ID NO: 268423 - DNA, 386 bp, Homo sapiens
tagtttttcaggttcctttgggtccccttggctgagagtggagtccattcggtcagctgggggaatttagacttttacttttggtttacaggtgaataacaacatcaagaagaaaatggaagctatcagaaaagcctctaccatccccaccacatctacctgtctacctgtgtgtgttcctaaactccagcttctctcatgaaagaactctccatgcatctggcttaaggtcatcccatccctgatctccacttaagagaatggattaatccaaaagaacgaatcttctcaagaagaaactttgtcagcactcaaaagaaacaatgttttttatatgtagttctcataattgtttgtggtaattaaaaaaaaatcattgacgaatt

SEQ ID NO: 268424 - DNA, 622 bp, Homo sapiens
ccccgactagcccgacagtccccgactagcccgacagtccccgactagcccgacagcctccaccagcccggctcctgcctcacgctggcccctctgggcccagctcatgcctcgcggtggcctctccgggcccagctcccacccagcctgacggcgcctcccggccccaagctgccttcctcgatgtggcccaaagtggcccaaagcgtcccaaagtaggcctcgccaggcccacctcctgcccggcgtaggccctgaggggcgcggcccctgccccatactggcctcttttgggccctctcttacaccagcccctgtctcaggattgtctcttcacgcccatcttctgcctcatagtggtcactcaaggcctcgcttttgcctgatgattgcgttttctggttttgctcttgccttgtattcccttcttcgggatacagcttttacgtcttccatggtgaacctcatcaaggagactaaatcttccctggtctgtcatttttttcacttcacaccagagtgccttgggaaaaccccatctcttcttttaaccttgagagtggatttctgacgaattgataataaattttttctctgtggtttcagtgatttctgttttatt

SEQ ID NO: 268425 - DNA, 608 bp, Homo sapiens
  misc_feature (308)..(308): n is a, c, g, or t
  misc_feature (343)..(344): n is a, c, g, or t
  misc_feature (366)..(366): n is a, c, g, or t
  misc_feature (373)..(373): n is a, c, g, or t
  misc_feature (404)..(404): n is a, c, g, or t
cacgaggcgtcaaaatcctgctgacttgagatgcactgtgctgcatgttttccccgggcacagcaggctaataatcctgttacaaagagaaatgctgtacatttcgagcagtgctggcccctggggctcaccgcggccttttctaagtgcttacagactctctgtttaataatccattccagaaattttccagggctcattgttgagcttggtgttcgcaactttgagtgatcagcccttctcctttgtgggagcaccaggacagagcagcctttgtccctccccagtctcagttccctcccactgcncctgtggacctcgaatgcagagcttatgcacctanngaaggtcgtgtcagcacccaangcagaangaggctgccctgggaactagggtcaattaanacagcttgtgctggaggaccctttacagcagatgaaggcctctccccagccagaaaagatggagcacacgctgggtggtggccccgcttcctcactggaaggagatggtgctcttcttttttctttctgaattgtggccaccttcataccagtctgtcatggaacacttaagccgcttgagtgtctgctggtactcccagccct

SEQ ID NO: 268426 - DNA, 211 bp, Homo sapiens
gtgtttatgtgggtgcatatgtggatgttggctccagttgatggcaagctgatttctagcagtatttgataaaaaaattccagttcctcaaattaagttgaatagttatgttacgtttttgccacaaaggatttcacatgtgggtccaaagacaggacattcctaaacacgttttcccatgaatactaagaaaaccacaaaaccctccaga

SEQ ID NO: 268427 - DNA, 355 bp, Homo sapiens
aaccaccctacttcatgccctgtctctctgtccaaacaccaggacagtcctctcaccagtctcaaccacccaatggattgacaaaggtgcaaatatgattcagtggagaaggcattctcttgtcaacaaattgtgtagaaacaacttttttttacacaattttttttttatccccaaaggaaaaaaattcacctgaacctcaatactaactcaaaaactaactcaaaatggattatgcaactaaatataaactataaaactagaaaaagtatagcagaaaatataagacaaaatcttcatgacacagagttaggtaaagtgttctttattatcaataaacacaaaccattaaaga

SEQ ID NO: 268428 - DNA, 670 bp, Homo sapiens
catcttcatttacaacccagtttattaacttatcctctctaggcaactttcctcttgtccatgcccttatgccgtatcatccagaaatatataacatactgcttcagctgcacagaggtaaatgagctgataaaacagccaaagattctgagataaatgaaaaaggctcccacacaatcaaatgaatgaccatgactaagggcatctcacatgagcatagatgattaaataccaagtccctgaaccgctatcactagaaggtatagaaaatgaattttctgtaagagttcacatctttaagcaatgagagatgcattttcaagctgaactcacctgaatgtcactctctgtcaacaaaagccatggaggtaaccaacaacctcttctttctacagtacagaacagagaagggcaagaggaggagcaggtgtagcagagaggcaacactaggacacgttgtttctgaagtgatttacgaatgacaagtagaagtagtgaatacaaaatgaaaattagaggaggtagttcttccagttgtttaaaaagagagagaaataagcaacagctgcagcttgtgttctgctatttgaaggtgaactcttcctttagaatttcagacttttagcaacagcttagcggttgaaactacagaaatgatgttgatacactt

SEQ ID NO: 268429 - DNA, 134 bp, Homo sapiens
agcccatgacagagttgtgattcagagatatgaagagtaaaatcaatgtgaattaaagtgataatctgttttgctggtagtttatatgtggtaaagcagtctattaaatgagagaccttagggaggcagctttg

SEQ ID NO: 268430 - DNA, 144 bp, Homo sapiens
gtttgctacctcttgcactaattcttcttataaaataaccagtaaagcctcttcttcaaacccagcaccaggagtgaggcctttacctcctctaggacctgacactaggaacccactgttgcctttgtcctggtggctgaccag

SEQ ID NO: 268431 - DNA, 453 bp, Homo sapiens
taggcattaccctttggccattttcaaagtgagcctttttgggaactgtcatcttaatttagggcaacaaaaattattttcaataaaaataatagtagagccccattctttgtgtctgaattctaagatactcttttaggatcctatagtttaagaaacagattaccggccgggtatggtggctcacgcctgtaatcccagcacattgggaggccgaggtgggcagattacgagatcaggagatcgagaccatcttggctaacatggtgaaactccgtctctactaaaaatacaaaaaaattagccgggcgtggtggtgggtgcctgtagtcccagctactccagaggctgagacaggagaatggcgtgaacccaggaggcggagcttgcaatgagcggagatcgcgccactgcactccagcctgggaaacagagctagactccgtctcaaag

SEQ ID NO: 268432 - DNA, 552 bp, Homo sapiens
attctacctaagtatatacaatgaaaaagtataggaatttagatgacattgagttttaaattttaaattgagttttgaagtacatatagaaatttattcagcaaagggatgagagagggacaatggcagtacaagggcacagtttaccaggaactacttagcctggctggaatgtataatgtgaagtggagaaagctttggggtattgaggctgaggcaggagaatcgcttgaaccctggaggcagaggttgcatgagccgggattgcgccactgcattccagcctggcaacagagtaagactctgtctcaaaaaaaaaaaaaaaaaaaaaaaaaaaggatacttaatgaattcaaatcccataattgaagactttctgtgatgatttttttttaagaaatctactcttcagacaggcctattctatctataagttgctgctcttcttcgcagcttctcctttgcctctgttcctgaaaccacacacaggatttcttctgtagattctcattggttgcaagggctttggtgctaagggagccatatgtgtat

SEQ ID NO: 268433 - DNA, 424 bp, Homo sapiens
ggcaccccgccagcagccagctgtgacattgtaccctgccagctttgtgaaggccctgctcgcgggattgtctcagctctgttgacaaccacctcctgcccggccaatgtcccattccaattgtcctcaacttcccttgtttaatgctgttttgcaaattattaagcactggaagtctgttaatcacagttcacgtcccgtgtaaggccacacagggtaggcagggctcggggggaggcctgctggcaggactgaatgtcttgggtggtggcccattcacacccctaacgagatcattaccactaactaaatacaggcctggccttgtgaccctctggggaatcgagtgggctggtgcgggacatcagtatcgtctccaactcccactgcactgccttccagcactgaaagctaagcccgggat

SEQ ID NO: 268434 - DNA, 629 bp, Homo sapiens
  misc_feature (391)..(391): n is a, c, g, or t
aggagatagggactcactgaattttctggagagcagcactgacaacgcctaagtagagggctttcaaaaggaaagagcggttagtgatagcaaacgctcaggaggataaagaaaatgaggccgctgagtttacctagggggaagtcagtttcagtagactcaagggggccaaagtgaccctggtggagattcagaagggactgtgtgtctggataccccctcccaacacccccaccgcaggagagctacatttccccctctcccctcagcccactggtccctcccattgtctaccttcctgccttcactcccagttcctcagtgctgaccaccaagttggtggtctccttgggtggcatggctgaatcactcttccccggtgggaaaggtnggggtagtctctcagcagggtgcagctcctcagcggaggccaggcccacccaggctggccagcccactgtgagagcagcctgcactgacaatgcgtctgcctggcaggtgcaggagaaccaaggtgctgctctggcaatgacagcctcacaggccctaaggttgcagctgaactagggaaatatattttacttgacatctgaatgccatggttccagggggcagaaggcgagctggga

SEQ ID NO: 268435 - DNA, 152 bp, Homo sapiens
aggcctcaaggacgtgttgacatagctgggagtctcgatggtccatctctgtcatttaacagctctgtagggttccctgctgtagccccagtgcccactcacaggtatttgttgaacaggtgaaaaagatactcaacaaatggtgactctca

SEQ ID NO: 268436 - DNA, 342 bp, Homo sapiens
aaataaggtcattgtagatgtaactaattaaaatgaggacaggaaggccggcacggtggctcacgcctgtaatcccagcgctttgggaggccgaggaggggggattacgaggtcaggagatcgagaccatcctggataacacggtgaaaccccgtctctactaaaaaatacaaaaaattagccgggcgtggtggcgggcgcctgtagtcccagctactcaggaggctgaggtaggagaatggcgtgaacccgggaggcagagcttgcagcgagctgagatggcaccactgcactccagcctgggcgacagagcgagactctgtctcaaaaaaataagtaaat

SEQ ID NO: 268437 - DNA, 355 bp, Homo sapiens
caataagggctgatattcagccagtatgcatcagtacagataatgttagctgttagaatactgaagtagtttcactgtggttggtaactaactgctgtttacaccactgtgcggactgtctctttcactgtccaggccactctccagaatgccccatgatccaacaaataacacagttactccccagcacaagtgaccttcaggaccccgctccatccataaataggcatcctttctgattagctagttcttgtacaagtcagtcccgcaaaatcttcccagttaaacactacctacaatcttatttatacttaattggcagagctaacattcaaacccaggcagcccaacaaag

SEQ ID NO: 268438 - DNA, 1068 bp, Homo sapiens
gaaggctgggctgggggaagaggcgtggcggcgctgtgcgcgtgcacaaaagagagctgaggggcgggggcgctgcggcacagctggtttgagcaactgaactggaaacaagatgcaggaccccaacgcagacactgaatggaatgacatcttacgcaaaaagggtatcttaccccccaaggaaagtctgaaagaattggaagaggaggcagaagaggagcagcgcatcctccagcagtcagtggtgaaaacatatgaagatatgactttggaagagctggaggatcatgaagacgagtttaatgaggaggatgaacgtgctattgaaatgtacagacggcggagactggctgagtggaaagcaactaaactgaagaataaatttggagaagttttggagatctcagggaaggattatgttcaagaagttaccaaagctggcgagggcttgtgggtcatcttgcacctttacaaacaaggaattcccctctgtgccctgataaatcagcacctcagtggacttgccaggaagtttcctgatgtcaaatttatcaaagccatttcaacaacctgcatacccaattatcctgataggaatctgcccacgatatttgtttacctggaaggagatatcaaggctcagtttattggtcctctggtgtttggcggcatgaacctgacaagagatgagttggaatggaaactgtctgaatctggagcaattatgacagacctggaggaaaaccctaagaagccgattgaagacgtgttgctgtcctcagtgcggcgctctgtcctcatgaagagggacagcgattccgagggtgactgaggctacagcttctatcacatgccgaactttcttgtgacaaattgtctggattttttaaaaaaggaaaaagcaagaatgaatccttgtggtttttagttttgtataaattatgtttcaaatctttacattttggaaataatcattgctggagattctgttaaatattttggaactcttttttttttaaattatagtatttcctctaaaaaaaattaaaaccagccatttgtatggca

SEQ ID NO: 268439 - DNA, 1566 bp, Homo sapiens
gaaggctgggctgggggaagaggcgtggcggcgctgtgcgcgtgcacaaaagagagctgaggggcgggggcgctgcggcacagctggtttgagcaactgaactggaaacaagatgcaggaccccaacgcagacactgaatggaatgacatcttacgcaaaaagggtatcttaccccccaaggaaagtctgaaagaattggaagaggaggcagaagaggagcagcgcatcctccagcagtcagtggtgaaaacatatgaagatatgactttggaagagctggaggatcatgaagacgagtttaatgaggaggatgaacgtgctattgaaatgtacagacggcggagactggctgagtggaaagcaactaaactgaagaataaatttggagaagttttggagatctcagggaaggattatgttcaagaagttaccaaagctggcgagggcttgtgggtcatcttgcacctttacaaacaaggaattcccctctgtgccctgataaatcagcacctcagtggacttgccaggaagtttcctgatgtcaaatttatcaaagccatttcaacaacctgcatacccaattatcctgataggaatctgcccacgatatttgtttacctggaaggagatatcaaggctcagtttattggtcctctggtgtttggcggcatgaacctgacaagagatgagttggaatggaaactgtctgaatctggagcaattatgacagacctggaggaaaaccctaagaagccgattgaagacgtgttgctgtcctcagtgcggcgctctgtcctcatgaagagggacagcgattccgagggtgactgaggctacagcttctatcacatgccgaactttcttgtgacaaattgtctggattttttaaaaaaggaaaaagcaagaatgaatccttgtggtttttagttttgtataaattatgtttcaaatctttacattttggaaataatcattgctggagattctgttaaatattttggaactcttttttttttaaattatagtatttcctctaaaaaaaattaaaaccagccatttgtatggcaaatgtctgttttcctcatttatattttaagtaagccataaaacctagtcactattttttgacatataactataaaaagaaatacagttttaaatgtgaataaattatacagtggaaaaaaaaaaaaaaaaaaaaaaaaaaaaaagggggggggggcaaaaataacccgggggggccaagtttggttaccggttttttttcaaagggggcccctaagggagggaataaaaagagggaggggcgccggttaacaccgctgggcgtggacacacggccgctggactctggaaaggacctcctctgtgggtgtccttcgccccccccaggaaatataggccaggcaaaataacttcaggtcacgggtaccaggcaatctggctaaatgcccgggcgattaaatgcgcgcactaaataagcaaacagagaaaatgaccacaaaacaccaggacaatacactgacacaccaccacgccacctcaaactaatcctccctctaata

SEQ ID NO: 268440 - DNA, 1512 bp, Homo sapiens
gaaggctgggctgggggaagaggcgtggcggcgctgtgcgcgtgcacaaaagagagctgaggggcgggggcgctgcggcacagctggtttgagcaactgaactggaaacaagatgcaggaccccaacgcagacactgaatggaatgacatcttacgcaaaaagggtatcttaccccccaaggaaagtctgaaagaattggaagaggaggcagaagaggagcagcgcatcctccagcagtcagtggtgaaaacatatgaagatatgactttggaagagctggaggatcatgaagacgagtttaatgaggaggatgaacgtgctattgaaatgtacagacggcggagactggctgagtggaaagcaactaaactgaagaataaatttggagaagttttggagatctcagggaaggattatgttcaagaagttaccaaagctggcgagggcttgtgggtcatcttgcacctttacaaacaaggaattcccctctgtgccctgataaatcagcacctcagtggacttgccaggaagtttcctgatgtcaaatttatcaaagccatttcaacaacctgcatacccaattatcctgataggaatctgcccacgatatttgtttacctggaaggagatatcaaggctcagtttattggtcctctggtgtttggcggcatgaacctgacaagagatgagttggaatggaaactgtctgaatctggagcaattatgacagacctggaggacctcatgaagagggacagcgattccgagggtgactgaggctacagcttctatcacatgccgaactttcttgtgacaaattgtctggattttttaaaaaaggaaaaagcaagaatgaatccttgtggtttttagttttgtataaattatgtttcaaatctttacattttggaaataatcattgctggagattctgttaaatattttggaactcttttttttttaaattatagtatttcctctaaaaaaaattaaaaccagccatttgtatggcaaatgtctgttttcctcatttatattttaagtaagccataaaacctagtcactattttttgacatataactataaaaagaaatacagttttaaatgtgaataaattatacagtggaaaaaaaaaaaaaaaaaaaaaaaaaaaaaagggggggggggcaaaaataacccgggggggccaagtttggttaccggttttttttcaaagggggcccctaagggagggaataaaaagagggaggggcgccggttaacaccgctgggcgtggacacacggccgctggactctggaaaggacctcctctgtgggtgtccttcgccccccccaggaaatataggccaggcaaaataacttcaggtcacgggtaccaggcaatctggctaaatgcccgggcgattaaatgcgcgcactaaataagcaaacagagaaaatgaccacaaaacaccaggacaatacactgacacaccaccacgccacctcaaactaatcctccctctaata

SEQ ID NO: 268441 - DNA, 499 bp, Homo sapiens
ctcacctgttctttctgagacaaatcatctgccaggtttccgcctcgggacacccaagctcagcacagacagcctagcagcctgggtgacaggatcccaggggacaggattctctccttgccatggggatgaggacaaattctcccttcatccttgagattggactcccgccacacatcctggaggagcctacagagaagccggcaggtctccctcacctggatggtgccagcgggtggcctggaccacccagaggccctctcctgcacctgacaggaagcccctggggcatacgtctcccctgccacttccactgtggccactggaagtgtggcagagaaaatagctaggacaaaaagaagtcaatgatttcaaccaacggaatttctttgtcctttgtaaaaatcaacacatgatctgttactgattgggatgtgaaataaaactaaaaataacagcacactgagcctggctcagggctcagctcacctttaaaaag

SEQ ID NO: 268442 - DNA, 444 bp, Homo sapiens
gggtgcttgcaaccatcttcacctcttcccagggaaagattctgccccgggagattctctccttgccatggggatgaggacaaattctcccttcatccttgagattggactcccgccacacatcctggaggagcctacagagaagccggcaggtctccctcacctggatggtgccagcgggtggcctggaccacccagaggccctctcctgcacctgacaggaagcccctggggcatacgtctcccctgccacttccactgtggccactggaagtgtggcagagaaaatagctaggacaaaaagaagtcaatgatttcaaccaacggaatttctttgtcctttgtaaaaatcaacacatgatctgttactgattgggatgtgaaataaaactaaaaataacagcacactgagcctggctcagggctcagctcacctttaaaaag

SEQ ID NO: 268443 - DNA, 498 bp, Homo sapiens
ctggaatcagtgctgtcgggctggggaccagtgtctctggcctgtaaaaccttctcccaaaaccttctgggaggctttgagggtctcagaggaacctggcaggaaggattctctccttgccatggggatgaggacaaattctcccttcatccttgagattggactcccgccacacatcctggaggagcctacagagaagccggcaggtctccctcacctggatggtgccagcgggtggcctggaccacccagaggccctctcctgcacctgacaggaagcccctggggcatacgtctcccctgccacttccactgtggccactggaagtgtggcagagaaaatagctaggacaaaaagaagtcaatgatttcaaccaacggaatttctttgtcctttgtaaaaatcaacacatgatctgttactgattgggatgtgaaataaaactaaaaataacagcacactgagcctggctcagggctcagctcacctttaaaaag

SEQ ID NO: 268444 - DNA, 410 bp, Homo sapiens
tgcggtggggctggaacatgggtattgtggtgtcggagcagggggccctgggccaaaaataggtgcggccgggaggagtgggaagtcgggctgaggaaggagccagcctaggggcccccaacctgctttcacgcctcctaccaccggacggaacgtagcctagcgtttcattttccgtatcctcccgtcaggcgaccccgttatagccggcatcctctctttagaatatcgtttttctttctctggtaaaccctccaaatatttaccgcgggaatcccacctttttccaaagtgaccccgtctctgtgtcagaaccacgggaaaaagaaaaatggagcagctactccttgaaatacttaatgtttaataagcttttcgttgtaacgtttccacgttgcttacgggaaaaa

SEQ ID NO: 268445 - DNA, 581 bp, Homo sapiens
aaggtgggttttggggaagttacaaaattaagaaggtagaaggtaaatgaatagtaagtacgtaggtgactaatttaccaatcacagaacattacacttacagagctaattcttggagacagcttcagaatctgcattttcaaaaaatggacacaaaggtttttaaaagcagcatcccacccacatcatgatcatttctttacacatgaggaacagacctcaacccaaaaaaagccaaaagaaacaaagaggtttgcaagtcaagtttttaaaaagtagagataaaatagcaaaatactggaatatttaatatcaggaagataaaacatataaattaaggttgatcagactgtgaactatgatgtactgagttttaaaatgaatccaggcagggataggagattggaggttgatggctaaagggtaaggcacttctttcgggaagacaaaatgttcttctaaaatttattgtagtaacagttatacaactctgaatatgctgaaaaccaactgtgcactttaaatgggtgaattatatgctacgtgaacaacatctcaatcaagctattaccaaaaaaaaa

SEQ ID NO: 268446 - DNA, 401 bp, Homo sapiens
aatctaggactagtaataagtcctctctttcatccagaaaatattgaaggccggatgccatcacctgtaatcccagcacttgaggctgaggcaggctgatagcttgagctcaggatttcaaaatcagtctgggcaaaatggtgagatcctgtctctacaaaaaaataaaaaattagctgcatgtggtatgcacctgttgcctcagctgtttgggagactgaggagggaggatcgcttgagccttggagattgaggctgtagtgagctgtgatcatgccactgcactctagcctggtagcagagcaagaccctgtctcaaaaagaaaaaaaaaaagaaagaaagtattgagaagttaacttatttcattaccttaatgtgctgaggtgggtggatcacctgg

SEQ ID NO: 268447 - DNA, 461 bp, Homo sapiens
agatttattgctaaatattctttaaaactgcagcagttcagataagatactgtcgaaaggacgtttggcccagcagcaggacctccaccaatgaacggactccaattcttgatttgagccttgggaaccaatcaactttgtttccaagagtttatgtgaacttccctcctttaccagtaaaatcttccccctattcttcccttctccagacccgtggcttgccatagctgtacatcttggattataattctttttgttcactcccaaagaaactcagtatctttggagaattctttctttgttgtcttttagcttcccagagccaaacaagaaatattttaggttttgtgggtcatgctggcttggtcacagctattcaacttgtatcttaaaattagccatagacagtatgaatgggtgggtctctgttccaataaaaccttatcctaaacactgaagtt

SEQ ID NO: 268448 - DNA, 390 bp, Homo sapiens
cctggtgtgaaatgtaactatattggtagatgactttaataattagagatactaataataaaattaagtagctgacatgtttgtgttcaataaatgttatctcaactgtttaaatatactagcatataattttccattttatatttcttgtaatttttcatagttatacaaataagttgttgattttcaaatatttctcccatatgtatccaggaatttatattcttatgtaaacttcagtggtttgttcttgtcccagtacgagcactttaagctaagacattccattgaagaaatggatgattgacataaaatgagcacagaatctgaggggctgtcctcacgggtcagtgttgggttctattttgtttaacaacatcattagtgagc

SEQ ID NO: 268449 - DNA, 319 bp, Homo sapiens
tactactgatatccagggtgtgaacacactgtgttagcaccctgtgatattattcataatatccatgatattactactgacatccagggtgataatgcagtgttaacacactgtgttatgtttgtaacatcatcgatatcactactgacatccagtgtttcacactgtgatattaatgaaatatcgctgttacatttataatatacagtgtttccacactgtgctatgtatgaaatatagtatccagtgtttccacactgtgctatgaatgaaatattatactatccagtgttttcataccgtgctatgaatgaaatat

SEQ ID NO: 268450 - DNA, 959 bp, Homo sapiens
acagctctgctctacaagcccattgaccgggtcactcggagcaccctagtcctacacgacctgctgaagcacacacctgtggaccaccccgactacccgctgctgcaggatgccctccgcatctcccagaacttcctgtccagcatcaacgaggacatcgacccccgccggactgcagtgacaacgcccaagggggagacgcgacagctggtgaaggacggcttcctggtggaagtgtcagagagctcccggaagctgcggcacgtcttcctctttacagatgtcctactgtgtgccaagctgaagaagacctctgcagggaagcaccagcagtatgactgtaagtggtacatccccctggccgacctggtgtttccatcccccgaggaatctgaggccagcccccaggtgcaccccttcccagaccatgagctggaggacatgaagatgaagatctctgccctcaagagtgaaatccagaaggagaaagccaacaaaggccagagccgggccatcgagcgcctgaagaagaagatgtttgagaatgagttcctgctgctgctcaactcccccacaatcccgttcaggatccacaatcggaatggaaagagttacctgttcctactgtcctcggactacgagaggtcagagtggagagaagcaattcagaaactacagaagaaggatctccaggcctttgtcctgagctcagtggagctccaggtgctcacaggatcctgtttcaagcttaggactgtacacaacattcctgtcaccagcaataaagacgacgatgagtctccaggactctatggcttccttcatgtcatcgtccactctgccaagggatttaagcaatcagccaacctgtactgtagcctggaggtggattccttcggctatttggtcagcaaagccaaaaccagggtgttccgggacacagcggagcccaattggat

SEQ ID NO: 268451 - DNA, 561 bp, Homo sapiens
ctctagaggatccatgcaccattcgagacatgagctggaggacatgaagatgaagatctctgccctcaagagtgaaatccagaaggagaaagccaacaaaggccagagccgggccatcgagcgcctgaagaagaagatgtttgagaatgagttcctgctgctgctcaactcccccacaatcccgttcaggatccacaatcggaatggaaagagttacctgttcctactgtcctcggactacgagaggtcagagtggagagaagcaattcagaaactacagaagaaggatctccaggcctttgtcctgagctcagtggagctccaggtgctcacaggatcctgtttcaagcttaggactgtacacaacattcctgtcaccagcaataaagacgacgatgagtctccaggactctatggcttccttcatgtcatcgtccactctgccaagggatttaagcaatcagccaacctgtactgtagcctggaggtggattccttcggctatttggtcagcaaagccaaaaccagggtgttccgggacacagcggagcccaattggat

SEQ ID NO: 268452 - DNA, 199 bp, Homo sapiens
gtaagtgccctggccaggacgaggttgggtgggccattgtggattctgcactgctctgcccaggatggggccctgccagcacgcctttagacatggggcattcccctggaggccagaaaccagctcctcttggcagggaggtcacccctggcctttgtctccaaagtcctctttctcaagccctccctgaagctgtctg

SEQ ID NO: 268453 - DNA, 254 bp, Homo sapiens
gactgttgtggggtggggggaggggggagggatagcattaggagatatacctaatgctaaatgacaagttaatgggtgcagcacagcaacatggcacatgtatacatatgtaacctgcacattgtgcacatgtaccctaaaacttaaagtataataataataaaattaaaaaaaaagaaaaatacttttaccctagagtattacatccagcacaaatatccttcaaacacgaaggataaatactttcccaggca

SEQ ID NO: 268454 - DNA, 502 bp, Homo sapiens
cagaaatctgcttctgctgaaggggtcggtgctgttcgttttctgaattttctgacaagactggttagatcctccaaggggatctgctccggtcatgtcctcaggagctagtgatgcccggactgatgccatcactagtccagcagtggtactcagtctcagggatgcagtgctgccgagggaggcctcgcagcagggagtgcaggaaccagcacaggagattagaaccaagttttgagcagcagcaagacgctggaaataaagtgcatcctagtgtctaattcaaacagatcatcacggtgtggtttcaacagaacattttcccttcctttcttgcatgggattcttatgtgaaataggagcaattcctacaatggtgctggccctctgggggtttcttagggccagctctgcctctccgccttctctgaacaggctgcctgggcagggctctgctttctcatttcagatctgctaacttcacatgtcacctactgccgag

SEQ ID NO: 268455 - DNA, 453 bp, Homo sapiens
gaaaatattaaggtggtgacagtgcacggtatgggtggcacatggagatggcagaggctgggaaggactaaagtttcagccactgcagctggaaactcctctcaagtttaaaatgtttgggtcaaggtgacactttcccgtctgtggtccctgctttcttaacactatcattcagaaaggccccaagtgtaggccgggcacgctggctcacgcctgtaatcccagcactttgggaggccgaggtgggtggatcgcgaggtcaggagatcgagaccatcctggctaacacggtgaaaacccatctgtactaaaaatacaaaaaattagccaggcgtggtggcgggcgcctgtagtcccagctactcaggaggctgaggcaggagaatggcgtgaacccaggaggcggagcttgcagtgagccgaaatcgcgccactgcactccagcctggccaa

SEQ ID NO: 268456 - DNA, 147 bp, Homo sapiens
gaaatatcctgatggattgcctagctttgagttagaatggggacttaacagatatggtcaaggacaatattttttgcagtttttctgaaacagcatcttgcaagatgcattctttataatattacagcaattgctttattcatgaat

SEQ ID NO: 268457 - DNA, 257 bp, Homo sapiens
catgggcatcccagccagtttctggacatggcatcaaagctcttcctttgttcatcacctggggccaggagtgctggctaggatggctaacagagttgttgggcaacagtgactggttctaacagggaataaggattccttccttggttcattgccttgggaccatagggaggaccaaatttttaagattttctctttgtaacttattatgaatgaagactaataattatataattattaatgaggcctcagtaatg

SEQ ID NO: 268458 - DNA, 387 bp, Homo sapiens
acctctctcatctcccaggctgccggtcagcttgggagtcggtgtccctccccgttctgctgcagtcccctgctgtggggcactcggcaggagaacaggatcctttacgagtgggtagcttagctgagaagggaaggctgtttcaggcaggtcggggacaaggcaggaaaaggaaagggtctgggtcacacctcactgtcgggtccgctgggcacactcgcatttgtcctgagtatcagtccctacagaacgaataagaaactccccaggacaaaagggcctgattcctgggataccaaagctgtgacctgacttccactccagcccctcccttccccagtaacaggcgacaccgttctcctgcgagggattcaacgcctcatcctt

SEQ ID NO: 268459 - DNA, 164 bp, Homo sapiens
ctctcccagtggattcctagaggataggtactaggtggaaggaggaggttaggatcacctcaactttttgtgatgaatctatggaagaggattcttataggacagtatgttcttccaggacagaacattctttgctattttgtactggaagaacatgcaaaact

SEQ ID NO: 268460 - DNA, 470 bp, Homo sapiens
cagcgaaatcttatttgcctatagcaaatctacaaaaaattttcctagaccgtcttttctacaactggatggtaaagttgattgaagtgtgcctcatgtagctttatgtttggggcatttgaagggctatggctggaccagagtgtaatataaatgcttaatagagaggggaaaagaagagtgtaagaaccattatagggctgggctcacgcctgtaatcccagcattttgggaggctgaggcaggcggatcacgaggtcaggagttcgagaccagcctgaccaacatggtgaaaccccatctctactaaaaatacaaaaattagccagtcgcggtggcacgtgcctgtaatcccagctactcaggaggctgaggcagaagaatcacttggacccaggaggcagaagttgcagtgagccaagatcatgcctctgcaccccagcctaggtgatagagtgagactccatctc

SEQ ID NO: 268461 - DNA, 423 bp, Homo sapiens
ctttacatgaagggtttttcaaaatctagccacaaacagatatgaccagatttcaaaaaattttgagaaactaggaggaatctattttgacaaagccaagccacacataggatagaggcagacatgcgtgccctggaaagaagaaagtagaaggatcaactaaaagagctctcccactaaatggctgtgggctcctctaagaaactgaaacatggaagaaggaaggaccagccagccagaacagcagtgggtatcaaggaatgatataaaagcaagctcaagacagtcaagattcaaggagctatataccttgcttcctttccagagctgaaatttgagtcaagagtccatttcttccatctggccagatgatctccaggatactctcatgtatgtcaataataacttttcttttataaattt

SEQ ID NO: 268462 - DNA, 490 bp, Homo sapiens
cactagtaaaaatgcatggaatgcagttctgggatgcttcctgtgaagtgaagacacttaaccaaaaataatatattattttggtgggcttgattttatagtttctcttaaaaattgtttggttgccatccagagggctcttttatgaagaatctatataaactactaaaacatttcttaggacctttttggtgaatttgatcataaaattaaaaagcgtgtatgtgttttataaaggcatacctctgttaagaaggctggttttatgtttgccttttcttctctactttgatcaccaccctagctgttcctttctccagaccaccttacttttcaaacttgattcttgctatcacagctctctgtaacatcagttaaaatcagctgcctcaactctttgaggatgtttgtgcataggacggcattgtgaaacatagggaaatggcagtcttactaacaaaacaggacctatctctggccaaaaagaaaa

SEQ ID NO: 268463 - DNA, 809 bp, Homo sapiens
aatagacattgcaaactctcatgtttttggaaactagtggcaatatccaaataatgagtagtgtaaaacaaagagaatttaatgatgaggttacatgctgcttgcctccaccagatgtccacaacaatatgaagtacagcagaagccccaagcaactttcctttcctggagcttcttccttgtagttctcaggacctgttcaagaaggtgtctcctaggggcagcctgaatgcctccctcaaaggacctgcaggcagagactgaaaattgcagacagaggggcacgtctgggcagaaaacctgttttgtttggctcagacatatagttttttttttttttacaaagtttcaaaaacttaaaaatcaggagattccttcataaaactctagcattctagtttcatttaaaaagttggaggatctgaacatacagagcccacatttccacaccagaactggaactacgtagctagtaagcatttgagtttgcaaactcttgtgaaggggtcaccccagcatgagtgctgagatatggactctctaaggaaggggccgaacgcttgtaattggaatacatggaaatatttgtcttctcaggcctatgtttgcggaatgcattgtcaatatttagcaaactgttttgacaaatgagcaccagtggtactaagcacagaaactcactatataagtcacataggaaacttgaaaggtctgaggatgatgtagattactgaaaaatgcaaattgcaatcatataaataagtgtttttgttgttcattaaatacctttaaatcatgaatgttaagca

SEQ ID NO: 268464 - DNA, 213 bp, Homo sapiens
tgtaatcaatgctatagaaagaaagaagacatcatttcaaatttgggtgggcccaaaagttttggaactttaataaagtctagatccacaaatagaatttatgtaaatttatgtaggggaaaagtattccaagtgtaataaacaatgagcaaaaacaatgaaagtaggaatccagagtaagatatcattaattttaaataacgacaactaatt

SEQ ID NO: 268465 - DNA, 548 bp, Homo sapiens
gtaaatttcaggctgctaaatccttgggtgaagcttcaaattttagcttatgcaactgaagtccattgcaaaatgagacatatttacactgtttatactgtaatttatgctgcataaagttttgtagtgaatgtgtatgagagttttaggtttgcttcaatgtatgtttatatttatgtgacttatacaacttgacatagtagtctgttttaatttattaggtatatcaatatttgttagatttaaaataagagtctaatgctggatacaaactcagtttatttcactgttctagaaccatggaggaatgaagactcccactgaaatgaatgttctaaatatttgttctaaatcttttaatttttgtttaataatttctggtgaatatgtgttcaatctgttatgttaaatagaatataataaacataagacttttctttactgatacatcactgaacataagctgcaatactttaacttatttctgttccataatttcagtaggggctaatgacccacccctgctacattaaagacttcagactgca

SEQ ID NO: 268466 - DNA, 155 bp, Homo sapiens
ttatggaaaaattgtcaaacattcaaaaaagtaaggagaatagaaggataacccccagatttccaattcccagtgttcacaattatccacatttcgacattctggttttacctatcctccccaacctttcttacttgaatattttaaagtaaatc

SEQ ID NO: 268467 - DNA, 476 bp, Homo sapiens
atggatctcaatctaatcttcacatcttatgcaaggattaatttgaaaataatcaaagacttaaatgtaaaatgtaaaactgtaatgattttagcaaaaataggtaaaaacctttagcatctagggctagtggtataattcttagccctaacatggaaaacacatgtcaaaaatgcaaaaattgataaatttgaccttatcaaaatttaaaactttactctgtgaaagctcatgtgaagagaattaaaagacaagttatagatgggggaaatattttaaaatcacatatctgacaaaggactaatatctaaaatatataaagaactctcaagactcaacgagtcaaacaatccaactgatgcagaatttttgttccttagttcagctaaaactgtgttcttgtcatatgacaggaaagattaagcacatggacacactgaaaggtgaggggagcagaaagtattgggcgaaaagga

SEQ ID NO: 268468 - DNA, 396 bp, Homo sapiens
tgtgttgagatgacacctcaaccagtaggacactttggggtgaatcttagacaaatggaaagatgggtgtttaatattaaccacatctcttcagttggagagggagaagttaatgcattagcagagggagcatttgaaaatgggaaagggatctaattaaatcaagaatctgtcatatcaaaagagtaaaaagaacacatctataaatctgtttctagaagattaaatggtttgtttggccataaacagaattctaggagaggtgtcagaagagtacttagtggcagcaaccctatgtgtctgtcagagatcttaccaggtggttttctcttcttttgggtactgtttaagcattcaaatttcccactgctcttggcacataactctctaaaaaaa

SEQ ID NO: 268469 - DNA, 399 bp, Homo sapiens
cttcctatgctgtctaatctgattcggtacaagagataaggcaggtactgctaaatgataacttagatgcaggggccatcatgaaaatattcatcccatatcttacattaagcaaactactagcaactgtttgttgaaaagtataaatgaataaatgaaaataggacagataggcagtgtgggaagctaaaatatggaagtgttattgctttgctttatgtggtataatgatctgactttatcttcccagctctcccaggaagtatgcagaataatatttatctcatattgtggatgtggcaatcaagacagagaggctagatgctttacctaaagtcatccaacaaatatttggtagaaccagtgctagaatgcaataaatggaaacagagtttattt

SEQ ID NO: 268470 - DNA, 534 bp, Homo sapiens
agccgagaatccaacatgtccagaaccagaaccagaaagatagtatttgaatgaaggtgaggggagagagtaggaaaaagaaaagtttggagttgaagggtaaaggataaatgaagaggaaaaggaaaagattacaagtctcagcaaaaacaagaggttttatgccccaacctgaagaggaagaaattgtagatagaaggtgaaggagattgctgaagatatagagcacatataatgccaacacggggagaaaagaaaagttccccttttacagtaatgaatgtggcctccatagtccatagtgtttctctggagcctcagggcttggcatttattgcagcatcatgctaagaaccttcggcataggtatctgttcccatgaggactgcagaagtagcaatgagacatcttcaagtggcattttggcagtggccatcagcagggggacagacaaaaacatccatcacagatgacatatgatcttcagctgacaaatttgttgaacaaaacaataaacatcaatagatatctaaa

SEQ ID NO: 268471 - DNA, 523 bp, Homo sapiens
caagtggctgaaccagcaatcaatacctgacctgaaggcaaccctctataggctggcaagtggcctacaaagttgctcagtgctagagaactgagcccaacagaagtacattctaatgtttagtgattggccaatcgtattctttgtgatggtgctgatgggaaggtagtgatgtgcatcagacatgcagagttagtagcagctggagcagacacagaagcctccctaacaatgggcaatggagaaaggaacaacagacagttctgaaagaataccaagtgctcctaagccaaaagctatagttaggctgctggaggtactgccagtcctaaatgatggcaatgatggtccatttttctgtgaaacttgactgtatacctgttaagatttttttgtgttctttttaaggctccatgaatgaatctttccaataaacaagtttgtaacaaaggcaacctgaacatttctgatacttgaaacttgaaaatatctaatacaattttacatcactttcaaatcatga

SEQ ID NO: 268472 - DNA, 978 bp, Homo sapiens
tcccactctctctataataaaccactcccacaaagtagcgggggatgaggacgctgactctgcctctttccttcttatgtttgagctccaagatggctgttaagctcctatttatcaaacattgttgctctgaggcttaaagaaacatgacaaaaataagtaaaggcaggtgcaccctttccagcctacaacatgacagttgtgtcaggagacttcacaatagccataccctttaatctaggaactctgttttatgcttaaagatgttcactgcagtattatttataatacagtaataaaaattggaaacacagataacccacgataatgtctagtaaagggtcctacagccatagaatagaatggctttggccttttaaatattttaagaagttttactaataggagtttattgcttggggtgggggggtcactggcttcaaagcagaagacagattgtatataggtaataatctctactatgttaaaatccatagaaagaaaatgatacaagtgatgtttttcgattttgctattatactcaacattttcttctttaaacattagtgtattttaaaaaatttaattactgtattttttttaaaatgttataacaatggtaatcatttttttaaaaaccacaaactatctagaaataaaatgataattcatttggtttaagtgcttgctgagaagataatgtccaaaatatgctccagatatcccacaaagttcttgccatatagaccgagaagtgcctggggagaagtgctgaggtcataaccttcacagcccctgaagtttatattttcatacatgtcctgtggtcttgccaggggcaggggggggccacagattgggataatttctttcctcatgcagaatatagacttggagagacacacttcatatatgcatattaaaaccccttggagttgacctggcaggggtaaaatcatgggtgattgattttcacac

SEQ ID NO: 268473 - DNA, 449 bp, Homo sapiens
ctacattaataatcatcacattggtctcttgagcttatacatgacacaaaaataaagacaaatgagtatggcaagggaaaaaggcaaattgcatctaattgttagtttcttatggggctatagtttgacgcagggcaatgagggatactcagtctcattgaagtttctatgatgtagaactgcagttatatcagagtcccatgcttcgggttgtaaaacaggtttaggaagtctttgaaagctaggcagaaaaaagtaaaggactttttttctagtaagacattttatgatctgcttagtatgttaaatgttagcttcccaccatgcaacttgcaatcccattacttgaatatagtggattcaactagagggaatttctcaccctttgtatctccattgagttcaccgcttcatattgaaaacaccaaaaactaaaagcgatgaaaaca

SEQ ID NO: 268474 - DNA, 577 bp, Homo sapiens
acctgtcattaggcagggcaagtgggagccgcttcatggtgatcttggagacagattttcaccatcaaccactccccatcagctcagctctgagaaggtacaaggtgttttcgttttgtataattactattgtgggccaagtgtggtggttcatgcctgtaatctgagcactttgggaggctgaggcaggggatcacttgaggtcaggagtttgagactagccgggccaacatggcaaaactccatctctactaaaaatacaaaaattagctgtaaatggtggtgggcacctgtagttccagctactttggaagctgagacagaagaattgattgaacctgggagttggaggttgcagtgagccaagattgtgccattgcattccagcttgggtgacagagtaagactctatcttaaaaataaaataaaatttatttatttttatttattttttttttgctttaaaaattctttaatttgatacagtcaagacttcatatataacttctagtttacaggaaatacaggtgatatacaggttatacactggagaaatacagggaaatacaacacgaag

SEQ ID NO: 268475 - DNA, 791 bp, Homo sapiens
cagtgaccatctttgtgagcataacttacataattgtttcgtaaaaaattcaatgagaatacacattttaaatattcattgccagtcatgatggctcatgcctgtaatcctaggactttgggaggccaaagcaggaagatcagttgaattcaggagttcaagaccagcttgggcaacatagtgagacctcatctctaccaaaaatttaaaaaataaataggcatggtggcacgtgcctgtagtcccagctacttgggaggctgaggtgggaggattgtttgagcctgagaggttgaggctgcagtgagctgtgatggcaccaccgtactgatgatgcctgggcatcagagtgaaatcctgtctcaaaaaaaaaaaaattgttttcaaagtatcctacaaaaagaccttatcagtcatatttctgatagagtatcagaatataccttcactaagtattatcaatctttttcatctttcttggtctaattggagatgtttgatcatttgtggggtttttgtgaattgtctgttcactgaactctcttcataagcacaatgcctagtacataatgcctagtatataatactgcattgtgtggattgtgttgctgttcccttatttgggcttgctgcttatttctactttttttcttattataaataatactgcagtacacatctctgcatgtctttttttgtatctattttatgttatctccttaaaataaattcctgttagtggaattactgggtcaaggcagtgaatattttgagactcatggtacagaatg

SEQ ID NO: 268476 - DNA, 352 bp, Homo sapiens
aaatgtctcttagctacacttctttgattaccagtgggttattgcatctattcatgtttgatcatttgtggggtttttgtgaattgtctgttcactgaactctcttcataagcacaatgcctagtacataatgcctagtatataatactgcattgtgtggattgtgttgctgttcccttatttgggcttgctgcttatttctactttttttcttattataaataatactgcagtacacatctctgcatgtctttttttgtatctattttatgttatctccttaaaataaattcctgttagtggaattactgggtcaaggcagtgaatattttgagactcatggtacagaatg

SEQ ID NO: 268477 - DNA, 463 bp, Homo sapiens
tctgtttaaaaagtaagtttaatgattacattattcagttttttccatatttgcttcttgtactaaatttgtccaattctgaaactgtgttttgaaggttgccactgtcatagaactatggtctagttctttttttatttctagtagatctcagttcaaatatttagttccatgtttttggtaaatagagatttgtggctgttacatcttcttcataaattatgccttttataattgtctactacctctctgtgtcctgtttagtgcatttatctataaatactgcagctgttgtaatctcaatactatcaaatacataaggaaaagtatgctaagtgtatagcctgatgggttatcacaacatgagtgtggccatgccgaagggctttcagagtagaaacatcacccgccctcggaaaaacatcactggctgtcaccaactcctcccctagtcctaggggag

SEQ ID NO: 268478 - DNA, 375 bp, Homo sapiens
  misc_feature (339)..(339): n is a, c, g, or t
  misc_feature (352)..(352): n is a, c, g, or t
gaaaaaaggagtggtcactggaaagacctaggcaggattagagggttaggactttgagctccatgccctagcttctgtttaaaggttgggttatccagtggccaatgatgttaatcagtcatgcctatgtaacaaagcctaaaaccctaaaaggataggattctgggggctctgggttcctgaacatgtagcagtttctggagggtagtgccctcagagggcatggaagctctgcaccccttcccacatactttgccctgtgcatctctccttctgctgttcacctgggtcctttgtgatagcctttacttaaagcagcccttccggcttagcctccgngcttggattacanatgtgaagcccatgcttcgcctg

SEQ ID NO: 268479 - DNA, 508 bp, Homo sapiens
agatttgcagaaaattatccatcctctgctaaccactcagtgacgggcctcggggttcagggtcagtgtttacaggggaggagggaggctgggcatgctgggtcctcattgtacacaaataccccgggcctcaacctcacccatgtgccacactgtgccaagggtgttacataacatttctcttttaatcctcacaacaatctatgaggcaaatactgttctcgtccccattttgcagaagaggaaatgagctcaaaggtcacttggctagtgtatagtcattagtgctgtctccaaatatttccggctctctgccttctggcacaaggtaggactgcatgttctcactctttgatgctagctgtggacatgtgaccaactttaaccaataaaacgtggcggaactgatgtgcgtcagctctagtggaagcattaagactctggcaccctcacacctatgttgttcatagagtgtaaatgagaaataaacttttattgttaaaccact

SEQ ID NO: 268480 - DNA, 134 bp, Homo sapiens
attttggttggaaatattcagcagcaaaaaaatgtcaacaaatacttgcaaagaaatggtgttactttatattctctgtcaaaaatgcttactgaataaggcaccattataataaacaatatgaaggctacaaa

SEQ ID NO: 268481 - DNA, 397 bp, Homo sapiens
  misc_feature (149)..(149): n is a, c, g, or t
  misc_feature (373)..(373): n is a, c, g, or t
atttatatgcagtatgataacaatttctttttctggcacaaattaagaatttctgtatgataaattctttaaagaaaaacaccaaaagacatatcattcctaagattgacataatattttccattaattccagtaaagcttgttttttnggggaagtataagtaggagggattaggataggaaattaattaatcttttttttttttctcagttttgctgaaacggctcatagttttaaaagtctgagtgcttctactcctagaatatttaagcacaggccgggcacggtggctcacgcctgtaatcccagcactttgggaggccgaggcgggcagatcacttgaggccaggagttcgagaccaacctgggcanacatggtgaaaccccgtctctact

SEQ ID NO: 268482 - DNA, 478 bp, Homo sapiens
tcactgcattctagcctgggtgacagggcaagaccgtgtctcaaaaaaataaagtaaaagaaatgaaataaataataataaataagataaataaataagagtaggttgaagactttgggctgaaagagcctttatggatcccacatactcagagtcaattaggatgatccaggaggatttttgtgtcaggcctaaagtttctaggaggtcctggagaacagcttcactaggatcaggcaggaagcagggggtaatggtggtggtagagatggttttttgtggtattcattgaaagaaattctaatgcagagttctctgtataaacccttcccagagttagccattgctaatcagttgatccataagctaacagacatttttctagtccattggtatccagaatgggatatgcataatttaatgagatatgagaggaagatgtttgaacctcacttgatttttatatttgcttttcaaa

SEQ ID NO: 268483 - DNA, 427 bp, Homo sapiens
tagtccctgtgtctgtcttttctgtatttctgacagcatccattgctaaatagagaaacagaaaacctcacctcggcatgcatggtgtggatttggttcctggctcaatttgagacaaactagatcagtgacatagggttttcttcgctactaaacacaaagatctgcctcttagtcaatagagaaaacagggtcccaacttcaaagagcttgacatataataacataatggataagacaaaaattagttatttaaatttacagttatttttatataaagttatctgactttaaggttatctgacattacacaggcaagacttttttcatatttcagtcattccgtttttcattgacaaaatgcataaatgtttctattttaagcccttttaacatgtcagtaaatatcaattaccttcaacataaa

SEQ ID NO: 268484 - DNA, 451 bp, Homo sapiens
aaggctaacctgatccgtgttttttccactgtgctctcactaaggactacattcagttatacatgtatattttatttttgagacagagtctcgctctgtcgcccaggctggagtacagtggcaaaatctcagctcactgcaacctccgcctcctgggttcaagtgattctcatgcctcagcctcctgagtacctgggattataggcgtgcaccaccacaccaggctaatttttgtatttttagtttgagaccaacctgcgtaacatggtgaaaccccatatctacaaaaagtacaaaaattagctgggtgcggtgcgcatgcctgtggtcccatctactcggaagactgaggcagcagaaccgcttgagcctgggaggtggaggttgcagtaagatgagatcatgctgctgtactctagcctgggcaatgagagtgaaactcttatctcaa

SEQ ID NO: 268485 - DNA, 332 bp, Homo sapiens
cacaggtttattttttaaattaagacataattcccatatcataaaatccaccctactaagatgaacaattcagtggttgttgatatatccacaatgttgtacaaccatcaccactatgtaattctaaaacattttcaccaccctaaaaggaaatgctgtacctattagcagttactcctcattgcccactcccctcagccccaggcaaccagtaatctaccttctatctctgtagatgtacttgtttggggcatttgtataaatagaatcttgcaagatgtggccttctgtgtctagctcctttcactttagcataatgctttgaaggttta

SEQ ID NO: 268486 - DNA, 258 bp, Homo sapiens
tggtgctttagttatccctgatgtcaagacctttactctattttgcccaaatttctcagttagataacagcaaagagagagagccagaagacctgggtgtgcatcctagctgtaccaatcactgaccatgggatcttagattcagactctgagaacctccatttccttctccataaaaatgggcagatatgtactgtactctgttgggggaaaactccaactcaatgagataaagtaggtaaaaactataaacccagt

SEQ ID NO: 268487 - DNA, 489 bp, Homo sapiens
tgagacacaatctcactctgttgcccaggctggagtacaatgacacaatctcggctcactgcaatctccgcctcccgggttcaagctgaggcaggagaatggcgtgaacccgggaggcggagcttgcaatgagcggagatcgcgccactgcactccagcctgggccacagagggagactctgtctcagaaaacaaaaggccaaaataataacacatctttgcattggagttattttttggatatagctcccccaatgtacacattgggtgttgttaactcaaacagaaagtatcagagagactcttgaatcttggtttggttcctcattggctgtgcaaacttgagcaagttccttaacttctctgagtgcttattccctcagctgtaaaatggagcaaatagtgccttcctagatgagtgtcaggattaagggactcagtctagtccctgccgtattgagaataagcaataaatggtcattattgtta

SEQ ID NO: 268488 - DNA, 358 bp, Homo sapiens
ccagaaacacacacacacaagcacaaacacacacacacaagcacacacacacacacacaccaagtaagagaatactaaaagatcagagaaaatgtaattatacttatcaaaatgttttaatgcagtggcctattagtttcagaatataaaatttatttgatttgttgagcaacttggagcttattttttaatcctttcagataataggaacttgaaacatacttggctgtgtataagatatatgtgatattagaaaatcatatatatctgttaatatatattcaaatatattactaagcaaaaatatatttacatgtttatatcaatgatgcaattaataaatgttttcacatcctgt

SEQ ID NO: 268489 - DNA, 282 bp, Homo sapiens
gcacaggggggctcaagggaagctgaaagtgaggagacttggcttgtatcctgactcccctcagtgaggtgctccatctctgtgagcctgctgctgcccctcaccccaccaagatgtctgacaggatggatttgagaaggaggtacaacacacaccccatgatgcacggttggcccccacagactctgatgcaggccacaccctggcgctccctgagctggcctggttcagtgctctttactctcttagaagaacattggccgggcacggtggctcacacct

SEQ ID NO: 268490 - DNA, 2459 bp, Homo sapiens
  misc_feature (3)..(5): n is a, c, g, or t
  misc_feature (7)..(7): n is a, c, g, or t
ggnnngngggtgagccggagagggtgaagcaggcaggaagctgcaggccggcggtggatggggccaggaagcatgcagggggagtgaggaccgtgtatgagagaaacactgcccaagagagaagaaagaaaatcacaggacccgaggaaaaagaatgagtggtgtgttcagagatgacacatgacaacaaattgtttgcttggaggattttcttacgcgtgcgtgtttaaactggcctcaaggaggaagaagaaacatgcgttcctggatgactgagttctggaatattctgtcataagactttgcaactggagtagccccagaaaaaggcaggcagtgggagttggctccctccccaaagccatccctgagttggctttgttttgggttcctcccaggtggaatttaggcaaaacttacagtattgttctgggatctgggcaagttgtgttggggatggacatgggtctcagagagatgtgcgttggcgagaaacggacagtgatcattccgcctcacctgggctatggggaagctggcgtggatggagaagtgcccggcagtgccgtattagtgtttgacattgagctgctggagctggtggctggccttcccgaggggtacatgttcatatggaatggtgaggtgtcacccaacctttttgaagaaattgacaaggatggcaacggagaagtctcctggaagagttctcagagtacattcacgcccaggtggcatctggcaaagggaaactcgctcctggctttgatgctgagctgattgtgaagaatatgttcaccaaccaggaccggaatggagatgggaaggtcacagctgaggaatttaaactcaaagaccaggaagccaaacaggatgaactctaaacctggcacgaaccagatggtgccagggagtacgtgacaccaagccaactgtgtggcagaacgtgcagtgagggtgcaagggtctttcagaagttgcatcattagccagtagtaggtgggtcacatagtacctggtgtacacatcggggtgggttgatatatggggtgagaagtttaggctgatcgccagtgatagtaaacaaaatctgtgcagagggccttagcatgggatgtgtccagtattgaaaaggctgcactgccaaccatgatttgtgaaccttctgggaaattttgttattaaaagaatatatagtgtcagacggaagttataatcatcttggaggaaccataagaaaaagtgtccagggtatctatataaagagggttaaatttttttttaacttgctggttaaaacattttagaaatattcttgagatgggcaggagagtcaaagggcttgcttgccccagcagagttcccagcagacagccatggctcttcccagcagcctgtgcaaattctgatgatgaccccacccccgcacacgcacacgcacatcatgcttttccagctcatcacaccccgccccactatgggcctaccattaatagtgtatatcttggaggttaaaagagccttttggacagaaaactgggccaggaaaaggcatctcagaccacaaatagagaatttgattcctcatttgccacataagtcatctgcttagcttttcctttcttttttttttttttttttttttggaggcagagtctccgtttgtcgccaggctggagtgcagtggtgccatctcggctcactgcagcactgtctcggctcactgcagcctccgcctcccgtattcaagcgattctcctgtctcagcctcctgagtagctaggactacaggtgtgcaccaccacgccccgctaatttttgtatttttggtagagacggggtttcaccgtgttggccaggatggtctcaatctcgacctcgtgatccgcccacctcggcctcccaaagtgttgggattacaggcatgaatcaccatgcctagccacttagttttttgtcattcccacctttctatcccatagaacactcttttttatcttccctgaaccatattgatgagataaatagggctgggggctgggccccgctggtcactcaacagagtatttcccttggccgagatggaagttttgtcccaatagatgagctgctgagcatcaacaaggtgacatttttctgctgcccatttgtgtcctggagacggtggtaccctgaaggcagaggccagctgctgcaagacagcaatgacagtccacctgccggcctgattcctgcatcatggaataaccacatggctaccttctatcctctgttcccaaatggtggtggcacttatcctgaagtcatcaatgatttccctttgaaactactttattttactaatttaaactattttgtactgatgtagccctgaggtagttcatgaaaatgctgtgcactcattccatggaataaatgttggaaagctgatcttttctgatataaaatgttgaattata

SEQ ID NO: 268491 - DNA, 1545 bp, Homo sapiens
tcctgtcaaaaacacgctgctgtgatccggaacgatcagtgtggctgtttcctgatttaaaagttgcatcattagccagtagtaggtgggtcacatagtacctggtgtacacatcggggtgggttgatatatggggtgagaagtttaggctgatcgccagtgatagtaaacaaaatctgtgcagagggccttagcatgggatgtgtccagtattgaaaaggctgcactgccaaccatgatttgtgaaccttctgggaaattttgttattaaaagaatatatagtgtcagacggaagttataatcatcttggaggaaccataagaaaaagtgtccagggtatctatataaagagggttaaatttttttttaacttgctggttaaaacattttagaaatattcttgagatgggcaggagagtcaaagggcttgcttgccccagcagagttcccagcagacagccatggctcttcccagcagcctgtgcaaattctgatgatgaccccacccccgcacacgcacacgcacatcatgcttttccagctcatcacaccccgccccactatgggcctaccattaatagtgtatatcttggaggttaaaagagccttttggacagaaaactgggccaggaaaaggcatctcagaccacaaatagagaatttgattcctcatttgccacataagtcatctgcttagcttttcctttcttttttttttttttttttttttggaggcagagtctccgtttgtcgccaggctggagtgcagtggtgccatctcggctcactgcagcactgtctcggctcactgcagcctccgcctcccgtattcaagcgattctcctgtctcagcctcctgagtagctaggactacaggtgtgcaccaccacgccccgctaatttttgtatttttggtagagacggggtttcaccgtgttggccaggatggtctcaatctcgacctcgtgatccgcccacctcggcctcccaaagtgttgggattacaggcatgaatcaccatgcctagccacttagttttttgtcattcccacctttctatcccatagaacactcttttttatcttccctgaaccatattgatgagataaatagggctgggggctgggccccgctggtcactcaacagagtatttcccttggccgagatggaagttttgtcccaatagatgagctgctgagcatcaacaaggtgacatttttctgctgcccatttgtgtcctggagacggtggtaccctgaaggcagaggccagctgctgcaagacagcaatgacagtccacctgccggcctgattcctgcatcatggaataaccacatggctaccttctatcctctgttcccaaatggtggtggcacttatcctgaagtcatcaatgatttccctttgaaactactttattttactaatttaaactattttgtactgatgtagccctgaggtagttcatgaaaatgctgtgcactcattccatggaataaatgttggaaagctgatcttttctgatataaaatgttgaattata

SEQ ID NO: 268492 - DNA, 363 bp, Homo sapiens
ccttaaatcttattttagtcatttgtctgatctttaccacctccaaattgttggcagaagctattagagcaaatttaactgagttcaaatttcacttcctatattctacttattttctgaaaggaggatgaaagaaatgcaaaaacagaagattggagatgagagcagggttagtcacaaacccagttcatatcaagaaccaatgttgagattactgagatctgttgtaattttttaccattcccaatagtaataagaatttttttctcaagaattacttattaaaatatgggcagacatcagtgatagactggataaagaaaatgtggcacataatacacgatggaatactatgcagccata

SEQ ID NO: 268493 - DNA, 415 bp, Homo sapiens
gctgtgctgacagacggcctggtgagggaacccgggaggcctccagcatctgcacccctctcctactttgatctctgtttcaccaacattgcaccccaacttaaggtcacatagctactgtcaagccaacaaggtgctgcctctcccgccgtgtgagggtggaaccccataagccaccactggaggcatccaagcatgttgattccttctctagttcagacaccacctctcctggacatcctgtggcctaaagactatcctagaatcaacactccttaaataggagtggggaaagaaaaggaaaatgtgtgtaatacatgtgaatcacagataacgtagtcattggttaatatatacaactacgcgtatttacattctgtatgcgtcaatgagtaaaatactgtggttggtgctt

SEQ ID NO: 268494 - DNA, 244 bp, Homo sapiens
tttgatgtagtttttgatcaaaaagctttggtgtttccaaactcgtagcctgtactagaacataatgttgaaaaacatatgtgtatagaatcaaaccaatataaagtaatttttccaaaacgggtaaggcagacagaaggtgaagtcattaaaaacacatggtcaaagaggtcctccaaacagcttagaggaaggcggcccaacgaacgcatttaatcaatatatattgctaaagataatgggg

SEQ ID NO: 268495 - DNA, 159 bp, Homo sapiens
tcttttgaaagtattagtttgtttggccagttgggccaggtcataaatattacggaattattagtcagctcttgaagacaggaatgtttgagggctttgaaagctagcccagcaggaagcttttcgtggtctgtgtattttccttcctctcaggaatga

SEQ ID NO: 268496 - DNA, 412 bp, Homo sapiens
gatgggttcaatagaagcccaaaccccagccttatgtaatatatccatgtaacaaccctgaaaaagtatcacaccctcccccaattctaaaattaaaaaaaaaaaaaaaaggtaggactgtatttaccaaaaactcactaggtgattttgatgtgatagcaccagtcttccagttgaaaacatctgacttaatatattttctccctttgtgaaaaattacaattcaaataagaattctgagtgttcagaaaagtctacaatttaggccaggtgtggtggctcacacccgtaatcctagcattttaggagggaggcctaggaaggcagattacttgagctcaggagtttgagactagcatgggcaatatggcaaaatccagtctccaccaaagaaaaaatacaaaaaaattag

SEQ ID NO: 268497 - DNA, 387 bp, Homo sapiens
attcaatagaaacataaccgtccaatttattttctgaatattttccatctgctgttgctgaatccacagatgcagagctcctggatatgagagccaagtgtgctttgagagtagggtgggtgaggttgctaatgagtacaggggagcaggtgttgatcaggaggaccctgcactggggcatctggacgtactgcctcaggacttgagactccagttggatggcacaggcagactcggcacaggcagactcagcccaggtcaaagccgtccccttgaagtttcattttatcccaagctctttctggaccctggaatttggcatcccctaggccataaattttagtaaagagatatgggtatggaaacatgttatgcatagcaatggga

SEQ ID NO: 268498 - DNA, 372 bp, Homo sapiens
attcaatagaaacataaccgtccaatttattttctgaatattttccatctgctgttgctgaatccacagatgcagagctcctggatatgagagccaagtgtgctttgagagtagggtgggtgaggttgctaatgagtacaggggagcaggtgttgatcaggaggaccctgcactggggcatctggacgtactgcctcaggacttgagactccagttggatggcacaggcagactcagcccaggtcaaagccgtccccttgaagtttcattttatcccaagctctttctggaccctggaatttggcatcccctaggccataaattttagtaaagagatatgggtatggaaacatgttatgcatagcaatggga

SEQ ID NO: 268499 - DNA, 164 bp, Homo sapiens
gtacaggcatcctctctcctggtgagtgattttctactgtattcccagcagtttatattctaatttctatggagatttaataatttctgtaatcaaagctatattcctaaatacctcaagtttttgaaacctcatcaaaataaagtttatttggcaacttagta

SEQ ID NO: 268500 - DNA, 635 bp, Homo sapiens
aggagagatggatatgtttgctgtcttgggtgtggtgatagctttatggtttttacattgtgtgtgtgtgtgtgtgtgtgtgtgtgtgaatgacagacttttatgtgttcccataaagtctagaaatttgctatcttatcctttacggaaaaaatttgatgacaactggataagatcaatcattattcacctgtgtgttttcagagccctagggtctgctattataggaggtcaaggagcagccacacaggatgggccctgtctcaacagagcagttctaatatatctgtggcatagatttggcttttggctttccagtaagatttaactggggaaaagggtggttaaagtctcagactaggtgactgctgcatctgagatagaatcccattctgttaatgcaaaattgggaatgggagtcatttggagaaatgccattttatttcatagtaggaattaactgctcttagctcattgttttaatgaaccacccaagacctttgtaattaaagaatgtactgaaacccttgaaaagaacacatttttgtaagtagattaaaccttgtcattctgttttgttcttcaggctacttagccaagcttctctgcccagatgatgtagagataaataaacc

SEQ ID NO: 268501 - DNA, 423 bp, Homo sapiens
accacagcccagtcctggcctctgggctgcagtctgcttactctgttgcttttttttagttctatctcactctggatacccatttattcagctctgccccttaaacctctggatagttatgcttgagggctgttcctttctcttgcacaaagggattgcccttactaggattattactcagcagagccactcatatccattctcattctcattttcatccaaaagcctaggaagggagactgctccttccagtacagatggagaggatcaaattgggttggggacactaagggatgctgtgaattccatgctccaaggtttaagctgagggcagtggggaggaagggcggagaggtacctgtatccacctggcctgttcactacttaattttcttttgcaccacgcaccagaggatcatctct

SEQ ID NO: 268502 - DNA, 377 bp, Homo sapiens
gtaagtagcaggttgttgtatgtacgttcttactgataacccactggtcagtgtttttgcgttggtcttatattttggtaatttcaaaaatactcagtaatatgttgttattaatgcacagaagggatgtgtgtgtctaaatgcttagatttgcttgctttgtcttaggtttggtgtgtctttttaaacttgggaatctagttgttatcttagcagtgtaatcaaaacaaatattataacctcaggactaattcttaatgaactttgctgaaattgaaagttgttgctgacaacttaagagcatttcttctcatcgtcatcagccattatgaacgcccttgttttcttgctgtcagctgtttgagattgtcatgatg

SEQ ID NO: 268503 - DNA, 424 bp, Homo sapiens
caggaaccaggttctgtcctcattgtgtctcctcgctcactgtagtgatttcactgaagaaaaccatttaagagatatttccaaagaggagcgttttcacattccccgcgcatttctctctgagcttgtggctcgtccagtcaatggcccaacttcagttaatgttgagatattgctttattgaccgaactcctgctctcctcaatacagtacacatttatgattgagttttcctgtatgaatctttttgtgataaaatgaattgcattctgaagggctggcgggggcgtcctgggttgacaggacaattgtaaaacatccgtttaatagaaggctcttgctcaaatgccatttttaccctggtggcggcaaattttcttaagaatttgacttaatcaaatgtgtctaaaaagttttcactagg

SEQ ID NO: 268504 - DNA, 355 bp, Homo sapiens
gaaataactgataagtcacccacattaccaccttcttaaatggcttaaattctggagactttcttggtaacttgacataggtgaactagattgtggccacattaagcttttaccctggagttcatttaaatttcctctgaatagtttcagatgtcagaggaaagcctagtaattcaaagtacctacacagcaagataggtaaatgtacagaatcactcagcagagtgcatggtgatccttttcctctgtatgtgtgaaaaataagttttagactcacttttctcttgtttcatttataacattttaattctctataaaaatgaatgttgctgagggaggcggaggttgcagtcga

SEQ ID NO: 268505 - DNA, 289 bp, Homo sapiens
aaccaactatttagtaataagtgttttttttacattcacctcaatctctagaaagatcattataattttcctttaattatcaacaacttgattatatgaaagttttatttttttaataaagcctcttattgttacacagaccattcatgatacacttggacttcctggtttgtcctgaacattcttctttcttaaacaaccagtcattttattacaagactaaatttaccataaaagattctttctcataaaaaattatttctctttaagcttacttaccaaaaaaatc

SEQ ID NO: 268506 - DNA, 523 bp, Homo sapiens
ccagtctctacttctgtcatcctgatgcaaactcagctgcttctctcttgtggggacccctgtgatcgtctccagcccacctgggtaattgagagcacgcgctccatcccaccatccttggctgcgtcacatccacagagtcctttttgcaggaaacataaagaaacccattggccggttcctgggcttaggatgccatggacacctttagagggctgttgtgcagggatcaggacgaggtggaggggttctatggcgtggaaccttgtaggtcatttataggagataagattttattctcagtgcaatgacgtagtccagatttatgggttttttaattttttagatttaattaattaattatttcagagacagggtcttactctgttgcccaggccagaatgcagcggcatgatcatagctcattgtagcttccaactcctgggcttacacaatcttcctgtcccagcctttcgagtagctgggactacagatgcatctcaccacaaccagctgattaaaa

SEQ ID NO: 268507 - DNA, 334 bp, Homo sapiens
tatcaactgtatacccatatttgcttatgataaacagcctctaattagagaagagattacaatgtcatggctatgcacaagagttctgttgttaggacataataggaaaagctcatctcaatggaactaaaacttacagactaaaaaaagaaaaacagaattttggcaaatgaaagatgaggcatgtagtattctgcttctatggaacaaaaaaattcttttattattatgctttaagttcgggatacatgtgcagaatgtgcaggtttgttacataggtatacacgtgccatggtggtttgctgcacccatcaacccaccatctagattaggt

SEQ ID NO: 268508 - DNA, 355 bp, Homo sapiens
cacgccactgcactccagcctgggctacagagtgagactctgtctcaaaaaaaaaaaaaagggctcatttttcagatgagagatttgatgttcagcgaggggtgagcttactaggaacttgatgcccagagtggagcgcacctctcacctctcaggtgtgagtcctgagaggagccagaacaccagccccggagcacttctgcgtccactgaatcatcaacactctcaagctgtgggggcagggttgtgtttgatcatctccacttcacctctgtgacagcctgttagatttatgaatgaatttaaatctcccagatttttgttgttgtttagcaaaagcttgggttactcagaa

SEQ ID NO: 268509 - DNA, 634 bp, Homo sapiens
acagcaggagtcttaaactccagtactggcagtgggcctgaggccatggggatgagtgcatggtccaagaataacacagtgggtctgtggtgaatgggaaggcacagacaggtcctgcccgaacactttctaaaacaccatgtgggcttaaaacataagtctgtcagaagggagccccacgaggacccggatctttgtgtctgtccgattcgtcgtgtcgtcccggacatgttgtaggcctcaagaattatttgttgtcatgaagtcggtctggggcctcgctttctatttgtgtctgtagtttgtaaactttatgccaaataaagctgtattttttttttcgtctacctgttctgacaaggacaaaaagaagtgtattcctgtgagattctagcagccagatggtattttaattcacagtaaagttcatgatttgtgttgtgtctggatactatgtgtcatccatagtgaaacagccgttgggttggaaggtagcgcatgtggcatcgttgagagccgggtgtgaagcctggcctcagctctgccagttgtctccaagtctcattttcctcatcttcaaatgagcttgggttatttctccccccagcttactgtgaataataaatgaggtgct

SEQ ID NO: 268510 - DNA, 735 bp, Homo sapiens
gttttctcatgtgggacctgaccttacatgctccttggatgggccacactggtgaccacgcgaggctttgatgctctcatcacagggacctgttctgagttttatgttgtctttgttggtttcaacattttatgccaaatcagcaagaaatttaaatcttttttcatcatgatcattgtattcattctccttcattcattggtgagcctgttcctggaagccatctgtaccctcggacagccagcaacgactgagctacacatggatagaaccatgaaccacaagaaatacccctgaattctgaactatttccatatcaacttctcccaaaatacccacagccagtccaacaccatccaactggatgggagcagggaaggcggggaatcagagtggaaagagacttagctgagttatttttattatttttaaaagccttattcatagacatatgtgtatatttagagacagagtctatcactacgttgcccaggtttgattctttttttagagacaggtctggagtacagtggtgcaatctttgctcatcacagccttgaactccagggctcaagccatcctcccacctcagcctcctgagtagctgggactacaagcatgtgctgtgccaccaagctggcttggtgtgactaactgatgtctcacctttgcaaactttacagaaacatatgacataggaacacattgcaattacatattgcaattcagcagaaa

SEQ ID NO: 268511 - DNA, 353 bp, Homo sapiens
tgtaaacttggatgtttaaaaattaatgtcatatttacttatcatgagcctaaaatcttgtgatgtccaccaggctaagaagattattggttacaaaatattaagaaacatgggctgggcatggtggtttgtgtctgtaatcccagcactttgggaggcctaggtgggcggatcacctgaggtcaggagttcaagaccagcctgaccaatatggtgaaaccccgtctctactgaaaatacaaaaattagctgggtgtggtggcatgcacctgtactcccagctactcgggaggctgagacagaattgcttgaacctgggaggcagaggttgcagtgagccaagatcgtgccac

SEQ ID NO: 268512 - DNA, 390 bp, Homo sapiens
agtgaggggcaggggccaatcctggaggctcacagatcagaaggtgcttaggctcctccccctgcttccctggaaaacagaactgtaccccctccccatctctgggaaagtggattctaccatttcccttggcagccttgaatctcccctcaattcttcctgctgcagctgaaacagtaggactgccagtgctcaggtaacaccacaggctgcaaacagggaaccaataaccaagacaggaactgctccaacaaagaccttccctcaggccttgggatttttcagacatgttatctcaatgagtcctaacaatgatcctattaataataaagtagtattaaaagaaccaataaaatcaccaataaaaatcatctctttgacatatgaaaa

SEQ ID NO: 268513 - DNA, 371 bp, Homo sapiens
ggttccccttctggaggccattagtgcttgtcacagcagcgtgttgggagatggagtctgagggccgtgatctgtgctacctctgggagtgtggtctggaagggacagaggaaagaggagcagaaggagccagaaaccaagcaggcgcggtggctcatgctgggattataggcgtgagccaccacgccaggccagacctggctaattaaaaaaaaaaaaatactcccaaagcactgggctgacaggtgtgacctgtttaattcttttgtttgtttctttacttcttattgtctgcctctcttcagaagctaattcccattagagcaggtgctgtattctttgccaccaccatatcaccagtgtctacaact

SEQ ID NO: 268514 - DNA, 511 bp, Homo sapiens
gtgtgttattagtaaaatgaggtttcaccatgttggtcaggctggtcttaaattcctgacctcaagtgatctgcccatctcggcccccaaagtgctgggattacagccaccacacccagcttttttttttttttgagacaggatgtcactctgtcacccaggctggaagtgcaatggcccgatctcggctcactgcaaccctcgcctcccgagttcaagtcattctcctgctgcagccttcagagtagctggaattacaggcacgtgccaccatgcccggctgatttttgaattattagtagagacagggtttcaccatgttggccaggctggtctcgaactcctgacctcaagtgatccgcccatctcggcccacaaagtgctgggattacaggtgtgagccaccgcgcccggccagagctttaagttttcttgttctgaaaggcagatgtgaatttaaaactcattgacttttctgtacttttcttctaatctcaacagcattgagttc

SEQ ID NO: 268515 - DNA, 501 bp, Homo sapiens
aaaatgaaaacatgtccacacaaagacttgtacactaacgttcaaaacacttgcataccaatgttcaaagcagcattattcctaacaggcaaaaactggaaaaacctcaaatgttcttcaactagtgaatgcacgaagcatccacataatgtaatattatttatgataaaaaggaataaagtactagtatgttacaacatggatgaacttaaaacacattaatgaaaaaaacacagaaagatcacatataacataaaatgtacagaaaaagacaactctagagacacaaagtcgactgagtagtgggtgcctgggattagaggttggacgggagattaactgtaaactggaataacggatcttgctgggatgatgttctaaaaaatggattatggtaatggttgcacaactcagcatatttactaaaactcactgaattgtacacttgaaatggttttaatgatatgtaatttgtacctcaataaattcctttaaaaaaaa

SEQ ID NO: 268516 - DNA, 290 bp, Homo sapiens
ctggagacaaaactctcagagaaagagcttggaataaatggcattaattcacatccatcagggaagccagttgtggtgcccacaggaggaggcttttgccagtttcatctgtgttgaccacttcccagttccctgcggtaagggaagcatatgacttactgcagatacgtgtgggaatgcctcctccttacaaacaagttgtcaggaaagcagtttttaaaatgtgatcaaaagcgagaagaccccatgaatggtctttcacacactcttgttaattccttgggtcccat

SEQ ID NO: 268517 - DNA, 1104 bp, Homo sapiens
ccatcttactacctgcttcctcaccgccgccatcttacttccttttttctctgccaccattttagttcttctgccgccatttggccgccattttaattcctgttagttcccatttgttcttttaaccctgcccacctaactccttggcttccgtcttacccccattcttatttccacctccctgtagtgccataccagtccactacatctacaactcctaacacattcgctgcgggcagtgatatccgctaatcctggatgaggcagcggagggcccccaaacccctatccaggacttagtaaagctggcgttcaaagtttttaattcccgagaggaggcggctgaggtacaacgacaggcaagactgaaacaaaaagttcagctccaaacccaagccctggcagctgccctgcaacaggcattccctaagagccccagcaggagaggtagaggtacaatctcccaggccccgtctggcacctgcttcaagtgcggcaactcaggacactgggccagccggtgccctagccaacagcaaccgtcctgcccgccttgcaactgtttcaagtgtggcaatccaggtcattgggcaaaacagtgcccaaaccccaagccgccaacacgcccgtgccctaactgccaacaaatggggcactggaagtcagactgccccggcctcggagcggccgcatgtgtctccacatggcgacccctccccggatggcgaaggtgccctccagctcctccaactggatgacgactgaagaggccagactcgggaacccctctcacccttgccgagcccagggtaatgcttcaggtagcgggtaagtccatttcctttttactagacacaagggctacctactctgttttgccatcttttagcagacccagccgcccctcctcaatctctgttataaggactgatggcattccctccacctaccgccagacaccttcactgcccttccacctagaccactatataactttcttgaacccataatctaccatccttccctttattccttactaaagcaaatacatcaacttatcttcttactttagtaaacactttctcaggttaggttaaagcctgc

SEQ ID NO: 268518 - DNA, 626 bp, Homo sapiens
accatggcattcatcataacaactaaaaagtacagcaaggtaggtttccaaagagtgaaatttaatcgagagtagacattgaacatgattgcagctagttccatcataacatgttggcagaaaacttcactctttttaattcacatcggaaccatttttggctaaagggcaactggagcatattaaagtagcaaaggataaagcatttctccaatgtttccctgtactcatagggcaagtcatggatcataaattagaaaaagaatttgggaatcagaagtcaaggaggatgctacaggaggacaggtctcagagagctgggaagaatccagggatttagcaaggcctgaaggagcaagccaaacagctgtatccaggcatcttgattaaaacagtttcctgtcctgttcacagatttatcatcattattaggattctttcacagctgtaacaaatcctagcctttctgattcaggcaacttgaaaggccctattttaagtggagagtgtgcaggctttcaaaaatggacctgccttctgtcagccggctccatctttcacacatataataccagcaggattcaaggaagcagagttcctgacttccagaaggttttggtttggaa

SEQ ID NO: 268519 - DNA, 189 bp, Homo sapiens
gggatgctgacccctgaactcctaactggggttggaattcaggtcccttgggaacactgggcacctagggatgtgggagcaggactggccacagccaggtttcccttagaaacagactggttgaattaatgaactgaacaaatgaaccaatgtgttttgccccagagaaaagtgagctttgtcctgggt

SEQ ID NO: 268520 - DNA, 445 bp, Homo sapiens
ctcacatctaagtccaagtgcaaggacctgaaggtccttgcttcatgcttcatgctgcccagctgcgggctcaagccctgtcagattttgagaaaaattatcaactaaaaagcagacagatcctgggcatgcgctagccgggtagagagacacagagctgtgtacaggatgtaatatcaccaacttttggagactgatgttcaaatgctgtagcgttacatacttggttccatgagccgtgcctttttgtatagtccacatgatatttcagaattggtgttgctgttcttcagcaactgttgtacaaaatgttcacatttaatttttctttcttcttttaagaacacattataaaaagaatactttcttgtttggttgggcttttaatcctgtgtgtgattactagtaagaacatgagatgtgacattctaaatcttgggagaaa

SEQ ID NO: 268521 - DNA, 142 bp, Homo sapiens
taagaaggaggcacagggcttggttggcccatttagttagtgacacacctatattactctccttggcatcttaccccagcccatccattgggttgtgtcagtcttttatttctaagtgaggatccagtcaacaggaggcaca

SEQ ID NO: 268522 - DNA, 389 bp, Homo sapiens
accagctcttccagaaatgtttatacaaaggatttagaggttaacaatgcatgtgctctacatattaaaaccgaaaggtgctacaaataaatggatgttacccacagttaagggtttgcacacttgctgatgaacttgaaaatctccaagtttaataagtcatggctaatgtagtatgattcattcttataaataagcctcaaaaggaaggaaggaaggaaaagagggagggatggagagagggagggaaaaaggaaggaaaaactggatagtttatagagatagacatattgatgcaactgaatgggcttagtaaattaatttttccatctttaatttggtactaattggcgagttatcaccgagtgagcctgttggttcataggttt

SEQ ID NO: 268523 - DNA, 982 bp, Homo sapiens
gttgagctgtggacgcgggtctctgttccgcaggatggggtttgttaaagttgttaagaataaggcctactttaagagataccaagtgaaatttagaagacgacgagagggtaaaactgattattatgctcggaaacgcttggtgatacaagataaaaataaatacaacacacccaaatacaggatgatagttcgtgtgacaaacagagatatcatttgtcagattgcttatgcccgtatagagggggatatgatagtctgcgcagcgtatgcacacgaactgccaaaatatggtgtgaaggttggcctgacaaattatgctgcagcatattgtactggcctgctgctggcccgcaggcttctcaataggtttggcatggacaagatctatgaaggccaagtggaggtgactggtgatgaatacaatgtggaaagcattgatggtcagccaggtgccttcacctgctatttggatgcaggccttgccagaactaccactggcaataaagtttttggtgccctgaagggagctgtggatggaggcttgtctatccctcacagtaccaaacgattccctggttatgattctgaaagcaaggaatttaatgcagaagtacatcggaagcacatcatgggccagaatgttgcagattacatgcgctacttaatggaagaagatgaagatgcttacaagaaacagttctctcaatacataaagaacagcgtaactccagacatgatggaggagatgtataaggaaagctcatgctgctatacgagagaatccagtctatgaaaagaagcccaagaaagaagttaaaaagaagaggtggaaccgtcccaaatgtcccttgctcagaagaaggattgggtagctcaaaagaatgcaagcttcctcagagctcagaagcaggctgctgagagctaaaccaaacaattttctatgatgatttttcagatacagacaataaacttatggaca

SEQ ID NO: 268524 - DNA, 1603 bp, Homo sapiens
aagactacaaatcctagtgagtatcgagttggtcttattatcgcgtgaactgggagcctttgtttcctgcgtgtcgcaggaagtgacgtttcgggtacagccgctaccagagtccctttctcgcgaggcggaagaaccccgatcgctgaggagcaagggggcgctaggaaagggaactgggttgcgacggtccggcgagagagagctggggtgctggggtgcggggaagttggggagcagaggccgcttggtgtccgagtagggtaagaccgcaccgacccagtccgttaggaaagaagggaaacgaggcaattgtcgggcggatccccggacggagggctaaggttgtgtggaaggcgctgctccccggatggcgaccgcagatactccggccccggcctccagtggcctctcgccgaaggaagaaggggagcttgaagatggggaaatcagtgacgacgataataacagccagatacggagtcggagcagcagcagcagcagcggcggcgggctgttaccctatccgcggcgaaggcctcctcactcggcccggggcggtggatctggcggaggcggtggctcttcctcgtcatcgtcctcttctcagcagcagctgaggaatttctcacgctcgcggcacgcgtctgagcggggccacctcaggggacccagcagctaccgacccaaagaaccgttccggtctcatccgccttctgtacggatgccttcgagctcactgtccgaaagcagtccccggccgtctttctgggagcggagccacctcgccttggaccgtttccgctttcgaggcaggccttaccggggtgggagtcgctggagtcgggggcgaggagtgggtgagcgaggaggcaagccggggtgcagacctcctctgggaggaggagcaggatccgggttcagcagcagtcagagctggcgagagccctctccacctcggaagagctccaaaagttttggaaggtctccatcaagaaaacaaaattattcatcaaaaaatgaaaactgtgtggaagaaacttttgaagatttgcttttaaagtataaacaaatacagttggaactagaatgcatcaataaggatgaaaaactagcattgagtagcaaagaagagaatgtgcaggaagatcctaaaacattgaacttcgaggaccaaactagcactgataatgtcagtattacaaaggattcaagtaaagaagtagctcctgaggagaaaacacaagtcaaaacttttcaggcatttgaattaaaaccactcaggcaaaaattgactttaccaggagataagaaccgtttgaaaaaagttaaagatggagcaaaaccactttccctgaaatccgacactactgattctagtcaaggtatcccttatcgggtaaaggagggttttactcctattcctggtttgaaattttcagcgtgaatggatgttgaagtttacaaaatctgttttcttcattattgggatgagcatctaatttattttaatttgttagtgtaatgaattatataatttatttctagtattaaaccacccttgtatgcttgcgtttaatacagtttatgatataccattttt

SEQ ID NO: 268525 - DNA, 1727 bp, Homo sapiens
aagactacaaatcctagtgagtatcgagttggtcttattatcgcgtgaactgggagcctttgtttcctgcgtgtcgcaggaagtgacgtttcgggtacagccgctaccagagtccctttctcgcgaggcggaagaaccccgatcgctgaggagcaagggggcgctaggaaagggaactgggttgcgacggtccggcgagagagagctggggtgctggggtgcggggaagttggggagcagaggccgcttggtgtccgagtagggtaagaccgcaccgacccagtccgttaggaaagaagggaaacgaggcaattgtcgggcggatccccggacggagggctaaggttgtgtggaaggcgctgctccccggatggcgaccgcagatactccggccccggcctccagtggcctctcgccgaaggaagaaggggagcttgaagatggggaaatcagtgacgacgataataacagccagatacggagtcggagcagcagcagcagcagcggcggcgggctgttaccctatccgcggcgaaggcctcctcactcggcccggggcggtggatctggcggaggcggtggctcttcctcgtcatcgtcctcttctcagcagcagctgaggaatttctcacgctcgcggcacgcgtctgagcggggccacctcaggggacccagcagctaccgacccaaagaaccgttccggtctcatccgccttctgtacggatgccttcgagctcactgtccgaaagcagtccccggccgtctttctgggagcggagccacctcgccttggaccgtttccgctttcgaggcaggccttaccggggtgggagtcgctggagtcgggggcgaggagtgggtgagcgaggaggcaagccggggtgcagacctcctctgggaggaggagcaggatccgggttcagcagcagtcagagctggcgagagccctctccacctcggaagagctgtatccttaacgtggcggtcggcgctggatgctgcacttaaaaggatgcttgttttgatgtcctgctcattgttttccctatgaaccaaaagttttggaaggtctccatcaagaaaacaaaattattcatcaaaaaatgaaaactgtgtggaagaaacttttgaagatttgcttttaaagtataaacaaatacagttggaactagaatgcatcaataaggatgaaaaactagcattgagtagcaaagaagagaatgtgcaggaagatcctaaaacattgaacttcgaggaccaaactagcactgataatgtcagtattacaaaggattcaagtaaagaagtagctcctgaggagaaaacacaagtcaaaacttttcaggcatttgaattaaaaccactcaggcaaaaattgactttaccaggagataagaaccgtttgaaaaaagttaaagatggagcaaaaccactttccctgaaatccgacactactgattctagtcaaggattacaagataaagaacaaaatttaacaagaagaattagtacctcagatattctgtctgaaaagaaacttggtgaagatgaagaggaactatctgaattacagcttcgccttttggctcttcagtcagccagtaaaaaatggcaacaaaaaggctatggaaaacataggagaactgaaacaggaatcgaagagatgaaaaggaaaaagtgagttagagacatgatatacaagatatctgagaagtgaaggggaatg

SEQ ID NO: 268526 - DNA, 770 bp, Homo sapiens
gtgtttattcaatactattttgggcctctaccatagacctttattaattggtaagcttgcatgtttttattagtaaactggcatatgatgttgcaaaaaaaaaaaagtaccagaaaatatccagtctgcttgtgtgactttgatttccgtagtaacttgtcataaataagatatcttgttgtttttcttttcacagatgctgcacttaaaaggatgcttgttttgatgtcctgctcattgttttccctatgaagtatcagtaatccatcctagaggtggtgttctttttaagaatttgagaaggaaaacgtagttcccagctacttttatataatgtgagcaaacaaaatatttgttacaacacttcattcaaatttatttaatatcaaggttgtactcagtttaattcatatttccactatgtgattataataataccttttttattttacaaatactgtataaagaaagaatgcaggttactctgtggcatatttctgtaatttagaagtaaagtagcctgagtatagggtttatttctatttttgccataactcctttcactgtaataactaagatatgctagttgcaactttaaagaaatagaataaactagattcaattgcagttcttattttcacccttaatttttcttaatgatagacactttgtcagtacatcttagcatgtctcccttgaatgactactcttttaaactttcaaatctgaggagagctaacataattaggctagtgtctctcatcagtaaa

SEQ ID NO: 268527 - DNA, 536 bp, Homo sapiens
agtcataagtcctggaggagtctcttgcaattcttatgtgacactaggcatgaaaaatacaaaaatcaataatgagaagactttaccttagatctagactgtgaacaccactcttgagaataggaccttgtagtaatcaagacataaccctgccgaagattgctagaccagacaaagaaacaccaggatcattcttcttaaaatgtaaatagtaagtaataccaattttcttcaaggcaaccaccttatcagagtaagtctgcgaaagacacggttgtttaacaagtcaccaggggaatattttggaattgaagcactaacatcacagcaaccagatagtgtatatgtatataaacaccttgtcaaatgtaagtagtatttttcccagtagacacagtgaaaaatatacttcactcttggtcaattctaattgaaaaaataactaaatagctgctagatgaagaattcttggaagagttgctctcctagcactgggtcttgcaagataatgccagcgtcctgaagacaaaattggg

SEQ ID NO: 268528 - DNA, 1079 bp, Homo sapiens
gggatggggaatgttgaagaagataatctagttttactgacctttattgagcattcactgtgtgctaggcaccgttctcagaatacagtatctccacttaatttctcataactcagaggtggctgctgctctcaccattttacagatgaaacaggagaggataactcacccagtgtttccaaagctattaagggggaagagctgagatttgaacctaggaatctccagaattcaagtatctgagctccacagtttaagtcctgggggtggagagaggagagagcagctggtagatattatctatttttataatctttattagagttgatcttcaacatgctgaactggttacggaaagttaaggattttagctagaaaatcagtaaagaaaaggggaatgggattaaactgatcttttcaaatactcctatctagctttaatcccaaatgccaaccaagtttccattttttctgggaaagactgctttctaaatgcaaagctctttcactatcagaatgtgtttttaagcagggaaaacttttttttggtaaagggccaggtaaaaaatattttaaactttgcaagccagaaggtttctgtagcagctcctcatacctcttcattgtaaagtggaaggagtaaagtgtaaacaaatgggcgtggctgtgttcctaaaaactttgacactcaagtgtgaatgtcatatatcttgtgtcagaaaatattctcccctccccccaaccatttaaaagtacaaaattcattctcagcttgtgggcagtacagaaacaggtggcgagctgaattgacccacagccttcccagcttttaaggaaaacagtcagcaatgagccagacaagtgaacaagataccgtatttcgcttgatagtgtatgtgtaaaataaaccaatagtctttttagaaaattgttttattgatgtggaagcaaactaggaaattatgtagtccatcatatccatcatgcattttaaaataatgcattcctggagactctttggctctgaagagaatcatctttttttttcccctcttacagattctgtaattaaaaaaaaa

SEQ ID NO: 268529 - DNA, 876 bp, Homo sapiens
gttcatacttacctggcaggggagataccatgatcatgaaggcgcttttctcatggtcgcggcttatccattgcgttccagatgtgctgacctctgcgatttccccaaatgtgggaaactcgactgcataatttgtgatagtgggggactgcgttcgtgctttcccctggcgcttttgtggtgcgaatagtagatgagccgtaagtgtttttgtaattcagggtgcgggctcgtgttttgtggctgtgttctgtccggtcagttgtttccgttcgcaacggttagttttcctttgtgaggccatgtttagggacaggttagaattatccacttactctctcgggaggcgaatttcagtctctgttggttggggtattctcccaggttagctgccgcggtacttgctaggtggagctcagggatcaagggtcgggagctttctggtttgttcagtgctcccagggcttctaacatctcttaaaaactctggtgttttctgtcatcctcggagttacctcttagcctctgttttttttgttgttttttttccccccctccctaagacaagtctcgctgtaccgtccaggctggagaagtggcgcgatcttcccatctcaggctcccgagtaggacaaccgcacgccaccacacccggctagttttttctctttttttttcttttcttttctttctctttcctttctttttcttttttcgtagcggtttcaccattctgctcaggctgggctccaactcctgggctcaagtggtccgcccagccttctgaagtgctgggattacaggtgcgatccatcttgccctggcagctcctgcttttcaccacagcattcacgggagtttgtaggatttctgtgc

SEQ ID NO: 268530 - DNA, 576 bp, Homo sapiens
cccgagccccacacctgccggacagcaggtgctggacgtcgacagctgcctggactcatccgtgctggacagctccttcctcacgctctgaggcctccacgctgaggtgagggctctactgggggtcctgccgccttggcgcagcttggactcaagaccctgtgcacctctcagcaggcctttgctggacagatgaagagtgacttgtttctggatgattctaagaggttatcaatactctggctgaccatcgtcatcgtgggactgactttggtggaagtccttggttacttatcattactgtgtttctgagaagttataaatttgccatctccctctgcacaagttacctttgtgtgtctttcctgaagactatcttcccgtctcaaaatggacatgatggatccacggatgtacagcagagagccaggaggtccaaccgccgtagacaggaaggaattaaaattgtcctggaagacatctttactttatggagacaggtggaaaccaagttcgagctaaaatctgtaagatgaaggtgacaacaaagtcaccgtcatgacaaatcatggaaag

SEQ ID NO: 268531 - DNA, 457 bp, Homo sapiens
gatggcttgagtccaggagttcgagaccagcctggacaacatggcaaaaccctgtatctactaaaaatccaaaaattagccaggcatgtggtgtgcacctgttgtcaccaaaaaagaagaatgtatatgccgtcatggcatggaccatatttatctttttcgaagttcctagcaataggaccaggtgcggcattggcactcaatgaatatttgttgaagaaataaatgtgtttggtacttgttcacatttatatgacaaacacctgcatttatagctctcatctttttgtcagttttccagctttgcggtagagctgttattaaactgttttgtctggttgttatagcaacccagaggcttccagaactacaggttgtttctgatgtgcatattctaccagacaaccaaacacacacagtgtttttaatcatgaaataaagatgttactataaatca

SEQ ID NO: 268532 - DNA, 500 bp, Homo sapiens
ggccagtgcagagctgtgacataagcaggtgactttccctatcagaactttcagttaagtcacttccatggaagaaggggctcttctatgaagagcctctgtaacagtactgactccatgttagaggaaagcttgcttgcttgaatacaattattgctttgcttgagtctttagattattcactaaaaacagcctcagaaaaagaggaccttcaacagagattttttaaaatgtgccaaccaacagctctgggaatgaattggccggcctgaccatacccacagaaggccacaaagcattgaccaagaaggcaaggattaaatgcccacctgagaatgcccacgtttcacaagaatgttttcattattctccctaatttcccttaaaaacccctgatttagaagcatgactcagaaaggtgatctttgaaccctagttcactgccttccctgggttgctggcttcttgaataaagctaactttcctttcaccaaagcttg

SEQ ID NO: 268533 - DNA, 375 bp, Homo sapiens
agagacaaaacagactgaaagacattgtttaaatttatgacttttattatcttacttgaatgctatttttgcccctctcgctattattaaaccctttgcttcctgttttcagttgctcctgtcaaggtatgaatttttctttggatgattgtcatctatttcatattatctagtattcctctctattatgagaaaatcaaaagtagacagtgtatctatagctatagatttaaatgcactaaggtaattatatatttgaatcagagacctaaggaataatctagtgtagcatttaccaaatttatttaaacttaacatgcttacatgaagacagacctatttatgtttccaaggaacaccagtttgagaaatgct

SEQ ID NO: 268534 - DNA, 448 bp, Homo sapiens
acagctatattctgagtctgagaattttcttagataaatattttcagataaacaccctaatccctccagatactaaattttcccaactcttatttttaaaatacagctgcatccttcaggcaatttattggcatgtctagttagttctgcagtttcacaaacatctaatgtcatggtcaaacacatgtgcccataaggccaaggtcctcaaactttgtattgctttatattacttatattctaccaggtgagtgtgtgttggaggggaagagttcttcttttctcaaaaaagtaaaatagtaaagtatacctttgtaatacaattgattcaaaataaataggccctaagcgtgcatcactttagaaagcaattattttgattttcagtagttttataattactattcactaaaatttcatcttattccagcctccaacagaagttaaa

SEQ ID NO: 268535 - DNA, 265 bp, Homo sapiens
gtaagatatatacttttaaaaaataaagaaccagagttacttttaaaattatgtatgaccttgtaactagaattataagtattaaatacagagcttaattactaacaaaataattatttcagcatttttttgttcattcactatgtactttaaacaacaacaacaacaactatgttaacacagattaggacaaaaatttttgtaaattatttattatgaagtatatcctaatgtgtttaaaaacaagtcattatgtttatctcct

SEQ ID NO: 268536 - DNA, 369 bp, Homo sapiens
cttcacgtggacaggcatcttttctgctttgtccactactgttttcccttatcctaaaaccatgcctgccacatcatagctactgcatgctaaataaatactatatactcatgtatttttaaatgaataaatgtttattagccatttgtattttttcttctgtaatttgccagttaccatttttctgcaggttatcagaatcttaaaactttatctagtatgctacaaacattcttctttcaatcttttccttgtcttttaaatattttgaatgccctcactataaaatggaagtttaaaatttttgtatagtaggttctgtcagtttttgtttttgaaacagattctccgtctgtcgcccaggctgga

SEQ ID NO: 268537 - DNA, 511 bp, Homo sapiens
acaacactcaggactatcataggaagacctacagtgatacagagagttgataacagggcctagctaacagctgagattgtgactctcatatgcagacccagcctacaggctcttcattcttacacataaacagagcctatgaatgtggcacttaatctcacacataaacacagttgcaagttggatttgttactctcatatgtggatctggtttccaggtggtttggtgactctcaaaccatgattcagcagacctgtgaggctgtgagttccctatcagaacacaatctgcaggttgtattgtgccatatacctgggaccaaattacaagcacaatgatgaatcttttacctggagtcaagacatgggcaggatgatggaacttatcactggacctttccacagtgttattgtgacatatgcctttgcccaacatgtggtgatttgactccccagactgggtccagttcacaaataaaattgtgccgtatacttggccaagaacctaaag

SEQ ID NO: 268538 - DNA, 448 bp, Homo sapiens
aggcatgccttcaagcatctccctcaggagggattcgcaacccctagacttccctcgtgccgcctcgtgccgcctcgtgccgaatgatgactctcttacctggacacagccagtgggaaatattttgacttttgtagccaggcttagggccacaggtggtttggtgactctcaaaccatgattcagcagacctgtgaggctgtgagttccctatcagaacacaatctgcaggttgtattgtgccatatacctgggaccaaattacaagcacaatgatgaatcttttacctggagtcaagacatgggcaggatgatggaacttatcactggacctttccacagtgttattgtgacatatgcctttgcccaacatgtggtgatttgactccccagactgggtccagttcacaaataaaattgtgccgtatacttggccaagaacctaaag

SEQ ID NO: 268539 - DNA, 403 bp, Homo sapiens
atacatagactcaaccaaaacaacagatttttttactcttctggctagacttagggacacagccagctgacagtaagaattgtcacccacacatgtgggcagatcccactagtgacatcctgactttgccttgtggacacagttcacagttgaaattgtgactgtcatatgcagatctgaccacaggttgtattgtgccatatacctgggaccaaattacaagcacaatgatgaatcttttacctggagtcaagacatgggcaggatgatggaacttatcactggacctttccacagtgttattgtgacatatgcctttgcccaacatgtggtgatttgactccccagactgggtccagttcacaaataaaattgtgccgtatacttggccaagaacctaaag

SEQ ID NO: 268540 - DNA, 355 bp, Homo sapiens
taagtgacgtgactatcattttatgtccacagaaggcgttgtaacatctcactaagcccagcactcaggcgatgtggctttcctgctatggcactgcacacaagaagaatgttgacatattcctggcccagaattcaggttgtattgtgccatatacctgggaccaaattacaagcacaatgatgaatcttttacctggagtcaagacatgggcaggatgatggaacttatcactggacctttccacagtgttattgtgacatatgcctttgcccaacatgtggtgatttgactccccagactgggtccagttcacaaataaaattgtgccgtatacttggccaagaacctaaag

SEQ ID NO: 268541 - DNA, 560 bp, Homo sapiens
aggcatgccttcaagcatctccctcaggagggattcgcaacccctagacttccctcgtgccgcctcgtgccgcctcgtgccgaatgatgactctcttacctggacacagccagtgggaaatattttgacttttgtagccaggcttagggccacaggtggtttggtgactctcaaaccatgattcagcagacctgtgaggctgtgagttccctatcagaacacaatctgcaggaagcattggaacatatcacttagcccagcacctaggtggatgggattccctttcttgcctggtccctgcccactggagagattgtgacccattgctgagcccagcaccaaggttgtattgtgccatatacctgggaccaaattacaagcacaatgatgaatcttttacctggagtcaagacatgggcaggatgatggaacttatcactggacctttccacagtgttattgtgacatatgcctttgcccaacatgtggtgatttgactccccagactgggtccagttcacaaataaaattgtgccgtatacttggccaagaacctaaag

SEQ ID NO: 268542 - DNA, 627 bp, Homo sapiens
ctttattttcccttttcaatacacacctcctcctaccctataaatatctaacttggaaggagtagagtagctgataagaggacagaatcaaaataaatatttaagtgacagtatgcaggactccaaaagggtaaaaagtaaaaagaataaaaagaaaagaaacaccattccaataagcatgttgttagacattagttagacagtgatccagcttagttgtgtgtctcaagcacattcaggtctacctcaccacattatgtaccaacagacaagggcaaatatttgcatactatcccactagtgcagcaaagtaaaatttctttaaatattcacatattgataaatagctgtggagaaaaaactttaaaatgttatgttcccatatgtgtttttcaggcttgttgtataacctagaatatgatctatcctggaaaatataaccatgcatgattgagaagaatgtgtaatctgatcttgggtagatagatgtctgttaggtctacctggcttttgtgttgttcaagtcttctatttccttgttggtattctacttgtcctatctattattgaaagtgaggtattgagtcttcacctgttattcttgaattttctgtttttcccttcaat

SEQ ID NO: 268543 - DNA, 505 bp, Homo sapiens
  misc_feature (273)..(273): n is a, c, g, or t
  misc_feature (298)..(298): n is a, c, g, or t
gctttttcgcaacgggtttgccgccagaacacaggtgtcgtgaaaactacccctaaaagccaaaatgggaaaggaaaagactcatatcaacattgtcgtcattggacacgtagattcgggcaagtccaccactactggccatctgatctataaatgcggtggcatcgacaaaagaaccattgaaaaatttgagaaggaggctgctgagatgggaaaggctccttcaagtatgcctgggtctggataaactgaaagctgagcgtgaacgtggtntcaccattgatatctcctgtggaanttgagaccagcaatactatgtgactatcattgatgccccaggacacagagactttataacgtgattacagggacatctcaggttgactgtgctgtcctgattgttgctgctggtgttggtgaatttgaagctggtatctccaagaatgggcagaccagtgagcatgcccttctggcttacacactggatgtgaaacaactaattgtt

SEQ ID NO: 268544 - DNA, 409 bp, Homo sapiens
gacctcagcaggcagggccctggggtcccttccttcagttctgtgagctcctaggctactcacctctcctccgcctctcaggctcacccacctcatctgaaaatggcaatgatagtgggcgtgtaggcggggctcagtggctcactcctgtaatcccagcactatgggaggccaaggcaggcggatcacctgaggtcaggagttcgagaccagcctgaccaatatgatgaaacccagtctctactaaaaatacaaaaattaaccaggtgtgatggcatgcacctttaatcccagctactcgggaggctgagacaggagaattgcttgaacctgggaggtggaggttgcggtgagccgagatcatgccattgcgctccagcctgtaaaacaagaacaaaattccatcaca

SEQ ID NO: 268545 - DNA, 143 bp, Homo sapiens
gagtaaatattagcagatatcacaaacgggatgattggagtaccaagaatcttagataatgatcaacaaagcaaaagaagccataacataatatgttaaatgattgaagaaaaaagtttcaggaacaacaaggaaataaaacg

SEQ ID NO: 268546 - DNA, 371 bp, Homo sapiens
aaatatgcataaatcacatatccaaaaaagccttatattgagaatatataaagaactctcaatactcaacaactcaattttacatggtcaaaaggcttaaacaggtgcttcaccaaagaggttgtgtggatggcaaataagcacatgaaatgaagttcaacaccattactaattgggaaaatgcaaactgaaatcacaatgagacatcaccactgccttagcccattttagctgctataacagaaaaccacagactgggtactttataaagaacagagatttctttcttacagttctgaacctggagtgtctaacatcaaggggccaacatctgatgagggccttcatgctgtgtcatcccacatcccaga

SEQ ID NO: 268547 - DNA, 708 bp, Homo sapiens
ggattaagagaaggcaggctgccttgctgaagctatgtggtcttcaagtgagagttgcaggcaatagaactactttccttttggagtaaaaggaggaattcattttcagtagccacaagaaaagttttttttttttccagggtggctggcaaaatggccaaatagtaacagctccagtctgcagctcccagtaagatctacacacaaggcgggtgatttctgcatttccaactgaggattcttagtccctgtacttgtgctaacttcaagttccttcggtggattttagttcatctcagctgtgctgaaggagaaacaaggccacacagtcttgtcacctctgctctgggtgtgaggacagcatggagatcatcaggtcaacgcaagtaagatgaggacttgggccaggaagcagagagaatgctgggccgctgtccttttcttcatgggatggtgtttagacaacattctctggtgacaaggactctcttcttgcccaaaccctagtcaggctcctctgggctcctttttcagtgaggccccattttggggtgtgtcccaagaccccagttttagcaagaatcctgttacctcaattcagccagaatcccccacccttgatgtctatcaatcaccctcagcttcaatatctggccaggttctttgtccctcaccatccccaaggaatttgtggccaccctgagctgc

SEQ ID NO: 268548 - DNA, 482 bp, Homo sapiens
caactgtctgactctatgtcagacactgtatctgacagacaaggaaattcttaccttctgatcaaatcttgtatgactgtgaaggaagcagggagtgtgaggaaaggtgtctctcctttcccattcccttggtatacacatactgaagtactgaagttgaagaaaacaagactgctttcgtggttattttcaaacaaatataaatgtctgtaagcgtgtgctttggtaagtcactcaataagcataatgtacactttaggctctggttgagtatggaatatctccaagtagctgcttcttcaaggatatatcacaatgttcagtaataagggcatgttttcatattaatcagatgaatgatgacattttaaaaactaatagtaaaagaggccatttccatcctcaactgggttttataaaaaagaagacatttaccttctgagccagtttattcaagtatgaaatatagaaaaaaaattcaa

SEQ ID NO: 268549 - DNA, 403 bp, Homo sapiens
agttctgggatcacaggcatgaaccactgtgcccagccaaggtctttaaaaatgtcaatgaatgaagcatagttgttaagaatgcaaagtttggagtcatgaaaactttattataggccaggcacagtggcttacgcctgtaatcccaacactttgggaggtcaaggagggcggatcacttgaggtcaggagtttgaaccagcctggccaacatggtgaaacctcatctctactaaaaatacaaaaattagctgggcatggtggcacatacctataatcccagctactggggaggctgaggcatgagaatcacttgaacccgggtggcagaggttgcagtgagccaagatcacaccagtgcactccagcctgggcgacagagtgaaaccttgtctcagaaaaa

SEQ ID NO: 268550 - DNA, 417 bp, Homo sapiens
ggtcagagccccctctgtgctcctagcacgtgagtcttcaggagtcaggccttgaagagtgtctgccattcgttccgagacaggaagtaagagatgattggccaggaggctgcagctgcaagtcccaagagcagcgcctggcgccagctgccaccctcaggcttggagcagagaagagatggaaaccaaataaccgagggcctggctcaggaccttcacgcagttttcaagaaattcatcttttcttgccgttttccctgtgttaagtgagtcaggaaattgaaaaacagaaaaaataagcgtgaaagtaggtagttgactctcatatttattcagttatttttaaagagtttatcctactgatatgagtaaaataaaattttcgttaggaataataagagcttattttctatctag

SEQ ID NO: 268551 - DNA, 346 bp, Homo sapiens
gtggactaattatacaattgtttagtgccttagtttttccctcctcagcatgtgtggatttatattggtgctaattgcatccaggtgttctaaacaccacagttaagcacaggcaaagagaaactagaaacacttcaaaatctgaaggtatattggggcagaattcattgaacattttctattgttgttggcttaaatggctctgtcttcagacttgagtgttttttaatgttaataactgaaaaatgttttctttttccaatgtaatcttgaaatttctaaaaattgggttattatcttgcagttcttgataaagaatagagtcagaaaaacataaactaaaaaa

SEQ ID NO: 268552 - DNA, 448 bp, Homo sapiens
cacacctactggaaaaatatatgtcagccccagaaaattgtgggcaagatgaggcaagtcctgagcaacacaggaaactgccctcctccttttctggccccgcttccactgtgatgctaaagatcgcatcaaggctggtcatccaatcagcaggatgtaagagggtcattcttcactgtggccatttagaagtttcctggaaacctggctttctcctgaccattgccccatgagcatggtggtgacaagcttgggctctgaaatcagacagccccaagtttgaaacctcaatattcttacttgctagctatgagactttgggcaaattcacctctccaaatctcaatttctcaatctgtataatggggataatattgggtaatgcactaagcaccatgtcaggaatgtagttagtgttcaataaacgtttatctttattgctgcgaaa

SEQ ID NO: 268553 - DNA, 455 bp, Homo sapiens
taagaattggatggtgaggtcatttaatagtaaaaagaatagaactagtgataatatcaagtgctgttgatgagttaaggtattagatattgttgtgcactgttggcagagtgtaaataaccaaaatttttgaagggataatttagcagtgtccatcaaaataaaacacagatcatttccagccaggtgtggtagctcatgcttgtaatcctagcactttgcaatgtcaagttgggaggattccttgagctcaggattttgagaccagcctgggcaacatagatagagactctgtctcaaaaaaaaaaatcatttctaggactctattcctacagatgtacctgtaatcccaacactttgggaggccgaggcaggagtatcacctgaggtcaggagttcaagacctgcctggccaacatggtgaaatcccgtctctactaaaaatacaaaaattt

SEQ ID NO: 268554 - DNA, 425 bp, Homo sapiens
tacagagcacccacaaatcgtaatctcgcccaaagcactctaacaggataatttaaacaaggttaggtagcctgcgacctttaaaaaaatggcatcccactaacccgcatggaccccatagttgcgtggttcgtgctacaaatcactggggtggtttcatctctcttagtatggaaactaatcagcaacataaagtgatgaaagcaaacggatcaatatcagtggcactaatcagtggggggtttatttgtaaagtattgaaagtttaaccaaaattccttaaaaggcaaattattccttccctgcattgctcttgtatcttaatttaaggattactgtatattgatgcaaaactctggttgttgatgccaaagaatggagggtggaggaagggactactgcttttcttggatacaaatttgcat

SEQ ID NO: 268555 - DNA, 156 bp, Homo sapiens
gcatagcccatgctcacagtgtcggggcacaggggtggtgcccgtgccaacagagcccacgctcacacagtgtcagggcacaggggtggtgcccgtgccaacacaaggttgtctgtttattcagtcaacaaacgctcactgagaagctactctggg

SEQ ID NO: 268556 - DNA, 197 bp, Homo sapiens
gacctcgtgatctgcccatctcagcctcccaaagtgctgggattacaggcgtgagccaccgcacccggccatcaccttgaaattcttaatttttgagcaaggggctctgtatttttattttgcactgagccctacaaattatacagatagtctgtggtcagtgcagatccctggtatttaacagcatcaattaagag

SEQ ID NO: 268557 - DNA, 489 bp, Homo sapiens
gacctgcctctccctgagatgcgtggaggttgcagttgccagtgatgacttacaaggggcaaaaatcccttccccttgcctcaaggatgactattcttcggaggagttacactcagagtatctgtgaatcaggccaaagtatgatgtgcctttacatggacacatcctggcttggcaacttcctttatcctgcttttcacattcccttcttcagtaaatatgcaccaaattgaactcaacatgagcaaagacagtaccaaggctgacaaataggcctgcgttcaggagcagtaagatagaaacctgcagtcacacaaggttgggctgggctttggcaccagtcaaaagggttttagcattggtccggttggcatcaaacaccctgctacagggcctttggctgggattgctctggggccaacttttctctatttccatgcacttcaacatggggtatcagtgctataacaagggttctagaacatgaaa

SEQ ID NO: 268558 - DNA, 391 bp, Homo sapiens
  misc_feature (1)..(1): n is a, c, g, or t
  misc_feature (13)..(13): n is a, c, g, or t
  misc_feature (30)..(30): n is a, c, g, or t
  misc_feature (34)..(34): n is a, c, g, or t
nttcggaacgagnggaggattaagtgaaancatntggtcaaagtcgcttagcttggcccctgatacatgataagcactcgaaatgctatttaattcttccaaaagctatttctctatttagctttcctaaatactgtttaattcaagtctttcatcctgcttaaaacgcttcaacgtcttctgaggttctttagggccacgtcctatgagaccatttcagcagcagcagcctgcatccccattcagtggcatggtgaagccattggcagttccagaagcattctcggggccccgggcttcgtatacattttgctcagagagcatgccctcaaccgtcccctgtcctctggctatgccatttgtccaccaggtagagcctcctctgaaagca

SEQ ID NO: 268559 - DNA, 338 bp, Homo sapiens
atggctgctgaaaacagttaagcctttgtaacaatttagacagacatatatgtatggacatggaaggatatcgtatacatgtcgctaagtagaggaagtaaggcatagaatatgtattagttgtacacacacacataatataggtgtatatatgtatcatgcataggatcccaataaactatattgccaatatctaccaggatagcccttgaaatgatagcatgctacttttggaacagagaataagcttaaggatagggtgagaatataggtgaaaattgactttttttggtaattgaaatttttcacaaggcaaatgtaattcatatagtgtaact

SEQ ID NO: 268560 - DNA, 510 bp, Homo sapiens
atatgaaatgcccctttttccttctcaccccaatttagggtgatcagccatctcaatttgcctgaaactgcccggtattagcactgaaagttccacatcccaggaaacctctcagacataggcaaactgggatgactggtcaccctacagtcttttcccatgaagtgaaaggagccaacctttgttgagagcccgagatctctgctagataaaccatgtaatacagcaaccttgcaaaggaaacttgctatgctcactttactgagaggagacagactcaaagagaccttattcaaagcctgtgcttattaatgcatttgacagtatctgttgaatgtcttccatgtgtgagtccctgcatggagtgctggggatgctgtggtgggcgagtcagacctgtccctgcccccaagtgcatgtatcttaacagcagagaccggcatctaacaattacttaaatacaaaatgtgatacatattttgaaggaaaaatagaagaatttatgaactg

SEQ ID NO: 268561 - DNA, 448 bp, Homo sapiens
tcaaatgatgcaggaaaagcatttgacaagctccaacaccctttagtgataaaaacactcagaaaactatgactagtagaagggaacttcctcaacataataaaagggtatttattttttaaaaaccacagttaacatcatactcagtagtaaaagactgaaattttttctaagatcaggaataagacaaggatgcccattttcaccagtgctattcaacatcatactagaacttctagccagagcaattagaccagaaaaagagagtgcatccaaattgaaaaggaagaagtaaaaccattaacagatgacatgattccatatatatatataaatcctaaagaatctacaaataaaattattagagctaacaaattaactcagcagagttagggtacaaggcagaaaatcagttatatttctatacactagcaatggacaacccaaa

SEQ ID NO: 268562 - DNA, 648 bp, Homo sapiens
aacagaagagggggaatgagaccctaagatttagagatgaagtctgaaacttaggactttatatttatctgaacatcatatgtaaattttactattatgggactggtattaatgcttccttataaaaatatatttagcctcatcagtgatcagggaaccatatttgggaccagtctgttcagttggcaaaaattaaaaaggccatcatatcagaaaggagaaggtaaaatgatttgttcacagacagcatgatcttttatgtacaaaaccctaaagattccacccaaaaaaccctgttagaactaaaaaacaaagttgcaggatgcaaaaccacacaaaatttagttgcatttcgatgtaaaatttaaaaaggaaatcttaaaaattccatttgcaacagcatcagaactaaaatacttgtgaataaatttaaccaaagaggcaagacttgtacactgacaactacaaacattgctgaagcaaattaaagaatatagaaataagtggaatgacgcactgtgttcatagattgaaacagttaatattaagatgttgatactactcaaagtgatctacagattcattaggtaatccctgtcaaaatcccagtgactttttttcagaaatagaaaaattcatcctaaaatg

SEQ ID NO: 268563 - DNA, 673 bp, Homo sapiens
tgacgctgcagggcgggcggggtaaagaagggagcgagcccttctcaagcttggaaagtttccagactgctgggccagcctcctccccagagggaaactgaggtccgattgaggtttctccaagaccgcccactcctgctcctgtccccaaacccctttctgcctagggttcctggaagccaaggaaacagaacgaactgttccctgggtgggcgagccactgcagagtacaaagctttcaggccgcctgcctcattagcactaatggctgctcccttccgccctgtgtcgtcaggactgtctatgcctggtctcatcagcacaaggctggggtaaggactgcccttttgtggagatggcaggacatacaggaccctgctgcccctgccttccctcaccccactgcagagctgtttatcacacacgtgtccatctgggaaaggaatgcaggctgaatcagctttgagaggatcgcaaggccccagtgcacaaactgggttggcacaaggcagtggaaaaaagatgaagggggccaggtatggtggctcacacctgtaattccagcattttgagaggccaaggtgggaggatcacaaggccaggggtttaagaccagcctgggtatcatggtgagaccccgttgctacaaaaaataaaaaaatagctgggtgta

SEQ ID NO: 268564 - DNA, 769 bp, Homo sapiens
tgacgctgcagggcgggcggggtaaagaagggagcgagcccttctcaagcttggaaagtttccagactgctgggccagcctcctccccagagggaaactgaggtccgattgaggtttctccaagaccgcccactcctgctcctgtccccaaacccctttctgcctagggttcctggaagccaaggaaacagaacgaactgttccctgggtgggcgagccactgcagagtacaaagctttcaggccgcctgcctcattagcactaatggctgctcccttccgccctgtgtcgtcaggactgtctatgcctggtctcatcagcacaaggctgggtgtactccccttcaagggccctgttcccaccttgtccaggggagagggtggggggtgcagggaaaaactgcaagcacccgtggctctgtcaatcagggttgattttgaaacccctacccagcccattgcccctgccccagagagcacagccatgtgtttcctgtgaatcatctgtaggatttcctaaggcagaggttgcctggagaggcacggtctcctcagtcattcagggagaggagaagatggatgggggttctctcgggctggtgtattgagccctgagctagagaggatctgtgattgttaattttgtgtgtcaacttgactgggccaggaatgcccagatatctggttaaatattatttctaggtgtgcctgtgagggtgtttccagaatcatccaatcctttgagggttggaataaaacaaaaagataga

SEQ ID NO: 268565 - DNA, 391 bp, Homo sapiens
aatgttcagtcttttactgttaagtatgatgttaactgtgggtgtttcatagatgcactttatccaggttgaggaagttcccatctattcctagtttgttgagagtttttaacatgaaagagtgttagattttgttagaaggtatttctgcatctattattgagaggatcatgtagtttttgtcctttgttctatcagtatagtatattacactggtcaagtttcagacgttaaccaaccttgaattcctataataaatcccacttgttcagagtatataatcctttatatatgttgcagaatttggtgtattaatattttgttaagggatattattctgtaattttattttctggtaataaaaatgtctttattaactgttctcactgaa

SEQ ID NO: 268566 - DNA, 587 bp, Homo sapiens
cactgttattatattaggctgaataaccaagaaccacaggcagcagagatgtggcactttaccaaactccacaacctgttgggactattaacgtgccgtgtgcaaacaaagcagatgtcctaggaagatccttctgctccccttcccaagcagggcccaggagctgctagtctcacttatcaagcaattaacatgccatttaacctttagcttcttgaaccccgaaactgatccgggcagtaaatccttggctttaacaaagggtagggtgattatgagctgttagtactgtgatcacttcccgtaaggcctttgaaggagatggaatttccagttatcaccagatgttgagtttgataatgtcattgttctgccaggatggaacatttcatacgattggagaatgaaagaataggaattagtaattcagggactaaaaggtgaaattacatctttatgaagaatttttctttccggcacaaaaccaaagttagagttaaaaaaaaaaaacctcacctaatggggccgaatttgggctaacttgccttcgccctatagtgaggcgtatacttcctggcccccgtttt

SEQ ID NO: 268567 - DNA, 357 bp, Homo sapiens
acaccctctctgttctctccccttgtttgtctttgtttttttcctccccccccccagacctcccgatcagcaatgactgttttggccacctatgcccctggcccccagggcaaggcctgtctcccaggagcagctcgataaacccctgtccagtgaatgcctgaaaaaaagcccagccggaagccccagagctctctcaggttgcccaattctctttcctgaaatccaatcgtgtggcccctggaaattgcagccgatctcatcacttgtttgctcgctcactcactcactggctaacgtgcagtaagcacgtcctgcatggctggtcctgtgctgggctgagccacagggaggccg

SEQ ID NO: 268568 - DNA, 551 bp, Homo sapiens
aaatatcagttttaatagattaaaaaataaaatgctttgctatataaccaataaaataagtccctatctgtgtggagaaatgacaaaatgctaatgaagacaattcaaagaggtccaagtaaatatatgaacatattatcttcatggactgcaagactcagtggagatgtgtgacctataccaaagctatctgtagattcaaagtcaatgctgtcaaactactagcaggaatttttgtcatgtagacaagctgactcaaaaagtgtatggaaaggcaaaggatctggaatagttaaaacaattttgaaacaaaaaccagaaaatcatggtggaatcatactgctcaattttaagatgtaatataaacctacagtaatcaaaacagtatggaattggctaatggatacacatatagattaatggaatagaatggagagtccttgaatagacccacacaaatatggccaatggagatttttagaaaggagagacaattcattatatgttaggcttttcaatcagtgatattggaacaattgaatatccatatg

SEQ ID NO: 268569 - DNA, 1783 bp, Homo sapiens
gaaacagaacaacaaggtgacagccttttgctcaagtcaaaaagaaaataagtccctcatcttagtttaaagttgttcattcagtagtacagacttgcatttgaagacttattcttgatcttctgtagctttgacagcaaggacatcactacaatgggtacagaaataacacattctgatccttgctgagatccttgtatgggcctatcttaaatctagcctattgtctgtcttaccctttgatttttataagtagaaaacaggaaaaggctaaccaagcaagaggaaggcatagattcatcttcctttcaatcttgactatagtttaaagagaataccatgatctttctgttctattcttggcttacttgaatatttagccaggtctctgcatcttattcagtcagaaaacagacacagattcagataactcaaaggatgttacttgcttgagtaatccttgggcctcgctttaactttgtagatccaggaacagaattaagcagacagttcggtctacactgccaaatttcttagggaaaaagagggcaagtcagaaggaggaagttggcatttggctcaaatgaccaaattatttaaggtctctacacttcactttgcaccaagtagacccaagaatgattataattcagctacgtgtggtggtgcagatcagtagtcctagctattcaggaggctgaggcgggtggattggttgagcccaggagtttgaggctgcaatgagctatgatctcgccactgcgctttagcctgggcaacagaacaagaccctgtctcaaattaaaaaaaaaaaaaaaagaagactctaattctatgagtggcagggtcctagaattatcaaaaatgggttatcaaacccatatgcataccaagcattgtctatagaataaagaatgttttgtccacatgtgtacttgtattcttaaaatgtttgtagcttctgctataatgattaaaaatacaaatctgattgttttcatcatgatgcagttcccaaacacttcaaaactactattgtgtggaggccagccaacattttttactttaaaagcaattctcagatttcaaaatgctgggaactaccagtgaagacttcactctaaggagttcatccctgagaatgaagactgaggctagaggttgcttggttactaaaagagtcaaaaacaagggagacagtagaatcaaaagccaagacacaaatttagcctaccaaaacctagggactcttgtttcttttagttttatttcaggcgtgctaaaacaagaagcatgctgcacctttctaatctgatctatcactaagttgcatggcaggtatttgtaaacttataattctgcaaaaggccataagctttctgagagttgaattcaatttttttttcaaagatttaagttaagtacccagcctgtccgaaacataagaatataaggtttcaattgcattatgaaaaactctacggtctgaacttcgtggccaggcacagtggctcacgcctgtaatcccagcactttgggaggccgaggtgggcagatcacttgaggtcaagagtttgagaccagcctggccaacatggtggaaccccatctctactaaaaatacaaaaattagccgggtgtggtggcaggtgccggtaatcccagctactcaggaggctgaggcaggagaatgcttgaaactgagaggtggaggttgcaatgagccaagatcatgccactgcgctctagcctgggcaacagagacactgtttcaaaaaaaaaa

SEQ ID NO: 268570 - DNA, 789 bp, Homo sapiens
caccatgcactggctaccaacttgtctgagtccggtgggacagaacactcatattcacaagttacatgaagcagatttattacttacagataggagcaaaggacaacagaagcctggtcccccaagcctcaggaatgctgcccaaggtggataatgccttgactgtgtatgcctcacttgcactgcagcagtgggaccctggaagtagcttggcttgggttttatgacccagggcaatgtgatcactgggctaaagcactgaaggacatcctgttcggggcgggctttggggggattggaacagagcccaggaagttctggctagtcccttcctatgtcaagatattacattccagcacattctactgttgttttagagaattgtaaacaagaaagtggggagaactggatcagtccaaggacacccagagaactgtcctgcagaagtaatctcttacccagttcagtgccctggggcccatgaaatgtagggaaggctagatctccttgagaaaagttcctgtgactgtcacaagtataaactattttcctttaagctcttcagaggagcctaacacttacctgagtgtatcccagagaaaaggaagaaatttcaagaaagagggaaatacccagagctttcaaggtatattctacactggctctgatttgaagctattccctggggacccaaaatgctactataatcacaagcagggcttatttccaaactcattctatgaggtcagtattaccctgataccaaaaccagacaaagacacattaaaa

SEQ ID NO: 268571 - DNA, 492 bp, Homo sapiens
agaaaagcagccctttcagattttattgttggaagttccttgggttgcagagatgcagattcaagtgccaaaagttgtttctgatgagacttacctttttagccttaaaatatttgtatagttggctctaataatttctcatttttgatgaatttgaaatcatttcacttctaaatgagattggtcatctcatgagtggtcaagttggaacatggaggtctatcatgtttttaacctccaagatccacttatggggatgaggccaaaggcacaatagttacttctagaagaaccagattaatttttctgccttccatcaccgcagtgtattacctttgaccctcgctggtcatctggtaagtgtagttcatcaaaagagcagaaataggcacaaagacagtgccaggcttggtacaacctgttaacactgttgaggaaagagctcaaaacatgcattactttggggattaagtcagtgtttaatctcaatat

SEQ ID NO: 268572 - DNA, 281 bp, Homo sapiens
gagacactccctcacctaggttgcagtacagctcatggccacttccacctcccaggttcaagcaattctcgtgcatgagcctcccaagtagctggaattacaggcacgagccaccacacctggccagctttgtgtatttataatcatcgtttctcttgttatattttcctaagttttgaagcaagatgtatttcactttgaaccatctgttcggaccggtgtctgttaggaaactgtgtttggatacaacaaaatccataaaagcagtagctttaatcaat

SEQ ID NO: 268573 - DNA, 385 bp, Homo sapiens
gacactatcaaggatctcctcccaaatgtatgcgcttttcctatggaaaagggcccttgtcaaacctacatgacgcgatggtttttcaactttgaaactggtgaatgtgagttatttgcttacggaggctgcggaggcaacagcaacaacttttcgaggaaagaaaaatgtgagaaattctgcaagttcacctgattttctaacaagaacacagccctccatggattcgggattgctctgagggccatagaaggcatttgggtgtgtgtgtgtgtgtgaacaagaggttcattcctctacccccacatttattctccctgatgtgctcctacaagtgcttcatctctgtgcctgaaattctataaatgttgcaatcatgaaaaaa

SEQ ID NO: 268574 - DNA, 468 bp, Homo sapiens
aaggtggtagtgactgctaatgggcgtgagggatcttgcagtgatggaaatgctctaaagttggattgtagagatggctgcacagctcagaaaatgtactgaaaatctttaactttatgttaaaacagatacatctatagtatgtaaattatattttaacaaagctttttgatttaaaaaaaaaagaaaaatgtgtttattacatcagcttagaaacataccttgtttccatagaggtgagagatgatttactttgagagaagacattgtgtcacctatgacattttattaggcacagagtcatattttaaggtagatagtcctgtagtgctgaaataataattttaatgtctttatgttgccacatgttaagaccatgatgaaggtataaatggaaatgtttacacctgaaatgagtgttttcaaattaaaatttaattgatttgcttcaacacttaattgtagatt

SEQ ID NO: 268575 - DNA, 532 bp, Homo sapiens
agtccacaggggaacatcacgcagctgtgcagacacatgcacgccatccacataacacgcaggtacaaagggacggagggacagagagaaaaaagtctgggccggggtaactgtaagccaccgtatatgtcattgggaacactgactcatttaccctgggcctgatgtcactgacttctacctcctgccccaagacttagagtgaaagatgaaaagatgacctgttaactcacctgtgggcaggatgtgtagaccatgtagcatatgtgattgaatacacagccagtccctccattaactccaaaggacacggctccttcggcagctgctggaggccaggcggaagccactcccaggtgggtgcatcctggctgactttcctggaaagtcccgatgctacactgacaactacattctctttagcaattgtaggatggccagcaaggacactgtggttatcggcggtggaaagtaaattcttggcatcctactgctattccaggctattaaactacattacggtaaaatgtgt

SEQ ID NO: 268576 - DNA, 269 bp, Homo sapiens
ccaaggagttgataactaagttatcaactaatgatcaatgatcaattatttagtcaatcatgcctatgtaatgcagcatccataaaactccaaaagcacagcattctgggagcttccagatagctggccacatggagattcctggagggaggcatgcccagcaagatcatggaagctccgtgccccttctcccattccttgccctaagtatcgcctccatctggttgtttgtctgtatcctttattaataaacaagtaaatgtaagtaa

SEQ ID NO: 268577 - DNA, 457 bp, Homo sapiens
cctaataaccaaacctataacagtctattgcttttgatcgaatcttgatttcaaggagcagttggaggacaactgaggaagtgtgaatgtgtattagatgataaagaggaacttctattaattgtgttatgttgatgacatatactatggttatatagaaaagtatcctgaaattttagagatgcctatttaagtatttaaaggtgaaatatcctgatattggtatttaccttaaaatattttttaaaaagtaaatacggcaaaattacttaaagtgttaagtctgggtgttacagactgcatgtctgcgtcccctcaaagttcatatattgaaccctaacccccaagggaatggaattaaaaggtgggcctttggagatgactggatttagatgaggtcacaagggtagagcctgcatgatgaacagggtgggaccgtatctcaaaaaaaaaaaga

SEQ ID NO: 268578 - DNA, 681 bp, Homo sapiens
tctctctttgttgtacaaagctgctccatcttaagcttgatgaggaaatgaagaaaagttgaggaaagggaggcatctctcggggaggatcagcctcggcattatgagcaacaggggatcctaaagagtgccaaattgggtctggatcattcaatttagtagttacatatccaccaccttatgttgctaaataactgtttctagcacatctgatttccccaattcatttgtttaatcaacaaatattcactgagcactgctatgcatcagatactattttagggcttaggtacaacagtggactctaaagattgcaaatatctctgaaatagtaactgtatcctccacggcactggcacagtgctggctccagagcagacattcctgtggaatcaatgatgaaagaacatccttgagatctgctgatctatgaccaattgaccttgaataacctgctttacaaatttttcacttgagagtgtattctgccatatatttcaggttccccacttggataaatgtgggtaataacattatcttaccttgctagatttcagactctatctcaggtatggcaaatgtatggtacaaacagtggctcttatttcacctacagccatggcagacattgcttattaatctcaatactctttccagataagattgaaaggagcaaaccag

SEQ ID NO: 268579 - DNA, 374 bp, Homo sapiens
taaaacaaaacaaaacagaaaaacaacaacaaaataaggcagactggacaagcttgtgacaatgctgccttttaagaactgatgacggatggctgggcgtggtagctcacgcctgtaatcccagcactttgggaggccgaggcaggtggatcacctgaagtcagaaattcaagaacagcctggccaacatggtgaaaccccgtctctactaaaaatacaagaattagctgggcgtggtggcagggacctgtaatcccagctactggggaggctgaggcaggagaatcaccctaatccacaaggcggaggttgcagtgagctgagatcgcgccattgcactccagcctgggtgacaagagtgaaaactccatctc

SEQ ID NO: 268580 - DNA, 452 bp, Homo sapiens
tgctgggatcacaggagtgagccacaccgcgcccggcctgtgctgctcttattaagcaactgcctcatatgaggctctaaatagcttcttttagtgtttgaaacctcataaactgtagtcatggcaactggtgtctgatctaggtgggagccagcttctaaggtaactggacatccagcagatcactccacagctttgctcccagcctgtccacctcaccctcggtcaacttcccctgagcctgctgctgtctcttgagcccactgtgagatccagatagatacccactgaggaggaagcaggatggagacatgggatcaggcgttgctttcttgtaaatatgtgcatttcctgttactttacatgtaagcttctaggttagtaaccagtacagtgatactgagatgacactggtcacctttagagtgacaatatgatatccttcatctcta

SEQ ID NO: 268581 - DNA, 530 bp, Homo sapiens
tgctgggatcacaggagtgagccacaccgcgcccggcctgtgctgctcttattaagcaactgcctcatatgaggctctaaatagcttcttttagtgtttgaaacctcataaactgtagtcatggcaactggtgtctgatctaggtgggagccagcttctaaggtaactggacatccagcagatcactccacagctttgctcccagcctgtccacctcaccctcggtcaacttcccctgagcctgctgctgtctcttgagcccactgtgagatccagatagatacccactgaggaggaagcaggatggagacatgggatcaggcgttgctttcttgtaaatatgtgcatttcctgttactttacatgaaagcatgagatgtcaatctctggacctgccttctggacgccatttatctaaaattcactgtttgttttttttttttgaaaggtaaagcactagtttaccttagctacaactttcatggtatataaaccttgcagaaacttcattaaaactaactgaaggaaca

SEQ ID NO: 268582 - DNA, 522 bp, Homo sapiens
aaacttttttttaacaaaatgtatcattcgataaagtgaattttaaaaaagttacataactcttcatttttttatttccaaatcgtaggtttttttaagctgtagaactgttatctgtaatatcttgctgtagaaatatcaaatcatttgaaaatttgcacatttttgtgcaaaactcaatctacagtatcagtctcgtcagatatattaattttacacttcagttttgattggtgagaaagtacccattctcttcaaataatcaaagataattattattttgttttgtttttggaatcaacagggaggcgcaaagtataaagttgctgctaacatatatacatatatatccatattttataagggtgtctatgtatatatagacagtgtgtccacacaaaaaatagatacagttatcagtcagtcagttcttccatgatttagtttttttaaacgtagaaaagctattgtaaacatctctttccatttattcttaattttttgacatattggtatttcttt

SEQ ID NO: 268583 - DNA, 827 bp, Homo sapiens
ggtttgatttcctgcgctgaactgatgctgcttccagaatgaatctgctccttggtgggttctgctgatgtggccagtgctagcctaggccacgaccacctagcccaccacccagaaggcagcatcccctgctcctgctttaacaagctggcccattttcatctctcctacctctgggagtagcaggggcgctcccggaagctgacaccccctccacaggtccggctgcaggggctccactggctccagggtccccaggtgtcactctgccgcctcaccttgggagcctgcagaagacaggaccatgcatcagcattgcccactcacagcctgagcccagaggcccctccaaagatgctctgcctaaaaccctcccctacccatcaaggagtctgggattctcccttccagggcccacctttaggactcagcaacactgccgggcaccccaaaacatattccttttcagaattagcctgctttcctcataaggagctgagagccaggcctggagggcgggagcaggagcagctgggaagagtttggagtttcaggggccactggaggggagggaccctacagccaggggcagtttgagggtccaggcatttgtaggttaaccgtgatgtaggggaggggggcctaaaagaaaataaagggaagcaacgtggggggatcctgctaatctggccgagactcccaggagtaccccaatattcatcccctccttctcccattgtgagagaatgcttgaaaacttgactcagctgggtacctggctgcccaaaatttaaaaaaaaaatacatttcctggactgcctgcagct

SEQ ID NO: 268584 - DNA, 513 bp, Homo sapiens
gccggcctcgaactcctgacctcaggtgatccgccagcctggacctcccaaagtgctgggattacaggcgtgagctgccgcacccggccctgtgtttcttttctgtttgacaatctctgacttttaattgagatgttttgacaaagttatatttaatgtgataattgatagattcaagtctgtcatcttgccatttgttttctgtttgacccatctcttctttttcttcccttttcctcatgtctttggttgaagaacttcctttgatatttctttttttttttttttttttttttttttttttttttgtggtgagatggagtctcactctgttgccaggctggagtgcagtggcgtgatctcagctaactgcaatctccgactcccgtgttcaagcgatttcatgcctgtaatcccagtactttgggaggaggaggtggacggatcacttaagtccaggagtttgagaccagcctagccaacatggcaaaatgctgtctctactaaaaaata

SEQ ID NO: 268585 - DNA, 538 bp, Homo sapiens
gacttcatgcccacagatacattcaagtcccagatggaaaggtgatctggatcaggcaaggtgctgaccatgggaacaggagagagtcaagggaatctgaggaagcacatgtttgtgtccaatatagtcccctccttgtgccactcagatgtgctcatgccctccaactgtggctggttttataagcagatgccttgtgtagttgcacgcagtcttgtgcttgaggggctttttgcttggattaatgttctgcacttgcatttttatttttcagacagcagatactcctccgctgaagagggaatagttctgcagtaattccctaggggtttgctttctcctctcctacgggcttgatggagacaggcacagagtcctataatgcccacgatgcatgcctctagcagctttgaattctgctggatcatctgactcaatgggcagagcaggttgggccacagcctatacctgctgtagagatatcttatgttctggattccacttgaaaccactagtctttgcattcattctgtaaccc

SEQ ID NO: 268586 - DNA, 164 bp, Homo sapiens
aggaattcagaactgcttaactggatggttctgagtcagaatctctcatgaggttatagtcgagattcagctgaaggcttgactgcagttagaggacccacctgcaagacggcttgctcatctcgctggcagactggcgctggctgctggcagaggcctcagct

SEQ ID NO: 268587 - DNA, 498 bp, Homo sapiens
tggatttattcagtatttctcacatctgttcctttcttctcatttttaaagtattttcaaaactgtttccctctgtctctccagactaattgggtaactagcaactacataaagacaacctatggatttcaaggatctttcattactgtaaacctggtaatcaaactggtaactctttctgaggcctgaagaagttgctgttctgagagttctgttatgcagccatcactgtttttaggtgttttcctttgctatagaaataaatgagaagtatgtatgtggtttatttcacttcattttattctgaccaacacagtagtgaagcttcaattgaagacagagtaattatacatgtcatatccagtaaagaattaatggcatcttttcgttcctcaccaaaaggggtaaatcagaggctaggggagtcatctggataaaagagaatattttactcatttagaatttagaatgcatcgtatgcctgtttagtattttact

SEQ ID NO: 268588 - DNA, 568 bp, Homo sapiens
tgacctcagatgatccacccgccttggcctcccaaagtactgggattacaggcgtgagcccggccagcagaacctgtctttaggagactcacaaaattgccctgcgtgactgcttactttctaaaagagaatgcagtatttgaaatacagaatcacaaattaaatcaatattagtaaaaataaagcaatactaatataggcactaccaaaattagcagattgttttcacagtgccggagtcaatagaaatgtacactttttttttttgccttatatacaaatgtgctgtttcgcttcacaccaatgatctgaatgaaaatgacttccttgataactgcaactgtgctactgccttgtaattactctgtaactcagagctccttaacagcagggaaacacacaccaaataatgattctcaactcttccagaattcctcccttgtggtcatgcttgcagttgtctgatttgtaccttagtagtatcatcttacatgttctaataaagtgttcccaaaccatgctctctgtaacactagagttcagcaagttagtactagatgttctgtaa

SEQ ID NO: 268589 - DNA, 570 bp, Homo sapiens
agcacttcgggaggccaagatgggtgcatcacctgagatcaggagttccagaccagcctgaccaacaagagtactgagctgtctccgaagaattcagattattgaatgtaggcacccttttctgatttccttcatcaattcaattcaggagatgtgatgcaatgtgatgtgtcaatgtatgtatgatcgaagtgtcagtctctataagtactccgctccatgatcctggggtgaagtgctacaaaacacatttttggtggagcagaaatagtgctgcctttcctgtgcttcccacggctgttgtagatagaaagcaatgaattcagaattctcaagtcggccaggccatcttctcagtgagctttgcctcaggcaccctagatattaccacatgagagctatatttcatctgttcttaaatttttgcagctaaaggaccacatttgagggtcgaaatccctgccacaaaaccaaccttaccaccttttactactcataagaaaaatccatcagaatttactggaatttattgcaagaatgaccttccatttcatgagttgaaaaaaaaaa

SEQ ID NO: 268590 - DNA, 433 bp, Homo sapiens
gaggctgtttcttctctaatgatcacataatatccaaattatatcaacttcattatttccctctttccttttcctaaccctttccctttatttcttgtttctcttgaagactacttcaaattacctatttgtcttcattactgcccccaaaactctaataattgtgacccctaactgttcatttctcttcctttctccaccccattctgaacatccttctttaagttttatttaatgaaagaacactaaagtgagtgagttcataaacttgagactcgtaggcagagtgaagcatgtcttcattttagcttcagagtttaaaagttatcaatattcttttgagagtgggaggacctgagtcacagttttaaatgtcaactgtactagctgaggtcattaattccccttaccttcacgtttggccaaaaatgaa

SEQ ID NO: 268591 - DNA, 434 bp, Homo sapiens
tgtgacttagttgcgttacaccctttcttgacaaaacctaacttgcgcagaaaacaagatgagggcaaaggggaggaaatggggttctgtttgaaaaaatgagggagaaggaggagagagcccatgtgtggtgtgtgtgcccctgagaactttgtggtgactgcctttgggagcccgcaggtggccagaggcaggggtagctgagttcctggagaccccttttttgcccccaggttccccagagggcaacgccatcagtagcagtgtggtgtttcaggcagagctctggccaggctgtgccagtgtgtcccggacgcatcactaaggaagagagagtttatttagtcaactggcccaaggcagcgaggcttctacagtcccacaccccatagccgcctgggcttgggcttacttggggcttgaaggttctggac

SEQ ID NO: 268592 - DNA, 347 bp, Homo sapiens
gcagccaagaacagatcattcagccactttagggtttataaaaatcatatagatggccgggcgcggtggctcatgcctgtaatcccagcactttgggaggccgaggcgggcggatcacgaggtcaggagatggagactatcctggctaacacggtgaaaccccgcctctactaaaaatagaaaaaatcagccgggcgccgtggcaggcgcctgtagtcccagctactcgggaggctgaggcaggagaatggcgtgaacccaggaagcggagcttgcagtgagtcgagatcgcgccactgcactgtctgcctgggcgacaaggcaaaactctgtctcaaaaaaaaaaa

SEQ ID NO: 268593 - DNA, 422 bp, Homo sapiens
gagaaggcctggctcttttgcccaagctgaagtgcagtgatgcaatctcagctcactgcaactcctgctccctgggctcaagccatcctgccaacctcagcctcttaagtagctgggaccacaggcatgtaccatcacacccggctaatttttgtattttttgtagacatggattttcaccatgttgtccaggctggtctcgaacttgtgagctcaaacagtctgcccacctcggcctcccaacgtgctgggattacaggcgtgagtcatcacacctggcctcattttagccatttttatgtgtataatacggtggcataaagcacattcacattgctgtgcaaccatagccatcatccatcttcagaatctttcttttggccttggttcaggctttgggagctatacaggatttattcact

SEQ ID NO: 268594 - DNA, 194 bp, Homo sapiens
atcatatttccataagccacgatgtctcaaccatgtctccttatgaaagggtttgaagtttctagctcctgaagagaaagcttgtttctcttgggagaaagaatgacatcattaactcctcagagtaagaccctaaatctttgttggtgtgtggagaacaattactctagtctctatttgccacttcagcccag

SEQ ID NO: 268595 - DNA, 478 bp, Homo sapiens
gagactagctgggcaatgtagtaagacgctgtctctacagaaaataaaaataattagctgggcatggtggcacacttctgtagccccagctactcgggggctgaggcaagaggatcacttgagctctggatttcaaggttacagtcagctgtgaccgctccactgtactccagtctgggcaacagagcaagactctgtcaaataaataaataaataaatggatgaatgaatgaatgaatgaatgaagctaaattacctttttctcccaaacagtcccagaatcaattactgttggtatagtttcatagttttatggatattccagaaggttgtcttccataagaagaatgttaatgtttcttgcaaagcagctattggcttttgaattttaaccttcttttgagtgaaatttataattaatcatgagtacatgtaaactcatttaaaaatgaaagcatcaaaaatgaacctgatgctg

SEQ ID NO: 268596 - DNA, 836 bp, Homo sapiens
gcaggatggatactggccagcattcttgaggtcctaagtcagatctggagacaaaggggagatagacggctcagacccgtgcagcacctctgatgatgcttgtgaaggctcttgcctcttaacccctctagctaagcgctgggagaggtcatttgttacattactgcttccacttaagaaactgtctctggctaagtggttggattaataccaaagcagaaataataataatggataatagtatattagactgagcagtgacctcagaaaccatcccctcactttgcagatgaggcatctctggggtacagagaggtgaagtggcttctccaaagcagcgtagcagagaaaagcagagctggaatcacagctaaagctcccgtgccaagtccacagtttgactatgcgggatgatgttacctcccctgtgacagcaagtcacagagatattgcccctcatcaaccctagggagttttaagatgacctttatgttacaggaaccttctgggcttcctttgctcttctggggctcgttatttagagaacatttgtggtccctcacatgtcacctaggtggactgcacacaccctccttcttgaacttcttttccttcccccagacactcagagtagcctgcattcttcattagggtgccccagcacttccaagaaccacatgggcccgtgagagggaggtcaaggtcatcccttttgtctcttgttatcatagtcataattctgctgaaaagctacacgatgcagatcccaagatgagagtgaacagcaccagtcaatacctgtagacacacagagctaccagagggagggccatcta

SEQ ID NO: 268597 - DNA, 209 bp, Homo sapiens
cacatccttgatttccttggcacgagggaacgaaccttgggtattaccccagatgacgacgattcttcacccccactggttgtgaaagatgaagaatgcagcccagattgcagctggcagccactttgtgatcagaggggaatgagcctgtggatgaagccaacacagtggagggaaggatggagacatggaagaaactgggccttgtt

SEQ ID NO: 268598 - DNA, 635 bp, Homo sapiens
tggagaacacaaaaggcactgggatcgaggtaaatgcctggattttgcagaaggtaccaagaaatcctagaccttcactgtacagtgtaggggccacgggacacgtggctgcccagcactggaaatgtgcctggcctgaattgagatgtcctcctgaaagtgtaagaacatgccagattttgaagattcagtttgagaaaagaatgtaaaataactcaataatttttatattaattacatgttgaaagggtaatattttggatttattgggttaaatatattatcaaaattaacttcacctattctttgatttaaaaatatgtctacatgaaaacttaagataacatatatggttcacatttgtggcttacattatatttccatgggatggtgccattctagactctgtaattcattgattttgctccatctccttggcagcattctaaaacatagtgcgaagcagatggttgtgtacttgtaggaaagaaagtagtaataactgaaagcaagaataattctactaagaacaaatcatgccaaactgacctcatttttttttctttttatagggttacttggctagtgtctctgatcagtcggcattttagagagcatgagttgggttgatgccg

SEQ ID NO: 268599 - DNA, 448 bp, Homo sapiens
tgaaagggtgagaataggaagaattcattattcttgtgcctgactattgaaaaatatataaaaatgtgtaacacattttagacctgggaagagatttgaactagtaatctgaaaacttgagtttgcattctagctccacctctagctatgggactgtgagcaagtgtctttaaactctgaaccttggtttttctcatatgtaaaataagtgtaataataactgccctgttctgtgttcctctcaggataattgtcaggatcaaaattcatcttattcaactaatattttgggcatactttgtaccaaccagatgctggggatacagcagtgaataaaacaaagtccctgctcagtggagtgaaatgaaatacctgtgacagtgttttgaaaattgtgaaggaatttagaaatttaagtttttatgccatccaacacccataattttac

SEQ ID NO: 268600 - DNA, 499 bp, Homo sapiens
acagacaaggaagtggtgtcaaatggacagtaaaggtgaatcacatactcagctatagcctgctcccagctggggcactccaggcccctcctctggtcactactgtagaaattaactgcatgtgtctcaatctgcgagtgcagctgcttctagatggtggcaccttccagagcttggttcgccctgtgtctacccaacaagtacagatgccatcccggtgctgtgatcttccagccatttctccatttctgtcacagcccagaaagtgacgccgcaaggccttagagcaagggccgttccatcagccctggcctacctggggctccatggctcctttctttttctttttgttttgagacggagtttcactcttattgcagaggttgcagtgagccgacattgtgctactgcattccagcctgggtgacggaatgaaactctgtctccaataaataaataaataaataaataaaataaaaagttatactgtttgattcat

SEQ ID NO: 268601 - DNA, 508 bp, Homo sapiens
ctttttttgatttcactttttaaattaaagtattgtaaaactggctttttggtgcacagttttgagaatttcagtacatgaacacatttgtgttcccaccaccacaatcaagacagagggccgttttattgtccccaaagctccacatgctatcctttcaggtctacttcctttttactgtttttgtaatcactgcacttttaaaaacaagttgtacgccaggtgcagtggctcacgcctgtaatcccagcactttgccgaggaggagcacttgaggccaggagttcaagaccagcctggacaacatggtgaaaccccgtctctactaaaaatacaaaaattagttgggtatggtggtgggtgcctgtagtcccagctacttgggaggctgaacaggagaagtgcttgaacccgggaggcagaggttgcagtgagccgacattgtgctactgcattccagcctgggtgacggaatgaaactctgtctccaataaataaataaataaat

SEQ ID NO: 268602 - DNA, 1051 bp, Homo sapiens
  misc_feature (76)..(76): n is a, c, g, or t
taatgtttatctttcttgttatagcaaactcattcaagaggaaacccctattaatatagtaaatgtggtaaagccntcatgtagataccaaaggtcactaattatatcagcaaactcatgtggtagataggtccttctgaaacggaatgtggaaagcttttgaaagtgacatatgcatcagatacttaaatcagaagggaaaacgatagagttaaacttggccattggccacaaaacccattgcatagcaggaaagaattgcagtgattgtctaaaattctttatttaaaattcagagctgaattgccccctaactcagttatcagaaagatcctattctcgaaggcaataatatttaggttcaatgcaggtataaaatcctaatggagccatatctattctgcttcagcagagtcatacatttactctaaaagcaatggttctggtcacaggaaataatttctgtggaggattagatagcattaaacatcacaagcttttaaatataggagcagaatttgctccatacagagattttatgaatgcagtgaaagtggtaaaagcatcagtgataagttattttttatttcatggattcacttcttcacatcctaccatgtcttaaattgtgaagcatcttatgatctggaatgtcatagtaattgtcagggctttttaaatgtgtgatggcactttagatttgagtaattacccttgcctgtatatataattttataatggttttgcataattattatagaaaggattccagagaatattctataaatattagacatttcattgtcaaatattccttttgaatatatgaaaaataagaatataataaggattagtcgaatagtgacaaaggatcttaggggttgtgttgtggactgtactatgtgacatgtactttatatatttataaacttcattgtttacttggaattacacgaagaaacaattttcagggttaaagaaattctcaacataagacaaaatgttgaataattcaatgtagtgcaaataaaatgtttttttcttatgaatc

SEQ ID NO: 268603 - DNA, 1170 bp, Homo sapiens
cggggtttcactgtgttagccaggatggtcttgacctgatctcatgatccgcctgccttggcctcccaaagtgctgggattacaggcatgagccaccacgcctggccgctaggctttcttaatactcacctccaaagagcttaaggtattctagaagcttagaaaagaaaggagcagggagaaataattaaaaatgcaagtatgaaaagaaaacaaagactagaatgatgagaacctctggcatccttacctggtaagaagcccctggagcattgcttctaatatactccaatagaaaataggcccccacagttacaggaggcgggaggttaaaatagccggttctcccgggaatctttagttgccaccctttcctgggaggcagtcagataggaaattaaagaacagtttcagaatatagtacataaaaaataatggtatagcagtgatctaaaataatggagccctgggtttacaaccaaatgtttctcaactggaaaaaaatgttgattatttcgtgtacaggttgttgctatggaagtgtagttactaattttgggggagtgggaggttgggggaactcagactcctttgatagctaatgaattctagaactcttttcagaaaattgcaaatacatacaattttggattctaggttaacaaatctctgctttaggaaacaggaggataatttataaatttatcaaagaatgaattgcttaagagattatgttaaaaaatgtatcaaagggccttaaaatttgggggacactatattaattaaactttccttcaactcttgtttgaagacgtgtccctaaacccctagtttatattaactggttctccctgcaccagttgagggaccacccagtcaagaaagacacctgttcagatggtgtcattcttcactttggccagcctatacagcaatagaagaggcctatgagctattccctcactgacaccctgctatcccctttataatgtagatctcaaaaacaaccaaaccgattccagctactttattacttgacttatagtaagtggcagagtaaccttatgttttgaatatatgtgtaataatagtatcttttatgttttttcagagaagactattcaaggacctcaagtaattaaaacatataggccttaaaccaaaaaaaaa

SEQ ID NO: 268604 - DNA, 510 bp, Homo sapiens
agaggcagggtgggaagatgcccagacttgcacagcgtttttgaaggaacagataaaggccaggaagaatctgggatcctactgaccaactcttgcgtaaaaagagaagaatttttatccattcagtgggtgcaggcacaataaatgccttgctggattgcctattagaggatgaagttattagccaggaagacatgaacaaagtgagagatgaaaatgacactgtcatggataaggctcgagtcttgattgaccttgttactggaaaaggacccaagtcttgctgcaaatttatcaagcatctctgtgaagaagaccctcaacttgcctcaaagatgggtttgcactaagagagaagatggaactctggagcacttcagagacttcccagagcttcttccaagggagaagatattctcgtgaaagaaaaaaacaaaacaaaacaacagtgcttttttcaaacctgattaatttcatcaatttccaataaatctttcattctctcataat

SEQ ID NO: 268605 - DNA, 477 bp, Homo sapiens
tccacacagatgtaccacacctaacctcctctgcatagacccctacttccaaccaactcttgcgtaaaaagagaagaatttttatccattcagtgggtgcaggcacaataaatgccttgctggattgcctattagaggatgaagttattagccaggaagacatgaacaaagtgagagatgaaaatgacactgtcatggataaggctcgagtcttgattgaccttgttactggaaaaggacccaagtcttgctgcaaatttatcaagcatctctgtgaagaagaccctcaacttgcctcaaagatgggtttgcactaagagagaagatggaactctggagcacttcagagacttcccagagcttcttccaagggagaagatattctcgtgaaagaaaaaaacaaaacaaaacaacagtgcttttttcaaacctgattaatttcatcaatttccaataaatctttcattctctcataat

SEQ ID NO: 268606 - DNA, 294 bp, Homo sapiens
ttcattccttaaggcaaatttcttgaagtggataatgctgggtcaaatattgacattccatggaagattgtcccatgtacataccaaaaagaaaaataaaaaacctggactgctgtgtctcctatgacaactcttgctgctgaaagatgtctcaagttatccactgctatgtttcctttcctgttttgtgtccttccaagtgaagccagcaccaagtacagcctacttaagtcccattttgtctttttttatcactccctactgaaataaagtccacccaaatgagagctggaa

SEQ ID NO: 268607 - DNA, 267 bp, Homo sapiens
tccatcccctcatcaatcaatcaaccatttattgagcccagatgtggtacagccccagccggagatgacccagaggtggggtggggaggagagagatggggaagctgagtccggggccacaggtgcagccaggaggtgcaggtgagcagcgctcagaccagcctgtcagcctcagtcctgagcttacttctggtgatggagggagatatacagaaaagatcctgcagcctgcaggtgtggcacagctgatcttgggccaaggatgca

SEQ ID NO: 268608 - DNA, 1033 bp, Homo sapiens
caccagtacctctttctagaacatttttatcacccccaaaaggaaccctggacccattagcagtcactccccattcccccaaattccccagcaccaggctctcccccgtctactttctatctctatggatttacttattctgaggaatgaatagaaaaggttgattgtagaacatgtggtccttttaagactggcgtcgtttacttagtataaagtttccaaggttcatccgtggtgtagcctatgttagtatttcatttctttttatggatgaataatatttcgccgtatggataaatgtcaattctgaaaagtacaaatctcttggaagctgaaatttcttgtggcacatttgtcctttctccccagccttaccccaacctttgtctttttgaaaaaaatttgtttccttgctgcttctgcctttagtaccactgttttcatttcatgtttatactctgagactgcagaagcaaagcttttctccacttcaaatctctggccagctctagaaagtacatgtgtggatctctcagtgagaccttctgcaaataatgtcattgggagaccctctagctatttgataacattagatgagcttatattcaaagaaacttcaaagctatttattctagaagattcttaggaagagtcagtgatttcaaaagaaatctagacttacatgcagggatatgcagggtataaactttattgatggctcaggaaacaggtttgaaagagcttccggtacacaaaggggattcttctactgcagccgcttttgaaaagctaaggcagagtcagagtgaggaacacagaagcatccaaccgcttctgtcacgtaagcatgctgaggctgcggaaaaagagtgcgtctgactgtagtccgggagaaagggatgggctggcagaggaggaggagaaaatgcagagggtacaagtcttgtaaatgctctaattttaaaactgacggtaagttatgccatttccctctaacaaaaatgaggtaggattcgctattttcaaggtaaaa

SEQ ID NO: 268609 - DNA, 546 bp, Homo sapiens
ataaaaaatattttcattaaaagctatgtctttaatttctgatggaattagtagagattttattactaattcatttagtatttatgagtccactatggttgtcagttatcctttatgacataatttataagattactgataggagcacattttctaagctgaaacatttagaataccattatacaattctttaatagctggagacggaaaagagagtgctagatggagaattaacctctgaatcatgttatgcactagggacttagggttacttttggagtagtatggaaacaaatttaagaatagagtgtgcagtataactttataacacggctcattttcagtgtcagagatcaaataaataatgtgaaatatagcattactgtgcagtagaaatccaaaataatgcaggtagcatatgatataggcattatcataccccttaacgcacaacaaaaggtgtttattattatcataatgttattttccctaatatttatttgctttaataaattattattgcaaaataagtaatataaattaaat

SEQ ID NO: 268610 - DNA, 1366 bp, Homo sapiens
cgaaacggtcgccacctgagtctccattctgctgcagtggcccctgcgttaaagctctctcgtggtgcggctgccgaggctgcggtagctcctgcgcccccgtgctggtggcgcagcctctgcttgctgccgacctggcggaagggtgcgggagcgcacgctacgggcagcgtcggtctgcgtccttcctcctcctattccgacccccgcatcccacgcccccgcctcgctctacgcctcctccctggctgcaggcagaccgcttcacacagccgcagtgccctgtgtgtggacagcctgtgggagactcgcacgcccacactcaccccgcctggctgcacccctgcccagcatgtcggcgctcgagtggtacgcccacaagtctctaggcgatggtatcttctggattcaagaacgtttctacgagtcgggcaaccgtgccaacatctggctggtgcgcggctccgagcaggacgtggtgatcgatacaggcctggggctgcgcagcctcccggagtacctgtactcctccggcctcttgcaggaccgagaggccaaagaggacgcggcgcgccggccactgcttgccgtggccacccacgtgcacttcgaccactccggcggcctctaccagttcgaccgcgtggcagtgcaccacgccgaggccgaggcgctggctcgcggggacaactttgagaccgtgacctggctttccgatagcgaggtggtgcgggcgcccagccccggctggagggccagacagttccgggtacaggcggtgcagcccaccctcatcctgcaggatggggatgtgatcaaccttggtgacagacagctcactgttatgcacatgccaggtcactccaggggcagtatttgcttacatgacaaagaccgaaagattctcttcagtggagacgtcgtgtatgatggatcactgattgactggctcccatacagcaggataagtgactatgttggaacttgtgaacgtctaatagaattagtggacagaggtctggtagagaaggtgcttcctgggcacttcaatacctttggtgctgaaaggctttttcgattggcttctaactatatttcaaaagctgggatatgtcacaaagtttctacttttgccatgcgatctcttgcaagtttagctctacgtgtaacaaattctaggacctcgccctagtatctatactgataatatattttgattaattatatacattaattcattctgtgctatttaactgattaatagtgagcatttcatgaagtgcttttataccactattatatatcagagaaagattgagaatgaataagccaaaaagaaaattgttagtttaaattgttttctttc

SEQ ID NO: 268611 - DNA, 240 bp, Homo sapiens
gcccggagacctaggagccaccggaggtctgacccagagaactcaccaacagggtgcgccccatggtgaaaataaaatgaatctgttagagagagagagacagagaactccctccactttttttccccaagtcaccaccacttctgacactatctttttctctagcgttctgctgttgtggtccctggcgcatgcttgtttcacaaaacgccaagagtagatcagtggatgtcattggga

SEQ ID NO: 268612 - DNA, 686 bp, Homo sapiens
tatttgggttttcccagagggagactgtaactcaagtatttaagtccagatcatttatctgagagccacagaaaacaaacaaacaaacaattaccagggttgtgaagaagtgacacagagaagagaaggcagacaaaaacagatgagttttttggccagttatcaaaattgctgatgggctcaatactgtgtagcaccatggaagttgtatgatatgattattggagtcaaatgaggtaaatataaaaataatcatcagtgtctctagtaagacagcattgaaatttctaaaactattttattcttatatcaagaatagaactagagctccgataataccaactaaattattattgtcttttgttacatgaagagccttagaatgcctaattgtgctttataaaatataacactgtcagctgaagttgaatgtgctccaaggcttaataattctgagaaaaacagcttatattaaagaatgtctatgtactctcttgtccagcctctttttaagtcacaagaaagggcttaattagacttttaggtagaaagagtttgacacagaggatattttaatatttgctggtgcaaatttgtttcagaaagtattgagactattcagttcatatgtgtctaatttcattttttaatgtctgctaatataaatcactttaaataatttttat

SEQ ID NO: 268613 - DNA, 390 bp, Homo sapiens
cattgctcctgttgctcgatcatctgaccaaagaagatggaaatccagcaggttttatccaaaggaactgagtctttggtggaccaacccagacagggggccacaatcagaaggttggtgacatcaaactgtgaagaaaagtagccctgcctgcttgtgaacgagcatagatttcagcagctgagggtgtgatggctgtggaggtggtctgggccagtgacctgaggactggaaaatcattgacaatctgatatggaagatggctacacacaacgttatcgttcttcctggctcgtaagtgaagataagaggctatggcagtgagatttccatttgttgaaatgtatgctataaaaattcaatgttttcttgctagaccctatctgtcta

SEQ ID NO: 268614 - DNA, 428 bp, Homo sapiens
aaatcagatgtaaaatcagaaaatattgcctctccaagagctcaaaagactcttaagctgcttaagagaccttttttttttcgtcttgtacctactacctagttcaagtctttgcaaacagttaggcacttaaatgccaccctaaatggaaaaatcaatttagagtttcaatcaaagctgaattcctgagaggaataaagacgtgaaatatgtaaagaggtgatagttcaatctatgacaaatttcattcacaaatggaaagtagagaacaatagagagaaaatacttaatccccattttagagagccagagaaagaaaaagagacagaaatgttagaattcttaaaaagacttactaagtgtctattaactcaaactatgcaacagtctttacaggtaggttctaatactgtttctgttttccaagt

SEQ ID NO: 268615 - DNA, 441 bp, Homo sapiens
tggttgtctttttcagattgacttccattctcaatcttatcactccctttttaggattccttgggctcttatgtctgtaattcagagtctattatttatattgattttcatgtgacttgtaatggttccttattattttttgatgcatggattatctttcttgtccttattgtaaattctctgtgagcaggggttgtatcttctaactcttttgtatgcctagtatagtgctgtgcacaagtaggcgctgaataaatgcttgctaattaaattgaatcaatttaacttacagcaattgtgttatgagacaaaaacttctgttacctgcatgaaaacattttactatgatgtaagaaatggattatctgttgataggctgagtttattgtttaattagattataatgcagatgagtaaataaagctagtgtttatttctact

SEQ ID NO: 268616 - DNA, 902 bp, Homo sapiens
accacacttaccatctgtgggctgagagcgggcaaatgatttattagtcttggtttctaacggtgctgagcagcttgggatcgatcttgctggtgacacactcggcagatgcaccgatgggtgggagggtcaatgtcaggatgaagcttcttgcggagctgacatgcacgtggggaccccaggtgtggtgtttagttggtagactgtgacattgcaaaagtggagtctcaagccatggcggataacaggcggcagaaaaagcagtgagggagcttcttgggatgttttactttaagtagaaagtaaaactgtgcatgaaaagaggggacagagtatgcaacccaaatcatcgccaaggctcttggtttcttctgtgcacactgcctgccttgtatccaagcgtttgactgtgcagaggccagtcatactgggggaccctgagcactacccttggcatttgggtatatcctgatcaatatagccatttccactgcttgacattatgttttgggggctagttttttaaagatcaatgattgaattgctgctcggctgattggatatgtcttctcggagactcacctgtcctccccgaagagatgctgactacacaacagcagtcactgtgctgggcacacgggcagtgttcaggagacgtggcttcctttcttcttctttcatttcttcctgcccagaacagcaaggctgagactgataataaaattcctggaacatggagaaactcatgtggggagaaaagaagaaatgtattgtgacttccatgggcttttggcacttttggacctccctcctcctcttttccataaaaaatgtattttaagacatattggtataaagatgagattattcatagtacatattaaaatgttttcccctaccta

SEQ ID NO: 268617 - DNA, 699 bp, Homo sapiens
ctactgtaaaatgctttcattgcttgcagttttaagtttgatctgcttacacttaggtagacatgcctgcaataacttttctctcagttatttctaacctcataattattctacttttcagtatcttgtgttactcatgggcaaaaaaacttcttagtgaatagaattctgtctgttgtttctgattgttggtatgaacattaaactattgggctggtaagttgtagtaatatgaatttttcatctctcttaacagttgtgtatattgatatgtttggtaaggcataaagtatataaataaaggtcgtcaaaacttttacaaaacaaatataagattatgtaattattttataaatatccaggaaggtttttatagaaagagaattataagcaaggtataaaataataaattagaaatttctaactcagactttgcaatacccaatgaaataattcgttaagttaaaactgtgaaaacaaaaattagctttaattctctataatattttttagaaattatccgtatctttagcaccaaaaagaacaactcacaaactcaataatatggtattatatatttctaaaaggtatgaaccaactggttttgtttttctaaccagaattatattttaatagaaaagtaattcaacatttaacagaattctgttagtacttcttattctggcaatattactaact

SEQ ID NO: 268618 - DNA, 466 bp, Homo sapiens
ataaaaaaagatattccacacaaattgaaaccagaaaagaacagtaggagctagctacacttatatcaataaaaaagacttcaggccaaaactcatacaaagaaacaaggaagattattatataatgataaaacggtcaattcagtaagagaatgtaacaatactaaatatatatgcacccaacactggagcatccaaatatataaagcaaatattaatagatctaaaagtaaagatagactgcaatacaataatggtataggactttagcacttcactttcaaaaataaacagatcatccaggaaaacaatcaattaaaaaagttggaattatactctagaccaaatgtacctaacaaacatttacagaacattttatccaactgctgcagaatacacattcttttcatgaatacatgggatatactctaggatagaccatataataggtcacacaattctcaac

SEQ ID NO: 268619 - DNA, 414 bp, Homo sapiens
atttagactgttatttaagtctttaaagaaaaacatttctttattaacagaatctggtcattatatctcagataagaaaacaggttttgattttagttgaaacacaagcagacctactgctaaaaataattttaaacatttcttttttcactgtgcttagaatttcttactggttttcatgtttgtttcaaaacataaccttaaagagtttatggtcactaatcgttgatatttacattactcatacttatttcagtgtctaaagctaaatattgatcagttttgtaaatagagtgtttgaattttctgtctatagtttttcaaggtcaaacaggtatatctgctgttagatgcatagcaaataatttatgaaaatcattttatttacatagcctcataaagcaattattttcg

SEQ ID NO: 268620 - DNA, 200 bp, Homo sapiens
taaatcaatgtgattcatcatatcaacacaataaagaacaaaaactatataatcatttcaactgatgccgaaaaacaatttcatgaaattcaacatcctttcattgtaaaaactctcaaaaactgggttatagaaggaatatgcatcaacacaataaaacccatattagatagatccacagctagtgtcatactgaatga

SEQ ID NO: 268621 - DNA, 437 bp, Homo sapiens
cttcccaaatacctgagactacaggtgcgtatcaccatgctcagctaattttttaattcttttgtagagacagagtcttactatgttgcctagactggtcttgaactccctgcttccaatgtatcagcctctctgaacttcatgctgccgttatctccagcaccaagtcctaagttactcatcggtttcacactccagctactacttattttgttgttttctcactctggaaatctcttctcacctcctttaattcttcccctttcagactcatgctctcaccccttaaattcttcttcctcctggaaagtcaatgtagacatgctcttttttttttaattatactttaagttttagggtacatgtgcacaacatgcaggtttgttacatatgtatacatgtgccatgttggtgtgttgcacccattaactcgtcat

SEQ ID NO: 268622 - DNA, 510 bp, Homo sapiens
tatcttccaaacaatgaaaacacatactggctaaagtttggtcctaacaaaaatttagatgtttacagtatattagatacaatgttcagttaatacagtttgtcagtattaactggttaatgtcagcattaaccactaaaaacttcagactacttccttccacatgtgaaagctaatggatcatttgttcttaaataaaagatgaaaataaattatgtactcagctgggaccttagctaagtagagtatattgccatcacaactgtcacaaaaaatatgatcacagtgagcctggagatctaggttcctttgtattagttcatacaaatatcctgatagatggccaaaatgacctgcaatcaatctttagaaccactttctgatatcactatactccctcattttcatgtattgcgcctatcctaacaatttatttttgttcttgagtcgtcagaaaacaaaaataaatcaataaaactaaaatcttcactttttacactgtaaaagaaa

SEQ ID NO: 268623 - DNA, 399 bp, Homo sapiens
ggtttaatatttttctactgctgcaaacttaatcctagtggtaaaatatatgttttattattattttatgcaacaagcctgtattaagagttttaaaaacaaatctaagtttgttttaattttagttaaggaatatagaaattagaaaataatgtttaatgaagttctgccaaagtaagtatgaaaggaataattattaaaatattctattaaaagtgcttttaaaaaatgtaagaaattatgaggccaacaaactgcattaacctattagaagagtcaaatatttttgttgtccttgctttgttcaggagaatggcttgaacccgggaggcggagcttgcagtgagccgagattgcaccaccgcactccagcctgggcgacagagtgagactctgtct

SEQ ID NO: 268624 - DNA, 504 bp, Homo sapiens
tgagattcagccatattgttgcatgtatcagtagttcatttctttacgggagctgttttatgggagaccatctgaccatgtagatatgtctattcataatcttaattccaaagagttagcgaaaccctgggatggctttctatctttcatcttagttatctctcccccttttttctaattctaaaaatatatatgatataaaaagttgaaaccactttcactgttttatcatattattaatatagaagtatattttttatagataattataaatatgaatctgattttttcactttaaaaaaagacttctaagtaaggtggttgctatctgttttgacttaaacctcaactaataaatgtgtagtttaggaaattagcatgttgaatgaatagtggtagcccttgaaatctcattttgaatcatgtattctactagataaattagcaaattttagaaaatctgggaccttgtctttctgaatgaaaatattatttgtgaaattc

SEQ ID NO: 268625 - DNA, 314 bp, Homo sapiens
taaaactagaaaccaacagtgtaaaatttacatttggcatctggtcacaaattatcaggtatacaaagcatcagagaacacagtccgtaatgaggacaaaaacagtcaatagaaatagacccaggaatgattcagagaatgcatgttaagtagagacatggaaaatataaaaatgaccaaaatctaacttttaaaaacgaaaactgcagtgtctgagatgagaaatatagtgcccaggatttacagcagatcggcacagcagaagaaaaattagtgaacttgaagacatagcaaatgaaacttaatgcaaaatg

SEQ ID NO: 268626 - DNA, 573 bp, Homo sapiens
acttatctatagattcaataaaatcccaatgaaaatcccagctaaagttattttgtagatattaacaaactgattctaaagtttatatggagaggcaaaagacctagaataggtagctatcacagtattgaaggagaagaacaaagttggggaaggctgatatcaactatatgacattctgggaaagtaaaaaactatgtagacagtaataagatcactagttgcgagaaggctgggggaagaagtggcgaatagacagagcagagaggactttgaaggcagtggaactattctatgtgatactataatggtggatacagctcattacacatttgtccaaacccgtaaaatgtacaatacaaaactgaactctaatgtaaactatagactttgggtaataatgatgtcattgtaggctcattgattgtaacaaatgtactactttggtaggggtattgataatgggggaaagttatgcatgtgtggagaaaaggagtatctgggaaatcttggtacattcctctcaattttgctgtgaatctaaaactgactaaaaaataaagtcttaccaaa

SEQ ID NO: 268627 - DNA, 494 bp, Homo sapiens
cctttcatactttggagctgagaaacccaatgttacagaaagctaagacaatgattctaagttccctttttaaaatgtattgaaatgtgttgtctaaaaattaaaaaataaaaatatctgtggtattttgtgaagacagaggccttggtttggagtagatactgtcacatgacttctcacctcgactcttttattgtaaaagaggaagataataataccttccagggaacattcttcccccttctccattgtggtaggaattaatcactgcccaagactcctggttgaggggctgagtgaagtgcaggcagtctccagccaggagctacaccgtttgttgggctaccctgtttgtagggaggaatgcctttctatgtttctaacttgcccaaagtctgcatccttgtaaagtagtgttctgaatgtgagcgatcatattcatgaagtgcctggcacatagtaagcactcaataaagagggatgtaatttttaaa

SEQ ID NO: 268628 - DNA, 667 bp, Homo sapiens
tgtgagccaccatgcccgctcctattttttctaaaataattataaattctaaaattacctatctaaatggaggagggtcttctgacacctttaaaataaaatccagctcagtactgtaaatgtgtttacagaacttgtttaaagttcttacagttgtttaaatcagactagttaactaccctcactacttagatgcttccatttcttagagctcttttttaagcttatctgaagaaaagcccttccaatttaagggttatttccaattgcacattccaaattgagcctcccaaagtgctgggatgacagttgtgagccactgtgcccagctagcaactgtttttaaacattagttccaatgtagtgtacactgaaaacttttatgaaaggaatttcaaaaattaagataaaccattaaaaacgtaattactaagtactactactactacaatgatatttacataatagactgagttacatttcataaagacaatatatctgtataagaatttttaaacttccctgtctatataatagaagttttagagaaattttttaaacaccaaagaaaactgcaaaataagatcacttacctatttggcattctcaactgtctggaacagcaaggagccattatgattatgcatttggtttgtggggtgtcttg

SEQ ID NO: 268629 - DNA, 527 bp, Homo sapiens
tcgtgcctcagcctcccgagtagctgggattacaggcatgcaccaccacacccagctaattttgtatttttagtagagacagtgtttctccaggttgatcaggctggtctcaaactcccgacctcaggtgatccacctgcctcagcctcccaaagtgctgggatgacagttgtgagccactgtgcccagctagcaactgtttttaaacattagttccaatgtagtgtacactgaaaacttttatgaaaggaatttcaaaaattaagataaaccattaaaaacgtaattactaagtactactactactacaatgatatttacataatagactgagttacatttcataaagacaatatatctgtataagaatttttaaacttccctgtctatataatagaagttttagagaaattttttaaacaccaaagaaaactgcaaaataagatcacttacctatttggcattctcaactgtctggaacagcaaggagccattatgattatgcatttggtttgtggggtgtcttg

SEQ ID NO: 268630 - DNA, 371 bp, Homo sapiens
agacctgccaaggggcaggcgccccgtagggtccacaggtggggaaaagcagaggtcacctcccagattatggcaggactgagcgcctgcagcaggggcagaagaagagcctgctcctggcgcgtcctccgttgcccagccatgccactgcgactgtgagcctctccaggctgcgttcctcgcgaggctgcatctgccctgggtgctcagcacacaggcgaacccagtttgcctcctcacctgcggtcctggtgcccgacacaaggcgaccctgtcctggccacgtctccatcttccctcttaggccttgctggttttgttactcagtaaagaccgggaggatgacgataccaaaaatgtcaaacgtgaag

SEQ ID NO: 268631 - DNA, 448 bp, Homo sapiens
gtgagttcagacaactgggggcatatttaggactagaggtagttcattttaacccgatagaacagtcatggaaaacagaggtattttgggactgtgttgtgtatagatccttgaattaagactaaatatggaaaatgatagatatttaaaaagttcagtaccattttcaagatgttttttaatgtttaattaaattgaaccaaaaatcaggaacctaaatttgtttctcctttatgagaatagatctttatcattgctctaatttagaacattgagaaacttttgcagtacctttcttgaatttgagtcttcttcgttgagcggcatttacttgaaaaataaagttctggctgggtacagtggctcatgcacgtaatcagatagatggattgcttgagcccaggagttgacctgtctgggtaagatggtgagaccttgtctctacaaa

SEQ ID NO: 268632 - DNA, 238 bp, Homo sapiens
gtctcagagaaaatcctataattaggtaattggcattgatacggttgacctaaaagggaattgtggagtagaggtttgcttgcaatttctttaaaatacctgagtctgggtaatttataaagaaaggagatttaattgtcgtagtgttctgcaggttgtacaggaggcatgatgccggcatctgcttggcttctggggaggcctcagggagcttttagtcatggtggaaggcaaaatg

SEQ ID NO: 268633 - DNA, 1025 bp, Homo sapiens
gtctgcggtgacttggctggcgggatcaagtgcagctgcttcaggctgaggtggcagatagtgagcgctggtggcggagttaaagtcaaagcaggagagtaattatgaatagcgcagcgggattctcacacctagaccgtcgcgagcgggttctcaagttaggggagagtttcgagaagcagccgcgctgcgccttccacactgtgcgctatgacttcaaacctgcttctattgacacttcttctgaaggataccttgaggttggtgaaggtgaacaggtgaccataactctgccaaatatagaaggttcaactccaccagtaactgttttcaaaggttcaaaaaaaccttacttaaaagaatgcattttgattattaaccatgatactggagaatgtcggctagaaaaactcagcagcaacatcactgtaaaaaaaacaagagttgaaggaagcagtaaaattcagtatcgtaaagaacaacagcaacaacaaatgtggaattcagccaggactcccaatcttgtaaaacattctccatctgaagataagatgtccccagcatctccaatagatgatatcgaaagagaactgaaggcagaagctagtctaatggaccagatgagtagttgtgatagttcatcagattccaaaagttcatcatcttcaagtagtgaggatagttctagtgactcagaagatgaagattgcaaatcctctacttctgatacagggaattgtgtctcaggacatcctaccatgacacagtacaggattcctgatatagatgccagtcataatagatttcgagacaacagtggccttctgatgaatactttaagaaatgatttgcagctgagtgaatcaggaagtgacagtgatgactgaagaaatatttagctataaataaaaatttatacagcatgtataatttattttgtattaacaataaaaattcctaagactgagggaaatatgtcttaacttttgatgataaaagaaattaaatttgattcagaaatttca

SEQ ID NO: 268634 - DNA, 829 bp, Homo sapiens
gtctgcggtgacttggctggcgggatcaagtgcagctgcttcaggctgaggtggcagatagtgagcgctggtggcggagttaaagtcaaagcaggagagtaattatgaatagcgcagcgggattctcacacctagaccgtcgcgagcgggttctcaagttaggggagagtttcgagaagcagccgcgctgcgccttccacactgtgcgctatgacttcaaacctgcttctattgacacttcttctgaaggataccttgaggttggtgaaggtgaacaggtgaccataactctgccaaatatagaaagttgaaggaagcagtaaaattcagtatcgtaaagaacaacagcaacaacaaatgtggaattcagccaggactcccaatcttgtaaaacattctccatctgaagataagatgtccccagcatctccaatagatgatatcgaaagagaactgaaggcagaagctagtctaatggaccagatgagtagttgtgatagttcatcagattccaaaagttcatcatcttcaagtagtgaggatagttctagtgactcagaagatgaagattgcaaatcctctacttctgatacagggaattgtgtctcaggacatcctaccatgacacagtacaggattcctgatatagatgccagtcataatagatttcgagacaacagtggccttctgatgaatactttaagaaatgatttgcagctgagtgaatcaggaagtgacagtgatgactgaagaaatatttagctataaataaaaatttatacagcatgtataatttattttgtattaacaataaaaattcctaagactg

SEQ ID NO: 268635 - DNA, 1086 bp, Homo sapiens
gtctgcggtgacttggctggcgggatcaagtgcagctgcttcaggctgaggtggcagatagtgagcgctggtggcggagttaaagtcaaagcaggagagtaattatgaatagcgcagcgggattctcacacctagaccgtcgcgagcgggttctcaagttaggggagagtttcgagaagcagccgcgctgcgccttccacactgtgcgctaattgtagagcgggaaggaaacttcaagatcactgaattataacttctcatttttctgtggtaaaactagctccccacgatgagatggtgctgtgctggctctgcagtttctctctcttcagtcccattttccggaagtgtgatatgcgtctttatctggtttttccatgcctttttctcaaatagtatctactctctccttttctcttccttctcaggagcaattctgcctgtctgatataagacttcaggcaaacccggatgtgaatcctggtctccaccacctatatatataatgtgactttgggaacattctctaagctctcaacctcagttttcttatggctaaaagataatagtaatatttacatttcatggtttgtgtaaggattaaataagatagcataaacaacctggaacaatatttgccacagggtagagaataaatagtagtcaccattaatgttgaagagttatattcatatgtgtacgaggggtgctaatgaatgtaatttagtcagactttgaaacagcatttatcagagtttagcaataaaaactatcaaaaagatagtctggcatgtggtaggaagggcatgggatgttctatcaacgataagctgaatgcttagcaacaggtgctttaccgggtagaagagtttcaataacaggacctactagaatcaattttgaattgggagtagtactagttttactatttatatccagataaggcaatgaattgtgaaatcctaagtttgtaaatgacaccacttttttgtgtccttaaatgatgagctaatgagcagtgtgggttttggagttggttgaattcattcaaatcccggaaaataaactgatgataataaatgtgga

SEQ ID NO: 268636 - DNA, 611 bp, Homo sapiens
gtctgcggtgacttggctggcgggatcaagtgcagctgcttcaggctgaggtggcagatagtgagcgctggtggcggagttaaagtcaaagcaggagagtaattatgaatagcgcagcgggattctcacacctagaccgtcgcgagcgggttctcaagttaggggagagtttcgagaagcagccgcgctgcgccttccacactgtgcgctgtgagtgaggaccatccggggatagagggggagcctcccgggatgggggtgaagaggcacaaacccctctgggttttgttcccacagtaccccttacactgttggagactacggggcggggaggggggaggcagcgcgatcctctaacctgctcggagtcttagggggtcggtggaaggaatcggagtagagcaaatgtgggtaaaccctggacagagagcgttgagaccagcagacaggaagggaaagtgtgaaaaaagtctgtagaggtgactgtggagacagacgtgacaggtggatgatgcaggggtggacaggaaaataataaggtgacaaatgggaagggactaaggaccgaatgccggggaacttgaatgccttgaggctggtggggcaatatt

SEQ ID NO: 268637 - DNA, 197 bp, Homo sapiens
ccagcctctacctttagctccagacttgtatatccaactgccagtaccatatatatttgggtatttactaggaaatgatttgcagctgagtgaatcaggaagtgacagtgatgactgaagaaatatttagctataaataaaaatttatacagcatgtataatttattttgtattaacaataaaaattcctaagactg

SEQ ID NO: 268638 - DNA, 1175 bp, Homo sapiens
gtctgcggtgacttggctggcgggatcaagtgcagctgcttcaggctgaggtggcagatagtgagcgctggtggcggagttaaagtcaaagcaggagagtaattatgaatagcgcagcgggattctcacacctagaccgtcgcgagcgggttctcaagttaggggagagtttcgagaagcagccgcgctgcgccttccacactgtgcgctagctccccacgatgagatggtgctgtgctggctctgcagtttctctctcttcagtcccattttccggaagtgtgatatgcgtctttatctggtttttccatgcctttttctcaaatagtatctactctctccttttctcttccttctcagatgacttcaaacctgcttctattgacacttcttctgaaggataccttgaggttggtgaaggtgaacaggtgaccataactctgccaaatatagaaggttcaactccaccagtaactgttttcaaaggttcaaaaaaaccttacttaaaagaatgcattttgattattaaccatgatactggagaatgtcggctagaaaaactcagcagcaacatcactgtaaaaaaaacaagagttgaaggaagcagtaaaattcagtatcgtaaagaacaacagcaacaacaaatgtggaattcagccaggactcccaatcttgtaaaacattctccatctgaagataagatgtccccagcatctccaatagatgatatcgaaagagaactgaaggcagaagctagtctaatggaccagatgagtagttgtgatagttcatcagattccaaaagttcatcatcttcaagtagtgaggatagttctagtgactcagaagatgaagattgcaaatcctctacttctgatacagggaattgtgtctcaggacatcctaccatgacacagtacaggattcctgatatagatgccagtcataatagatttcgagacaacagtggccttctgatgaatactttaagaaatgatttgcagctgagtgaatcaggaagtgacagtgatgactgaagaaatatttagctataaataaaaatttatacagcatgtataatttattttgtattaacaataaaaattcctaagactgagggaaatatgtcttaacttttgatgataaaagaaattaaatttgattcagaaatttca

SEQ ID NO: 268639 - DNA, 888 bp, Homo sapiens
gtctgcggtgacttggctggcgggatcaagtgcagctgcttcaggctgaggtggcagatagtgagcgctggtggcggagttaaagtcaaagcaggagagtaattatgaatagcgcagcgggattctcacacctagaccgtcgcgagcgggttctcaagttaggggagagtttcgagaagcagccgcgctgcgccttccacactgtgcgctatgacttcaaacctgcttctattgacacttcttctgaaggataccttgaggttggtgaaggtgaacaggtgaccataactctgccaaatatagaaagttgaaggaagcagtaaaattcagtatcgtaaagaacaacagcaacaacaaatgtggaattcagccaggactcccaatcttgtaaaacattctccatctgaagataagatgtccccagcatctccaatagatgatatcgaaagagaactgaaggcagaagctagtctaatggaccagatgagtagttgtgatagttcatcagattccaaaagttcatcatcttcaagtagtgaggatagttctagtgactcagaagatgaagattgcaaatcctctacttctgatacagggaattgtgtctcaggacatcctaccatgacacagtacaggattcctgatatagatgccagtcataatagatttcgagacaacagtggccttctgatgaatactttaagaaatgatttgcagctgagtgaatcaggaagtgacagtgatgactgaagaaatatttagctataaataaaaatttatacagcatgtataatttattttgtattaacaataaaaattcctaagactgagggaaatatgtcttaacttttgatgataaaagaaattaaatttgattcagaaatttca

SEQ ID NO: 268640 - DNA, 1243 bp, Homo sapiens
gtctgcggtgacttggctggcgggatcaagtgcagctgcttcaggctgaggtggcagatagtgagcgctggtggcggagttaaagtcaaagcaggagagtaattatgaatagcgcagcgggattctcacacctagaccgtcgcgagcgggttctcaagttaggggagagtttcgagaagcagccgcgctgcgccttccacactgtgcgctaattgtagagcgggaaggaaacttcaagatcactgaattataacttctcatttttctgtggtaaaactagctccccacgatgagatggtgctgtgctggctctgcagtttctctctcttcagtcccattttccggaagtgtgatatgcgtctttatctggtttttccatgcctttttctcaaatagtatctactctctccttttctcttccttctcagatgacttcaaacctgcttctattgacacttcttctgaaggataccttgaggttggtgaaggtgaacaggtgaccataactctgccaaatatagaaggttcaactccaccagtaactgttttcaaaggttcaaaaaaaccttacttaaaagaatgcattttgattattaaccatgatactggagaatgtcggctagaaaaactcagcagcaacatcactgtaaaaaaaacaagagttgaaggaagcagtaaaattcagtatcgtaaagaacaacagcaacaacaaatgtggaattcagccaggactcccaatcttgtaaaacattctccatctgaagataagatgtccccagcatctccaatagatgatatcgaaagagaactgaaggcagaagctagtctaatggaccagatgagtagttgtgatagttcatcagattccaaaagttcatcatcttcaagtagtgaggatagttctagtgactcagaagatgaagattgcaaatcctctacttctgatacagggaattgtgtctcaggacatcctaccatgacacagtacaggattcctgatatagatgccagtcataatagatttcgagacaacagtggccttctgatgaatactttaagaaatgatttgcagctgagtgaatcaggaagtgacagtgatgactgaagaaatatttagctataaataaaaatttatacagcatgtataatttattttgtattaacaataaaaattcctaagactgagggaaatatgtcttaacttttgatgataaaagaaattaaatttgattcagaaatttca

SEQ ID NO: 268641 - DNA, 988 bp, Homo sapiens
  misc_feature (9)..(10): n is a, c, g, or t
  misc_feature (13)..(13): n is a, c, g, or t
  misc_feature (15)..(16): n is a, c, g, or t
  misc_feature (45)..(45): n is a, c, g, or t
  misc_feature (50)..(50): n is a, c, g, or t
  misc_feature (54)..(54): n is a, c, g, or t
  misc_feature (58)..(58): n is a, c, g, or t
cgttcgacnnaananncattttttccctggctttggtgattcagncctgncttntcanaaagtaattatgaatagcgcagcgggattctcacacctagaccgtcgcgagcgggttctcaagttaggggagagtttcgagaagcagccgcgctgcgccttccacactgtgcgctatgacttcaaacctgcttctattgacacttcttctgaaggataccttgaggttggtgaaggtgaacaggtgaccataactctgccaaatatagaaggttcaactccaccagtaactgttttcaaaggttcaaaaaaaccttacttaaaagaatgcattttgattattaaccatgatactggagaatgtcggctagaaaaactcagcagcaacatcactgtaaaaaaaacaagagttgaaggaagcagtaaaattcagtatcgtaaagaacaacagcaacaacaaatgtggaattcagccaggactcccaatcttgtaaaacattctccatctgaagataagatgtccccagcatctccaatagatgatatcgaaagagaactgaaggcagaagctagtctaatggaccagatgagtagttgtgatagttcatcagattccaaaagttcatcatcttcaagtagtgaggatagttctagtgactcagaagatgaagattgcaaatcctctacttctgatacagggaattgtgtctcaggacatcctaccatgacacagtacaggattcctgatatagatgccagtcataatagatttcgagacaacagtggccttctgatgaatactttaagaaatgatttgcagctgagtgaatcaggaagtgacagtgatgactgaagaaatatttagctataaataaaaatttatacagcatgtataatttattttgtattaacaataaaaattcctaagactgagggaaatatgtcttaacttttgatgataaaagaaattaaatttgattcagaaatttca

SEQ ID NO: 268642 - DNA, 889 bp, Homo sapiens
aggagtttatatgtctcgatcgttaggggagagtttcgagaagcagccgcgctgcgccttccacactgtgcgctatgacttcaaacctgcttctattgacacttcttctgaaggataccttgaggttggtgaaggtgaacaggtgaccataactctgccaaatatagaaggttcaactccaccagtaactgttttcaaaggttcaaaaaaaccttacttaaaagaatgcattttgattattaaccatgatactggagaatgtcggctagaaaaactcagcagcaacatcactgtaaaaaaaacaagagttgaaggaagcagtaaaattcagtatcgtaaagaacaacagcaacaacaaatgtggaattcagccaggactcccaatcttgtaaaacattctccatctgaagataagatgtccccagcatctccaatagatgatatcgaaagagaactgaaggcagaagctagtctaatggaccagatgagtagttgtgatagttcatcagattccaaaagttcatcatcttcaagtagtgaggatagttctagtgactcagaagatgaagattgcaaatcctctacttctgatacagggaattgtgtctcaggacatcctaccatgacacagtacaggattcctgatatagatgccagtcataatagatttcgagacaacagtggccttctgatgaatactttaagaaatgatttgcagctgagtgaatcaggaagtgacagtgatgactgaagaaatatttagctataaataaaaatttatacagcatgtataatttattttgtattaacaataaaaattcctaagactgagggaaatatgtcttaacttttgatgataaaagaaattaaatttgattcagaaatttca

SEQ ID NO: 268643 - DNA, 763 bp, Homo sapiens
agtgctctagaggatcttatatgtctcgatccgttaggggagagtttcgagaagcagccgcgctgcgccttccacactgtgcgctatgacttcaaacctgcttctattgacacttcttctgaaggataccttgaggttggtgaaggtgaacaggtgaccataactctgccaaatatagaaagttgaaggaagcagtaaaattcagtatcgtaaagaacaacagcaacaacaaatgtggaattcagccaggactcccaatcttgtaaaacattctccatctgaagataagatgtccccagcatctccaatagatgatatcgaaagagaactgaaggcagaagctagtctaatggaccagatgagtagttgtgatagttcatcagattccaaaagttcatcatcttcaagtagtgaggatagttctagtgactcagaagatgaagattgcaaatcctctacttctgatacagggaattgtgtctcaggacatcctaccatgacacagtacaggattcctgatatagatgccagtcataatagatttcgagacaacagtggccttctgatgaatactttaagaaatgatttgcagctgagtgaatcaggaagtgacagtgatgactgaagaaatatttagctataaataaaaatttatacagcatgtataatttattttgtattaacaataaaaattcctaagactgagggaaatatgtcttaacttttgatgataaaagaaattaaatttgattcagaaatttca

SEQ ID NO: 268644 - DNA, 1533 bp, Homo sapiens
gtctgcggtgacttggctggcgggatcaagtgcagctgcttcaggctgaggtggcagatagtgagcgctggtggcggagttaaagtcaaagcaggagagtaattatgaatagcgcagcgggattctcacacctagaccgtcgcgagcgggttctcaagttaggggagagtttcgagaagcagccgcgctgcgccttccacactgtgcgctatgacttcaaacctgcttctattgacacttcttctgaaggataccttgaggttggtgaaggtgaacaggtgaccataactctgccaaatatagaaggttcaactccaccagtaactgttttcaaaggttcaaaaaaaccttacttaaaagaatgcattttgattattaaccatgatactggagaatgtcggctagaaaaactcagcagcaacatcactgtaaaaaaaacaagagttgaaggaagcagtaaaattcagtatcgtaaagaacaacagcaacaacaaatgtggaattcagccaggactcccaatcttgtaaaacattctccatctgaagataagatgtccccagcatctccaatagatgatatcgaaagagaactgaaggcagaagctagtctaatggaccagatgagtagttgtgatagttcatcagattccaaaagttcatcatcttcaagtagtgaggatagttctagtgactcagaagatgaagattgcaaatcctctacttctgatacagggaattgtgtctcaggacatcctaccatgacacagtacaggattcctgatatagatgccagtcataatagatttcgagacaacagtggccttctgatgaatactttaagaaatgatttgcagctgagtgaatcaggaagtgacagtgatgactgaagaaatatttagctataaataaaaatttatacagcatgtataatttattttgtattaacaataaaaattcctaagactgagggaaatatgtcttaacttttgatgataaaagaaattaaatttgattcagaaatttcaacacaacaacaaaaaacaaaaaaaaaaacaaaacaaaaaaaaaaaaccacacaaaacaacaacaaaagaaccaagaagaaaacaacaaaagacaaggagcacccaaaacacacgcagacagaccagagaaaggggggcgaacacaagacgccccccacccccggcgccccgcctccgcgcccccggcccaccaccgcggccgcccctgatcagaaatcgcaaaccccacatcagacgaaccaggaaccaactactagaagacaaacattaacaacgctgaagaggagcacgcacactcacgctgcccggcgacgccaaacccatcagagaagccggcagaccaatacgaagaccagcatactaaaacaggaaacgaaacaacctaccgccacactcaaaaccagcgcagtagcttaccatcaagcaccaaaggacagacgcaggtataagcacagaccacaaggtccggagagaacgcgctaatacacagctgaacctgaagatacaa

SEQ ID NO: 268645 - DNA, 1079 bp, Homo sapiens
  misc_feature (1079)..(1079): n is a, c, g, or t
gtctgcggtgacttggctggcgggatcaagtgcagctgcttcaggctgaggtggcagatagtgagcgctggtggcggagttaaagtcaaagcaggagagtaattatgaatagcgcagcgggattctcacacctagaccgtcgcgagcgggttctcaagttaggggagagtttcgagaagcagccgcgctgcgccttccacactgtgcgctatgacttcaaacctgcttctattgacacttcttctgaaggataccttgaggttggtgaaggtgaacaggtgaccataactctgccaaatatagaaggttcaactccaccagtaactgttttcaaaggttcaaaaaaaccttacttaaaagaatgcattttgattattaaccatgatactggagaatgtcggctagaaaaactcagcagcaacatcactgtaaaaaaaacaagagttgaaggaagcagtaaaattcagtatcgtaaagaacaacagcaacaacaaatgtggaattcagccaggactcccaatcttgtaaaacattctccatctgaagataagatgtccccagcatctccaatagatgatatcgaaagagaactgaaggcagaagctagtctaatggaccagatgagtagttgtgatagttcatcagattccaaaagttcatcatcttcaagtagtgaggatagttctagtgactcagaagatgaagattgcaaatcctctacttctgatacagggaattgtgtctcaggacatcctaccatgacacagtacaggattcctgatatagatgccagtcataatagatttcgagacaacagtggccttctgatgaatactttaagaaatgatttgcagctgagtgaatcaggaagtgacagtgatgactgaagaaatatttagctataaataaaaatttatacagcatgtataatttattttgtattaacaataaaaattcctaagactgagggaaatatgtcttaacttttgatgataaaagaaattaaatttgattcagaaatttcaaaaaaagaaaaaaaatggcctcgttggactcagcggtggaggtttgcgcaaagn

SEQ ID NO: 268646 - DNA, 980 bp, Homo sapiens
gtctgcggtgacttggctggcgggatcaagtgcagctgcttcaggctgaggtggcagatagtgagcgctggtggcggagttaaagtcaaagcaggagagtaattatgaatagcgcagcgggattctcacacctagaccgtcgcgagcgggttctcaagttaggggagagtttcgagaagcagccgcgctgcgccttccacactgtgcgctatgacttcaaacctgcttctattgacacttcttctgaaggataccttgaggttggtgaaggtgaacaggtgaccataactctgccaaatatagaaggttcaactccaccagtaactgttttcaaaggttcaaaaaaaccttacttaaaagaatgcattttgattattaaccatgatactggagaatgtcggctagaaaaactcagcagcaacatcactgtaaaaaaaacaagagttgaaggaagcagtaaaattcagtatcgtaaagaacaacagcaacaacaaatgtggaattcagccaggactcccaatcttgtaaaacattctccatctgaagataagatgtccccagcatctccaatagatgatatcgaaagagaactgaaggcagaagctagtctaatggaccagatgagtagttgtgatagttcatcagattccaaagatgaagattgcaaatcctctacttctgatacagggaattgtgtctcaggacatcctaccatgacacagtacaggattcctgatatagatgccagtcataatagatttcgagacaacagtggccttctgatgaatactttaagaaatgatttgcagctgagtgaatcaggaagtgacagtgatgactgaagaaatatttagctataaataaaaatttatacagcatgtataatttattttgtattaacaataaaaattcctaagactgagggaaatatgtcttaacttttgatgataaaagaaattaaatttgattcagaaatttca

SEQ ID NO: 268647 - DNA, 505 bp, Homo sapiens
  misc_feature (353)..(353): n is a, c, g, or t
  misc_feature (366)..(366): n is a, c, g, or t
  misc_feature (438)..(438): n is a, c, g, or t
  misc_feature (454)..(454): n is a, c, g, or t
ggaaaagatcaacaaattggcaactgtttagctagactgaccaagaaaaaaaaaagagaagactcagattaatacctcagcatggaagagagagcgagactctgtctcaaaacaacaacaacaaaaagatacaagcaaaacaaatcaagaaacgtatacaaaggattatacaccatgaccaagtgggatttatcccaggaatacaaggttggtttaatatttgaaaatcaatcgatgaaacacacaaaattgagagaataaagatgagaagcttaatgtagggtaaaatgtctgaagctctaagtgaaactgttgataagctggggtttctactcttggaacgctagagaggnagagacacttagntacttagtaacagcaaaaagcccggccaaaaagtagaactcaagtgctttagaaactctgtgggcaggggtnaacgtgactactctantttctctttcgtctgtgggcacttagtttgatcagttgttagcacctttag

SEQ ID NO: 268648 - DNA, 991 bp, Homo sapiens
ttgttgcccaggctggagtgtagtgacacgatctcagctcactgcaacctctgtctcctggattcaggcaattctcctgcctcagcctcctgagtagctgggattacaggcgcctgccaccatgcccagctaatttttgtacttttagtagagacagggttttgccatgttggccaggctggtctcgaactcctggcctcaggtgatccgctcaccttggcctcccaaagtgttgggattataggcgtgagccattgtgcctggttcttttgcccttttaactgccttctagaaaaatactatttttttcagcattttgattatccatagaatgatggtaactaaatccctatttccataatatatattaaaaatattaaatattaaataatatttaaatagtttttcttttttactttatgatgtattctagaaatcttttttatctcagtacagtaattatagtatttccctattttctttcttgtttcttttctctttagcagccagtagacagagtaatgggtcccaatgacttctaggtcttaaaacccagaacttgtaaatatgttaccttgcatggtgaaaggaactttgcagatgtgattgaaattaaggagattatccttaattaattggacagattatccattgggcccaatgttatctcaaaggtgcttataagggaaaaagggaggcaggagggttgaagccacaggaaatgtgttgacggaagcagaggacagactctcctagagccttcagaaggaacacagcaatgccagcaccttgattttagccctttaagacccatttctgacttctgagctgaagaaccgtaggataataaatttgtgttgttttaagtcactaagtttgtggtaatttgttatagcaccagtaggaaacttaatatggtcatataacatttcaatgtttggatagatcatggtttatgtaatcaatcgtctgtagatgataatggattctc

SEQ ID NO: 268649 - DNA, 410 bp, Homo sapiens
ctggtcttgaactcctgacctcaagtgatccacccgccttggcctcccaaagtgctgggattacaggtgtgagccaccgcgcctggcctcttaacagttctaatgtatctttgcagagctatttggagcatatgctgtgtatatgtgcgtgtgtgtgtgacacaaatgatagcacacgctctacactgttcagcacctgctattttcatgtcataatatacctgcctgtagatagtcaacatagttttccatcgtatggtgtgtcacaatttatttaccattcccctcctagtggatatttatgtatgtccgccttttattactacaaacaatgctaattacaggaaatatcttggtacatatatttgcagacatatgtgtgtgtgtgaaataaatttataagtatggca

SEQ ID NO: 268650 - DNA, 340 bp, Homo sapiens
acatgtgtggggacgcactggctgcatggtgcccgcttcctcttccccgagccgtgctctccagcgctgtgtctcagcctcccctccaggagcgctcacttcctctcagctctgggcccctgtggcctctgctttgccagctgcccagccgtgatgactagtttccactccagtgctatctctgtctttattgttctttttgacctctaggtgcacatgctgtcgtgccccagtgttccagcatcgctgactgggagagggaagaagaggtgagggagagggaagaagaggtgaagggctttcttagaacactgacattgaaattgcagctgaatcttta

SEQ ID NO: 268651 - DNA, 519 bp, Homo sapiens
ctggttttctgagtggtccaggactttactgacttcacagaacaggatgttaactgatgagtgcttgctgatgtatgttctgttccataaataactgtccacgtggcaggatttggtctcacttccacatcacacaatcgtcagcttatggaaaagccttaggccccacccacctcacggcttctttggcatctgtttttatcatccccaaaagaactttaggtttggaatgtgactagactgagttagatcaggttgcaatgataatgagaaagccattaagtcactggctcctccatgaagctcctaaacccctgtgtcccatctgaaaaaagctcgggtgctctaaatgcaaacccctcagctgtcactctgcttggtgatgtaagagttttttgtttgttttccaaatacatgactctcctcccaagattgtattagatgagaacgttctacccctcatgtcctgcccataatacatgcctacctcaatttcttgaataaatgaatgaatgtctg

SEQ ID NO: 268652 - DNA, 266 bp, Homo sapiens
cccaggcttgctaattaaaaaaaaaaattttgtagagatgggatctccctatgttgctcaggcttgaactcctgaactcaagtgatctgcttgacttgacctcccaaagtgctgggattataggtgtgagccaccacatccagccccagtgggaaattttgtttgcagttcttaagcatcttttctccatgaactctacttcataaattttgtgtttttaagggtctcaagatttttgtttgaataaacaaaactatgtgtttgta

SEQ ID NO: 268653 - DNA, 597 bp, Homo sapiens
ataaagacatacttgagactgggaagaaaaagaagtttagttggacttacagttccacatggctggggaggcctcagaatcatcatgggaggtgaaaggcacttcttacatggcagcagcaagagacaatgaggaagtagcaaagcggaaaccccagataaacccattagatctcatgagacttattcactatcacaagaatagcatgggaaagactggcccccataattcaatcacctcctcctgggtccttcccacaacatgtgagaattctggaagctacaattcaagttgagatttggtggggacacagccaaaccatatcagatatggatacataaaagtatagatatgtgtgtatacatcgtttagtacagatacatctatttcctaggtctgtctaccaagagggccaagaagcaatgatacactattggtaaagagcagacccaatgcctagattgtactttctaaataccactctccaataaaaggactcagcattctttgggaaaatggctaattctagggctgggcagggaagatacaagacagaccttgagtgtcttctagtgtcaaaaaatgaggaagtgctca

SEQ ID NO: 268654 - DNA, 296 bp, Homo sapiens
aattatcacagagattcagggagatggggaaagcactgtgttgattaccatacagatgtctatgatgaccactactggggcgtgttccagaagttcatttgacaattgattttttggaaacctctaatgagttttcacatagtatctatgttaaaaatcaaggctctgagcctcgcatgggggcacacacctgtaatcccagctactcaggaagctgaggtgggaggatcacttgagtccaggagctcaaggccagcctgggcaacaaagcaagatccagtctcaaaaaaaaaaaa

SEQ ID NO: 268655 - DNA, 344 bp, Homo sapiens
ttcaacagcacagtaggatgactatagtcaacaaaaatatttgtatttcaaaatagctagaagatttgaaatgtttccagtgcaaaaaaatgataaatgttcaaaatgatggatgtaacaaaatatcacatgtaccccataaatatatacaaatattatatgtcaataaaaagacaggaaagaaattattaccaaagtataacatattattacaaatttagaattttttaaccatttggcacccaagtcattctctacggtcaatataattatattggaaatgtcactgtaaaccatcatgaactactgccaataaaacttttatataaagagaagaaaccaca

SEQ ID NO: 268656 - DNA, 386 bp, Homo sapiens
tcatctaatcacttctctagtcctcatttcagttttccaacgaaaagacagaggaatatatttaagaaaataccaggaaccgtaagacaaatttaaaatatttacaatctattgacaactgatttaatcgctttaaaaatgccataaaggggaaagaaatgttgaagtattagagaaaactaggagtgtctttacatacgaaggatacaagggcatctaggacatgatatgcatacacagttagtactttctttgcttttttatattgattcattatatagcaccttaagtatatagtctgactaaagttatttgatcaatggtaagaactcatttaatcattctaacttcagaaatcctaaaattattctggtggtttctttcac

SEQ ID NO: 268657 - DNA, 443 bp, Homo sapiens
atgggtcttccagagagcagacattaatatattagaagccagaggcccagggtattgattgctttgagctgtatcttccaaatgtgcaccagaatcaccaaaggaaagaggtaacaactttttccttaccactgtaactactggaggtgagtcacttggtatttctaaaaccacaggtatactccagatagccttgaaagacacacccttgttggtgaaaatacgttaactaaagggaagcaagtatactaaggtgctcagtagctcaattttagtatagtttgtttatacatttttgagtttttattttccctgaggcttatgctgtagtgatttagggactctatagttcaaataaattctgtaacacagacagctgacacagaggactagaatgttaaagtcctgctcattccttgcctatttccagttaacactcatat

SEQ ID NO: 268658 - DNA, 892 bp, Homo sapiens
tctctctctctctctctctctctctctctctctctctctctgtgtctctctcgtgccgaattcggggcgagccccagcggggcctcaccaccccctttatcactcttctccaaaggatatcttgcgccctcctgtgtgtctatgtgaggtttctctctgcatgcagatttagagcagctttttctatttcagaatactttttaggtattaatcatgcttgaaatctcatggactcagtcgcgatttgggaattttattatattttattttggggggaagggagctaatttcctgtgggaattttatggcactgttataagcaaacactcccataggatggatatgggatatatcctctgtgcgttttcatttcccatcgcaagttaggtggacagcatctcccaagccttcaggatttccgcaggagcctactaggccctcctcttgtcaatgagcctggagtgactccttgcactgcatgtggtgggaaaaatatccccggataagctggggcatgtcataaagtgtgtggaagggatttttataatattggaaaacatataatgcactctgaacagctttaaatgtgtgagaagagaaaaagagatgtgtctgtaagaggggaaatgaagttagctccaaaaacaaagccagaagtataaaaaagcaattaaaaagtctctcacatttttgcattttctgtatcatgagatcacttgtgattgagccatactttttaaataatgggcaacattttctccattgtcttgcttgagcattaactaccatttctgtgttactcttgtgaggttatttttggtgtgatttgatcctagtcagagcaaaaataaaatgtcagttctacaatgatgtactctataatgtagaaagc

SEQ ID NO: 268659 - DNA, 495 bp, Homo sapiens
ctcacgtgcttgctggccattgtgctttaaatcgttttttccagcggacagctgtgactgcagttttcaaatgtgctctggcctccaaggaccaggggggcggtggggggcgggggtgtcctctgtataaaaagtgctgtcctgcgagcttcccgacggacactttggggcatctgagcgattcccggggagggcagctctgccttcctcaggctaccactgcagccaccgacggacattctcaccagcaatcaaccaaaaaacatcagagtctctgtgaacttggctgcgatgataagaaccaaatgttttctaatctaagacttgtatgcagaacacaggaaattgcaattaggaacaccctacaaaattgaacaacagtattttctaaaaatattttttacatcactttaaataatttacagaaagctacagaaatcatatttaccaggacacatctgttaaataaaagcattgtttcatgttggtgtacgt

SEQ ID NO: 268660 - DNA, 426 bp, Homo sapiens
ggtggttggcagggccagaagcaggatattgtggggttagtgtttaatttgtatagagtttcagttggaaaatgaccgtgttctgtggatggattgtggtgatggttgcactacaatatgaatgtaattaatgccactgaactgtacacttaaaattgattaaagtggtaaatgttatgtatatttcaccaccataatagaaaaaaagaatatgttcatcaactaattcataaataagaaacaagaaaagttatttttataacaaagaagtgaaccaggtaatacttggaaagtataggttatagcaagaagacagcaatgacactagacctaaaaaatattcaaaactgtgctactaaaactgtgttgcctgaatcctaatatggggcagagacttagagctctttcattctgccctctccccat

SEQ ID NO: 268661 - DNA, 1143 bp, Homo sapiens
ggtttccgggtgagggttgggctccttggtaccatgtgggaagcgctgtgaagagttgttgccttccaagatatacccaaattcccagttccagcccgtgtcattaaaactccgctggcgtgaaagatgacgtccttagcccagcagctgcaacgactcgccctccctcaaagtgatgccagcctcttatctagagatgaagttgcttctttgttatttgaccctaaggaagcggccacaatcgacagggacaccgccttcgccattggatgtactggcctggaagagttgcttggaattgatccttcctttgagcagtttgaagcaccgttgttcagtcagctagcaaaaaccttggagcgaagtgttcagaccaaagcagtaaacaaacagttggatgaaaacatttcattattccttattcacttgtcgccttacttcctgcttaagccagcacagaagtgtctggagtggttgattcacaggttccatatacatctctataatcaagatagcctcattgcttgtgttctgccatacacgagacaagaatatttgtgcgagtcatacagcttctaaaaattaataattcaaagcacagatggttctggttgttgccagttaagcaatctggagtgccgttagctaaaggaactttgattacccactgctacaaagatcttggattcatggatttcatttgcagtttggtgacaaaatctgtgaaggtttttgctgagtacccgggcagctcagctcagttgagggtgctcttggctttctatgcttctaccatagtgtcggcgctggtagctgcagaggacgtatcagacaatatcatcgccaaactatttccctatatccaaaagggattgaaatcatctttaccagattacagagctgcaacatacatgataatatgtcagatttctgtgaaagtgaccatggaaaatacctttgtgaattcattggcatcacagatcatcaaaacattgaccaagattccctctttgatcaaggatgggttaagttgcttgatagtgctcctgcagagacagaagccagagagccttgggaaaaagtatgtacaattgaattgagaaatggtgctagtcagaggtgaataaaattattttgaataat

SEQ ID NO: 268662 - DNA, 496 bp, Homo sapiens
ggcgtgaaagatgacgtccttagcccagcagctgcaacgactcgccctccctcaaagtgatgccagcctcttatctagagatgaagttgcttctttgttatttgaccctaaggaagcggccacaatcgacagggacaccgccttcgccattggtgagccatcttttaacttagaaaagctcttggaagcgtttgttttctggatgttactgttttttttttttccccttgttttctcttctgtcccgtcctcttccttagcagtttctagcatgttgatgtatatttttaagggaaagagaacataacagtcaggtgcttggtgcttgaaatgtttatgagtagaggtatctggatttcacagatgaagaaacaaaattagagaggtcaactaatatgtcaaagagaagaacagctaaaagggggatggaggcagtgactggggtgacggagaagtcctctcagaggactggcctagttattgtaggggatatcca

SEQ ID NO: 268663 - DNA, 1684 bp, Homo sapiens
ggtttccgggtgagggttgggctccttggtaccatgtgggaagcgctgtgaagagttgttgccttccaagatatacccaaattcccagttccagcccgtgtcattaaaactccgctggcgtgaaagatgacgtccttagcccagcagctgcaacgactcgccctccctcaaagtgatgccagcctcttatctagagatgaagttgcttctttgttatttgaccctaaggaagcggccacaatcgacagggacaccgccttcgccattggatgtactggcctggaagagttgcttggaattgatccttcctttgagcagtttgaagcaccgttgttcagtcagctagcaaaaaccttggagcgaagtgttcagaccaaagcagtaaacaaacagttggatgaaaacatttcattattccttattcacttgtcgccttacttcctgcttaagccagcacagaagtgtctggagtggttgattcacaggttccatatacatctctataatcaagatagcctcattgcttgtgttctgccatacacgagacaagaatatttgtgcgagtcatacagcttctaaaaattaataattcaaagcacagatggttctggttgttgccagttaagcaatctggagtgccgttagctaaaggaactttgattacccactgctacaaagatcttggattcatggatttcatttgcagtttggtgacaaaatctgtgaaggtttttgctgagtacccgggcagctcagctcagttgagggtgctcttggctttctatgcttctaccatagtgtcggcgctggtagctgcagaggacgtatcagacaatatcatcgccaaactatttccctatatccaaaagggattgaaatcatctttaccagattacagagctgcaacatacatgataatatgtcagatttctgtgaaagtgaccatggaaaatacctttgtgaattcattggcatcacagatcatcaaaacattgaccaagattccctctttgatcaaggatgggttaagttgcttgatagtgctcctgcagagacagaagccagagagccttgggaaaaagccattccctcacttatgtaatgttcctgatcttattacaatacttcatgggatttctgaaacttacgatgtcagtcctcttctgcattacatgcttccccatctggtcgtctccatcattcatcatgttacaggagaagaaactgaaggaatggatggtcaaatctacaagagacacttagaagctatacttacaaaaatatcactgaagaacaacttagaccatttgttggctagccttctatttgaagagtatatttcatatagttcacaggaagaaatggattctaataaagtgtctttgcttaatgaacaatttcttccactcattaggcttttagaaagcaaataccccagaacattagatgttgtattagaggaacacttaaaggaaattgcagatctgaaaaaacaagagcttttccatcagtttgtttctctttctacaagtggaggaaagtatcagtttttagcagattctgatacttctttgatgctcagcctgaatcatccacttgctcctgtgagaattctggccatgaatcatttgaaaaagatcatgaaaacatcaaaggtttgtttcagatcgcttttttatatggt

SEQ ID NO: 268664 - DNA, 401 bp, Homo sapiens
agctttgtcacacactgccgctggagtgggacttggcgtggcttttctggagggcgacctacatcaaggggcatgcatgcgccctttgagctacagatttctcagctgggaatgaattatgaatgtcctttagccttggccgagagggtgtacagctctgcagtgttcctgtcggaaactggaaatagcctgagtgttctccattatgaattagtgcaaatgaaacacggctgagccttacggtggcataggatgcagtcattagaatacaacattcgaaaaaggaagagctggtcgtttggtaaaagcttgtaacagataaagttctaaatggcatcaaaagaacagacttagtaaatctcattttggttaaagatgagaaataaaaataatacgcctga

SEQ ID NO: 268665 - DNA, 484 bp, Homo sapiens
gacgatggcagcaccccgtttctttgttgttgtgattttttttgttttgctgcagactacaggctcctccaacacaagacctatcatcccgaattctgttgccacagatcttggggtccctccacacccttaaaattcatcattgaattattgagaggtttctcagcatcaaaatattgacagaaagaaaacagtatctgtttatgacaggtgtgctctgagtgggcaaagctgttatttcacaggttcagttgtgaagaaatgatctgtgatgagaacggtttgggaaagctaaggtgaaagaatgatttttgacatctggagatccctatttcgttgtcatgagtgagtcacactcacagtagaccacagcaaagccaatctccttagatcccatggccccttattaggaatatctgccggcttgaaggagaaagatgtcttttgattttagcatgcaaagacacagtagcaaggacaactt

SEQ ID NO: 268666 - DNA, 193 bp, Homo sapiens
gagtctcatgagatctgatggtttgaaaaacaggagtttccctgcccaagctctccttgcccgctcccatccacgttagatgtgactttctcctctttgccttcccccataattgcaaggcctccccagccatgtgaaattgtaagtccagtaaacctctttcttttgtaaattgcccagtctcaggtatgtc

SEQ ID NO: 268667 - DNA, 1079 bp, Homo sapiens
  misc_feature (1075)..(1075): n is a, c, g, or t
  misc_feature (1079)..(1079): n is a, c, g, or t
ggtaaaaattctcaaacactgcatacacagagaggataggagacatggcatttgcggataggaaatgaggaaattttgcgataggacagctgtagatcctgttgcggacacccagccgggcagttggaggcggggtcagtccagaagccttcagataacaccagggtgtagtcctggcgagaaatcttcagttgcttcaggaccttttctagccccacgcgacggctaggtcctccgtgagagaaaactggttcgagaagcatggccaacattcccaatgatccgtgagtattgagaagttctccatgttctcccaagcaagcctaacatctgagacttcccgcatggcggccgccctattagcatttaggtggctataggatgcccattgtttgaacttaagatggaggccgagagcctccaaatgaaaggacagagttgaaagttaagttctgcgcctgtactcacccctctgatgaatataccttctgttctgattctgatcctgggcgagtccccacaatgaagtggtgttgtctgtctggggaaataactgaggttcgttgtctcgcgctaaggagaacaaagatgtgggcacacagggaatgggtttaagagcagaaagtttaataggtgaaagaaacaagaggaaagctcccctgtgcagagggagggggttccgaagggatctcccgggttgcggtgggaagcggctggttttatagagggcttgaggaggcagtatctgattacatagggcctagggattagttggaccacgtgtgccatttacatagtccacaaagaggctggcatcccaccctaatctttctcttattaggcagatgtggtttccacctggccggtgccatgacacccacacacatggcgacaaggagaagggagaagaaaacctatttgttgtatatacctggcttttggcacagctgccgggattcacctgtgcaagtttccagcttgcttatctatgcttgcagcttgatttttcaggctactttctgttagaaaagaaatgatttgggggctgctttctattaaaagaaaaaccttaccnaggn

SEQ ID NO: 268668 - DNA, 559 bp, Homo sapiens
ggctggagtgcatgtttcagaggcttgcccatacaacgcacatggtcaagtacagcctcagcaatttccctcctaacaattagtataagctagggctcttacttcgactttttaccttgttccatttttggtctcattttcttaaggcttcactgctcaatttgttcattttgtgaggcaagagcttaaagttcatccttaaaaatgcgtaggtgattcagttttttaattagaaaaaagcaaacactgctaatcccaaaccttttcaatggcagccttctaggggcacacattttaattccatcagtgggtcatcttattcattctcttataatcatcgtgggggcccatgctgtatttctgggcagtctctggagtctatgacactggattacagaggtctgtctctgttcattaagtgagtgttcagagaagacccactcatcctgtaagcacttagagacactctggagtttgatcctcatgagagggtgacctggcaaggccattttcctgtctgcttcccagatggtcacctcttctttgtctgcccgccttt

SEQ ID NO: 268669 - DNA, 621 bp, Homo sapiens
aaataggtactttcatctaaatattcccatgttttctgcgctctggtgtgctttacaccacgtattctctaccagttgtattctcttttctagtaatgttttcccaaaaaacttgattccagggtttagaaatgtgagtaaccctggcttcaaatatcttctatgatttgtaaaatcacattgcaggcatttttgtttaattaattgtgtatatatttgagcatatatttaccttttcccaacaaaccattgtaatatgtgcaaatacagggatataggaagtgccatagggaacagggaagaaacaacaaatacagaatgctcgagaattttgagaaccccgggatggatccatcaggatcaggaacatttctctcttttaatcatgcctgagttgccacatcatgagctgctccatcctttgatggggcccctctattagcccatttgttagaccgtgttcttttccttaactctatacctattttgtcacaaactgaccatttttgaaataagccttgtaaagcacatcatcacgatatctctgtggggttcctagtgtttattatttgtgtatttactatgtcatttgccatacatcattaaattttccatttattt

SEQ ID NO: 268670 - DNA, 387 bp, Homo sapiens
caaaattcccaaattcaggaaaagctttatgcacaaaaatgttcttcataacccagatgaccagaaaaacgcatcacaacctgctctcctgtgttatgggtgtgatcaccacgcaaagctgtgtcagggcaatgtgtgtaaaacatgaacatggcgcaatgtgcccagggctcatagtgtagctgtgtgaacatacagaatgaggggcaaggtgcatggttcatggacgatgtgcttggaggcaaggacgccacatgaacctacgtacttgcttggatgatggaacaaaatattgtcccctttgcttttctgaattttccaattgttctttgatgcaaagttttttttataacaaaaaattaaaaccttatgatgtcatcaatcaaa

SEQ ID NO: 268671 - DNA, 386 bp, Homo sapiens
ccagccctctttgttctctgtctagggtcatttcacttataatgattcatcttaatctttcaggttctggaaagcataggatacatcaggcaggaggtaccccatttctaagcctagagcggagaagaaatcctttctggatgaccacaccatggggttgaaaaagcagagcagagtccacagttctgcgtagattatttattcaaaaaatccccaataactaacagagcagaaactggatttaggaatctaaattaaaacttattttgatgacctttgagaaagatacttcaaaacaaagatttattgcaagtgttagcttctttgctccttgaaataacattcattacttcagattaaacactgcttgctatttagtcttcagt

SEQ ID NO: 268672 - DNA, 405 bp, Homo sapiens
accctaactttccacgcctaagtaacaaaaggaccagaggctattccctttgcaaatcccccaccttttctatgcagcagatgaccacaaccaatcagactgattggggcgtagtcttggtttgcaactttgtaacttcaccttagcatctgactggttgcagagaatggaatgaatgaatgaatgaaatggaatcaatgaaattggctgactgcaaccaatagaccgattgcaggccaccacttgatttaccggaggtgagcgtgaagaggccagtgggaaagctctagggggtatttggaccgggtatctgtatccctgccctccagtgctgctcaggtggctcccacactgtggagtgtactttcgttttcaataaatccctgctttcatgcttttgttgct

SEQ ID NO: 268673 - DNA, 733 bp, Homo sapiens
aattattaataatagccttattcctagttaaaagtaaaacaaagtgctggcttgatggtatgggagataactaaaaaagatttaaactgaaaatataaaaacttttcttaaaagctagaaataaacatttgtactccaaaagaatttatatttacaaatagagaaactaacaatgatttaaccacagtgataagggaagcagacttttgggcctaaggaatagacacaatataatttggtagcatagcgggaacaaaggattaaataattaaggcaaatacttacagtgaatggtctcctttacttctggtctcaataacaaaattatgggaaaaatataaaatcaatatatccatgctctaaactaattacagaaaaccagacaatggttgtaaacccaaatgtaatatagagcaatggctcttaagtccagattccgatttaattaatttcagggagccctgtggcgctggtagtatgcagaagattcccaggtgttgaaaatgacctggagccaggaattaaaaccaccaatctggggttaacacccaaagcaaaaatcaggcatcctataggctcagttaaaatcagtttttatacaacgagtttaacaaacacatgacatgactgaccagagttaaagatgaagtggcagatttaacttggagtaagaccagtaagttaaggatataaaaaacaactgtgaaccacaagtcatatatgatgaaagggg

SEQ ID NO: 268674 - DNA, 218 bp, Homo sapiens
tgctgaacaatatcagtgatatgcaagaatctggtatggctgagaagactggaaaggggcaaatataatacttttaataaagtagaagatttatttttgcaaactccacatcagtaagtttggtagaggatgagggcaaagattctaaaatcaattattaaaggggatgtttgtgagcactaaggaaaaacagtgatagctcatatagaccacacttt

SEQ ID NO: 268675 - DNA, 560 bp, Homo sapiens
cttttggcctagatcctctatcctgaaaagacctatcttattgcctcgctgtggcataaagaggggcagaaggagcacatttatttctgggagtatctctaactccttgaatggtggcagtgggaattgtgtaatgaaccacagagactaagaactctctggccctcattcttatcccaaattccctctaggtctgttctttgttgtaataaatgttaaacatgtattctgctggattgagatagatcagatctgttcctctagacgtggagtagagaagggtggtgcaccagtgtgttcttgtggaggggcggggaaagcaaagggtactacagttattctttataggaaccgagagtctggggatgatgggccctcagggtctattttgctagtccaacctcttgtttctcctgagaaaatacaatcaataaataaaaatttaaaagcactgtttttccagctaggagcagtggctcacacctgaaatcccagtacttaaggagtccaaggcaggaatattgcttgaaacccatctctactaaagatacaaaaaaaaa

SEQ ID NO: 268676 - DNA, 470 bp, Homo sapiens
atttagtgtaagaccaagtagggctcaccagactccggagagtcaaaaaaaacaaagcaccaactaagaatgtttataatggcataatgcatgaattgagattccctcaaaatataaatgttttatttgttcatagaatcaaaagtagatttgtgcagatcatgctttaaatgattaactcactttacagttcagaaattcaggtatgtagccttaaaattattatttagattaaaattaattagaagatatggttattcatttgcaaaagaattaggttagaattgtacaggatatacaaattggtcattctttttatttaaccgaaatgccaatttatggggataatcaattttctgtattttcctcttggaatggtgaactcttttacatgccttactttttaaaaagtcatttcaaaaataaaagtcatttcaaaaaaataaatgtgaataaagagtttataaact

SEQ ID NO: 268677 - DNA, 1140 bp, Homo sapiens
gcgatagagtgagactccatcaaaacaaaacaaaacccttaggctactttaaatgattaatgacatctagagtattcaaatttattgttaaatttggatctagggtttgagctttactttctgtgacttttaacagaaattacttgtataaagtagtaaagattttattgcatatgtccaataaactgatacttttctgtatttagtttctcagaattttacagcagtgtgatgaagatggctcctgaaatagtgtgtgtaccaggttatgaatgattttttttcctttgaaagcatctaagtgcagtatgacaaattctgcctcccaagtaggcagcttataagcactggcttttatcatacgtaacaaaattgcaaaataaagtttatcactaaaggtagaaaagtattgtgggtacatgtttatctaaatgctattttatccaggttcaagctcttgtaataggatttatactacttgtaaggagaattctatatttgagaattgtccttttgaaaaggtgaattttatcacatactaaccttttgctgccctgcacattttctgagatacttgaaaacatattttgacatttacatgttttgccagtacccattatgttcctgctttattaaagccattttattcacctgacagattaagattagaatattttaaaagttgaattttgaaagcaaaagtttgttctactgcagtagttcgcaagtgctggtctttgtatgactgcatctgagtcacttaagaaggctttttaaactctagattcctgggctgtaatccttggagattctcatgacttaccatttttggcatccattctttagaaatagttccagcaatcctattctgcccgttttcatttaatacacacactttgtttcttcatctttattttgtggcagatgggtttgactttgccagctgtgactgattagtggttctctgtagcactgtattgagactcttagtgaagccatatttgagctggactggaaggagggaagcattttgccacgagtttctcccaaggcgtgactgaatggattggtccttgtatcatttgcagtgcttatttgccagctttaattagctattctcctgttagacgttttattaac

SEQ ID NO: 268678 - DNA, 913 bp, Homo sapiens
ctcccaggctggagtgcagtggcgtgatcttggctcactgcagccttgaactcccaggctcaagtggatcctccctcttcagccccgcaagtagctgggactacaggagtgcaccaccacccccatctaatatttttttgttgttattctagggacgagttctcactatgttgcccaggctggcctcgaactcctgggctcaagcaatcctcctgcgttggcctcccaaagtcctgggattacaggtgtaagccactacggctggcctattattgctgtattctaacttattcatctcctatggctagcctccaagctggaagctgaattgacagttgaaaaataatgacatgtatacaaggtatgtttgaaggattgcagatgcaggggcaccatatgctaaaggagtgttggaagctcactgcagaagatgacaaaagcagactgatatgtattatttgctgaaatataagctggaggcacaggtgaagattgccaaacctaatgaacagtttggcaaataagacaggctgtcaggccatggcagttcagcagtgggcgtgctgcctgtgaaccaagtcatttgttccagaggactacacttaaataccacaaataaaatcttccttgtcactgatatcacagtgaaatagatgttgtctttcagatttctggttgaattaccagccattaacatctggtgatttgggttgtaaaattatttttagttttgcctgttcatatttcatccagaaagcccaaacaagatatattttcccacataagaatgtaagcagtataatgccccgtccgggagggaggcggggggcagcccccacctggccagccgccccttccaggagggaggtggggggcgcctctgcccggctgccccgtctgggatgtggggggg

SEQ ID NO: 268679 - DNA, 791 bp, Homo sapiens
tattgtcacctgtgcctcactccaaaatatgctctgaaatcaatatttaaatattaaatttgtatggtgaatgtattcttttttaatgttaattaaatgattggtcagcccacttaatatttacaatgcaggacttactttgcgtattctctgtcttgtatttttgctttatttaagctaggctagcctccaagctggaagctgaattgacagttgaaaaataatgacatgtatacaaggtatgtttgaaggattgcagatgcaggggcaccatatgctaaaggagtgttggaagctcactgcagaagatgacaaaagcagactgatatgtattatttgctgaaatataagctggaggcacaggtgaagattgccaaacctaatgaacagtttggcaaataagacaggctgtcaggccatggcagttcagcagtgggcgtgctgcctgtgaaccaagtcatttgttccagaggactacacttaaataccacaaataaaatcttccttgtcactgatatcacagtgaaatagatgttgtctttcagatttctggttgaattaccagccattaacatctggtgatttgggttgtaaaattatttttagttttgcctgttcatatttcatccagaaagcccaaacaagatatattttcccacataagaatgtaagcagtataatgccccgtccgggagggaggcggggggcagcccccacctggccagccgccccttccaggagggaggtggggggcgcctctgcccggctgccccgtctgggatgtggggggg

SEQ ID NO: 268680 - DNA, 657 bp, Homo sapiens
ccaaggaagtatatttaaatcaaagcaagaaatcccatttccaaatggcaataaagcatgtgttacatagaatcagtgcatgaaagtgttttagtagcccagattagattgtaccctggcaaataagcaagagttctttttcattttcatcttgcaattcaactgggtatttgggttctttttctattcactcatgtcagatagagacatacatgttgtaaattattttgtcagaatgaaagcctggcagattaaatgctttcttctcttcttgctttacttgatatcaatctcttgttcatttcttgataatatgtttggttatttttgttttcattgcttttagtgtcagagatggctttggattccccgttctgtgtgctgctgtctggctcctgaacccagctgtagaggtgtgtcaatcccaactggtgaagtactgagaggaagctacacaaaaggcagcaaagtattagtgagtggtgtcattgagcaaacacgaagtcgggctcatccaaggatgagattttgccagagaaaggacgagcagcaagtcagggagcttaaggtaattatgggaaagtgactatctacaattgcttaggtagaaggagacagattggatttttgtgtgtttggtatttgggataagaggga

SEQ ID NO: 268681 - DNA, 614 bp, Homo sapiens
ctcccaggctggagtgcagtggcgtgatcttggctcactgcagccttgaactcccaggctcaagtggatcctccctcttcagccccgcaagtagctgggactacaggagtgcaccaccacccccatctaatatttttttgttgttattctagggacgagttctcactatgttgcccaggctggcctcgaactcctgggctcaagcaatcctcctgcgttggcctcccaaagtcctgggattacaggtgtaagccactacggctggcctattattgctgtattctaacttattcatctcctatgtgtcagagatggctttggattccccgttctgtgtgctgctgtctggctcctgaacccagctgtagaggtgtgtcaatcccaactggtgaagtactgagaggaagctacacaaaaggcagcaaagtattagtgagtggtgtcattgagcaaacacgaagtcgggctcatccaaggatgagattttgccagagaaaggacgagcagcaagtcagggagcttaaggtaattatgggaaagtgactatctacaattgcttaggtagaaggagacagattggatttttgtgtgtttggtatttgggataagaggga

SEQ ID NO: 268682 - DNA, 295 bp, Homo sapiens
gactcctcactctcctccctctgatctgtcccagaatcccatcagttcttcctccaccccacccgacccacaattctctgctacacttgtctccacggccctggtctgaaacacatgatgcttcacctggactcgtaggcgaccgatctttctgcctcttggcttactactcttaagtctcgccttcacgggcagtcgcagggatctttctcaagatctaatttctaatgattgcatttttcttctttaagcagtaggctgaaagccaaagctctccatctttttacaactcaaa

SEQ ID NO: 268683 - DNA, 436 bp, Homo sapiens
ggaagatataataatgaaaagtctaacagaatccatagctttagtgaagataaagtgggggaagaaaatataagtacatcaatcacataaatgtgaaaaagaaaagatatcaaagtactaagagcccagagaaaggtgcaaaggggtgttaggggagaaatcagtgaaagcataacagggtgactcttaagaaagtggccgggcatggtggctcaggcctgtaatcccagcactttgggaggccgaggtgggtggatcacgaggtcaggagatcaagaccatcctggcgaacactgtgaaaccccttctctactaaaaatacaaaaaaattatcccggcatggtggcgggcacctgtagtcccagctactcgggaggctgaggcaggagaatggcgtgaacccgggaggtggagcttgcagtgagccgagattgca

SEQ ID NO: 268684 - DNA, 403 bp, Homo sapiens
acttcttcaacccataaactttggcaaaagtgatatgctgtgacttctggggtttggttgtgagtgaccaggcagctgctgccttgttcagataacacttgtgctgaggtcgctgagccactgtggaagacatccaagctccataaagacaggtcaagtgcacatgctccagtcaacagcccagctgagccctcagcatacagccaacaccaactgcaagctgagggtgaaacaacttggatgtccatttggatgtcaagctggacttcagatgcctgtggttgcagctctgtctgcaactacatggaagacgccatgtgaaccacctagtagagcccttcctagaattgttggccctcagactctacatgcatatcaaaatgaatgttgtttgaagccataa

SEQ ID NO: 268685 - DNA, 305 bp, Homo sapiens
gaaaactattccttgcagagacaagatttacagaggcatggagggtgtgaaacaagacagtaacaataaagggtggaagtaggggcgtgatgagagataagacagggaaacagggagaggccagatcaggaaagaacttacgtatcccgcagaagacctggacttactcccagagacaacagggagccactgaagtctttttaagttgaacatgttagaatctaatttctctttggcagcaacacaaacatgttgctgaaatgattaaaatatttgtttaataaatggatgagcaaacgaatgaa

SEQ ID NO: 268686 - DNA, 276 bp, Homo sapiens
taatgatttcatctctaagatgtattaatatatttgtactgtttgccaaaatcacaaatcatttatgtttttattccttttcaaaatggtgtcagagacatacatgcattttcccaaatgactctacttcactattatttacatggcttatttcattaatttatagagggtttgagaaaaagaatatgtagataatttaatggtttttcacaaattttaagcttgtgattgtgctcaatgagaaggtaaagttattaaaacttatttgaaatcaat

SEQ ID NO: 268687 - DNA, 1045 bp, Homo sapiens
ccacagattgttttttgaatagataatatatttgaatctttctggagaacgacgtgctgttttttgagttctagttaggtaaattcatgttggatgagtgtaagacataccgagttactctacagacttggagcattctttccacttgtactttttggtaggtttacaatatcttgaaaaaatatgaagcccataaagtggtatgtctgtggtatgagctgtttatttggacatttttaatagtcattttaagttggatcaaaatcagatacttcattgttagaaatatttatataaccagcactttggttgcttcacaagtcctcatttaatctgtttttcttcagtctttgattttctttgttgctgtttctgtaaaggaatcatgaaagaaaaaccattgtttaaatacagttaagggtgagaaaccttcactccgccatatttctttgattttgtgttcagtatgttggttgaagatgagaagtacagaccagacactgggaacttcgtggtcccatgtattccaacatcacactggtcccaaagagcacagaggcagtaatgctgctgcagatatctgattaaccagaattctctctgggaaggatcgatagcacagttatgtgatttttatatgcttgactgggttgaacaaataaactctgggtcgtacatttacacaaatgtgttcttcagaatacaacaactatgccactgaaggccgctctcagtatgcgttttaaagaagtgtttccactagttaaaatggatttacattgatccttctatatctggtcctgtgatcaggaagatgataagtacaaaggcaagctgactgcataacaataactgatgtatatggggatctcgcaacctggcttcgttagcagtgccattctctaaccaatcaagccgaagaccaaatgcaacactgagatgcatttttttcatcagtcatgcatggtgaaaggtatattctatgaattgcatggaagtaagaattggagacagtactttttggtaggtttacaatatcttgaaa

SEQ ID NO: 268688 - DNA, 225 bp, Homo sapiens
tcacgtggaccttcttttttcttctaaatctcaaccatattatctatatggctgtgcaaggaagatcaataaggaggagctctaacaatttccattggttttctgcaatccaaaccgagatgatccaggcttaaacaagacgtagggagtctaggggtagagaaaggctgattctttgctgtatcttacaggaggtctacgcttatgaattccagcttttcaggt

SEQ ID NO: 268689 - DNA, 416 bp, Homo sapiens
ctccgtcatccttgatccctgccacccatagccaaccaacctctgaaacagagctccctagctgataggcagctgaacccagctgagaccagcaaaagaactgcccagctgatcccagaccaagttgcaacccagagaatcattaactaaataggtgattgttctaaaccactaaattttggagtggtttgttatgtagcaaaagcaactaatacagacttgttctctctgtgtgtgatgtggtctctttctccccaacaacatgacccaatgattaaaatcttaaattctgccactttttagctgtgtgactgccaatgtgacagccttctgagcctctgatgtctcctgaaaacagagatgtgaataatagtgcctatgacatagagttgtgaaaataaaatgaaaaacagctt

SEQ ID NO: 268690 - DNA, 364 bp, Homo sapiens
gctgacctggaactcctgggctgaagcgatcctccaaccttggcctctcaaagttctgggattatagactttgccaaccccaatgcattgcacctctcattgcatgtgaatgatggctcctgttctattctctcaccttccaacaccatgaagtccatgccagctggtcagttgctaagaaaactacctatggttaccaagaaggacctccaggaaacttcagattgcccaaggatcactataagaaagagtctcactcttttgcccagggtggaccatgattgcaccatttcacattgccctccagtctgggcgacagagtgagaatctgtgtcaaaaaaataaaggaagtgtgatgccacca

SEQ ID NO: 268691 - DNA, 885 bp, Homo sapiens
cccagggtaaatctgcattaccttaagtcccttttatttatttatttttgatctggaatattagtataaagaaggaaaacaaatgttaacatattatgtgctagtcattgtgctaggcattgtcatacaatgatgctacacttaatctttacaatattcctagcattgttattcccagtagtagtaaggggcattgctggcatacggacccatatctgctggtacccatgccatgatgaatatgacttgggaaaaatgtgttttttagacataggaaacagacactctaatttttcactgagtttctactatttgattaagcctctttatttaattcctctccccacctccacccccgtttcttaagataatgcgctacaaaaatggcaatcataaatataaagtttacaaaaaagaatgtatacactagtccagtggaaaaaataattggactgggaattgcaattttgatactcactttatttattggttattatgtgaccctagaaaagacgtctacaagaaaaactttctgtgccttagtttctccatcaaaaggatagataagtcatgtttgttcctccttattttataaactttggggattagttgatgtaatagagaaaatagagttcttttcatgatatatgctgggcaaatcaaagtatttattgttacaaataactacattataaccaaatgattagttaaataatgattttgtttaatatgtaatgcttataataaattgcggtagcttatcgctgaattcagtatttcaagaacaatttttttttgctgtaattcattattgtcctcaggaaatataaaaattatatagctgaagataataaacaagtcctgaaataaaactatttcaaatac

SEQ ID NO: 268692 - DNA, 534 bp, Homo sapiens
tcttgtcctttgactttatgagtctcaatatatataaaagattttatttagtgaaaatgtctgtttttaaagtttctggattttatgtcttgccaataagggcttcccatctccacagttaaatgtataaacattctcctaatttttttgaacacgttattggattttttacatttaaatttcttaactacgtgaagtgtatttttatatacaatgcaaagtgagcatctttctttgcttttttctctgctagaatagccaattatgtcagtgccattcattaaagaaaccacactttttacacctttgttatatactgtattgattccgataggtagctggtttatttctgaactttcccttcccttttacctctatttttgtgccaatattattgtttgtatgtatgtatgtatgtatgtatttgttgagacagagtcttactgtgtcacccaggctggagtgcaattgtgcaatcttggctcactatgactgccgcctcccaggttcaagcaattctgctgcctcagcctc

SEQ ID NO: 268693 - DNA, 347 bp, Homo sapiens
attggtttgaaagatgctgggcagtgcatcgatccctatattacagttagtgtaaaggatctgaatggcatagacttaactcctgtgcaagattggattaattccaaattctaaaatgattcagtccacaatagctctaggggatgaagaatttgccttactttgcccagttcctaagactgtgagttgtcaaatccctagactgtaagctcttcaaggagcaagaggcgcattttctccgtgtcatgtaatttttctaaggtgtttggcagcactctgtaccctgtggagtactcagtaccttttgtttgatgttgctgacaagacctgaaaaaaaatcccttaaa

SEQ ID NO: 268694 - DNA, 353 bp, Homo sapiens
cttttctttctttctttcttctttctctctcttctttctttacttctttgccatttttgttttccactgaaaaggttagatccttatctggtagaagctatgcttctagaagttataaaaagaagagaaaaggagcttgagacttgtgtcagttgggaaggcatgtgaccccatgttgcagaaacctgaccacagtggcctaaccaaataaaggtcagtctgtttcaagtaataaatgtataggcgggtgccaggggatggtgaaagaagacatcaagaacccaggcttcatctaaccgatggagcatcatatctccatggcaggcagggagacggggagaaaggcaaagagg

SEQ ID NO: 268695 - DNA, 640 bp, Homo sapiens
ttgcccccaaaataaaagacagataggtggatacatggaatcacacttactggagcagaaacctctgtgggaaccagtcctgtggtaggaaaacatgaagtgtaattgacaaattgctggagactcagtgtggacaagtctgagagtgatttagttgaatgttgttcccactaaaatctcatgttcaattgtaatccccaacgttggagatggggtatggtggaaggtgattggatcatgaggaatcttatgaaatggtttaatgccatcctcctggtgctgtcctcgcaacagtgagtgagttttcacaagatctggctgtgtaaaagtttgtggcatctttcccccttgttctctctcgctcccactctcaactactccctgttcaccatccaccatgattgtaagcttcttgaggcctccccaaaagctgagcagatgccagcaccatgtttgctgtgaagcctgcagaaccatcagccaattaaatctcttttctttatgaattacctagcttcgggtgttgtttttttatttttattttttgagaaaggatctcactgtgtcacccaggccagagtgtactgtcctgatctcagctcactgtagcctcagcctcctgggctcaagtgatcctcct

SEQ ID NO: 268696 - DNA, 702 bp, Homo sapiens
ttgcccccaaaataaaagacagataggtggatacatggaatcacacttactggagcagaaacctctgtgggaaccagtcctgtggtaggaaaacatgaagtgtaattgacaaattgctggagactcagtgtggacaagtctgagagtgatttagttgaatgttgttcccactaaaatctcatgttcaattgtaatccccaacgttggagatggggtatggtggaaggtgattggatcatgaggaatcttatgaaatggtttaatgccatcctcctggtgctgtcctcgcaacagtgagtgagttttcacaagatctggctgtgtaaaagtttgtggcatctttcccccttgttctctctcgctcccactctcaactactccctgttcaccatccaccatgattgtaagcttcttgaggcctccccaaaagctgagcagatgccagcaccatgtttgctgtgaagcctgcagaaccatcacctcccaaagtgttgggattacaggtgtgaaccaccacacccagcccaggtgtttctttatagcaatgcaagaacagtgtaacacagaaagttataaacttcagtgggacccagtcatggggggtgctcatgctttccgtaagttttacctccaagagttctaccagcccctcacaatgaatattggagagacatccctttgtgcttccagcagagggagggg

SEQ ID NO: 268697 - DNA, 477 bp, Homo sapiens
caatgtttgtgttgctaaaacatggaagactgggttcgaacattttaaaggaatggttcattgtaggaaacgtgaagtatagtatagaattagctttagcactttcagaaagtactgcatcatttgaacaaattttctcagttatggatgctgtctaagatgagaacaagttgtacagccaaagtcatcttcattgttaaaactaagtttagattatcatgcattgaattttacacttattaactgggatatacatttcaaaaaagaaaaatctactctcccaacaaggcagtactccgaagcctacctaaaatgccatcctttggttcatggagtggcactgctctacaaaacccattttgttacctcagtaaataagcttcctggatggagtctaaggccaactaatactacattgaatcccactctacagccaagcatgttagaagaagcagcttacatctgtttgctgttcca

SEQ ID NO: 268698 - DNA, 410 bp, Homo sapiens
tagagacagggtttcaccatgttggccaggctggtctcaaacttctgacttcaagtgatctgcccaccttggccttccaaagtgctgggattacaggtatgagccaccgtgcctggtcctttctgtcagatttatgtgtcaaaaagttgctctgttagaggtatgaaaagggaatgagttgggaagacattggagaggcatcaagagtaatttggattttggagttagacagactggcttcaagtcctggctctgctacttactacctgtgtgaccttaagcaagttcttgaacctctctgtggctccggtttatcatttataaaatgtaataataagatctacttctcaatggcttgtggtgtggtttatgtgatctttgtaaagtcagcatagtgcttagaagatagc

SEQ ID NO: 268699 - DNA, 558 bp, Homo sapiens
caggctctgctgagacctcctgaattggaaccttagggtgggcctcgccatcggagttttaacaaggcctccagaagattctgacactcaccagagtctgagagacacagcagagctagaacccgggctccagttttcacccaggagacaggaggattctggctggaagggcaggagggactggggtcccccccagaaggagcgccccaggacgatgccacacaagagagtcttcagagactggaaatgcttgccagggaggaagaaccactttctgtcctccatcctcaggagcacagaagggtgaagctgagcccacatagagaagcatctcatgctgtctgcagcggctgcagcgctctcctggggcaggagatgctcaaaggtcaacatgactttgaaaaggggctgggagaaaagcccccagtgctggctctggactcactatcccagggctcctaaagggctaaacatgactagattgtagtgagcctttcctaacatgcaaagaagcatccagggataatgtctaaatacagatgtgctatttctctcctc

SEQ ID NO: 268700 - DNA, 576 bp, Homo sapiens
atcaaacattctagagaagcctccttcttagaaaaatatggctgttaaagctactatataatgttttctattctttttttagatggtgggtcaggtatagccacaagaggagacacaggagaggctcaggaaaacaaagtctattatgcttacaggtcctagagacaggagacatattatgccacataggactacatgggaaagacaccagggtgggcaggaggcagaagacagaagaggggaaggtttaggccactgccgttacttgagtttctttgggaaaggcaatgcagggctgagtgaacagtttaggattggctactttgaataaggtataggggtgctccctagttgtctggtacctggccatggggtgattaggacactggaatgttgtctcttggggtgtccatgccagatagagggaatatagctctgaattggttagtttgtatatcaaagaaatcttccagctgaacccttgctatctataagaattatctagcccaaggaggagcagccagaaagatttattttatttttatttttttgagacagagtgagacaccatctcac

SEQ ID NO: 268701 - DNA, 171 bp, Homo sapiens
tctgccagtaaacagatgggcctctctggaccccagtttccaaaggttgaaggtcaagacaatagctctcaattccctacttttgttaggattgtatgaagggtccttccagcactgtcccagtatggtgctcggctaatggaaaaccaatctctgtaacttggactagtt

SEQ ID NO: 268702 - DNA, 633 bp, Homo sapiens
gtaggagtggatggtcccccagcacggggcttagctcttagtaactaggcattctggcaatggcagccatcaataggagagactattgattgttgagtgaatataagtggcataatccaccaagtggagattctgagtgaatgtggccactttggacccaagactgctgcccctctctgtcctctcataggactattatttattgccagtgctgaccagcctttgttggctaccatgatcattacctgcactccgagtgttttaacagaattttctgatgcctctggcctcacctgctgccttttagccaagaggggtgtgtgtgtatgtgtgtgtgtgtgtgttgtgtgtgtgttgggtgtgtgttgggtagcagggttcttggaaggtctggtttagccataatgttgatcataaagagaaaacaagaaaataaatgcaaattaaatagttcggtgagcctttgttatttcgccacatccagtaagttctatcagttgaatgttgtctgaattacttaaaaagttctcagttgtaaacaggtaagagcacccagtggaggccatggagctaggcttagagctttgccaccagccttcagttccatagccatgaacctgggagggcaaggaa

SEQ ID NO: 268703 - DNA, 384 bp, Homo sapiens
ctgctccgcccctctctgtgtgtctgtgtctgtgtatgtaatggtgcgtctctgtggcaagaagagggtgtgtgtgtatgtgtgtgtgtgtgtgttgtgtgtgtgttgggtgtgtgttgggtagcagggttcttggaaggtctggtttagccataatgttgatcataaagagaaaacaagaaaataaatgcaaattaaatagttcggtgagcctttgttatttcgccacatccagtaagttctatcagttgaatgttgtctgaattacttaaaaagttctcagttgtaaacaggtaagagcacccagtggaggccatggagctaggcttagagctttgccaccagccttcagttccatagccatgaacctgggagggcaaggaa

SEQ ID NO: 268704 - DNA, 552 bp, Homo sapiens
agatgaagctgtttctgcactggattaaccctgaaatgaaagatcgaaggcatgaggaatccattctcctttctaaggctgagacagtgacccaagacaggacaaaaaacattgagaagagtccaactgtcaccaaagatcatgtgtggggagctacaacacagaagacaacagaggaccctgaggctcagcctccttctactgaggaggaaggcctgatcttctgtgatgcccccagtgcctaaataatctgctctagcaacactcccttcagtccagccaatcctgggtcctgtgccactcctacaaatgctccaaactctgtcctcaaatgacttgtgccactcaaccaggaaatctatcccaggtctaactcacctcagcagaaggcactgttttatgcaagaatacccatcacaagaaaaaggagttcataggttcctgaacctctgcaatcccctgaaaaaggctttcattgccatttccattaacatgcaggtgaagcagggcattctccaaatatactttgtacctttaagcaaagagccacct

SEQ ID NO: 268705 - DNA, 444 bp, Homo sapiens
cattgatgaaaacagcatttttccaatggaattcagatgtcagcagtttacattttataatttaagaaattgtggaatgtagttgttttgaatgaggtcgactcagaatagttttatttagagctttgttgctacaggtggtagtctattgacacctcctcatttaacatagaaaatgactaacccaataattcagggagttaaaactcaaatgacatttcacagcaaatgccattttgagtctttgcctcctgagtttccatataattaagtggcaatgttctagtgactgcagcataagatgtcatacaatctgaaactgcagagtttgatcaaagtaatctgcaatttactgcctatgtgtacaaagggagacatagcaggttatagtttatatgaatagtctattttgaatgttcattaaacttgttatccctgtgggat

SEQ ID NO: 268706 - DNA, 642 bp, Homo sapiens
cctctattcatgataagtcggtccgtcggaaagcatactcagaggagcgtcctttggggccagagtaacttacggcctggtaagaaagacacagtgaaaccacttataatttgggaaatctcccctcactgccaaatgagcagtggcaagtaggaagtagaagtggaaacaagggataagagttagacctgaattttagtcccaggtctactattaactctgtgtgactttgcataagtcgtttgcattttctgtgacttggtttcctcatttgaaccgaggatctttaaggctccttccaactcaatagtagaataaatgtagctttatcttccctcacttcttcttgattcttttcttgacctggaaaagtcagcttaaacttctcagtcaaattatctcttggtacaaatttacctccctggctgctgagatatgtatttacctcttgatcggaaattccataactgaaacttttattttcaaccatctgtatgtgttccttgctgcttctctcctgccttgcccctggccatgctaaccactgccctcctcgattttttccaatgttcagtaaattggaagagctcacttctgatgaaatggggggtgagagtggaggattgtggaccaaaaaaaaaa

SEQ ID NO: 268707 - DNA, 429 bp, Homo sapiens
aaaatagaaatcactaccaagagatctctcatacctatgacaacatggaaataaaacaacgctcttgaatgagggtaaacgacaatttttaaatctttgaaataatgaaaacaagacacaacgtgccaaatctctgggatgcagccaaaacgtgttaataggaattttatagcacaaaacacctacctccgagttagaagatctcaattaaccatctaacattacagatagaggaacaagaaaaacaacaaatgaaccccaaagctagcagaagagaagaaataactaaaatcagagccaaatggaatgaaattgagacccaaaaatccatacagagaatcaatgaaaaacaaacaatttttttatcttttcaaaaaaaatgttttttgaaagatgaaacaagattggtagactgttagctatattaac

SEQ ID NO: 268708 - DNA, 557 bp, Homo sapiens
gtggtagttttaaaaaaaatttctcataggcacaaaaagcgatataaatgaggtaatacacatttattaagattaatattttaaaaaattcagttcatccccaaagcaagcaaattactttttatttaaaaattttactttaatcataattggatttttaaggtattttaaaataaatattaaacataaaagaatgattttcagtggctgtagttcaaaactgctgtggaatagaaattagtattgtgacaccatttaagtgtccagttttaaattaaatggtgttgagtttccagctctcttagtttttaatgtgaaacaaaccaccccaaaacggtagtagctttaaaataaccatttatttggctcgtgactatttggctttgtcatttggatggggtttagctgggtgagtcttctgccggttaggaggggcttcctcacactgccagattggctgggagcttctgcgcctagaatgtcttcagctgggacagctgatccctgctccatgtggttgcagcctccagcagatgagttcagatttgttcacatgg

SEQ ID NO: 268709 - DNA, 421 bp, Homo sapiens
ctgggattttcttcaaaggttgagggaagaggtaggagtagaagtacaacaagatggccattaactgttaattgttgaagctgggtgataagtacacaagggtttattattctactttctctacctgtataaagtttaaaaaatacataagaaatgcccaagcatatacttagattcaggaaaacaatttaagaaaaatatattcacaattgttaagtatttttctctgttctatatattcaatgttttctctcataatcacaatacactacatcaaaataacatcatctgaagggttttggaaattgtatcttagtcgctattagaatatgactaaatttgtaaatatataattttctctcaaagcactgtggaatgtttcctttgctttgaatatgaataaaataatttgttcacaaaa

SEQ ID NO: 268710 - DNA, 210 bp, Homo sapiens
gccttatgagagaagtagttcagtacaacatgtttaactgtgcttaaacatttcaaaagactgcccaagcaatactattttaaattaaatatcagaaaatatgttaacatagaaagctgggtatgatgatctgcatattgcagttattattaatttgacaatgaacttaggtttggggagtgttttgtagttggggtttttttatttttt

SEQ ID NO: 268711 - DNA, 399 bp, Homo sapiens
aaaaattcccccagcaatagacagtctatcagtccaagtatttacttcctgagttttgatcaatattttttatttgtgtatgttaatcgtcataaaaacagtgattttggtgtgttttttattttggtgctttaatggcttaagatgttgcacattttttttttcttttggtttctgtttatgtttttttgcctatgcagttaaatttttcctagaaatagcatttgtgttgaacagtaacactttatacatatatatatgcatgtttattttgtttggcgtctttggagggatgcttttagacttgtttgcaaaagggcagttttctttttctttgctgcagttgtctattttgcagaataatagtgtgtgcaagtttgtgagcaaatgaaatatgca

SEQ ID NO: 268712 - DNA, 701 bp, Homo sapiens
aataaaaagatgtgaaagaaaaaaaaaaaaaaaatactttaacttatagataaaggataaaagaaatgataatagaggaaattttcctccccccaccaccacttgaacctaatttagtgatggaaaggttttattcccaatatagttgtgttttatgttcctgttctaggcttaaattttcaggggcctggaagcttccatttttgtttcaggaagctagatgctatgctttgaagaagctcagccaagacaactggaagagaagagactacatggagagagaaaggccacgtggaggaccactggggctccacgcattgagtgaagcctttttggacttttgagccagccaactaataagaagtaaaaccaacactgtggagtggcaaacaaaagaaaatgcattttaatctgggtctcaggaattgcaattgggagacacagatccagcaaataggaaaatcatgttccgtcttggtgagattagaagaggcttagaaggactactgtgagtttacacatctggaaggttttagcatagttcataatggatgatggctggttaacaatttagtacgtctttgatgatcaatctagttcagcatagctgtctcttgtcggtaaaccaatgtatacctaaggtcgtttcccggcagtcttttcatgagagcttattgtctggcccccttttgtattgacct

SEQ ID NO: 268713 - DNA, 721 bp, Homo sapiens
tacttcccacagaagctctagctttcccgctccttctgcctattaaattgttgttgtaatatacccttacccctagctgttcagcaagctactgctttctaatgctgtcacatgtatgaatataaagcatgttctttttccctctagttaaactgtctaatgtcaggaaatttgcaggcccacttcctccccccaccaccacttgaacctaatttagtgatggaaaggttttattcccaatatagttgtgttttatgttcctgttctaggcttaaattttcaggggcctggaagcttccatttttgtttcaggaagctagatgctatgctttgaagaagctcagccaagacaactggaagagaagagactacatggagagagaaaggccacgtggaggaccactggggctccacgcattgagtgaagcctttttggacttttgagccagccaactaataagaagtaaaaccaacactgtggagtggcaaacaaaagaaaatgcattttaatctgggtctcaggaattgcaattgggagacacagatccagcaaataggaaaatcatgttccgtcttggtgagattagaagaggcttagaaggactactgtgagtttacacatctggaaggttttagcatagttcataatggatgatggctggttaacaatttagtacgtctttgatgatcaatctagttcagcatagctgtctcttgtcgg

SEQ ID NO: 268714 - DNA, 767 bp, Homo sapiens
gtaggatataaaactagaatgtcaatttaaggagtttggtccttattcagtaggcaatgggaatcgaggtagcaagatctaaccctttaagggagaaaactcaaagggttgagacatcaagattacaaggttatctattgaaagagtcttgcaagagatagcaaaggctgcgatagtgacaactgtgatggtagttgtactatgggaattcaaaaaagaacgaaacccctgtggactggaagcgctataagcagaacctgagctaggttctgtgaagagtgagtaggagtcaacaacagccctgttgtaaacttgaattttaaattagttttataccacagcatatctcagtgacaaaaaagcaaacaaccattatttagcattttatttcaaccaaataaaagttgattaaaagtgaagtcttatttcctgatatttgagtctttcaggtatatctatttaaaaaaactgttctcttcaagtttaagggttagcgtgtcaggaattaattaagccctgtagtcatatgagataggaaaaagtggacctgaaatgaggacaagagaaggacaaattgcagaaatgaggacatgtaagtcttcagaagaatgtgtcacacaatagaattaatgcgtaagggtgaagaaataatgatttgtagtatcatgggagaataacaaaagaatgtaaaagactcacagagaataagaggggtagtgggctaaattcctcaactcaaaattaataaatgaagaggaatgatcaag

SEQ ID NO: 268715 - DNA, 480 bp, Homo sapiens
ttttgagctggagttttgctctcattgcccaggctggagtgcagtggtgagatctcagctcaccacaacttccgtctcccaggttcaagtgattctcctgcctcagccttccgaatagctaaactacacgtgtaagccaccatacttggctaatttttgtatttgtagtagaaacaggatttcaccatgttggccaggctggtctcgaactcctgacctcaagtgatctgcccaccttggcctcccaaagtgctgggattacaggcatgggccaccgtgcccagcctattacatgttttaaggtcataaaactgctacttctggaatatttcttaaacttgcttgatttctgtaaggtctggctgctgggctccctgaaaccttgcacatatcttactgtatgactgtatttcgttttgagtctctggattctggggtttggacagatgaccatagtgaggcctgcagaaatatgcatgt

SEQ ID NO: 268716 - DNA, 323 bp, Homo sapiens
ttcctttcacctggggaaggatttggctttggggaggtaagagcttgaaacatgggatgagagaggagtcactgctacctctgatttgctcaaagccatggcagttgtttagaattctctacctctactgtcacctaacaggcaggcttcatctgcaggccttccaaatagtggaagttcacaggtagaaaatttaggtccctgaatccgtgggttcgctgtctcagcccattcagaacaattctttaggtactggcctcactggagaaagaagtgatccagaagaacagtctagtgaccaggagatctgagggtagggtggg

SEQ ID NO: 268717 - DNA, 496 bp, Homo sapiens
tcgcctcatcttcactgtgggagggcattacagctccctcagaactcctgtagcactttatctgtgtctctttgttatgctttctactgtttattaatacatacccttttctttttctttcattcctggcctcacttcccctaaaaattggggtggtttataggaaaccttgaagataataaaaaataatgataaatggtaaaaaccacggcaaataaaaagtaaaatgaaaaaatggatgatgaaaagtacatgttacaaaagcctttgcatttgctagcagtggacactgaatttggctcaaatattcatttgtctcagggaagcaagaggagcttgaaaatatgaaacaggtcagtgctccatctcacatgaataagctcaatgtgaaaacccagatgctaatttcaatttaaacccaataatgttaaaatagtgtttcataatatttaatatattcattaaagatgatggactaggacacactcttatcatt

SEQ ID NO: 268718 - DNA, 442 bp, Homo sapiens
aattactgcacattgtgagactttcaaattctgcatgtgtatgactatcgagtaactgccaaagttatatttttgaaaaatagctctttgccttaatagtgagggaaaaaacaaggttaccaactccagtagacttagattgaacttatatttttttcagtgaagttaatttcatcttactctttttaatgtaaattgagtctggcaagcataaaggtttgttttatgctactttaaaggcagtgcagctcagtggaaatagcataaagtctgaggaacacctgaattcaagttctaagtgtaacttactagatcctaggctatgttctttcttaatttctcatctttacaatgtggatggtgataccccatggaagttctagaaggattaaagcatctcatttagccactgacaaaattgttggaattattacttaaaaca

SEQ ID NO: 268719 - DNA, 386 bp, Homo sapiens
ctttcttctttccacagaaattctaccttttctgaatttagtctaaattatataacagcaagtttgttaacatggtactataaggataggacatatgaagaggagtggccaggcacagtggctcaagcctgtaatcccagcactttgggaggctgaggcaggtggatcacttaaggtcgggagttcgagaccagtctaacatggagaaaccctgtctctactaaaaatacaaaattagctgggcatgttgatgcatgcctgtaatcccagcaacttgggaggctgaggcaggagaatagcttgaacccgggaagcagaggttgcggtgagcccagatcgtgccattgcactccagcctggggcaacaagagcgaaactccgtctca

SEQ ID NO: 268720 - DNA, 597 bp, Homo sapiens
attaatgttcctttaaattctgagttctgtatttttgaaagtctttttttatgtttgaatatattctaatttactgtaatttgccatcgttttatttgatccaaatcatatatattttagattataagaacatctgtattgtataatatttgcaagtaattaaaaaatattttttaaatcctaggtttaggcttcgtagatctgaatgcggttttttcattaatcttaaataaaatttaagactgaatttacagttgttaaacattcataacatgatcaatttttagtgggttttttggtggggtgtactattttccaccctttttgtatctagttgcaaggagccaagaacaggcaaattattaactcctttattatttcctcctgtctgaaatgttttcaagcagcgtatttgtctgttaaatcatgaaaaactgaaaaaaaaagtctatggctatttcctaatgattttatttaggttgttgctcttaatgaggattagtacctgttttgtacatcagtactggctgacttgtcagttactcggataattgatcgagtgattgctctgcagagaaataaataaatgcttaacta

SEQ ID NO: 268721 - DNA, 412 bp, Homo sapiens
ttctgcccagtgacatgtgggaagaagtggctctttcaggactgttcccccaaaactgtctttgggatgctccaaacttctttattcccccaatcctctgatgaacatgcacctgacattggatgctacatgttaaaaacggagttgtcatcttctacctgggtcgctgaatgactgtgtggatcaggaagctccccactcttccctgccatgactgaactagccactgtcatctggagggtgtctgtaatagcatctagcattgcctaacatcatactaatggaacactacatattttcatctgaagtgatatcagtggaatttccactgaaagcaaaggtttagattttggagcaataatgcttaatatttgtcagtaggagcttattaaatataaataccagtcccagt

SEQ ID NO: 268722 - DNA, 1276 bp, Homo sapiens
ggccgaatggagaatgaagccttttcaaattcacctcccagtgaaccaccctcaaaatagaagtgaatgtgaaaccacagatatttcattaaaacatatctgaagataaaaacatacctcaagcttcacagatataggacttctgagctgagaggacctcccggacatattgtctaccctaagcaccaggctggacacactgggaaacaggctgaccacctgggctcccaggccttctacccaggacgtcagcatgactacctagtcccacctgctggcacagctggcattcctgttcaaaatcagccaggtagacctgaaggggtaccatggatgccagcaccaccaccaccattaaactgtccgccaggattggaatacttaagtcagatagatatgatactaattcatcagcaaattgaacttctggaagtttctattcagttttgaaagtagtaacatgtatgaaatcaagaacagctttgggcagaggatttattttgcagcagaagatactaatttctgtatccgaaattgctgtgggcggtctagaccttttaccttgaggattactgataatgtgggtcgagaagtcataactctggaaagaccactaagatgtaactgttgttgttgcccctgctgccttcaggagatagaaatccaagctcctcctggtgtaccagtaggttatgttactcagacctggcacccatgtctaacaaagtttacaattaaaaatcagaaaagagaggatgtactaaaaattagtggtccatgtatcgtgtgcagctgtattgcgggtgttgattttgagattacatctcttgatgaacaaattgtggttggcaggatttctaagcactggtctgggtttttaagagaggcatttactgatgctgacaactttggaatccaattccctagagaccttgatgttaaaatgaaagccgtgatgattggtgcctgtttcctcattgactacatgttttttgaaagaactaggtaatgactggaatgtcagagtgtgggagtggattaatgattccggatctttggctaggcaaaatgaaactataactgatctaaacggttccttccttcttctactgtgcaaggaagatgtaaggaaaaactcgcacactatctgtggaactcatttaaattcaaatcctagataaacatttcgcattgaatatttacatggagaaaaatcatcaaacatcaacaattatcaagttaattaataaaaatactaggtattgcaaaaaaggct

SEQ ID NO: 268723 - DNA, 804 bp, Homo sapiens
  misc_feature (20)..(20): n is a, c, g, or t
  misc_feature (26)..(26): n is a, c, g, or t
  misc_feature (46)..(46): n is a, c, g, or t
ttttccaagcttaactcatnccgttnttggctatttatgacctacnaccctggttgtctacaccagagacaataaccagctgtccacttggattagagtatttgcatcagataaatcagttaacagtgtgtcaacattttgatcctctgggagtcctcagaaaatttgaaactagtaaaacgtatgaaatcttgaacaatcaaggacagagaatttattttgcagaagagagaaataattgcttccttcgacacctttgtggattttcaagcccttttactatgacaatttatgataatgtaggtagagatgtacttgctctgcataaggctctgaaatgtagcttacaaaagttattgactctggatgaggaaatggttattggaaagatttcaaaacagtactctggatttgtaaggggaatattaaccaatggtgagaaatttgggatccagtttccatttgatcttgatgttaaaattaagcattgatgcttggagcaactttcctcattgaatacatgtattttgaactgtggccataagaattaccctgaaagaatatgtcagagattactggcatttatttttgccagccctcaacaaaactaagcaactttcactgaaaatatctaaataaagttttattttactaaaactattcatatatattctttctgcctaataaactacatcaaaaatgtttaactcaaaaaaacaaaaaaagattgccctcgtcggcctcagcaggaggagcctctgcagccgctttccctttaatgaagggtcaattcatgaccccccg

SEQ ID NO: 268724 - DNA, 706 bp, Homo sapiens
cccgaattgcagaagaaggcccaggtgtaacggacggccgtgacaaggcctttcatcctcagaaaatttgaaactagtaaaacgtatgaaatcttgaacaatcaaggacagagaatttattttgcagaagagagaaataattgcttccttcgacacctttgtggattttcaagcccttttactatgacaatttatgataatgtaggtagagatgtacttgctctgcataaggctctgaaatgtagcttacaaaagttattgactctggatgaggaaatggttattggaaagatttcaaaacagtactctggatttgtaaggggaatattaaccaatggtgagaaatttgggatccagtttccatttgatcttgatgttaaaattaagcattgatgcttggagcaactttcctcattgaatacatgtattttgaactgtggccataagaattaccctgaaagaatatgtcagagattactggcatttatttttgccagccctcaacaaaactaagcaactttcactgaaaatatctaaataaagttttattttactaaaactattcatatatattctttctgcctaataaactacatcaaaaatgtttaactcaaaaaaacaaaaaaagattgccctcgtcggcctcagcaggaggagcctctgcagccgctttccctttaatgaagggtcaattcatgaccccccg

SEQ ID NO: 268725 - DNA, 885 bp, Homo sapiens
ggccgaatggagaatgaagccttttcaaattcacctcccagtgaaccaccctcaaaatagaagtgaatgtgaaaccacagatatttcattaaaacatatctgaagataaaaacatacctcaagcttcacagatataggacttctgagctgagaggacctcccggacatattgtctaccctaagcaccaggctggacacactgggaaacaggctgaccacctgggctcccaggccttctacccaggacgtcagcatgactacctagtcccacctgctggcacagctggcattcctgttcaaaatcagccaggtagacctgaaggggtaccatggatgccagcaccaccaccaccattaaactgtccgccaggattggaatacttaagtcagatagatatgatactaattcatcagcaaattgaacttctggaagtttattgactctggatgaggaaatggttattggaaagatttcaaaacagtactctggatttgtaaggggaatattaaccaatggtgagaaatttgggatccagtttccatttgatcttgatgttaaaattaagcattgatgcttggagcaactttcctcattgaatacatgtattttgaactgtggccataagaattaccctgaaagaatatgtcagagattactggcatttatttttgccagccctcaacaaaactaagcaactttcactgaaaatatctaaataaagttttattttactaaaactattcatatatattctttctgcctaataaactacatcaaaaatgtttaactcaaaaaaacaaaaaaagattgccctcgtcggcctcagcaggaggagcctctgcagccgctttccctttaatgaagggtcaattcatgaccccccg

SEQ ID NO: 268726 - DNA, 471 bp, Homo sapiens
tgcccttccacaaactttctgatcttcagcacacactacccaaccatcaaggctgagacttcccgtggccagcagtgtctcatgctggcttcaagccccacagcactgcttttttcaacttctcttgtggtttagactgtctttagcccagcaagagaattcattgtcttatcccccattaaactgtacctacactctttgaggaaaagggtccatcttacttaaaatattttaaaaattcacatgtgataaaactgatgtgtatgtgtatgagagagagagaaagagagaacagttctatgaggcttaatgtatacatgtggctgtgcagcccactgccccatgtcaccattttcaattctgtcattacccctgggacaatgtcttgtcaatatacacttgaggctgggcggggtggttcctgcctgtaatcccacctgtaatcaggagttcaagaccagcctgggcaac

SEQ ID NO: 268727 - DNA, 478 bp, Homo sapiens
cagcctttttgccgaggtggggatgctcatctgcattcttttagggccatgcagaaaaagcaataaagggaacttccttcccccaaactgccctgtctcccaccatgggcagcccaagaccgcatccttggactgacgttcagctcacaggggagcaggaagtgggaaaagtcaggccactgaagcctctacttcgatgcagcggctacttctactttccagactgttctcttgaatggggggaggccacaggtcggagctgtgcccacatcattagtcaagggcatatagattgttacaggtgatggtttcccatcaaggggatgcagcagagctgaggacccagttcataaatggaaaactggatttgttatccctgttttctctacagtgggtaatgcttctggcaagtgtgaagggaaagggaatgttcaagattatctgggaaagtcaaccgacaaggaaggcagccaggaaa

SEQ ID NO: 268728 - DNA, 621 bp, Homo sapiens
ggttcgtcctaattgagctgaacactagtcactgggttccacggttctcttccatgacccacagcttctaatagagctataacactcactgcatgatccaagattccattccttggaatccgtgaggccaagaatcccgggtcagagaacacaaagcttgccaccatcttggaagcggcccaccaccatcttggaagcggcttgccaccatcttgggaactctgtgagcaagggcctcaggtaacattttggtgaccacgaagtgacctccaaagcgatgcggagtctcactgtgttgcaaattcctgacctcaagtgatcttcctgcctgggcctcaaagagcggggattatacgcaggggccactgctttcagcctttaaattctgttaaaaacagcgttggtgaggtatggaattattatatgccatatgctttacgctactgttagtgggtcttgtaaagatcctatcacatttgtcttataattctcattttacatatgaaggaattaacacaacattgaagtattgccaaaactcacagtttgaaagtcagcatatattttgttatgcatcagaaatagtaaaataaaacttatatgcctctaataaatctatta

SEQ ID NO: 268729 - DNA, 275 bp, Homo sapiens
caagcatgggggcttgtggtgtcaagcatgggcttttgtgggatcaagacagacctagttactctacttaaaatctcaataatttagtgggaaagatggacattaaacaaataattttaaacactatgtaactgcaaatatgccaagtcctacaaggggacacacagaatatgaatgaaatagaagaacaggagctgtcttcttctgcttctgcatggaaaccactaaccacgtgtagctatttaaatttaatttaaatttgaattaattaaaaa

SEQ ID NO: 268730 - DNA, 513 bp, Homo sapiens
catacttaaatgctacctaataatggaatcaagtttttaaatctgcattttaataaaaattaaacataaaatattcagtgtctcagctatgatagacacacttcaagtgctgatcagcaaacggtgtgagtgccaggcagacgggccagtgcaggctacacagctgcagctcaaacagcacagctgcaggtgaaacaggccagtctctctgcgcacgggaacagtctgggcaagcatgagacggggaaaacgggcactgtcctcgtgagaacaaaggacccacaacaggaaccctagactcaccttctgccaaagacaccaacagcccacgacgcagcctcctcacaaaagggagaggcattcaagaacttagaaaatcacctcttcctggaaaatgctcactttaaaactttgcatgtaactttaaattttaattacaaagttgttaacatccattttctcatgtattcttaattaactctgtgaaagtaaacacagcttttattcttaaac

SEQ ID NO: 268731 - DNA, 143 bp, Homo sapiens
tgattttaaaaacacaactcaggccgggtagggttgctcacgcctgtaatcccagcactttgggaagccgaggttggaatattgcttgaggccaggcatgtgagaccaacctgggcaatgcagtgagatcctgtctgtacaaa

SEQ ID NO: 268732 - DNA, 484 bp, Homo sapiens
aagcacatatcctccccttgttcctaattttagagggaaagtactcagtctttcgccattaagtacaatgtcagctgtaagttttcctagagaccctttctcagcttgaagatgttccctggtattcatagtttgctaaaaggtttttgtcattttaaatcataaatgggtgttgaattttgtcaaaggcttttaatgcatctatggagatgatccaagtttttttcctccttatttctgctaaggttgtataattatgctcattggtattttaaatgttaaattaaccttgcgttcctgggataagacccactgatcatgatgcattttcctctttgtaaattgctgtattcattttagtttcttcaggattttgcctatgtttgaaggatattggtttgtaatttttcttgtaacatctttgtctggttttgaaatcaaagtaatactggcctaataaaatgagttggaatgtgaaacccaa

SEQ ID NO: 268733 - DNA, 218 bp, Homo sapiens
acctattttcttaatatctcttataatgataaagtcaatgtatctgtttcattcacaatataatttaagattctttatcatatgatatttattagattagaaaatacttatatagagcttactctgtgctaggcactaagtgccttggaaaatattaacttattcattataagagctgtgattcaccataagaaaagcttagatgttgtgattcttag

SEQ ID NO: 268734 - DNA, 246 bp, Homo sapiens
aataaattagatcaattaaaggtatagtagctgctcacattctagtctacattgagaggtatgtgaaaataggagagcctagaagactaaaaaccattagggggagtctaaattcatgataaaatataagatgacagttgaaaatgaggaaagatgaaaaaattggtgagaaaataaagcattcaagattatgacttcaaggtttaagtagttggcagaatctagagtagtgttgcccaatagaac

SEQ ID NO: 268735 - DNA, 1025 bp, Homo sapiens
cacgccacagcccccctcaatctgattccctgctatgcctgccatcaccactggccagttttaccacatgcttctcaagacccaaggcacaataggcataaagttgtcctgaaaaggacaagaggagtgtcagaagtaggaatggcagttgaaggagcttcgtctgccagcagaaagctgaaatgacaggcaagcacaaaatatattaaggagacaaagctatgcatgagcgaaatatcaaactttcatcttctacccactttttttttttttttttgcttaaaaacaggaagacagaatgtcttgtcaagggtcaccccaggaggaggagtaaattccccaaaaagcggaacatatttttatgatttaattaatacaatttctctcaatgtgtctgtttatcatttgagcatccacatgatcagacctgacatctgcctacattttcttggtcgtctttgacttcagttaagaaccttttgctctttgttttcccccagcagcacagtatattaagtttggaacaagacacacctgaaatcaaatccctgctctgtgctgggtgatcttagaggcagtcttttacctctttctactttattgttctcataggaaaagtggaaatgaggccttttaccccagggttgttgagaagacagaggagaaaaagcacataaaaatgcaccttgtcgggcgtggggctcacacctgtaatcccagcactttgggaggctgaggcaggtgtatcgcttgaggccaggagttcaagaccagcctggccaacaggaaaaatacattaaaaataatgtctctattaaaaatacaaaaattagccaggtatggtggtgcacgcctgtaatcccagctactcaggaggctgaggcagaagaatcgcttgaacccaggaagcgaaagctgcagtgagtcgagatcgcagcactgggcaggcacagtggctcacacctgtaatcccagtactttgggaggctgaggtgggtggatcacaaggtcaggagatggagacc

SEQ ID NO: 268736 - DNA, 795 bp, Homo sapiens
gacctccaaattacagtaaattacagtactaagattttacttgaactttctaaagcattcgccattttaaattatttaacttttatactcctccttcccttttgtgctgtttccttcctggcgctcctaaatatctgtccattctttggacctcttccaaattttcagataattataatagtgtgcgaatgatgcaaaggtaatgtgccgtgggagagaacagaagagagaaacctaattctggcctcatcacattattgtttttttaaatttaataactattttagatgcttcagtagatttacagtgagggcaaaagaaaacagttttctttaggagtatggagggattatataggatgtacaataaataccctaagtacttcaaatcagttcagatctttaaaatcctatttttccttcagttctcaacttcaatatcacctactctgggagtcattccctaccatgcttgtttgtttgtttgtttgtttgtttgtttgttttgagacagagtctcactctgttgcccaagctggagtgcagtgacaccatctctgctcaccgcagcctctacctcccaggttcaaacgattctcttgtctcagcctggccaacatggcgaaaccctgtctctactaaaaataaaaaataaaaaaacagccgggcgtggtggtgcacgcctgtaatcccagctgagtcaagagaatcgcttgaacccgggaagaggaggttgtagtgagctcagatcacaccactgcactccagcctaggtgacagagcgagactccatcta

SEQ ID NO: 268737 - DNA, 366 bp, Homo sapiens
tagtgcaaagatttttgtctgcctgagcttatggctgagctgggagactgggagcagcaaaggcactgttccctgggggaatgggaggtggattgagtcctaggtacttctcagagtgtagactctcactgcacggagagtgcttctcctattgaaagaaatgtatacttggcctccacacagaaactaactactttatctggagctcgtgaagaaaaagagcctgggcatggtggctcacgcatgtaatcccaacactttgggaggccaaggcaggaggatggcttgagtccaagaattcaagaccagcctgggcaacaaagtgagaccccatctctacaaaaaataaaataattagccgaatgt

SEQ ID NO: 268738 - DNA, 452 bp, Homo sapiens
tgtctttcctttcttcctcctttcttccttccttctgtccctccatctcccatccccttctctcctttcctttccatagccctaggtacacattagtaacaagtgtatttacctcattgagtgtcttattcttaagtatgttgaaacaagaactaattaatattgtgaatcggccggacgcagtggctctcgactataatcctagcactttgggaggccgaggcaggcggatcacgagatcaagagactgagaccctcctggccaatatggtgaaaccctgtctctactaaaaatacaaaaattagctgggtgtggtggcgcgcacctgtagtcccacctactcaggaggctgaggcaggagaatagcttgaacccagaaggcagaggttccagtgagctgagattgcgccactgcactccagcctggcaacagagtgagacaccgtttaaa

SEQ ID NO: 268739 - DNA, 495 bp, Homo sapiens
gatggcagggagagaagcagtggtacagagctagaaaggaagacattccaagcagtgtttgtagattgaatggattaattcatgaatacacaaaacattgtgaaagggaaaattcacagaatatttccattcctaaggatgcatctatagtcatttgatgtatatgcatagtatttctttctggtctgagaagggaaattttataaaaactggaattgtaccctagatgatacgtatagtatcttacagccttaatattttgcttcataagacgccatcccaagcaactcgtttgagaatgagaaattgccctgattcctaaagcccacctaatcttcccctttctccctagttagccacttaattatttttcagttattctattccagttttatttcataaacttgatcgaaagctgcttgacagcagagaccataccattcttttttatctaccattctgtacatattggttcatggagattgggagtttggt

SEQ ID NO: 268740 - DNA, 561 bp, Homo sapiens
cagccctgtaggagacacctccagagaaagtaacagctctcaattgattagctgagccagaattagcttctgttacttacaactgtgagtcctgactgaaaacatatttcttcctttgaagaactgttacctgtaacaggctaagaagaatattaagaataaacagatgcttttacagctcgccttggcgggaagatctggcacaaatgaagtatctataaggagcagcagagtcaaggtggtgatcctgtggatgaataactgaaacctgatatacttgacagcagaaaatataaagcaaattgaaaaggagagagtgtggagataaataagaaaatgaaagaactgataaagtcacttggattaaaaaacctgggagtaagggctttgtttatgattgaacttaagagagaattgagggaccacctacctttgatgttaacgagaaagtaaagaggaaacatatttagagataccctttggtgaaaaacagaaatggatgtgtcatttgatgcatcacattatttattcaacaaactcttagtgagaacttactgtgta

SEQ ID NO: 268741 - DNA, 460 bp, Homo sapiens
cagccctgtaggagacacctccagagaaagtaacagctctcaattgattagctgagaataaacagatgcttttacagctcgccttggcgggaagatctggcacaaatgaagtatctataaggagcagcagagtcaaggtggtgatcctgtggatgaataactgaaacctgatatacttgacagcagaaaatataaagcaaattgaaaaggagagagtgtggagataaataagaaaatgaaagaactgataaagtcacttggattaaaaaacctgggagtaagggctttgtttatgattgaacttaagagagaattgagggaccacctacctttgatgttaacgagaaagtaaagaggaaacatatttagagataccctttggtgaaaaacagaaatggatgtgtcatttgatgcatcacattatttattcaacaaactcttagtgagaacttactgtgta

SEQ ID NO: 268742 - DNA, 603 bp, Homo sapiens
cagccctgtaggagacacctccagagaaagtaacagctctcaattgattagctgagaataaacagatgcttttacagctcgccttggcgggaagatctggcacaaatgaagtatctataaggagcagcagagtcaagactggatttagtgacttgcttcatcaatggaatacactcaaataacattttggaatttctgagactgtcataaaaagctgaagggcttctattgggcttcctgaaatgctcccttttggatccctgagcagccatgtgagtttaactactctgcaggagagagtatgtgaaaaggaacctacctaagcccagcctccttgtcatccacaggaagacaccagacaaatgagttacactgttttggactccccaacacaacccagccaccggctgaatgccaccaaattaccttctagttaaaggtttatggagcaaacgaatcacctattcaatatctgcttgaatttctgactcaaaatacatcaggtataaaatgatggtttttttaagccactaagtcttgggggagtttattataaagcaatagataattttgaaaataaatagaacaagctgaagtcccaaa

SEQ ID NO: 268743 - DNA, 612 bp, Homo sapiens
ccaaaatagctgcataaacagttaaatagttaatgaattggttactttttctagccatgtacacacaaatacacacagactttcagaaaaactccacatgattgacatcatgtaaccaacactttaattttccattcagatgttcagtgtataggggacataatctttttattatagatactttaagtaagagttttaattgactgtcagtacctccagatgctattatagtaatatattacttattttggaatccataggctgaatatgttggaagtgaggtgaagctctagtctattcattctaaagtggagatgaagattcatcaggccaagaggaattcctgtttaccagagtttcctagcaggacaacgaaatccagagcccctcagggagttcaaaatttgtgagagaatttcaggacctcgaaataggacagcttcttcacccacccttaagcctcttatagaaaagctagactgctggagaagctttaggatgttaaatgataatgcggtctacattttaaaaccaaagattggtcttgattagtgcccttagattcaagagttttgcattttaaaattatctgagactttgttaaaagcaaaa

SEQ ID NO: 268744 - DNA, 555 bp, Homo sapiens
ttattctgagaattgtgttgacaagaccctcttttcctacagagctctctcttaatgttgcttggaatagccttgtgtcctggagacagttttaggtctggcaggatctgagaacaggagtggggatcttggaatgggatctgcatccctgagcttcatccacaaagggtgggaatgtggcttgggctgtggggtggaggtagatgaacagctggacttgcaggtctatcttctgttgtttctcaataaagtagacaagtccatctgatgggtgtttagtagggtatgacttgtgagtccacaaggccagcagtatatatgctgaatggactgcttagcagtaacacactggaaaaatccaaaaagaatggatttcaagttggcaaaaaatgcattagaagtcagcagtgtgatgtggtcaggagaacaaccagagtgactgtgggatgaggtcttggatagctttgtttctatatacagtcagccctctgtatccatggtttctgcatccatggattcaaccaaccaaggctcgaaaatattaaaaaaaaaaaa

SEQ ID NO: 268745 - DNA, 870 bp, Homo sapiens
ttttttttttgacatggagttttgctctgtcgtccaggctggagtgcagtggcgcttggctcactgcaacctctgcctcctgacttcaagcgattctcctgcctcagcctcccaaagtgctgggattacaggtgtgagccaccatacccggcccagataggttgatcttataacaatccagaaacaaatgtcatagtcaagatttggtagatagatttaaaactaaaatattctgccattggaagtgaaatgtcatagcacatacgtggacgttatgcatttagagatgttataaaaatgtattggcagtatacatagcactactcaagaagccaaagaaacacttgtgcagtgctaagtgtcacatgtctgcttctgccagaggctaggaatagtgatcttgctataatgtgagaacctgaatcatgtttgtaaaataggaggctgggagcagttccaggccacagtgaagtgtgttgcttctgtcactttatattcttatatttcctttccctcagacaatcaactgttgatgcctgtacttgtgaaaagttgtaaggcaatttttagggttgttgtcaaagaaaagcttggattacattaacatttgtactcagccttttaggcaatacaccagagggggctgggaattgtctgtttgttcctatgataagtagatcttactgtaaaatagtaaatgtccattgaaaagcaagtaacacaacctgtgctaactgggagcacttgaacaattttgttccattctgaataacttttcagcaagtaattctaagctttgtcttatatccttgtgtaaaattgctaccttcatttttaccctatttgatttcttaaatggtttgttcaaga

SEQ ID NO: 268746 - DNA, 406 bp, Homo sapiens
ctttaaggtttttggccagagcaattggaaagatggagttgccattaattgggatgaggatgcttgtggggggaactggttcaggatggaaaatcaagagctcagttttggacatgttaagtttgagttgcctattagcagtagtaaacatttacaaattggctttccaggagaaaaaggtgcgtgtgtgtgtgtgtgtgtgtgtgtgtgtgtataataagtttattataaggtttactgatataaatgatgcatagcacacaattcacaaataataaaatatatagtacttcttattgtaaattccatatggccactttattcccacagaacgttttaattgatgttggccagactcttatatctatagccaactaatggttgcaattgctgaacatgtatactt

SEQ ID NO: 268747 - DNA, 587 bp, Homo sapiens
  misc_feature (78)..(78): n is a, c, g, or t
  misc_feature (83)..(83): n is a, c, g, or t
  misc_feature (86)..(86): n is a, c, g, or t
  misc_feature (104)..(105): n is a, c, g, or t
aagcttctcatttcaaacatatgtaaacatttatcagccagctacaaggttctagaacagtgattttcaaacattctntctcnctntctctctctctctctgtnnctatctctctctacctaaacaagctaagaactgaaaagttctgattgacaggttgaaagacctggagcacttaagtcttctattattcaccaatcttttctccttcagcaggtggctccaatgtttaaaacctagaggttgaaccaggggttgtgaaccttaaatagagtgttatgagctactgactcttaaactttgagcttcagaggaagttaacagcaagtctgatgactcatatgcattctcacatgcttgaaggtggctgaagatgaaaatagccgaactagcaggttggtaggtgttatggtagcatctgtcccttcaaccaagaacaatctgcacctgtgacatttgagtaaactttgtgccagactgtgtcttctatttttcttatatgatgtgatacaagatatggcccaaatctgaagaaaacaaattatattatcatgtcaggggagaagaggggtcctctaggtcgccat

SEQ ID NO: 268748 - DNA, 819 bp, Homo sapiens
  misc_feature (58)..(58): n is a, c, g, or t
  misc_feature (63)..(63): n is a, c, g, or t
  misc_feature (66)..(66): n is a, c, g, or t
  misc_feature (84)..(85): n is a, c, g, or t
gaccaagtggatgtctgagtgccgatcacctttatgtttctctctatctctctctctntctcnctntctctctctctctctgtnnctatctctctctacctaaacaagctaagaactgaaaagttctgattgacaggttgaaagacctggagcacttaagtcttctattattcaccaatcttttctccttcagcaggtggctccaatgtttaaaacctagaggttgaaccaggggttgtgaaccttaaatagagtgttatgagctactgactcttaaactttgagcttcagaggaagttaacagcaagtctgatgactcatatgcattctcacatgcttgaaggtggctgaagatgaaaatagccgaactagcagcaattgttttaaaaaccgcaaggattattcgccgttgaaaataaaatcttgtgctccattcaagtacaggcacatcttctaaggaacaccaccacacaaattatcatacccattttatggatgacgaagaacacttggagaagataagaaaatggccacagttacaatgagatcaaaacagctcaatcttaaaatcaagtctctcactccaaatggagatttttatgctacattattaccaaaataattttgtttctcttttcctcaaggaagcacacatttgctgtgagcattatatattacttattaaaatttagtgattttagaatcgtaagaactttagtagaatatagttgaaaaatctgcataccttgtatagatctaaatcaaaggatactagaaaatacaagctatataaagggattacttaattattcctatttt

SEQ ID NO: 268749 - DNA, 583 bp, Homo sapiens
tagaaaaacactttaaaaagtaaaacaaaagtttataaaggaaaaaagttacagtaagctaaggttaatttattattggagaaaattaaaacaataaatttattgtagctaagtatacagtgtttataaagtctatagcagtgaacaggaatgtcctaggccttcacgttcactcaccactcactcactgactcacccagagcaacttccagtcctgcaagctccctttgtggtaagtctcctatataggtgtaccatttgttatcttttaaaccacatttttactgtatgttttctctgtttagatgcacaaataccattgtgttacaactgcctacagtattcagtacagtaacatgctgtacagatttatcgcctaggagcaagaggctataccatatagcctgggtatgcagtaggctatataccatctaggtttgtgtaagtacatacattctatgacatttgcacaatatcatgtaaaacaaatttctcagaacatatcccctgttgttaagcaatgcatgactgtatatattgggtctctgcccctggttcttggcccacagctccttgtaatctc

SEQ ID NO: 268750 - DNA, 395 bp, Homo sapiens
agtttggagaattgaaatgtatatctcctttggcataatgagccttggcttactttccctcctggcagtcacttctatcccttcagtgagcaatgctttaaactggagagaattcagttttattcaggtatgtggggttttgtttggtgaaggattgtgcaggataggatttccttgttaagaacaactgcattttaaatatgttccttattaaaagggtgcctttgaggctgtatttatgcatctagatacattatgctggaagccagcttaggattgctctggttaaataagtgaaagaccagtcagtatatgattgtactggaagactttgacagcactgccttccagtatactatgttaagaacaaaaaagttatcttaaaagagaaaaaa

SEQ ID NO: 268751 - DNA, 509 bp, Homo sapiens
taatggcagttagtgagggaggggatataacaaggtgtctgacctcccatcccatcatggctggaaactcagttttcaaggtttctttggggtccccttggccaagagggggggtccattaagtcagctggatgacttagaattttatttttatttctcaattgtaatggtaaatgaaattttaggagactttggggtttttttggaagaaggattgaagagtaagaaattaaaacagggtgactggttagacagaaatgcagaagtcacaagaagtgataactattgttacaagtagcaacaatgagatgaatgaatgaatgggaaggaaaccttaacttttttggaaaaacaagaaaggcatagaattagaaaagtgtgacgtcaaggaattcaaaagaggaaagaattttgtagaggagtgggacagaatagcagagtttaagcccaggtttggcattgtaggggccaagagaaaacagaccctttgcccatgaaggttcactaaa

SEQ ID NO: 268752 - DNA, 513 bp, Homo sapiens
gcagtgagccaagatcgcaccactgcacttcagcctgggcgacaagaacaaaactccatctcaaaaaaagaaacacgtcactctgtaggcgagtcctgacctcccgttcctgactccgccccagccttgcccacacacccatctgtggggaccatgcctcactgtgcccttttctctctcccttcccttggcagtccaaggagtcgtcctcagtcctgagttgtgacatctccagaaataacaaatacatcgtgacaggctcgggggacaagaaggccaccgtgtatgaggtggtctactgagacatgaccccccttcctgtacccgaagtccagactcccaggggaatcagcagccaggacagacatcctagcagccgcctcccagccctgcctaggaaccgtacatcccatctgctctctggccaacggcttcacaccttcccctgctgcatgtgggggccgatgggcaggggacctcggtggaaataaaatgtatctatcacaaacgcac

SEQ ID NO: 268753 - DNA, 763 bp, Homo sapiens
gcggccgcctggccgtctggtccgtctgctccggaggccgtgacggccagactcgttggtgtcctgtggttcgtctcagtcactacaggaccctggggggctgttgccacctccgccgggggcgaggagtcgcttaagtgcgaggacctcaaagtgggacaatatcctctgtggagaacacccccccatggaggcgaggtagagttggggtcgcagattttctccctgggccactgccctaaccaggactggctggcggtcggaatggagagtagcaacgtggagatcctgcacgtccgcaagccggagaaataccagctgcacctccacgagagctgcgtgctgtccctgaagtttgcctcctgcggacggtggtttgtgagcaccgggaaggacaacctgctcaacgcctggaggacgccgtacggggccagcattttccagtccaaggagtcgtcctcagtcctgagttgtgacatctccagaaataacaaatacatcgtgacaggctcgggggacaagaaggccaccgtgtatgaggtggtctactgagacatgaccccccttcctgtacccgaagtccagactcccaggggaatcagcagccaggacagacatcctagcagccgcctcccagccctgcctaggaaccgtacatcccatctgctctctggccaacggcttcacaccttcccctgctgcatgtgggggccgatgggcaggggacctcggtggaaataaaatgtatctatcacaaacgcac

SEQ ID NO: 268754 - DNA, 412 bp, Homo sapiens
acccgccagcatcagcagcaggtggaagggatcaggtagagggtacattgagcccctgctcatgctagcggtgcccttggggacctgatcccttccacccgccagcatcagcagcaggtgctccaggccgtagaacgcgccaagcaggtcaccgtgggggagctgaacagcctcatcggggtgagtctctctagcccctgccccgccatggggagacgcccactcccaggtccctggcacccacccaggaggtgttaaagctggggtggtgtgtgggccttggctccagtggtcctgggaaccccaggggcacatgctgtgcttaggtcccatcccctgtgtctacctcttgggctggggaccgctgggctcctgccgccccccgccccggcccatcctgcctcctttctag

SEQ ID NO: 268755 - DNA, 2719 bp, Homo sapiens
gcggccgccctcgccgcgctcccgccccggccgctgcccctgcccgccccgctcgccccgcgcaccccaacccggggaggggctcccacgaccccgggcgcgcgcgcttgggggcgcgccagggactccagggtcccttgccccgcgccgcttctccctcctccctctttcttcgggcagcctccccaccaccccacttcagcctcccccactcttgccgcctccatatcatcaagctctggtggcgcctggggggcttttcggatcggcaggatgtacccccagggaaggcacccgaccccgctccagtccggccagcccttcaagttctcgatcttggagatctgcgaccgcatcaaagaagaattccagtttcttcaggctcaataccacagcctcaagctagaatgtgagaagctggccagcgagaagacggaaatgcagcgacattatgtcatgtattatgagatgtcgtacgggctcaacattgaaatgcataagcaggcggagattgtgaagcgtctgagcggtatctgcgctcagattatccccttcctgacccaggagcatcagcagcaggtgctccaggccgtagaacgcgccaagcaggtcaccgtgggggagctgaacagcctcatcgggcagcagcagctccagccgctgtcccaccacgcaccccctgtgcccctcaccccccgcccagccgggctggtgggcggcagtgctacggggctgcttgctctgtctggagccctggctgcccaggctcagctggcggcggctgtcaaggaggaccgtgcgggcgtggaggccgaggggtccagagtggagagagccccgagcaggagtgcatctccctcgccccctgagagtctcgtggaggaggagcgaccgagtggccctggtggtggcgggaagcagagagcagatgagaaggagccatcaggaccttatgaaagcgacgaagacaagagtgattacaatctggtggtggacgaggaccaaccctcagagccccccagcccggctaccaccccctgcggaaaggtacccatctgcattcctgcccgtcgggacctggtggacagtccagcctccttggcctctagccttggctcaccgctgcctagagccaaggagctcatcctgaatgaccttcccgccagcactcctgcctccaaatcctgtgactcctccccgccccaggacgcttccacccccgggcccagctcggccagtcacctctgccagcttgctgccaagccagcaccttccacggacagcgtcgccctgaggagccccctgactctgtccagtcccttcaccacgtccttcagcctgggctcccacagcactctcaacggagacctctccgtgcccagctcctacgtcagcctccacctgtccccccaggtcagcagctctgtggtgtacggacgctcccccgtgatggcatttgagtctcatccccatctccgagggtcatccgtctcttcctccctacccagcatccctgggggaaagccggcctactccttccacgtgtctgcggacgggcagatgcagccggttcccttcccctcggatgcactggtaggcgcgggcatcccgcggcacgcccggcagctgcacacgctggcccatggcgaggtggtctgcgcggtcaccatcagcggctccacacagcatgtgtacacgggcggcaagggctgtgtgaaggtgtgggacgtgggccagcctggggccaagacgcccgtggcccagctcgactgcctgaaccgagacaactacattcgttcctgcaagttgctgccggatggccggagtctgatcgtgggcggtgaggccagcaccttgtccatttgggacctggcggcgcccaccccccgtatcaaggccgagctgacttcctcagccccagcctgctacgccctggccgtcagccccgacgccaaggtttgcttctcctgctgcagcgatggcaacattgtggtctgggacctgcagaatcagactatggtcaggcagttccagggccacacggacggcgccagctgcattgatatttccgattacggcactcggctctggacagggggcctggacaacacggtgcgctgctgggacctgcgggagggccgccagctgcagcagcatgacttcagctcccagattttctccctgggccactgccctaaccaggactggctggcggtcggaatggagagtagcaacgtggagatcctgcacgtccgcaagccggagaaataccagctgcacctccacgagagctgcgtgctgtccctgaagtttgcctcctgcggacggtggtttgtgagcaccgggaaggacaacctgctcaacgcctggaggacgccgtacggggccagcattttccagtccaaggagtcgtcctcagtcctgagttgtgacatctccagaaataacaaatacatcgtgacaggctcgggggacaagaaggccaccgtgtatgaggtggtctactgagacatgaccccccttcctgtacccgaagtccagactcccaggggaatcagcagccaggacagacatcctagcagccgcctcccagccctgcctaggaaccgtacatcccatctgctctctggccaacggcttcacaccttcccctgctgcatgtgggggccgatgggcaggggacctcggtggaaataaaatgtatctatcacaaacgcac

SEQ ID NO: 268756 - DNA, 2606 bp, Homo sapiens
cacatagtctaggtagagctcggggttgaatcggccgcttctccctcctccctctttcttcgggcagcctccccaccaccccacttcagcctcccccactcttgccgcctccatatcatcaagctctggtggcgcctggggggcttttcggatcggcaggatgtacccccagggaaggcacccgaccccgctccagtccggccagcccttcaagttctcgatcttggagatctgcgaccgcatcaaagaagaattccagtttcttcaggctcaataccacagcctcaagctagaatgtgagaagctggccagcgagaagacggaaatgcagcgacattatgtcatgtattatgagatgtcgtacgggctcaacattgaaatgcataagcaggcggagattgtgaagcgtctgagcggtatctgcgctcagattatccccttcctgacccaggagcatcagcagcaggtgctccaggccgtagaacgcgccaagcaggtcaccgtgggggagctgaacagcctcatcgggcagcagcagctccagccgctgtcccaccacgcaccccctgtgcccctcaccccccgcccagccgggctggtgggcggcagtgctacggggctgcttgctctgtctggagccctggctgcccaggctcagctggcggcggctgtcaaggaggaccgtgcgggcgtggaggccgaggggtccagagtggagagagccccgagcaggagtgcatctccctcgccccctgagagtctcgtggaggaggagcgaccgagtggccctggtggtggcgggaagcagagagcagatgagaaggagccatcaggaccttatgaaagcgacgaagacaagagtgattacaatctggtggtggacgaggaccaaccctcagagccccccagcccggctaccaccccctgcggaaaggtacccatctgcattcctgcccgtcgggacctggtggacagtccagcctccttggcctctagccttggctcaccgctgcctagagccaaggagctcatcctgaatgaccttcccgccagcactcctgcctccaaatcctgtgactcctccccgccccaggacgcttccacccccgggcccagctcggccagtcacctctgccagcttgctgccaagccagcaccttccacggacagcgtcgccctgaggagccccctgactctgtccagtcccttcaccacgtccttcagcctgggctcccacagcactctcaacggagacctctccgtgcccagctcctacgtcagcctccacctgtccccccaggtcagcagctctgtggtgtacggacgctcccccgtgatggcatttgagtctcatccccatctccgagggtcatccgtctcttcctccctacccagcatccctgggggaaagccggcctactccttccacgtgtctgcggacgggcagatgcagccggttcccttcccctcggatgcactggtaggcgcgggcatcccgcggcacgcccggcagctgcacacgctggcccatggcgaggtggtctgcgcggtcaccatcagcggctccacacagcatgtgtacacgggcggcaagggctgtgtgaaggtgtgggacgtgggccagcctggggccaagacgcccgtggcccagctcgactgcctgaaccgagacaactacattcgttcctgcaagttgctgccggatggccggagtctgatcgtgggcggtgaggccagcaccttgtccatttgggacctggcggcgcccaccccccgtatcaaggccgagctgacttcctcagccccagcctgctacgccctggccgtcagccccgacgccaaggtttgcttctcctgctgcagcgatggcaacattgtggtctgggacctgcagaatcagactatggtcaggcagttccagggccacacggacggcgccagctgcattgatatttccgattacggcactcggctctggacagggggcctggacaacacggtgcgctgctgggacctgcgggagggccgccagctgcagcagcatgacttcagctcccagattttctccctgggccactgccctaaccaggactggctggcggtcggaatggagagtagcaacgtggagatcctgcacgtccgcaagccggagaaataccagctgcacctccacgagagctgcgtgctgtccctgaagtttgcctcctgcggacggtggtttgtgagcaccgggaaggacaacctgctcaacgcctggaggacgccgtacggggccagcattttccagtccaaggagtcgtcctcagtcctgagttgtgacatctccagaaataacaaatacatcgtgacaggctcgggggacaagaaggccaccgtgtatgaggtggtctactgagacatgaccccccttcctgtacccgaagtccagactcccaggggaatcagcagccaggacagacatcctagcagccgcctcccagccctgcctaggaaccgtacatcccatctgctctctggccaacggcttcacaccttcccctgctgcatgtgggggccgatgggcaggggacctcggtggaaataaaatgtatctatcacaaacgcac

SEQ ID NO: 268757 - DNA, 2683 bp, Homo sapiens
gcggccgccctcgccgcgctcccgccccggccgctgcccctgcccgccccgctcgccccgcgcaccccaacccggggaggggctcccacgaccccgggcgcgcgcgcttgggggcgcgccagggactccagggtcccttgccccgcgccgcttctccctcctccctctttcttcgggcagcctccccaccaccccacttcagcctcccccactcttgccgcctccatatcatcaagctctggtggcgcctggggggcttttcggatcggcaggatgtacccccagggaaggcacccgaccccgctccagtccggccagcccttcaagttctcgatcttggagatctgcgaccgcatcaaagaagaattccagtttcttcaggctcaataccacagcctcaagctagaatgtgagaagctggccagcgagaagacggaaatgcagcgacattatgtcatgtattatgagatgtcgtacgggctcaacattgaaatgcataagcaggcggagattgtgaagcgtctgagcggtatctgcgctcagattatccccttcctgacccaggagcatcagcagcaggtgctccaggccgtagaacgcgccaagcaggtcaccgtgggggagctgaacagcctcatcgggcagcagcagctccagccgctgtcccaccacgcaccccctgtgcccctcaccccccgcccagccgggctggtgggcggcagtgctacggggctgcttgctctgtctggagccctggctgcccaggctcagctggcggcggctgtcaaggaggaccgtgcgggcgtggaggccgaggggtccagagtggagagagccccgagcaggagtgcatctccctcgccccctgagagtctcgtggaggaggagcgaccgagtggccctggtggtggcgggaagcagagagcagatgagaaggagccatcaggaccttatgaaagcgacgaagacaagagtgattacaatctggtggtggacgaggaccaaccctcagagccccccagcccggctaccaccccctgcggaaaggtacccatctgcattcctgcccgtcgggacctggtggacagtccagcctccttggcctctagccttggctcaccgctgcctagagccaaggagctcatcctgaatgaccttcccgccagcactcctgcctccaaatcctgtgactcctccccgccccaggacgcttccacccccgggcccagctcggccagtcacctctgccagcttgctgccaagccagcaccttccacggacagcgtcgccctgaggagccccctgactctgtccagtcccttcaccacgtccttcagcctgggctcccacagcactctcaacggagacctctccgtgcccagctcctacgtcagcctccacctgtccccccagatggcatttgagtctcatccccatctccgagggtcatccgtctcttcctccctacccagcatccctgggggaaagccggcctactccttccacgtgtctgcggacgggcagatgcagccggttcccttcccctcggatgcactggtaggcgcgggcatcccgcggcacgcccggcagctgcacacgctggcccatggcgaggtggtctgcgcggtcaccatcagcggctccacacagcatgtgtacacgggcggcaagggctgtgtgaaggtgtgggacgtgggccagcctggggccaagacgcccgtggcccagctcgactgcctgaaccgagacaactacattcgttcctgcaagttgctgccggatggccggagtctgatcgtgggcggtgaggccagcaccttgtccatttgggacctggcggcgcccaccccccgtatcaaggccgagctgacttcctcagccccagcctgctacgccctggccgtcagccccgacgccaaggtttgcttctcctgctgcagcgatggcaacattgtggtctgggacctgcagaatcagactatggtcaggcagttccagggccacacggacggcgccagctgcattgatatttccgattacggcactcggctctggacagggggcctggacaacacggtgcgctgctgggacctgcgggagggccgccagctgcagcagcatgacttcagctcccagattttctccctgggccactgccctaaccaggactggctggcggtcggaatggagagtagcaacgtggagatcctgcacgtccgcaagccggagaaataccagctgcacctccacgagagctgcgtgctgtccctgaagtttgcctcctgcggacggtggtttgtgagcaccgggaaggacaacctgctcaacgcctggaggacgccgtacggggccagcattttccagtccaaggagtcgtcctcagtcctgagttgtgacatctccagaaataacaaatacatcgtgacaggctcgggggacaagaaggccaccgtgtatgaggtggtctactgagacatgaccccccttcctgtacccgaagtccagactcccaggggaatcagcagccaggacagacatcctagcagccgcctcccagccctgcctaggaaccgtacatcccatctgctctctggccaacggcttcacaccttcccctgctgcatgtgggggccgatgggcaggggacctcggtggaaataaaatgtatctatcacaaacgcac

SEQ ID NO: 268758 - DNA, 2626 bp, Homo sapiens
gcggccgccctcgccgcgctcccgccccggccgctgcccctgcccgccccgctcgccccgcgcaccccaacccggggaggggctcccacgaccccgggcgcgcgcgcttgggggcgcgccagggactccagggtcccttgccccgcgccgcttctccctcctccctctttcttcgggcagcctccccaccaccccacttcagcctcccccactcttgccgcctccatatcatcaagctctggtggcgcctggggggcttttcggatcggcaggatgtacccccagggaaggcacccgaccccgctccagtccggccagcccttcaagttctcgatcttggagatctgcgaccgcatcaaagaagaattccagtttcttcaggctcaataccacagcctcaagctagaatgtgagaagctggccagcgagaagacggaaatgcagcgacattatgtcatgtattatgagatgtcgtacgggctcaacattgaaatgcataagcaggcggagattgtgaagcgtctgagcggtatctgcgctcagattatccccttcctgacccaggagcatcagcagcaggtgctccaggccgtagaacgcgccaagcaggtcaccgtgggggagctgaacagcctcatcgggcagcagcagctccagccgctgtcccaccacgcaccccctgtgcccctcaccccccgcccagccgggctggtgggcggcagtgctacggggctgcttgctctgtctggagccctggctgcccaggctcagctggcggcggctgtcaaggaggaccgtgcgggcgtggaggccgaggggtccagagtggagagagccccgagcaggagtgcatctccctcgccccctgagagtctcgtggaggaggagcgaccgagtggccctggtggtggcgggaagcagagagcagatgagaaggagccatcaggaccttatgaaagcgacgaagacaagagtgattacaatctggtggtggacgaggaccaaccctcagagccccccagcccggctaccaccccctgcggaaaggtacccatctgcattcctgcccgtcgggacctggtggacagtccagcctccttggcctctagccttggctcaccgctgcctagagccaaggagctcatcctgaatgaccttcccgccagcactcctgcctccaaatcctgtgactcctccccgccccaggacgcttccacccccgggcccagctcggccagtcacctctgccagcttgctgccaagccagcaccttccacggacagcgtcgccctgaggagccccctgactctgtccagtcccttcaccacgtccttcagcctgggctcccacagcactctcaacggagacctctccgtgcccagctcctacgtcagcctccacctgtccccccagatggcatttgagtctcatccccatctccgagggtcatccgtctcttcctccctacccagcatccctgggggaaagccggcctactccttccacgtgtctgcggacgggcagatgcagccggttcccttcccctcggatgcactggtaggcgcgggcatcccgcggcacgcccggcagctgcacacgctggcccatggcgaggtggtctgcgcggtcaccatcagcggctccacacagcatgtgtacacgggcggcaagggctgtgtgaagaaccgagacaactacattcgttcctgcaagttgctgccggatggccggagtctgatcgtgggcggtgaggccagcaccttgtccatttgggacctggcggcgcccaccccccgtatcaaggccgagctgacttcctcagccccagcctgctacgccctggccgtcagccccgacgccaaggtttgcttctcctgctgcagcgatggcaacattgtggtctgggacctgcagaatcagactatggtcaggcagttccagggccacacggacggcgccagctgcattgatatttccgattacggcactcggctctggacagggggcctggacaacacggtgcgctgctgggacctgcgggagggccgccagctgcagcagcatgacttcagctcccagattttctccctgggccactgccctaaccaggactggctggcggtcggaatggagagtagcaacgtggagatcctgcacgtccgcaagccggagaaataccagctgcacctccacgagagctgcgtgctgtccctgaagtttgcctcctgcggacggtggtttgtgagcaccgggaaggacaacctgctcaacgcctggaggacgccgtacggggccagcattttccagtccaaggagtcgtcctcagtcctgagttgtgacatctccagaaataacaaatacatcgtgacaggctcgggggacaagaaggccaccgtgtatgaggtggtctactgagacatgaccccccttcctgtacccgaagtccagactcccaggggaatcagcagccaggacagacatcctagcagccgcctcccagccctgcctaggaaccgtacatcccatctgctctctggccaacggcttcacaccttcccctgctgcatgtgggggccgatgggcaggggacctcggtggaaataaaatgtatctatcacaaacgcac

SEQ ID NO: 268759 - DNA, 2173 bp, Homo sapiens
gtagggggcccctggagtctgcatcagcagcaggtgctccaggccgtagaacgcgccaagcaggtcaccgtgggggagctgaacagcctcatcgggcagcagcagctccagccgctgtcccaccacgcaccccctgtgcccctcaccccccgcccagccgggctggtgggcggcagtgctacggggctgcttgctctgtctggagccctggctgcccaggctcagctggcggcggctgtcaaggaggaccgtgcgggcgtggaggccgaggggtccagagtggagagagccccgagcaggagtgcatctccctcgccccctgagagtctcgtggaggaggagcgaccgagtggccctggtggtggcgggaagcagagagcagatgagaaggagccatcaggaccttatgaaagcgacgaagacaagagtgattacaatctggtggtggacgaggaccaaccctcagagccccccagcccggctaccaccccctgcggaaaggtacccatctgcattcctgcccgtcgggacctggtggacagtccagcctccttggcctctagccttggctcaccgctgcctagagccaaggagctcatcctgaatgaccttcccgccagcactcctgcctccaaatcctgtgactcctccccgccccaggacgcttccacccccgggcccagctcggccagtcacctctgccagcttgctgccaagccagcaccttccacggacagcgtcgccctgaggagccccctgactctgtccagtcccttcaccacgtccttcagcctgggctcccacagcactctcaacggagacctctccgtgcccagctcctacgtcagcctccacctgtccccccaggtcagcagctctgtggtgtacggacgctcccccgtgatggcatttgagtctcatccccatctccgagggtcatccgtctcttcctccctacccagcatccctgggggaaagccggcctactccttccacgtgtctgcggacgggcagatgcagccggttcccttcccctcggatgcactggtaggcgcgggcatcccgcggcacgcccggcagctgcacacgctggcccatggcgaggtggtctgcgcggtcaccatcagcggctccacacagcatgtgtacacgggcggcaagggctgtgtgaaggtgtgggacgtgggccagcctggggccaagacgcccgtggcccagctcgactgcctgaaccgagacaactacattcgttcctgcaagttgctgccggatggccggagtctgatcgtgggcggtgaggccagcaccttgtccatttgggacctggcggcgcccaccccccgtatcaaggccgagctgacttcctcagccccagcctgctacgccctggccgtcagccccgacgccaaggtttgcttctcctgctgcagcgatggcaacattgtggtctgggacctgcagaatcagactatggtcaggcagttccagggccacacggacggcgccagctgcattgatatttccgattacggcactcggctctggacagggggcctggacaacacggtgcgctgctgggacctgcgggagggccgccagctgcagcagcatgacttcagctcccagattttctccctgggccactgccctaaccaggactggctggcggtcggaatggagagtagcaacgtggagatcctgcacgtccgcaagccggagaaataccagctgcacctccacgagagctgcgtgctgtccctgaagtttgcctcctgcggacggtggtttgtgagcaccgggaaggacaacctgctcaacgcctggaggacgccgtacggggccagcattttccagtccaaggagtcgtcctcagtcctgagttgtgacatctccagaaataacaaatacatcgtgacaggctcgggggacaagaaggccaccgtgtatgaggtggtctactgagacatgaccccccttcctgtacccgaagtccagactcccaggggaatcagcagccaggacagacatcctagcagccgcctcccagccctgcctaggaaccgtacatcccatctgctctctggccaacggcttcacaccttcccctgctgcatgtgggggccgatgggcaggggacctcggtggaaataaaatgtatctatcacaaacgcac

SEQ ID NO: 268760 - DNA, 2700 bp, Homo sapiens
gcggccgccctcgccgcgctcccgccccggccgctgcccctgcccgccccgctcgccccgcgcaccccaacccggggaggggctcccacgaccccgggcgcgcgcgcttgggggcgcgccagggactccagggtcccttgccccgcgccgcttctccctcctccctctttcttcgggcagcctccccaccaccccacttcagcctcccccactcttgccgcctccatatcatcaagctctggtggcgcctggggggcttttcggatcggcaggatgtacccccagggaaggcacccgaccccgctccagtccggccagcccttcaagttctcgatcttggagatctgcgaccgcatcaaagaagaattccagtttcttcaggctcaataccacagcctcaagctagaatgtgagaagctggccagcgagaagacggaaatgcagcgacattatgtcatgtattatgagatgtcgtacgggctcaacattgaaatgcataagcaggcggagattgtgaagcgtctgagcggtatctgcgctcagattatccccttcctgacccaggagcatcagcagcaggtgctccaggccgtagaacgcgccaagcaggtcaccgtgggggagctgaacagcctcatcgggcagcagcagctccagccgctgtcccaccacgcaccccctgtgcccctcaccccccgcccagccgggctggtgggcggcagtgctacggggctgcttgctctgtctggagccctggctgcccaggctcagctggcggcggctgtcaaggaggaccgtgcgggcgtggaggccgaggggtccagagtggagagagccccgagcaggagtgcatctccctcgccccctgagagtctcgtggaggaggagcgaccgagtggccctggtggtggcgggaagcagagagcagatgagaaggagccatcaggaccttatgaaagcgacgaagacaagagtgattacaatctggtggtggacgaggaccaaccctcagagccccccagcccggctaccaccccctgcggaaaggtacccatctgcattcctgcccgtcgggacctggtggacagtccagcctccttggcctctagccttggctcaccgctgcctagagccaaggagctcatcctgaatgaccttcccgccagcactcctgcctccaaatcctgtgactcctccccgccccaggacgcttccacccccgggcccagcagcttgctgccaagccagcaccttccacggacagcgtcgccctgaggagccccctgactctgtccagtcccttcaccacgtccttcagcctgggctcccacagcactctcaacggagacctctccgtgcccagctcctacgtcagcctccacctgtccccccaggtcagcagctctgtggtgtacggacgctcccccgtgatggcatttgagtctcatccccatctccgagggtcatccgtctcttcctccctacccagcatccctgggggaaagccggcctactccttccacgtgtctgcggacgggcagatgcagccggttcccttcccctcggatgcactggtaggcgcgggcatcccgcggcacgcccggcagctgcacacgctggcccatggcgaggtggtctgcgcggtcaccatcagcggctccacacagcatgtgtacacgggcggcaagggctgtgtgaaggtgtgggacgtgggccagcctggggccaagacgcccgtggcccagctcgactgcctgaaccgagacaactacattcgttcctgcaagttgctgccggatggccggagtctgatcgtgggcggtgaggccagcaccttgtccatttgggacctggcggcgcccaccccccgtatcaaggccgagctgacttcctcagccccagcctgctacgccctggccgtcagccccgacgccaaggtttgcttctcctgctgcagcgatggcaacattgtggtctgggacctgcagaatcagactatggtcaggcagttccagggccacacggacggcgccagctgcattgatatttccgattacggcactcggctctggacagggggcctggacaacacggtgcgctgctgggacctgcgggagggccgccagctgcagcagcatgacttcagctcccagattttctccctgggccactgccctaaccaggactggctggcggtcggaatggagagtagcaacgtggagatcctgcacgtccgcaagccggagaaataccagctgcacctccacgagagctgcgtgctgtccctgaagtttgcctcctgcggacggtggtttgtgagcaccgggaaggacaacctgctcaacgcctggaggacgccgtacggggccagcattttccagtccaaggagtcgtcctcagtcctgagttgtgacatctccagaaataacaaatacatcgtgacaggctcgggggacaagaaggccaccgtgtatgaggtggtctactgagacatgaccccccttcctgtacccgaagtccagactcccaggggaatcagcagccaggacagacatcctagcagccgcctcccagccctgcctaggaaccgtacatcccatctgctctctggccaacggcttcacaccttcccctgctgcatgtgggggccgatgggcaggggacctcggtggaaataaaatgtatctatcacaaacgcac

SEQ ID NO: 268761 - DNA, 2264 bp, Homo sapiens
cacatagtctaggtagagctcggggttgaatcggccgcttctccctcctccctctttcttcgggcagcctccccaccaccccacttcagcctcccccactcttgccgcctccatatcatcaagctctggtggcgcctggggggcttttcggatcggcaggatgtacccccagggaaggcacccgaccccgctccagtccggccagcccttcaagttctcgatcttggagatctgcgaccgcatcaaagaagaattccagtttcttcaggctcaataccacagcctcaagctagaatgtgagaagctggccagcgagaagacggaaatgcagcgacattatgtcatgtattatgagatgtcgtacgggctcaacattgaaatgcataagcagagtgcatctccctcgccccctgagagtctcgtggaggaggagcgaccgagtggccctggtggtggcgggaagcagagagcagatgagaaggagccatcaggaccttatgaaagcgacgaagacaagagtgattacaatctggtggtggacgaggaccaaccctcagagccccccagcccggctaccaccccctgcggaaaggtacccatctgcattcctgcccgtcgggacctggtggacagtccagcctccttggcctctagccttggctcaccgctgcctagagccaaggagctcatcctgaatgaccttcccgccagcactcctgcctccaaatcctgtgactcctccccgccccaggacgcttccacccccgggcccagctcggccagtcacctctgccagcttgctgccaagccagcaccttccacggacagcgtcgccctgaggagccccctgactctgtccagtcccttcaccacgtccttcagcctgggctcccacagcactctcaacggagacctctccgtgcccagctcctacgtcagcctccacctgtccccccaggtcagcagctctgtggtgtacggacgctcccccgtgatggcatttgagtctcatccccatctccgagggtcatccgtctcttcctccctacccagcatccctgggggaaagccggcctactccttccacgtgtctgcggacgggcagatgcagccggttcccttcccctcggatgcactggtaggcgcgggcatcccgcggcacgcccggcagctgcacacgctggcccatggcgaggtggtctgcgcggtcaccatcagcggctccacacagcatgtgtacacgggcggcaagggctgtgtgaaggtgtgggacgtgggccagcctggggccaagacgcccgtggcccagctcgactgcctgaaccgagacaactacattcgttcctgcaagttgctgccggatggccggagtctgatcgtgggcggtgaggccagcaccttgtccatttgggacctggcggcgcccaccccccgtatcaaggccgagctgacttcctcagccccagcctgctacgccctggccgtcagccccgacgccaaggtttgcttctcctgctgcagcgatggcaacattgtggtctgggacctgcagaatcagactatggtcaggcagttccagggccacacggacggcgccagctgcattgatatttccgattacggcactcggctctggacagggggcctggacaacacggtgcgctgctgggacctgcgggagggccgccagctgcagcagcatgacttcagctcccagattttctccctgggccactgccctaaccaggactggctggcggtcggaatggagagtagcaacgtggagatcctgcacgtccgcaagccggagaaataccagctgcacctccacgagagctgcgtgctgtccctgaagtttgcctcctgcggacggtggtttgtgagcaccgggaaggacaacctgctcaacgcctggaggacgccgtacggggccagcattttccagtccaaggagtcgtcctcagtcctgagttgtgacatctccagaaataacaaatacatcgtgacaggctcgggggacaagaaggccaccgtgtatgaggtggtctactgagacatgaccccccttcctgtacccgaagtccagactcccaggggaatcagcagccaggacagacatcctagcagccgcctcccagccctgcctaggaaccgtacatcccatctgctctctggccaacggcttcacaccttcccctgctgcatgtgggggccgatgggcaggggacctcggtggaaataaaatgtatctatcacaaacgcac

SEQ ID NO: 268762 - DNA, 1948 bp, Homo sapiens
gcggccgccctcgccgcgctcccgccccggccgctgcccctgcccgccccgctcgccccgcgcaccccaacccggggaggggctcccacgaccccgggcgcgcgcgcttgggggcgcgccagggactccagggtcccttgccccgcgccgcttctccctcctccctctttcttcgggcagcctccccaccaccccacttcagcctcccccactcttgccgcctccatatcatcaagctctggtggcgcctggggggcttttcggatcggcaggatgtacccccagggaaggcacccgaccccgctccagtccggccagcccttcaagttctcgatcttggagatctgcgaccgcatcaaagaagaattccagtttcttcaggctcaataccacagcctcaagctagaatgtgagaagctggccagcgagaagacggaaatgcagcgacattatgtcatgtattatgagatgtcgtacgggctcaacattgaaatgcataagcaggcggagattgtgaagcgtctgagcggtatctgcgctcagattatccccttcctgacccaggagcatcagcagcaggtgctccaggccgtagaacgcgccaagcaggtcaccgtgggggagctgaacagcctcatcggggtcagcagctctgtggtgtacggacgctcccccgtgatggcatttgagtctcatccccatctccgagggtcatccgtctcttcctccctacccagcatccctgggggaaagccggcctactccttccacgtgtctgcggacgggcagatgcagccggttcccttcccctcggatgcactggtaggcgcgggcatcccgcggcacgcccggcagctgcacacgctggcccatggcgaggtggtctgcgcggtcaccatcagcggctccacacagcatgtgtacacgggcggcaagggctgtgtgaaggtgtgggacgtgggccagcctggggccaagacgcccgtggcccagctcgactgcctgaaccgagacaactacattcgttcctgcaagttgctgccggatggccggagtctgatcgtgggcggtgaggccagcaccttgtccatttgggacctggcggcgcccaccccccgtatcaaggccgagctgacttcctcagccccagcctgctacgccctggccgtcagccccgacgccaaggtttgcttctcctgctgcagcgatggcaacattgtggtctgggacctgcagaatcagactatggtcaggcagttccagggccacacggacggcgccagctgcattgatatttccgattacggcactcggctctggacagggggcctggacaacacggtgcgctgctgggacctgcgggagggccgccagctgcagcagcatgacttcagctcccagattttctccctgggccactgccctaaccaggactggctggcggtcggaatggagagtagcaacgtggagatcctgcacgtccgcaagccggagaaataccagctgcacctccacgagagctgcgtgctgtccctgaagtttgcctcctgcggacggtggtttgtgagcaccgggaaggacaacctgctcaacgcctggaggacgccgtacggggccagcattttccagtccaaggagtcgtcctcagtcctgagttgtgacatctccagaaataacaaatacatcgtgacaggctcgggggacaagaaggccaccgtgtatgaggtggtctactgagacatgaccccccttcctgtacccgaagtccagactcccaggggaatcagcagccaggacagacatcctagcagccgcctcccagccctgcctaggaaccgtacatcccatctgctctctggccaacggcttcacaccttcccctgctgcatgtgggggccgatgggcaggggacctcggtggaaataaaatgtatctatcacaaacgcac

SEQ ID NO: 268763 - DNA, 1846 bp, Homo sapiens
tgagacatgaccccccttcctgtacccgaagtccagactcccaggggaatcagcagccgggacagacatcctagcagccgcctcccagccctgcctaggaaccgtacatcccatctgctctcgtggccaacggcttcacaccttcccctcccggctaccaccccctgcggaaaggtacccatctgcattcctgcccgtcgggacctggtggacagtccagcctccttggcctctagccttggctcaccgctgcctagagccaaggagctcatcctgaatgaccttcccgccagcactcctgcctccaaatcctgtgactcctccccgccccaggacgcttccacccccgggcccagctcggccagtcacctctgccagcttgctgccaagccagcaccttccacggacagcgtcgccctgaggagccccctgactctgtccagtcccttcaccacgtccttcagcctgggctcccacagcactctcaacggagacctctccgtgcccagctcctacgtcagcctccacctgtccccccaggtcagcagctctgtggtgtacggacgctcccccgtgatggcatttgagtctcatccccatctccgagggtcatccgtctcttcctccctacccagcatccctgggggaaagccggcctactccttccacgtgtctgcggacgggcagatgcagccggttcccttcccctcggatgcactggtaggcgcgggcatcccgcggcacgcccggcagctgcacacgctggcccatggcgaggtggtctgcgcggtcaccatcagcggctccacacagcatgtgtacacgggcggcaagggctgtgtgaaggtgtgggacgtgggccagcctggggccaagacgcccgtggcccagctcgactgcctgaaccgagacaactacattcgttcctgcaagttgctgccggatggccggagtctgatcgtgggcggtgaggccagcaccttgtccatttgggacctggcggcgcccaccccccgtatcaaggccgagctgacttcctcagccccagcctgctacgccctggccgtcagccccgacgccaaggtttgcttctcctgctgcagcgatggcaacattgtggtctgggacctgcagaatcagactatggtcaggcagttccagggccacacggacggcgccagctgcattgatatttccgattacggcactcggctctggacagggggcctggacaacacggtgcgctgctgggacctgcgggagggccgccagctgcagcagcatgacttcagctcccagattttctccctgggccactgccctaaccaggactggctggcggtcggaatggagagtagcaacgtggagatcctgcacgtccgcaagccggagaaataccagctgcacctccacgagagctgcgtgctgtccctgaagtttgcctcctgcggacggtggtttgtgagcaccgggaaggacaacctgctcaacgcctggaggacgccgtacggggccagcattttccagtccaaggagtcgtcctcagtcctgagttgtgacatctccagaaataacaaatacatcgtgacaggctcgggggacaagaaggccaccgtgtatgaggtggtctactgagacatgaccccccttcctgtacccgaagtccagactcccaggggaatcagcagccaggacagacatcctagcagccgcctcccagccctgcctaggaaccgtacatcccatctgctctctggccaacggcttcacaccttcccctgctgcatgtgggggccgatgggcaggggacctcggtggaaataaaatgtatctatcacaaacgcac

SEQ ID NO: 268764 - DNA, 2642 bp, Homo sapiens
gcggccgccctcgccgcgctcccgccccggccgctgcccctgcccgccccgctcgccccgcgcaccccaacccggggaggggctcccacgaccccgggcgcgcgcgcttgggggcgcgccagggactccagggtcccttgccccgcgccgcttctccctcctccctctttcttcgggcagcctccccaccaccccacttcagcctcccccactcttgccgcctccatatcatcaagctctggtggcgcctggggggcttttcggatcggcaggatgtacccccagggaaggcacccgaccccgctccagtccggccagcccttcaagttctcgatcttggagatctgcgaccgcatcaaagaagaattccagtttcttcaggctcaataccacagcctcaagctagaatgtgagaagctggccagcgagaagacggaaatgcagcgacattatgtcatgtattatgagatgtcgtacgggctcaacattgaaatgcataagcaggcggagattgtgaagcgtctgagcggtatctgcgctcagattatccccttcctgacccaggagcatcagcagcaggtgctccaggccgtagaacgcgccaagcaggtcaccgtgggggagctgaacagcctcatcgggcagcagcagctccagccgctgtcccaccacgcaccccctgtgcccctcaccccccgcccagccgggctggtgggcggcagtgctacggggctgcttgctctgtctggagccctggctgcccaggctcagctggcggcggctgtcaaggaggaccgtgcgggcgtggaggccgaggggtccagagtggagagagccccgagcaggagtgcatctccctcgccccctgagagtctcgtggaggaggagcgaccgagtggccctggtggtggcgggaagcagagagcagatgagaaggagccatcaggaccttatgaaagcgacgaagacaagagtgattacaatctggtggtggacgaggaccaaccctcagagccccccagcccggctaccaccccctgcggaaaggtacccatctgcattcctgcccgtcgggacctggtggacagtccagcctccttggcctctagccttggctcaccgctgcctagagccaaggagctcatcctgaatgaccttcccgccagcactcctgcctccaaatcctgtgactcctccccgccccaggacgcttccacccccgggcccagctcggccagtcacctctgccagcttgctgccaagccagcaccttccacggacagcgtcgccctgaggagccccctgactctgtccagtcccttcaccacgtccttcagcctgggctcccacagcactctcaacggagacctctccgtgcccagctcctacgtcagcctccacctgtccccccaggtcagcagctctgtggtgtacggacgctcccccgtgatggcatttgagtctcatccccatctccgagggtcatccgtctcttcctccctacccagcatccctgggggaaagccggcctactccttccacgtgtctgcggacgggcagatgcagccggttcccttcccctcggatgcactggtaggcgcgggcatcccgcggcacgcccggcagctgcacacgctggcccatggcgaggtggtctgcgcggtcaccatcagcggctccacacagcatgtgtacacgggcggcaagggctgtgtgaaggtgtgggacgtgggccagcctggggccaagacgcccgtggcccagctcgactgcctgaaccgagacaactacattcgttcctgcaagttgctgccggatggccggagtctgatcgtgggcggtgaggccagcaccttgtccatttgggacctggcggcgcccaccccccgtatcaaggccgagctgacttcctcagccccagcctgctacgccctggccgtcagccccgacgccaaggtttgcttctcctgctgcagcgatggcaacattgtggtctgggacctgcagaatcagactatggtcaggcagttccagggccacacggacggcgccagctgcattgatatttccgattacggcactcggctctggacagggggcctggacaacacggtgcgctgctgggacctgcgggagggccgccagctgcagcagcatgacttcagctcccagattttctccctgggccactgccctaaccaggactggctggcggtcggaatggagagtagcaacgtggagatcctgcacgtccgcaagccggagaaataccagctgcacctccacgagagctgcgtgctgtccctgaagtttgcctcctgcgtccaaggagtcgtcctcagtcctgagttgtgacatctccagaaataacaaatacatcgtgacaggctcgggggacaagaaggccaccgtgtatgaggtggtctactgagacatgaccccccttcctgtacccgaagtccagactcccaggggaatcagcagccaggacagacatcctagcagccgcctcccagccctgcctaggaaccgtacatcccatctgctctctggccaacggcttcacaccttcccctgctgcatgtgggggccgatgggcaggggacctcggtggaaataaaatgtatctatcacaaacgcac

SEQ ID NO: 268765 - DNA, 1091 bp, Homo sapiens
  misc_feature (7)..(7): n is a, c, g, or t
  misc_feature (11)..(11): n is a, c, g, or t
ctgaagntcgncttaaaaggattcccggtaagatttccaagaaacgggttccaccaagcatgtgtacacgggcggcaagggctgtgtgaaggtgtgggacgtgggccagcctggggccaagacgcccgtggcccagctcgactgcctgaaccgagacaactacattcgttcctgcaagttgctgccggatggccggagtctgatcgtgggcggtgaggccagcaccttgtccatttgggacctggcggcgcccaccccccgtatcaaggccgagctgacttcctcagccccagcctgctacgccctggccgtcagccccgacgccaaggtttgcttctcctgctgcagcgatggcaacattgtggtctgggacctgcagaatcagactatggtcaggcagttccagggccacacggacggcgccagctgcattgatatttccgattacggcactcggctctggacagggggcctggacaacacggtgcgctgctgggacctgcgggagggccgccagctgcagcagcatgacttcagctcccagattttctccctgggccactgccctaaccaggactggctggcggtcggaatggagagtagcaacgtggagatcctgcacgtccgcaagccggagaaataccagctgcacctccacgagagctgcgtgctgtccctgaagtttgcctcctgcggacggtggtttgtgagcaccgggaaggacaacctgctcaacgcctggaggacgccgtacggggccagcattttccagtccaaggagtcgtcctcagtcctgagttgtgacatctccagaaataacaaatacatcgtgacaggctcgggggacaagaaggccaccgtgtatgaggtggtctactgagacatgaccccccttcctgtacccgaagtccagactcccaggggaatcagcagccaggacagacatcctagcagccgcctcccagccctgcctaggaaccgtacatcccatctgctctctggccaacggcttcacaccttcccctgctgcatgtgggggccgatgggcaggggacctcggtggaaataaaatgtatctatcacaaacgcac

SEQ ID NO: 268766 - DNA, 2264 bp, Homo sapiens
gcggccgccctcgccgcgctcccgccccggccgctgcccctgcccgccccgctcgccccgcgcaccccaacccggggaggggctcccacgaccccgggcgcgcgcgcttgggggcgcgccagggactccagggtcccttgccccgcgccgcttctccctcctccctctttcttcgggcagcctccccaccaccccacttcagcctcccccactcttgccgcctccatatcatcaagctctggtggcgcctggggggcttttcggatcggcaggatgtacccccagggaaggcacccgaccccgctccagtccggccagcccttcaagttctcgatcttggagatctgcgaccgcatcaaagaagaattccagtttcttcaggctcaataccacagcctcaagctagaatgtgagaagctggccagcgagaagacggaaatgcagcgacattatgtcatgtattatgagatgtcgtacgggctcaacattgaaatgcataagcaggcggagattgtgaagcgtctgagcggtatctgcgctcagattatccccttcctgacccaggagcatcagcagcaggtgctccaggccgtagaacgcgccaagcaggtcaccgtgggggagctgaacagcctcatcgggcagcagcagctccagccgctgtcccaccacgcaccccctgtgcccctcaccccccgcccagccgggctggtgggcggcagtgctacggggctgcttgctctgtctggagccctggctgcccaggctcagctggcggcggctgtcaaggaggaccgtgcgggcgtggaggccgaggggtccagagtggagagagccccgagcaggagtgcatctccctcgccccctgagagtctcgtggaggaggagcgaccgagtggccctggtggtggcgggaagcagagagcagatgagaaggagccatcaggaccttatgaaagcgacgaagacaagagtgattacaatctggtggtggacgaggaccaaccctcagagccccccagcccggctaccaccccctgcggaaaggtacccatctgcattcctgcccgtcgggacctggtggacagtccagcctccttggcctctagccttggctcaccgctgcctagagccaaggagctcatcctgaatgaccttcccgccagcactcctgcctccaaatcctgtgactcctccccgccccaggacgcttccacccccgggcccagctcggccagtcacctctgccagcttgctgccaagccagcaccttccacggacagcgtcgccctgaggagccccctgactctgtccagtcccttcaccacgtccttcagcctgggctcccacagcactctcaacggagacctctccgtgcccagctcctacgtcagcctccacctgtccccccaggtcagcagctctgtggtgtacggacgctcccccgtgatggcatttgagtctcatccccatctccgagggtcatccgtctcttcctccctacccagcatccctgggggaaagccggcctactccttccacgtgtctgcggacgggcagatgcagccggttcccttcccctcggatgcactggtaggcgcgggcatcccgcggcacgcccggcagctgcacacgctggcccatggcgaggtggtctgcgcggtcaccatcagcggctccacacagcatgtgtacacgggcggcaagggctgtgtgaaggtgtgggacgtgggccagcctggggccaagacgcccgtggcccagctcgactgcctgaaccgagacaactacattcgttcctgcaagttgctgccggatggccggagtctgatcgtgggcggtgaggccagcaccttgtccatttgggacctggcggcgcccaccccccgtatcaaggccgagctgacttcctcagccccagcctgctacgccctggccgtcagccccgacgccaaggtttgcttctcctgctgcagcgatggcaacattgtggtctgggacctgcagaatcagactatggtcaggcagttccagggccacacggacggcgccagctgcattgatatttccgattacggcactcggctctggacagggggcctggacacgctggcccatggcgaggtggtctgcgcggtcaccatcagcggctccacacagcatgtgtacacgggcggcaagggctgtgtgaaggtgtgggacgtgggccagcctggggccaagacgcccgtggcccagctcgactgcctgaaccgagacaacta

SEQ ID NO: 268767 - DNA, 823 bp, Homo sapiens
gcggccgccctcgccgcgctcccgccccggccgctgcccctgcccgccccgctcgccccgcgcaccccaacccggggaggggctcccacgaccccgggcgcgcgcgcttgggggcgcgccagggactccagggtcccttgccccgcgccgcttctccctcctccctctttcttcgggcagcctccccaccaccccacttcagcctcccccactcttgccgcctccatatcatcaagctctggtggcgcctggggggcttttcggatcggcaggatgtacccccagggaaggcacccgaccccgctccagtccggccagcccttcaagttctcgatcttggagatctgcgaccgcatcaaagaagaattccagtttcttcaggctcaataccacagcctcaagctagaatgtgagaagctggccagcgagaagacggaaatgcagcgacattatgtcatgtattatgagatgtcgtacgggctcaacattgaaatgcataagcaggcggagattgtgaagcgtctgagcggtatctgcgctcagattatccccttcctgacccaggagcatcagcagcaggtgctccaggccgtagaacgcgccaagcaggtcaccgtgggggagctgaacagcctcatcgggcagcagcagctccagccgctgtcccaccacgcaccccctgtgcccctcaccccccccctgcctaggaaccgtacatcccatctgctctctggccaacggcttcacaccttcccctgctgcatgtgggggccgatgggcaggggacctcggtggaaataaaatgtatctatcacaaacgcac

SEQ ID NO: 268768 - DNA, 463 bp, Homo sapiens
cacatagtctaggtagagctcggggttgaatcggccgcttctccctcctccctctttcttcgggcagcctccccaccaccccacttcagcctcccccactcttgccgcctccatatcatcaagctctggtggcgcctggggggcttttcggatcggcaggatgtacccccagggaaggcacccgaccccgctccagtccggccagcccttcaagttctcgatcttggagatctgcgaccgcatcaaagaagaattccagtttcttcaggctcaataccacagcctcaagctagaatgtgagaagctggccagcgagaagacggaaatgcagcgacattatgtcatgcagatgagaaggagccatcaggaccttatcaacggcttcacaccttcccctgctgcatgtgggggccgatgggcaggggacctcggtggaaataaaatgtatctatcacaaacgcac

SEQ ID NO: 268769 - DNA, 425 bp, Homo sapiens
ctatcctagaaggctgtcagaaaacactgagtgaatggctaaacgtgaggcctttaaaacagagcctggcacagagaagctagaataagcagttggttccgatgactaccacctttctacagaactgcagagagaatgctctacaacatgagagaggcatctagtcctgcttaggggcatgacagcagacctgagtctccatgaaccaggtgaaaggtgtcattcggggctggagctgaggcaggagcagcaaaaacttcaggtgctgaagctagagagaaagcagaccaaatatgctccaaaagaaaggagctcagcctgggtgcagtggctcatgcctgtaatcccagcactttgagaggccaaggcaggcagatcacaaggtcaggagtttgagaccagcctggccaacatgacgaaacccc

SEQ ID NO: 268770 - DNA, 436 bp, Homo sapiens
tcagattatccaggaatcatcgaaccagagttgttttactttctacttataaagaacataagaaagcactcttgatctaaggcatgacactgagctggctcacacctgctctgatctttattactttctgtatgtaaaattctcacagtacagtaactgtgaggaaaataataattttgtgcacaatactttaggtaggaaggaaactatattaataataattcaatttaagtagaaatataagtaaacttaattacaggcttttgaaaatccaagcctatttattttatccagttttaaaattcaattcctatttattatctatttaaacctactctgtggagcatacttatacccctcgaaattatcagaattaagaaaaattcagtaattcctgtgtcaaaaatattctgtaaaagtaaactgttcaacagag

SEQ ID NO: 268771 - DNA, 306 bp, Homo sapiens
catgaatgtggctatgattaaattgtgatgaggactgtgacccacaagactggaaaaccagtttggcaccttgatgcagatgttttcaaggactgggttagagaatacataccatcattctacttttagctgttttgtttcattaaaacctttttggttttaatgaaacaaaccataacatgtatgacaaccataacatgtatgacaacatagcatgacaaccataacaagtacaatattttggccaatttcatttaatttggcacatagaatggaagaaatattaagatattattttctacatga

SEQ ID NO: 268772 - DNA, 1589 bp, Homo sapiens
agcggactgtagcctctgcctcctgggttcaggcagttgtcctgtctcggcctcccaagtagctgggattgcagatgcgtaccatggagcccagctggtttttgtatttttggtggagacagggtttcgccgtgttggccagctggtcttgagctcctgacctcaggtgatctgcccaccttggccacctcctgaagtgctgcaattgcaggcgggagccactgcgccctgcccaaacgcctcatttcttaataccatcaccttggagttaggttttcaacgtagaatttggagggacacaaatcccagcaccatccaatcttatcctatcctatccttccctaccctatcctatcccatcccatcttatgtcattgtttcaaattactggttgcaacccaccaaatgatgttatgacccatgagtgcgtctaaatcctaagttctgaaagctgttcttagtggtacattcccagaaagccatagttgttggtaatcagtgcttagtgtgtatttgctgcaattggcagggctcagcatggtgtcatatcttgggatccagagtgcccccaggccttgtggggacaggtaaggagaaagaaattaggagcttccaagaatctggttacccagaaccctgaccccactaggaggaatacaggatcacattttatggcctcttgtctttgtgatggcccatgttcgtgggggaccttgaggctaggtggtcctagagacccagtgggcagcgtggccctgaacttaagccagcattaggtcaggagggtttagaaggcaagagaaagagataggccgggtgcggtggctcacacctgtaatcccagcactttgggaggccaaggtgggtggatcacttgaggccaggagtttgagaccagcctggccaacatggtgaaacaccatctctactaaaaatacaaaaattagccaggcatggtggtgggcacctgtaatcccagctacttgggaggctgaggcaggagaatctcttgaacccgggaggcagaggtttcagtgagccgagatcacaccattgtactccagcctgggtgatagagtgagactgtctcaaaaaaagaaagaaagaaagaaagagattaaatacactggagaaaggaaggagggcacccagtgttggaagggctactctgcctccatcagcattttcaaatttcaggctctggcctttcaccgaatgcacttcccaccagtcctgtttacactgccaggttccgctaggagctttcccacctctgcaggtgcaggcctcgctgcttcttaaggcctttctctggggtgggaggaaacggaaactgtatgattgtctttcatattcacttttatagacctataatgtctacaatgtctgagagtggcgtttgcggcatgacttttaaaaaaatgtcctgctggtattggaccctttctgtgtttgtgaaattgctattttgtattaacacagtatttgataaacatttatattaagaagaataatccctctgctgaatattattgtttccaatggagtagaaagaacttaaaaaaaaaaatcaagatgtctcactctgg

SEQ ID NO: 268773 - DNA, 326 bp, Homo sapiens
ctgctcatcctagcactgggcgctctgggaaggctgtggagggtgtaggtacagtgtggtgagcccagattccaaaggccaggtccagggtcgggcacagtgactcatgcctgtaattccagcactttggaaggacaaggacaaaggattgcttgagcccagcaattctgttcaagacaggcctggacaacatagcaagaccccatctctaaaaaaatttttttttaaattagccagatgtggtgatgtgcacctgtagtcccagctacctgggaggctgagaagggaggattgcttgagcccaggagtttaaggttacagtgagc

SEQ ID NO: 268774 - DNA, 351 bp, Homo sapiens
gaaaaagaagagcaactaaacctaaagtgagcagaaggaaagaactaataaaatgttaagtgaaaaataaaggagagaatacaaaaacaataggtagaataaacaaatctaaaagttggtaccttgaaaacatcaacaaaattaacaaacttttcacaaggatgagcaagagaaaaagagagaaggctcaaattattaaaatcaggagtgaaagggggaacattactacagaccttatggaaataaaaagaatactgagggaatactacaaaaaactgtatgccaataagttagacaacatagacaacattgacaaattcctagaaagacataaactactaaagattactc

SEQ ID NO: 268775 - DNA, 169 bp, Homo sapiens
ttaccctgggcactttgtcctagtgatcctccatctcctgcccccaccctgcttcttggctttcctttagttgcacactcctgttttcaacagtcatgcccagaattttagccaagaaaaattagaattcggaccaaactgtagaaaataataaaaatttaaaaacatt

SEQ ID NO: 268776 - DNA, 492 bp, Homo sapiens
taagtgttttaaagcaatatttagtctaagtagtaaatattcctaagacagacagtaactttacaattcatttgttttgttgtcttaaatggcagaacaatgttgtttttctgtcactaacgtttttatatgttttctaagatgatgaatcatacagaatcaccaaactcatatttctgttcaggtctgaccatttttacaattttcatttgcctatgtaaatattacccacatattatagttcataatttgtgatatgtcagcagatttcattgaacttgagtcttaggtcacaatagaactaacaacatattggcttcattctagtccaatttgttttcttttatgcctacacaccaagggtgttcgcttgaaaacaagtcttccttcacctcctgctttttctcctcacctgctctttaaaaaataattgtacctgactcaaattgatagtcttctaggattttcattcgctaactcaaattgctagtc

SEQ ID NO: 268777 - DNA, 321 bp, Homo sapiens
tagggtccagacattatgtaaattggcattaagtttgaataatgtatggacccagtttaaaaggaaaaaatgctttgggaggctgaggcaggtgcattgcctgaggtcaggagttccagaacagcctggccaacacagtgaaaccccatctctactaaaaatacaaaaagttagctgggcacggtggcgggcacctgtaatcccagctactcaggaggctaatgcaggagaatcacttgaacctgggaggcagaggttgcagtgagccaagatcgtgccattgcactccagcctgggtgatgagagcaaaactccatctca

SEQ ID NO: 268778 - DNA, 562 bp, Homo sapiens
  misc_feature (17)..(17): n is a, c, g, or t
cagtgatccccccgggntgcaggaaattcgcggccgcgtcgacacggcttgcgaagaagacgacagaaggggagagatgaagctccctgcccagaggagctgacctcccagcagtcttacaggatatggttacagaggtgaatctgggggagagtccatcgttggtgttgctccactgacctccaggatggcctccagggaccccgcctcctggtggccactgtccccatcgtattagagttggccttttgaaagctgtgagtccaagttgcctggcaaatagataaggaatacaaggtgatcattcttaagacctcggggatctgcaaaccagccttctggaacctttgagcttccaggatgattcggaatttggatgcagccacagaaagcctaagcgccacaagtcccgccatgacgccctgaggcgtgggttcacacttgggtgtggctggtcacgtctataaaaatgagccttcactttgggaggcccaggcgagtggatcacaaggtcaggagatcaagaccatcctggccaacatggtgaaaccctgtctctact

SEQ ID NO: 268779 - DNA, 436 bp, Homo sapiens
attaaagtttttgttttgttgtttgttcttaatgttgtgtaatgaaatgtttcaacatttggaagataagcgtaactcagtgaatgaatgttcctcaagtgaccagtgtacagtgggtaagagagccattcacagtgcaaggtagacaagtgggttttaatgtgagaaagtacaaagagttaattgttatgatttttagattccacattgcaactcatctttaagaaactgccacttgtcaagttttggtggagtgtctgagaagaatgttcacaataatatgaaaaggctgtaaagtatttcttccttgtccgacatatctataaggccattgtttatgtacttcaaccaaaaaaaaattgcaaaatattgaatgtagaagcagatgtgagaatccaggcaataaagagatttgtaaaaatgtaaaactgtgccg

SEQ ID NO: 268780 - DNA, 127 bp, Homo sapiens
agatcagagcagaacagatcttacctttggaaaactgttaatttttaccacgttgaaacacaaagattcatagttgatgcgatccagcacctgccagaatcatagcaatcagacttccaaatatgag

SEQ ID NO: 268781 - DNA, 862 bp, Homo sapiens
gtcatgtggtactttgctttcattttttaattaccaatgcatattagctatttgtatttcttcttttaggatccagtgtattttgaatttctagaacttaaattataactccttatactcaaatttatacacaaaaacactccaaagacagatgttagtaatttggctatgggcatgattgaaaattgatttctgaagtatacttggaaatgtggtaataaggttgttttgagtggaatattgttagaacatatttatatattataaaatattttttgatttcagaagaaaactttcaccttattttttaatgttctaagtctttactttttaactactacctttaaattgagccttatttataattgtcctatgaagttatattgtatcattctgtgtttgttgcagtatcatttaattgttttgtaaaaagctacattgcaacacaataaaatacttcaatgcttacaataggaagtcttgaaatagtatcctgacatggtattagaaagtcttatctgcagaataacacaaatgcacaccaggaatggggagggatgagggcggaccagagaccagaagagctttgtttttatgaggagaaagaagggaatcacgctactcttgttgactctttactccaagttcattcttcattgctaatgtctccaaatagtgctaccttaggattgatttccagaatgtttcttgtttgtattattagaaagttaaataagtaccattgtaattttgaatatactttcaacagcatggtagaatatatgccatgtggtaatagtagtctttgtttccatttaagctttggcaaatctcttttagtactaattagtttaaaaaaaaa

SEQ ID NO: 268782 - DNA, 401 bp, Homo sapiens
gtttcaaattcagcctatgggtggagagtggtagcaaagatcaatttccttgatatctaaaagcttaaacataacagcagttgcaattatttaaacaatattctgttaaaaaaatgcttttcttcttattaaaataactttaatacaactaattccatcacaataataattctaatattaaatttggcattgtattaataacagatagatggaaaatatagaaaaagccaaagtagaaaattagaatgacctattttgtaattctaagagattttataattttgattgcatttttcctattattttatgttcatgtatatttaaaacactgagatcacagtgtgcatattgttttatactagcacacaatcccttaaattttttatatttctccctagtct

SEQ ID NO: 268783 - DNA, 289 bp, Homo sapiens
tttcactctagttgcgcaggctagaatgcaatggcgtgatatgggctcactgcaaccttggcctccaaggttcaagtgattctcctgcctgcctcagcctcccgagtagctgggattacagacatgcaccaccacacctggctacccaaacccttatcttaatccagacattcctttctcttcattccaggtctttagataaaaactctttcaaccaatttccagtcagaaaatcttggattggaaactgacctggaagcccaccacccaccttcgtcagttgtcctgc

SEQ ID NO: 268784 - DNA, 892 bp, Homo sapiens
gcccagaaccttggctcaggccaagtaggccagaccaccccacaacagacatcttccctgaatgcagggtttgagaagtgccctaatgccctctaactgatgctgagtttgaagaatccatcagttaaggggaggtgtttctgagtttgaagaatcaaacaccttcctaattggtaggaatcctgaaaacactccacaccggagtaaaagactttggttttttatctttatgcctgactaaaagttaactctcattctttcattcagcaaatattttgtgctagtgcatgacactgcagattaatatcgtagatgaactgagtctgggctaggtagagtcaaaaaaaaatttcctaaaggagcctgtacctaaactgagtcttcagagagaagttggaactggcaaagtgaggaaggacggggtctggagggaagagtgagtgcaaaggcacagcacatacagaatgcctgcatgctctagaatccaaaactgtgtcagccaaatttgagttgatggagggacagccaaactgagatacccaggcggtggttggatttatggatctggatttcaggggagtgggcagggctaggggaatagaactgagggtcatgatgtcagtggtaggagttgaagtcttggaagaaagagtagatagaaactttgttttctgatgaacattctatgaggaagttcagcagaggttggaaacatctttaccatttataaataaattttatgtaaaatcctatcctgctgtcatgtttaagcaacttattatgcacagcaccaggacatcaatgtaaattgcatgccagtctttgctctcagtttcaaaggcattcttccctgcctgctgtctaatctttacaaagaaaggttaactccaga

SEQ ID NO: 268785 - DNA, 407 bp, Homo sapiens
actgactcagattcatttattatagcacctcatttaaatgcaaactcaattggtatttctcccacaggtttttttcagtaccatatctgtgtgagcctttttacacacaatccccttagaaaaggaatgttgtctaaaaataggtgaattgagtttctgaaaaaacagaaatccaaagagtaaatttcaaatgtctgtctataaaaaatgataggcaggcaaggtaatggatatgttaaattacctttatttaatcattgtgcattgtgtacatatatcagaacatcacattgtaccccataaatgtttgcaattatgatttatctattgaaaataattttaaaaaaccttgtgaatcgtgagaaaaattaactcttgaaaataaaaaataaaatgtcataaattta

SEQ ID NO: 268786 - DNA, 557 bp, Homo sapiens
actgactcagattcatttattatagcacctcatttaaatgcaaactcaattggtatttctcccacaggtttttttcagtaccatatctgtgtgagcctttttacacacaatccccttagaaaaggaatgttgtctaaaaataggtgaattgagtttctgaaaaaacagaaatccaaagagtaaatttcaaatgtctgtctataaaaaatgataggcaggcaaggtaatggatatgttaaattacctttatttaatcattgtgcattgtgtacatatatcagaacatcacattgtaccccataaatgtttgcaattatgatttatctattgaaaataattttaaaaaaccttgtgaatcgtgagaaaaattaactcttgaaaataaaaaataaaatgtcataaatttaaaaaaaagaaaaacaaacccagagagtgcagtggcacaatctcagctcactgcaacctccacctcccgggtttaagcagttctcttgcctcagcttcccaagtagctgggattacaggcgcccttcaccacgcccaactgattttttgta

SEQ ID NO: 268787 - DNA, 407 bp, Homo sapiens
tatctacgtacatgcatttagaaatatgaaagtaaatatttctacaattttttaacaaaaattggctaacatagctaacaggattgctcccaaagagtgaggcaagagtgtgggacagggtgagaagtatgattgttgcaagtgctactgcaaatatttcacactattttttttaagagattggggtcttactatgttgtccaagctggccttgaactcctgggctcaagcaatccttctgcttcacctcccaagtagctggtactataagcatatgccatcatacccagctctttcacgcttttaacctacatacatgttttactgtagtaaaaagaaacattaaattacaaaaactcaaagttagtataactgaaaataaaaaactatgacttagtaagttagca

SEQ ID NO: 268788 - DNA, 532 bp, Homo sapiens
actactgcactccagcctgggcaacagagggagaccctgtctctaaataaaaaaagaaaagaaaaaaaaagcttacaacttgagattcagcatcttgctcagtatttccaagactaatagattatggtttaaaagatgcttttatactcattttctaatgcaactcctagaaactctatgatatagttgaggtaagtattgttaccacacatgggctaagatccccagaggcagactgcctgagttcaattcttggctccaccattcccaagttccctaacctctctatgcctcagtttcctcttctgtaaagtagggacactcatacttctcatttcagaacatttttgtgaagaataaattatgttatccatttgaggcccttagaatggtacccggtgtatattaagtgctagtacatgttagctatcatcattatcactttatatgagatggactggggttcatagaaacccaatgacttgattgtggctactactcaataaataatagaatttggatttaaaaccag

SEQ ID NO: 268789 - DNA, 273 bp, Homo sapiens
gatcacttgaggatggcatgagccttggaggtggaggttgcagtgaaccaagatcaccgcaccccagcctgggtgacagagtaaggccctggcttaaaaaaaaaaaaaaaaaagttaaaatcagtcctcttctttgtaacaatatagtgttatctgcttgtctaaactgaatgctagtcttgttgttcttatcagtagttggtgaacaaatgcgcctgttttactggaatagtcacagttttgatcactgaatctcacctgctcatagctgtg

SEQ ID NO: 268790 - DNA, 605 bp, Homo sapiens
gagtgaaaaatgaaatttaatatttatgtaaaattagaaaaaaaagttcaaattaatgaagcagaaataaatagaattaaaaataaatgaattctttgaaaaagagtaaattcataagtaagtttaacttgcacatctgaccaagtgaaaaaagagagagcagaagtaggcaaaatcaggaataaggagacaaccatggatctaggggggaggaactaagtttgctgctctgtagcaccaaatttgaaaacaacaagaaatggtggatttccatttaaaatacaaactactgaaattgaatcaagaaaagtctgaatggttacaagttctattgttaaaactgttataggccataaataaaagcttccaaatttattttacaaagtaatatcaaaacctaacaaatagtgtttaaaaagaaaactgtaggccaatttcacatgtgacagaatatatatgcaaaagtttaaataaaatattaggaaatagaatccagcaatatatgcgaaaaatccttataacaaaacagatggtattgcaggaattcagtgctggttctgtacctgaaaatgtctatatactatattaaattgaaaagctcattt

SEQ ID NO: 268791 - DNA, 364 bp, Homo sapiens
atttcttagctaagatatctggtgccacggcttcagtggtttctataccactacacgcatcttcaccatcacccatcttacgacaggaaggagtgcttggttcaactattttcattaaaccatagtctttgtccgctggatgatatgtcgccaggatgttcatttcttcccacttctgggattttttgctcagctcctcctcgacactcccgctgggctgttcagccgaggccaccatagaggaagctgtagaggtcttgttcttcaggatccccttgactggccagtgcgaggcagtccaggccgccatttctgggcgctctggctgttggctcagggtcgctgcttggcgtggagtccggaa

SEQ ID NO: 268792 - DNA, 612 bp, Homo sapiens
tttttaaaaagtattattaacactttctttattttgtattactgaataaactccttttttctgaattttttgaacttctgatatttgtaacactaattcatgaatctccaccaaaataaatacttatagagagtattgcatgatttaagagagtaaatgtgttttccaaagatgaatagagtcctgccaccatcaccacccgccacccctacaaattgaggatatcctaaataacctttaatatagcatatggacattgtacatttaaggtcagggaaggcacttttcttcctaattttatattacagtgcaaatcttgggttgactcactttaaggtttctgactgcccaaaatattttttcccctttacgttacagaacattataataaggcaaacaagttagggatttgaataacactcaaagcaacaaactgtttccagaaagtaccatatttgaagctgtttggtgtgtaaatgttcatttagctcatgtatttacaaaactcttactaaaacttaatttttgtgccataacagtgtctttcctggattacattgtaactggaagtaagcattttctaaaataataaaagtgcccttaagtttaaaa

SEQ ID NO: 268793 - DNA, 202 bp, Homo sapiens
ctctcctgaataattaacaattgctgactagtggtaacaagaagctctgggcattcttgttgttgtgctattaatatgctttataacatttcaaacttcattatgaggcaaaactcaagagataaggcacaaattgatagtcttgtttagcaattaaaatttcagcctcatgataatgatgaaaaagttatttcatttcatt

SEQ ID NO: 268794 - DNA, 389 bp, Homo sapiens
ccacacccacctccctaaacatatacaccccattcctaacctctgccaactactaatctcttctccatgctattgttttaaaatgtttatataaatggaaccatacaatacataacctttgagattgcccaccctccctgacccaaggataattcccttgacatcatccaaattgttgcctgtattgatactgtgttcctttttttggtggggttcatattccatgatacagaggtacagcagtttgtttaactgtttacttgtgagtgacgtctgggttgtttccagttgggggctattttatgaataaagctgcaagggacattggtgtataggcttgtgtgaacataagttttcatttttcttgaataaatgcctaagagtacaat

SEQ ID NO: 268795 - DNA, 369 bp, Homo sapiens
tcagcaggtgggcgtcactggtttagcaaggacagaagagtaggtttctcatttttgcaaagaaatggtccataagctggagattgaagcatttttcctccagttccctcactaaccagctgggtggcaatgataaatcacttccttttcctataaaatgaggggtctgaatagatgctaatgccatttgctacacaccaggcactgctccaactactgcaggcacatttattgccgaatccccacaaaggaggtgctatcactaactccttttaaagaaaggaggcggccaggtgcggcggctcacgcctgtaatcccagcactttgggagcacgaggcgggagaatcgcttgagtccaggagtttga

SEQ ID NO: 268796 - DNA, 451 bp, Homo sapiens
gggggcatgttaactaagtaatgtttcatagaaatatgtaattaacctacctgtggagcctctttccgtgcattctggaaagatcacaaaatattgccctggatttattgggcaagattcctgatacctgtcataaattcttgggaaagctgagtcctagaactacttttcaaattttaggtttacacatttctttcaggagcagtgtatctaatatggatgatcttacacaagcattttctcttctgatctttgttcttattagctaattgtaaaattcaatcaggaactgacaaaggggttgaaactcaagtttacttgctacttgttagaatctttgaattatttgaggttttaatcatcagtgttgtattagtccgttctcacactgctataaagaactacttgagactgggtaatttatgaataaaagagatttaactgaaacaca

SEQ ID NO: 268797 - DNA, 409 bp, Homo sapiens
aaattgaaaagacaggcaacttttatttccctctggctggatccacactcaggtggtgaggcttagtaataggaagcctctcacctccaacaaaggctaagtggactctcagcaagactatattaaaagtatccagcatgtctcatgcactagacagattctatatttaacccctccatttgctgagtagcacaataggtaaaggagaagcccagcattgtgttcaggatgtcttgagaacaaatcatgcaggctggcaatgggatcccataaccattgctaggaaaaaggactggtggggcccttgatatgtgtgagccctggcttcgttattacagccacttggaagaaaaggcgggatagcagatttgggctacgggtttccacttatctgaattagtaataaaga

SEQ ID NO: 268798 - DNA, 496 bp, Homo sapiens
agagctgccaggtttgcaggcgcctcccctacaggtggaagctatacttctggattgctccacctggcaggaaccccagagaggtggaattccatgcgttgtgctcggacctccacaaactgcaggctgatacagaatgtgtttactgggttagtgcaacctagcatgcaaacgtggacacaggatagtcacaactcccacagcagcctaaaggaactatgcaggtcaggttgtgaaatggcacccagagttatttagaagggcgtttggaattcataacgaggttggttttgttttaaaccctactgttgtcctggtaggaaacaatgagtgttgattacattttattctacttaacatcagtgcttctcaagggagatattggtgacatggaattaggtcttatattcaggcatatagcaaaaataaataaagaacctggggagaagatattaaaattttaagtaaaagtggaaatgagactacgaacaaaggc

SEQ ID NO: 268799 - DNA, 277 bp, Homo sapiens
cctaatgaactgaagagttgcagtgttcaaagtaatctcagaacaagctatgtattgcacaaatgcatttaggactcttgtcaaagtgggcttttgagaggcaaggtttgttgagagagaaaagatttgtacattttcaagctcctaaaagattgaaggtctgaacttcagttactctagagatcacaggaagaagaagaatacaggctgtaacgtaggaaggctactgtttattagggaagaaggacagatcatgggggaataaaaaggaaagaaa

SEQ ID NO: 268800 - DNA, 521 bp, Homo sapiens
gatggatttaactgcactttatcttaatatatctcttttatcaacaccttcctttccacgctcccagccgcattgtttatcaagaacctgttacatttcacttgactatttaccttctcaacttttccaactcctcttcctcaggcacctttgctggctcttctctttctctctttacccgctatctctcagcaggcctcagacttctctcctgtctctcccaagagtgctaccctagaccagcctgcctcagattctgtttcggcctagaagggccaaacatctggtttgtcatcttccttgggttttagcacattatcacacacacattaggtcttagcacattattagaactcgcaaatcccttatttgatagaagaactgatttcctttttaaccctaattcctctcccctacccccatttgaatgtgtatcttttcatttggatgtgttcttgtggaatgtccattttatttgtatgcacttattttaaattctgtaaatgatattatagtatccc

SEQ ID NO: 268801 - DNA, 379 bp, Homo sapiens
gataaattctccagaaagtgggcagattgacatttctggcagaaccctaggagcagaaaaaaaatctgaaaaacaaataagcacctgtgatgccctgtgactacagagttccagtagaactataatctgtggaagttcaagaagacttaaagcaggtacaaaagcagccagagtcactcctatctccattgcttacatgagtgagagatgtgagtattgcccagtggaacagatgagaagtaatcacagatattattgcaaaaatcagaaagtcaaagaacaacagaactcatttgactgtatggggcctaagaacttaccagtgagagagaaatgcacagcacagtatcatatttaaatacaatgagctagcaaaaaa

SEQ ID NO: 268802 - DNA, 469 bp, Homo sapiens
gataaattctccagaaagtgggcagattgacatttctggcagaaccctaggagcagaaaaaaaatctgaaaaacaaataagcacctgtgatgccctgtgactacagagttccagtagaactataatctgtggaagttcaagaagacttaaagcaggtacaaagttatttaaaattgaatcacatggtcttcacaatgtataagaaaacaaaattaatatagttataacagtctgaatattttcttcttagagagcagccagagtcactcctatctccattgcttacatgagtgagagatgtgagtattgcccagtggaacagatgagaagtaatcacagatattattgcaaaaatcagaaagtcaaagaacaacagaactcatttgactgtatggggcctaagaacttaccagtgagagagaaatgcacagcacagtatcatatttaaatacaatgagctagcaaaaaa

SEQ ID NO: 268803 - DNA, 202 bp, Homo sapiens
ctcccctattccagatttatcaggcattgcctcttcaaagttgttcttcaccctcagggatatggtgtgataataatgagcaaaagagataaaaaaggaaagccctactgattataggcaggtggcttaattctacaattcattccttatagttgagccctatcttagcgtcttctcttccatcctctctccaaccactgca

SEQ ID NO: 268804 - DNA, 452 bp, Homo sapiens
caccaatatatagcaccatttcagaatgcatgaagttttagcagtagtctaaatatctagcaaaatggctagataaccagttgaaattaaaggattaagggccaagagatacttatttcacttatataaacatttcttccttccataaatggttgttttagttaactcaactgtttttattttgtcttgttgagtacagttgggccaggtttttatatgtaggtaaattttgtacttggcagaaatgcacagaaattgtcagtttgattataactaacaataaaatgagttgatgcttttgagtaaatggtatccaagaattttagaaagttgtctgggcatggtggctcacacctgtaatcaaatcactttgagaggccgtggcaggaggattacttgaacccaggagttcaagaccagcctggggaacatagcaagatgccatctctaaa

SEQ ID NO: 268805 - DNA, 1192 bp, Homo sapiens
tcccggctgcagtcctacctcttggaactacccgtgtttccgggcccagccctcgcagccccccacctcctcgccccggcccggggatccgttggggccgcgtcccccacgcgcccccggagacgccctttccgtgtgcgcccgggacttggtgaaactttgcaggcgccggctgcgaaatggatttaatccgaggcgtcttgctccggctcctgctcctggcttccagcctcggacccggcgcggtgtcgctccgagcggccatccgaaaaccaggaaggtgttggaggatgactgtcacgaaaacttggacagaaccatgacgcaggaccaaagctgcaggaaacagaagatccaatccaggagagggatataagaagtccccagaataatagtgggaaggagatgctagaatgacaaatatttactagatagaaaaggcaaccagtccaactggaacaggcaaggtagggcctcctcttgacatcaagctgggcgcattgaactgtacggctttcagcatccagtggaaaatgccaaggcatcctggaagtcccatccttgggtacactgtcttttactctgaggttggcgcagataaatccctgcaggagcagttgcacagcgtgcctctcagccgggacatcccgaccacggaggaagtgattggagatttgaaaccaggcactgaatatcgtgtgagcatagcagcttacagccaggctggcaaagggcggctgagctctcctcggcatgtcaccactttgtcccaagattcctgcctgcctcctgcagctccccagcagccacatgtcattgtggtttcggattctgaggtggccctgtcttggaaacctggagcgagtgaaggaagcgcccctattcagtactattctgtggaattcatcaggtaagtctgtatgtcacattcaaaagccaaatgtgtgctgggtgcggtggctcacacctgtaatcccagcactttggcaggctgaggcgggcagatcacaaggtcaggagttcgagaccagcctgaccaacatggtgaaaccccgtctctactaaaaatacaaaaattagctgggcgtgatggcacgtgcctgtagtctcagctactcaggaggctgaggcaggagaaatgcttgaacccaggaggtggaggttgcagtgagccgagatcatgccattgcac

SEQ ID NO: 268806 - DNA, 782 bp, Homo sapiens
tcccggctgcagtcctacctcttggaactacccgtgtttccgggcccagccctcgcagccccccacctcctcgccccggcccggggatccgttggggccgcgtcccccacgcgcccccggagacgccctttccgtgtgcgcccgggacttggtgaaactttgcaggcgccggctgcgaaatggatttaatccgaggcgtcttgctccggctcctgctcctggcttccagcctcggacccggcgcggtgtcgctccgagcggccatccgaaaaccaggcaaggtagggcctcctcttgacatcaagctgggcgcattgaactgtacggctttcagcatccagtggaaaatgccaaggcatcctggaagtcccatccttgggtacactgtcttttactctgaggttggcgcagataaatccctgcaggagcagttgcacagcgtgcctctcagccgggacatcccgaccacggaggaagtgattggagatttgaaaccaggcactgaatatcgtgtgagcatagcagcttacagccaggctggcaaagggcggctgagctctcctcggcatgtcaccactttgtcccaagattcctgcctgcctcctgcagctccccagcagccacatgtcattgtggtttcggattctgaggtggccctgtcttggaaacctggagcgagtgaaggaagcgcccctattcagtactattctgtggaattcatcaggccagatttcgacaagaagtggacctcaatccatgagcggatccagatggactccatg

SEQ ID NO: 268807 - DNA, 299 bp, Homo sapiens
catttaccaaaaaaaaaaaaatgggatgtaaaggagagagatccagattgtaacagtatcaggaaacagcaccagaggagatagagattctccaaggattggcacaacggagagagtaacacaaagaaacatactctttaagggagtctttgctgggtgaagtgattttgattgagtcatttacgtcatgaggcattgtctcatgtttaaatgaatgacttggactagtagatttccaaccccttttaatctaaagtgcaatgatgattaattatgtaatgtcatgctatagaaaaaaa

SEQ ID NO: 268808 - DNA, 392 bp, Homo sapiens
ttagtccacagtccagtttgtgaggctactgggagttgaaataagacatatacaaatgtctttcttttttccttttctagtatacaggttacagtcgagcccagagcaggaacagagggatctaaatttgaaagcaataatggcaggcttacatatgtcaattctctacaagaatactaagtcactgtttcattaaaaagagaccaacaggtgggcgtagtggctcaaacctgtaatcctaccattttgcaaggccaaggcaggcacctgtaattctagctacctgggaggctgaggcaggagaattgcttgaacctgggaagtggaggttgcagcgagctgagattgcaccattgcactccagcctaggcaacaagagcaaaactccatct

SEQ ID NO: 268809 - DNA, 459 bp, Homo sapiens
ttatggagcaggcagcaggaatggcttattctctgtcagacacaggagacagagtgcccagggcccatgatactttaaggagcccatgagaatattttcttttatagtcagaagaaaaaattattatactttcaagtggatttgtctttataccaacaaagttataaaataaatttttaaaaaatgttttaatgacagaaggggcttatgaaggcactcctcaaggggcttatgaaagtcactaaaggaaaggtcataatttggaaaggcaaagaagagggtaagaagctagctgagtgaactgggatgaatactatgaaggaagccatggggacaggaaggtaatcacagaagcaaaacaatgagatagctgtggtttcccaaacaaaaacctggaaacatcttctgacacataatctgatcatagaacagaagatccaaaatcaagaccattctgca

SEQ ID NO: 268810 - DNA, 679 bp, Homo sapiens
gggtttcagcctgttggccaggctggtcttgaacccctgacctaaagtgatctgtccatcaaagtgctaggattacagcgcttacagctcacaggcgtgagccactgtgtctggcccaggttgtttattcttttctatttgatttgtaagtattcattttatattttgaatgttagtcctttttagattacagattttgcagatactttgtgaatctgaggagccctttaaaaatatgtatgattgagacttacccacagaagttctcattcgtaagtgtggtggttgtggggattggcatctgtattttaaaatttgatatacaatcaaatttaagaactatgataagattatggagaatggaggaatttaggacagtagctaagacctcaaaaagatgtgtgttcaactctcaactgtgtcatttaacagctgtggggccttgggcaggttattaaatgtccataagctttgttttcttcatctgaaaaatggaaacagtaggatttatgagatagttaaataagattgattcttgtgaaatgtttaacacagtacctagttcataggaaaagttaaaaaataaaaaatagagacttatttttctattcaagcaatcaaaatattaagactataaaatacatgttatgttatttgtgaaaaatgtccattaaggttc

SEQ ID NO: 268811 - DNA, 2856 bp, Homo sapiens
cttggctcgccccgcccttccttgtaagatggcggcgcccaggtggagcgcgtcgggcccctggatccggggaaacggccaaggttgcgggagtctcttcactctcgtctcaaagccattttgtgccgctgccgctgcctctacggccataaatgcccagagattagcggagaagctccgagcccagaaacgggaacaagacacaaagaaggagccggtgtccacaaacgctgttcagcggagagtgcaagaaatagtgcggttcacacggcagctgcagcgagtccaccccaacgtgcttgctaaggcactgacccgaggaattctccaccaggacaagaaccttgtggtcatcaataagccctacggtctccctgtgcatggtggccctggggtccagctctgcatcactgatgtactacctatcctggcaaagatgcttcatggccacaaggcagagcccttgcatctgtgccaccggctggacaaggaaaccacaggtgtaatggtgttggcttgggacaaggacatggcacatcaagtccaagagttgtttagaacccgtcaggtggtgaagaagtactgggccatcactgtgcatgtccccatgccctcagcaggagtcgtggacatccccattgtggagaaggaggcgcaaggccagcagcaacaccacaagatgacattgtccccgagctaccgcatggacgatgggaaaatggtgaaagtgcggcgcagccggaatgcgcaagttgctgtaactcagtaccaggtgctcagcagcactctctcctccgccctcgtggagctccagcccatcactggaataaaacatcagcttcgagttcacttgtcttttggattggattgtccaatccttggtgatcacaagtactcagactggaataggttggccccccagaagctgtctgtgggcaccctgaagaagctggggctagaacagtcgaaggcccgctacatcccccttcacctgcacgcccggcagctgatcctgcctgccctggggtccgggaaggaggaactcaacttggtctgcaaacttcctcgcttctttgtgcattccctgcaccgcctgcgtttagagatgccaaatgaggatcaaaatgagaacaatgaagccaagtgtctgggagcacagtgaagaccatgggagcaccctggcacctgggagcacagtgaagaccctgagagcatcctggcacctgggagcgcaggttggcccctgaactgttctttgtttacaggactctgctaacttctcacttggaacagactgcgtaagagccaggtgggataaggtaaagcaactcagctgctacagggcttttaatggagaacaaagtctatttactgatagtttggctgcactgtggaaaagcctgctggaagtctccctgccgtgggctctcattgccaatatggaacagagcccagggccaggcagactggggcagtgactggaaaaggaaaactaaaggtcagaatccgggatcaggaactgtttttatccagcagtgaagctcttgagctcttaggaaggttcccgtggttggaaagaacataatggttaacaaatatcacagcatccagggattgcccagctatagtgtgggtgccctactgaactctgattagggaacctgtataagggtattgagtgtgaggttgaggtgggacatttgctgagcaaggagaaccgatgtgaatggcaggcagataacatgcacacatgaagctggctgggtgtaaggcagtagcggggagcagcatgctgtctaacagctgttagctccagctggttgttgccatgtgggaatggattttctcatttcttcagagaagctggaaacctagatatttatgtgaaacctcccagtgtattgccaactaaatcaaatttttaaagatgcttaggcacctaagcaaataatacttagaggttgaatttggtctacaggctagcagtttgcagtctatgtttaatgaatggtatagaagtttggggaaaggtgccatcttgaaaattctggatcagtggttggcattttcgctgcgtgtagtatgtatcctttctaggcttggagatggctttggttggtccgtgaatgtagttatgagagtgctgccattaaaaaatcaaaatctctgttgtggaagcgtatcttctgttcttaggtctcaggaaggagagggctatactgaacaccattagggatagatggaaatgaccttggcctccctgctcagctggtccatctagtttccaccttgtttcttgcaaacaaatacacctcacactactttttctttctgacagagttggagtgacagcacagttaggggggtacaccccgggacagtctttatatgttccctctgtatagatgatgccactttctagccctttccctgtctccatggtacccattactgtgcataataaatttaactttgaaagcacaaaaaaaaaaaaaaaaaaaaaaaaaaaaaaaaaaaaaaaaaaaaaaaaaaaaaaaaaaaaaaaaaaaaaacaaaaaaaaaaaaaaaaaaaaaaagagggggcgcgcgccgccgaaaaatcatccctagggggggcccgactgcgcgcccaccatttgtgcgacacacgggcgcctcccagaggggggcggcgtaataatgcaagagaacgagcgcgcgcgtgcgccggccttaaaaacacagcgggcagacagcgaaaaacaacgcgcgacggggcagcactacttggggagagagaccccacacgtagcgagcggagacacaaacgtgggcacataccgcgaccgaaagtaaaacccgcggggcgaactaagt

SEQ ID NO: 268812 - DNA, 2617 bp, Homo sapiens
cttggctcgccccgcccttccttgtaagatggcggcgcccaggtggagcgcgtcgggcccctggatccggggaaacggccaaggttgcgggagtctcttcactctcgtctcaaagccattttgtgccgctgccgctgcctctacggccataaatgcccagagattagcggagaagctccgagcccagaaacgggaacaagacacaaagaaggagccggtgtccacaaacgctgttcagcggagagtgcaagaaatagtgcggttcacacggcagctgcagcgagtccaccccaacgtgcttgctaaggcactgacccgaggaattctccaccaggacaagaaccttgtggtcatcaataagccctacggtctccctgtgcatggtggccctggggtccagctctgcatcactgatgtactacctatcctggcaaagatgcttcatggccacaaggcagagcccttgcatctgtgccaccggctggacaaggaaaccacaggtgtaatggtgttggcttgggacaaggacatggcacatcaagtccaagagttgtttagaacccgtcaggtggtgaagaagtactggaataaaacatcagcttcgagttcacttgtcttttggattggattgtccaatccttggtgatcacaagtactcagactggaataggttggccccccagaagctgtctgtgggcaccctgaagaagctggggctagaacagtcgaaggcccgctacatcccccttcacctgcacgcccggcagctgatcctgcctgccctggggtccgggaaggaggaactcaacttggtctgcaaacttcctcgcttctttgtgcattccctgcaccgcctgcgtttagagatgccaaatgaggatcaaaatgagaacaatgaagccaagtgtctgggagcacagtgaagaccatgggagcaccctggcacctgggagcacagtgaagaccctgagagcatcctggcacctgggagcgcaggttggcccctgaactgttctttgtttacaggactctgctaacttctcacttggaacagactgcgtaagagccaggtgggataaggtaaagcaactcagctgctacagggcttttaatggagaacaaagtctatttactgatagtttggctgcactgtggaaaagcctgctggaagtctccctgccgtgggctctcattgccaatatggaacagagcccagggccaggcagactggggcagtgactggaaaaggaaaactaaaggtcagaatccgggatcaggaactgtttttatccagcagtgaagctcttgagctcttaggaaggttcccgtggttggaaagaacataatggttaacaaatatcacagcatccagggattgcccagctatagtgtgggtgccctactgaactctgattagggaacctgtataagggtattgagtgtgaggttgaggtgggacatttgctgagcaaggagaaccgatgtgaatggcaggcagataacatgcacacatgaagctggctgggtgtaaggcagtagcggggagcagcatgctgtctaacagctgttagctccagctggttgttgccatgtgggaatggattttctcatttcttcagagaagctggaaacctagatatttatgtgaaacctcccagtgtattgccaactaaatcaaatttttaaagatgcttaggcacctaagcaaataatacttagaggttgaatttggtctacaggctagcagtttgcagtctatgtttaatgaatggtatagaagtttggggaaaggtgccatcttgaaaattctggatcagtggttggcattttcgctgcgtgtagtatgtatcctttctaggcttggagatggctttggttggtccgtgaatgtagttatgagagtgctgccattaaaaaatcaaaatctctgttgtggaagcgtatcttctgttcttaggtctcaggaaggagagggctatactgaacaccattagggatagatggaaatgaccttggcctccctgctcagctggtccatctagtttccaccttgtttcttgcaaacaaatacacctcacactactttttctttctgacagagttggagtgacagcacagttaggggggtacaccccgggacagtctttatatgttccctctgtatagatgatgccactttctagccctttccctgtctccatggtacccattactgtgcataataaatttaactttgaaagcacaaaaaaaaaaaaaaaaaaaaaaaaaaaaaaaaaaaaaaaaaaaaaaaaaaaaaaaaaaaaaaaaaaaaaacaaaaaaaaaaaaaaaaaaaaaaagagggggcgcgcgccgccgaaaaatcatccctagggggggcccgactgcgcgcccaccatttgtgcgacacacgggcgcctcccagaggggggcggcgtaataatgcaagagaacgagcgcgcgcgtgcgccggccttaaaaacacagcgggcagacagcgaaaaacaacgcgcgacggggcagcactacttggggagagagaccccacacgtagcgagcggagacacaaacgtgggcacataccgcgaccgaaagtaaaacccgcggggcgaactaagt

SEQ ID NO: 268813 - DNA, 2958 bp, Homo sapiens
tcatgcctcagcctcccaagtagctggaattacaggcacgcgccaccacgcctggctgattttttttttgtatttttagtagagatggggtttcaccatgttggccaggctggtcttgaactcctgacctgaagtgatccacccgccttggcctcccaaagtattgggattacatgtgtgagccaccacgcctgtcccctgtgacttcttcgggtacagttccctcctgttttacctatgtggcaaatgagccaggaacggttctctgaatgttttattaggttcattcatccaattattcatttgttcatttaccatgcagtcagaatctacaatcttttattatttgaaaaaaaatacaaaactatattaccataattttattttaactgtacatatccatttttaaagactggaaagaccatgttattaatgtaatttttttctttttttaccccaaatattctacaattagcatgtatgactttagtagtaaaaaagataagcttgtgaaatctatcagctctcaggctaagcattacaccaagagaatcttgcacgatccttcaatcataagaaatcacatgttagtgcagaaggtccagcgtgaaatcctctaagtggccaaatctaggagttcttctctggcttggttggctaaagcagtgatctgtgtcacccccagggggccatcactgtgcatgtccccatgccctcagcaggagtcgtggacatccccattgtggagaaggaggcgcaaggccagcagcaacaccacaagatgacattgtccccgagctaccgcatggacgatgggaaaatggtgaaagtgcggcgcagccggaatgcgcaagttgctgtaactcagtaccaggtgctcagcagcactctctcctccgccctcgtggagctccagcccatcactggaataaaacatcagcttcgagttcacttgtcttttggattggattgtccaatccttggtgatcacaagtactcagactggaataggttggccccccagaagctgtctgtgggcaccctgaagaagctggggctagaacagtcgaaggcccgctacatcccccttcacctgcacgcccggcagctgatcctgcctgccctggggtccgggaaggaggaactcaacttggtctgcaaacttcctcgcttctttgtgcattccctgcaccgcctgcgtttagagatgccaaatgaggatcaaaatgagaacaatgaagccaagtgtctgggagcacagtgaagaccatgggagcaccctggcacctgggagcacagtgaagaccctgagagcatcctggcacctgggagcgcaggttggcccctgaactgttctttgtttacaggactctgctaacttctcacttggaacagactgcgtaagagccaggtgggataaggtaaagcaactcagctgctacagggcttttaatggagaacaaagtctatttactgatagtttggctgcactgtggaaaagcctgctggaagtctccctgccgtgggctctcattgccaatatggaacagagcccagggccaggcagactggggcagtgactggaaaaggaaaactaaaggtcagaatccgggatcaggaactgtttttatccagcagtgaagctcttgagctcttaggaaggttcccgtggttggaaagaacataatggttaacaaatatcacagcatccagggattgcccagctatagtgtgggtgccctactgaactctgattagggaacctgtataagggtattgagtgtgaggttgaggtgggacatttgctgagcaaggagaaccgatgtgaatggcaggcagataacatgcacacatgaagctggctgggtgtaaggcagtagcggggagcagcatgctgtctaacagctgttagctccagctggttgttgccatgtgggaatggattttctcatttcttcagagaagctggaaacctagatatttatgtgaaacctcccagtgtattgccaactaaatcaaatttttaaagatgcttaggcacctaagcaaataatacttagaggttgaatttggtctacaggctagcagtttgcagtctatgtttaatgaatggtatagaagtttggggaaaggtgccatcttgaaaattctggatcagtggttggcattttcgctgcgtgtagtatgtatcctttctaggcttggagatggctttggttggtccgtgaatgtagttatgagagtgctgccattaaaaaatcaaaatctctgttgtggaagcgtatcttctgttcttaggtctcaggaaggagagggctatactgaacaccattagggatagatggaaatgaccttggcctccctgctcagctggtccatctagtttccaccttgtttcttgcaaacaaatacacctcacactactttttctttctgacagagttggagtgacagcacagttaggggggtacaccccgggacagtctttatatgttccctctgtatagatgatgccactttctagccctttccctgtctccatggtacccattactgtgcataataaatttaactttgaaagcacaaaaaaaaaaaaaaaaaaaaaaaaaaaaaaaaaaaaaaaaaaaaaaaaaaaaaaaaaaaaaaaaaaaaaacaaaaaaaaaaaaaaaaaaaaaaagagggggcgcgcgccgccgaaaaatcatccctagggggggcccgactgcgcgcccaccatttgtgcgacacacgggcgcctcccagaggggggcggcgtaataatgcaagagaacgagcgcgcgcgtgcgccggccttaaaaacacagcgggcagacagcgaaaaacaacgcgcgacggggcagcactacttggggagagagaccccacacgtagcgagcggagacacaaacgtgggcacataccgcgaccgaaagtaaaacccgcggggcgaactaagt

SEQ ID NO: 268814 - DNA, 1629 bp, Homo sapiens
aactgctgcgtgctcacttggcacagagtgcctagaaagcaggtagtcgatagggtaatagcgagcattcccgttatagaggctcttcctccggaggagatggtgaatctatatagtgatagtcaggcatgccatgtacacttgcctttttgtgtgtctccctgacgagtgactctactagcccgttatgatctggactgtggttcctgcataatgacgcatgtgtgtgggtgccgggacgtacaggtccaattccgggtgtcacgagatctgttccgatcactacgacgagatgactgctctagattcgtcttagcaatggtaccgcgtcgtctactcttagcatccatggttggccatatatctacagtgagtctctaaggtattgttacaggctatagtgtgggtgccctactgaactctgattagggaacctgtataagggtattgagtgtgaggttgaggtgggacatttgctgagcaaggagaaccgatgtgaatggcaggcagataacatgcacacatgaagctggctgggtgtaaggcagtagcggggagcagcatgctgtctaacagctgttagctccagctggttgttgccatgtgggaatggattttctcatttcttcagagaagctggaaacctagatatttatgtgaaacctcccagtgtattgccaactaaatcaaatttttaaagatgcttaggcacctaagcaaataatacttagaggttgaatttggtctacaggctagcagtttgcagtctatgtttaatgaatggtatagaagtttggggaaaggtgccatcttgaaaattctggatcagtggttggcattttcgctgcgtgtagtatgtatcctttctaggcttggagatggctttggttggtccgtgaatgtagttatgagagtgctgccattaaaaaatcaaaatctctgttgtggaagcgtatcttctgttcttaggtctcaggaaggagagggctatactgaacaccattagggatagatggaaatgaccttggcctccctgctcagctggtccatctagtttccaccttgtttcttgcaaacaaatacacctcacactactttttctttctgacagagttggagtgacagcacagttaggggggtacaccccgggacagtctttatatgttccctctgtatagatgatgccactttctagccctttccctgtctccatggtacccattactgtgcataataaatttaactttgaaagcacaaaaaaaaaaaaaaaaaaaaaaaaaaaaaaaaaaaaaaaaaaaaaaaaaaaaaaaaaaaaaaaaaaaaaacaaaaaaaaaaaaaaaaaaaaaaagagggggcgcgcgccgccgaaaaatcatccctagggggggcccgactgcgcgcccaccatttgtgcgacacacgggcgcctcccagaggggggcggcgtaataatgcaagagaacgagcgcgcgcgtgcgccggccttaaaaacacagcgggcagacagcgaaaaacaacgcgcgacggggcagcactacttggggagagagaccccacacgtagcgagcggagacacaaacgtgggcacataccgcgaccgaaagtaaaacccgcggggcgaactaagt

SEQ ID NO: 268815 - DNA, 1685 bp, Homo sapiens
gggtttcagcctgttggccaggctggtcttgaacccctgacctaaagtgatctgtccatcaaagtgctaggattacagcgcttacagctcacaggcgtgagccactgtgtctggcccaggttgtttattcttttctatttgatttggccatcactgtgcatgtccccatgccctcagcaggagtcgtggacatccccattgtggagaaggaggcgcaaggccagcagcaacaccacaagatgacattgtccccgagctaccgcatggacgatgggaaaatggtgaaagtgcggcgcagccggaatgcgcaagttgctgtaactcagtaccaggtgctcagcagcactctctcctccgccctcgtggagctccagcccatcactggaataaaacatcagcttcgagttcacttgtcttttggattggattgtccaatccttggtgatcacaagtactcagactggaataggttggccccccagaagctgtctgtgggcaccctgaagaagctggggctagaacagtcgaaggcccgctacatcccccttcacctgcacgcccggcagataacatgcacacatgaagctggctgggtgtaaggcagtagcggggagcagcatgctgtctaacagctgttagctccagctggttgttgccatgtgggaatggattttctcatttcttcagagaagctggaaacctagatatttatgtgaaacctcccagtgtattgccaactaaatcaaatttttaaagatgcttaggcacctaagcaaataatacttagaggttgaatttggtctacaggctagcagtttgcagtctatgtttaatgaatggtatagaagtttggggaaaggtgccatcttgaaaattctggatcagtggttggcattttcgctgcgtgtagtatgtatcctttctaggcttggagatggctttggttggtccgtgaatgtagttatgagagtgctgccattaaaaaatcaaaatctctgttgtggaagcgtatcttctgttcttaggtctcaggaaggagagggctatactgaacaccattagggatagatggaaatgaccttggcctccctgctcagctggtccatctagtttccaccttgtttcttgcaaacaaatacacctcacactactttttctttctgacagagttggagtgacagcacagttaggggggtacaccccgggacagtctttatatgttccctctgtatagatgatgccactttctagccctttccctgtctccatggtacccattactgtgcataataaatttaactttgaaagcacaaaaaaaaaaaaaaaaaaaaaaaaaaaaaaaaaaaaaaaaaaaaaaaaaaaaaaaaaaaaaaaaaaaaaacaaaaaaaaaaaaaaaaaaaaaaagagggggcgcgcgccgccgaaaaatcatccctagggggggcccgactgcgcgcccaccatttgtgcgacacacgggcgcctcccagaggggggcggcgtaataatgcaagagaacgagcgcgcgcgtgcgccggccttaaaaacacagcgggcagacagcgaaaaacaacgcgcgacggggcagcactacttggggagagagaccccacacgtagcgagcggagacacaaacgtgggcacataccgcgaccgaaagtaaaacccgcggggcgaactaagt

SEQ ID NO: 268816 - DNA, 1011 bp, Homo sapiens
cttggctcgccccgcccttccttgtaagatggcggcgcccaggtggagcgcgtcgggcccctggatccggggaaacggccaaggttgcgggagtctcttcactctcgtctcaaagccattttgtgccgctgccgctgcctctacggccataaatgcccagagattagcggagaagctccgagcccagaaacgggaacaagacacaaagaaggagccggtgtccacaaacgctgttcagcggagagtgcaagaaatagtgcggttcacacggcagctgcagcgagtccaccccaacgtgcttgctaaggcactgacccgaggaattctccaccaggacaagaaccttgtggtcatcaataagccctacggtctccctgtgcatggtggccctggggtccagctctgcatcactgatgtactacctatcctggcaaagatgcttcatggccacaaggcagagcccttgcatctgtgccaccggctggacaaggaaaccacaggtgtaatggtgttggcttgggacaaggacatggcacatcaagtccaagagttgtttagaacccgtcaggtggtgaagaagtactggtatgaggcctgctgatggcagtagaggtggtataagtggaggcatttctttcacctatttattcattaaaaacagaaactcccattaatagaaggcactgcactatgacctgcgagattgtaaaaaatatgtgaaacagctttggtgcttagaatattaagtctgatagaacagtggttcttaattctggtatacatcaaaattatcaaaaattaattatacaagcatgggggggacatggtggctcacgcctgtaatcacagcactttgagaggcagaggtgggaggatcactttaggccaagagtcggagaacagcctgggcaacatagtgacaccttttctctataaaaagtaagaagttagtccggtatagtggcacatacctgtagtcccagctacttgggaggccagggtgggaggatc

SEQ ID NO: 268817 - DNA, 2883 bp, Homo sapiens
cttggctcgccccgcccttccttgtaagatggcggcgcccaggtggagcgcgtcgggcccctggatccggggaaacggccaaggttgcgggagtctcttcactctcgtctcaaagccattttgtgccgctgccgctgcctctacggccataaatgcccagagattagcggagaagctccgagcccagaaacgggaacaagacacaaagaaggagccggtgtccacaaacgctgttcagcggagagtgcaagaaatagtgcggttcacacggcagctgcagcgagtccaccccaacgtgcttgctaaggcactgacccgaggaattctccaccaggacaagaaccttgtggtcatcaataagccctacggtctccctgtgcatggtggccctggggtccagctctgcatcactgatgtactacctatcctggcaaagatgcttcatggccacaaggcagagcccttgcatctgtgccaccggctggacaaggaaaccacaggtgtaatggtgttggcttgggacaaggacatggcacatcaagtccaagagttgtttagaacccgtcaggtggtgaagaagtactggtatgaggcctgctgatggcagtagagggccatcactgtgcatgtccccatgccctcagcaggagtcgtggacatccccattgtggagaaggaggcgcaaggccagcagcaacaccacaagatgacattgtccccgagctaccgcatggacgatgggaaaatggtgaaagtgcggcgcagccggaatgcgcaagttgctgtaactcagtaccaggtgctcagcagcactctctcctccgccctcgtggagctccagcccatcactggaataaaacatcagcttcgagttcacttgtcttttggattggattgtccaatccttggtgatcacaagtactcagactggaataggttggccccccagaagctgtctgtgggcaccctgaagaagctggggctagaacagtcgaaggcccgctacatcccccttcacctgcacgcccggcagctgatcctgcctgccctggggtccgggaaggaggaactcaacttggtctgcaaacttcctcgcttctttgtgcattccctgcaccgcctgcgtttagagatgccaaatgaggatcaaaatgagaacaatgaagccaagtgtctgggagcacagtgaagaccatgggagcaccctggcacctgggagcacagtgaagaccctgagagcatcctggcacctgggagcgcaggttggcccctgaactgttctttgtttacaggactctgctaacttctcacttggaacagactgcgtaagagccaggtgggataaggtaaagcaactcagctgctacagggcttttaatggagaacaaagtctatttactgatagtttggctgcactgtggaaaagcctgctggaagtctccctgccgtgggctctcattgccaatatggaacagagcccagggccaggcagactggggcagtgactggaaaaggaaaactaaaggtcagaatccgggatcaggaactgtttttatccagcagtgaagctcttgagctcttaggaaggttcccgtggttggaaagaacataatggttaacaaatatcacagcatccagggattgcccagctatagtgtgggtgccctactgaactctgattagggaacctgtataagggtattgagtgtgaggttgaggtgggacatttgctgagcaaggagaaccgatgtgaatggcaggcagataacatgcacacatgaagctggctgggtgtaaggcagtagcggggagcagcatgctgtctaacagctgttagctccagctggttgttgccatgtgggaatggattttctcatttcttcagagaagctggaaacctagatatttatgtgaaacctcccagtgtattgccaactaaatcaaatttttaaagatgcttaggcacctaagcaaataatacttagaggttgaatttggtctacaggctagcagtttgcagtctatgtttaatgaatggtatagaagtttggggaaaggtgccatcttgaaaattctggatcagtggttggcattttcgctgcgtgtagtatgtatcctttctaggcttggagatggctttggttggtccgtgaatgtagttatgagagtgctgccattaaaaaatcaaaatctctgttgtggaagcgtatcttctgttcttaggtctcaggaaggagagggctatactgaacaccattagggatagatggaaatgaccttggcctccctgctcagctggtccatctagtttccaccttgtttcttgcaaacaaatacacctcacactactttttctttctgacagagttggagtgacagcacagttaggggggtacaccccgggacagtctttatatgttccctctgtatagatgatgccactttctagccctttccctgtctccatggtacccattactgtgcataataaatttaactttgaaagcacaaaaaaaaaaaaaaaaaaaaaaaaaaaaaaaaaaaaaaaaaaaaaaaaaaaaaaaaaaaaaaaaaaaaaacaaaaaaaaaaaaaaaaaaaaaaagagggggcgcgcgccgccgaaaaatcatccctagggggggcccgactgcgcgcccaccatttgtgcgacacacgggcgcctcccagaggggggcggcgtaataatgcaagagaacgagcgcgcgcgtgcgccggccttaaaaacacagcgggcagacagcgaaaaacaacgcgcgacggggcagcactacttggggagagagaccccacacgtagcgagcggagacacaaacgtgggcacataccgcgaccgaaagtaaaacccgcggggcgaactaagt

SEQ ID NO: 268818 - DNA, 2656 bp, Homo sapiens
cttggctcgccccgcccttccttgtaagatggcggcgcccaggtggagcgcgtcgggcccctggatccggggaaacggccaaggttgcgggagtctcttcactctcgtctcaaagccattttgtgccgctgccgctgcctctacggccataaatgcccagagattagcggagaagctccgagcccagaaacgggaacaagacacaaagaaggagccggtgtccacaaacgctgttcagcggagagtgcaagaaatagtgcggttcacacggcagctgcagcgagtccaccccaacgtgcttgctaaggcactgacccgaggaattctccaccaggacaagaaccttgtggtcatcaataagccctacggtctccctgtgcatggtggccatcactgtgcatgtccccatgccctcagcaggagtcgtggacatccccattgtggagaaggaggcgcaaggccagcagcaacaccacaagatgacattgtccccgagctaccgcatggacgatgggaaaatggtgaaagtgcggcgcagccggaatgcgcaagttgctgtaactcagtaccaggtgctcagcagcactctctcctccgccctcgtggagctccagcccatcactggaataaaacatcagcttcgagttcacttgtcttttggattggattgtccaatccttggtgatcacaagtactcagactggaataggttggccccccagaagctgtctgtgggcaccctgaagaagctggggctagaacagtcgaaggcccgctacatcccccttcacctgcacgcccggcagctgatcctgcctgccctggggtccgggaaggaggaactcaacttggtctgcaaacttcctcgcttctttgtgcattccctgcaccgcctgcgtttagagatgccaaatgaggatcaaaatgagaacaatgaagccaagtgtctgggagcacagtgaagaccatgggagcaccctggcacctgggagcacagtgaagaccctgagagcatcctggcacctgggagcgcaggttggcccctgaactgttctttgtttacaggactctgctaacttctcacttggaacagactgcgtaagagccaggtgggataaggtaaagcaactcagctgctacagggcttttaatggagaacaaagtctatttactgatagtttggctgcactgtggaaaagcctgctggaagtctccctgccgtgggctctcattgccaatatggaacagagcccagggccaggcagactggggcagtgactggaaaaggaaaactaaaggtcagaatccgggatcaggaactgtttttatccagcagtgaagctcttgagctcttaggaaggttcccgtggttggaaagaacataatggttaacaaatatcacagcatccagggattgcccagctatagtgtgggtgccctactgaactctgattagggaacctgtataagggtattgagtgtgaggttgaggtgggacatttgctgagcaaggagaaccgatgtgaatggcaggcagataacatgcacacatgaagctggctgggtgtaaggcagtagcggggagcagcatgctgtctaacagctgttagctccagctggttgttgccatgtgggaatggattttctcatttcttcagagaagctggaaacctagatatttatgtgaaacctcccagtgtattgccaactaaatcaaatttttaaagatgcttaggcacctaagcaaataatacttagaggttgaatttggtctacaggctagcagtttgcagtctatgtttaatgaatggtatagaagtttggggaaaggtgccatcttgaaaattctggatcagtggttggcattttcgctgcgtgtagtatgtatcctttctaggcttggagatggctttggttggtccgtgaatgtagttatgagagtgctgccattaaaaaatcaaaatctctgttgtggaagcgtatcttctgttcttaggtctcaggaaggagagggctatactgaacaccattagggatagatggaaatgaccttggcctccctgctcagctggtccatctagtttccaccttgtttcttgcaaacaaatacacctcacactactttttctttctgacagagttggagtgacagcacagttaggggggtacaccccgggacagtctttatatgttccctctgtatagatgatgccactttctagccctttccctgtctccatggtacccattactgtgcataataaatttaactttgaaagcacaaaaaaaaaaaaaaaaaaaaaaaaaaaaaaaaaaaaaaaaaaaaaaaaaaaaaaaaaaaaaaaaaaaaaacaaaaaaaaaaaaaaaaaaaaaaagagggggcgcgcgccgccgaaaaatcatccctagggggggcccgactgcgcgcccaccatttgtgcgacacacgggcgcctcccagaggggggcggcgtaataatgcaagagaacgagcgcgcgcgtgcgccggccttaaaaacacagcgggcagacagcgaaaaacaacgcgcgacggggcagcactacttggggagagagaccccacacgtagcgagcggagacacaaacgtgggcacataccgcgaccgaaagtaaaacccgcggggcgaactaagt

SEQ ID NO: 268819 - DNA, 2140 bp, Homo sapiens
cttggctcgccccgcccttccttgtaagatggcggcgcccaggtggagcgcgtcgggcccctggatccggggaaacggccaaggttgcgggagtctcttcactctcgtctcaaagccattttgtgccgctgccgctgcctctacggccataaatgcccagagattagcggagaagctccgagcccagaaacgggaacaagacacaaagaaggagccggtgtccacaaacgctgttcagcggagagtgcaagaaatagtgcggttcacacggcagctgcagcgagtccaccccaacgtgcttgctaaggcactgacccgaggaattctccaccaggacaagaaccttgtggtcatcaataagccctacggtctccctgtgcatggtggccctggggtccagctctgcatcactgatgtactacctatcctggcaaagatgcttcatggccacaaggcagagcccttgcatctgtgccaccggctggacaaggaaaccacaggtgtaatggtgttggcttgggacaaggacatggcacatcaagtccaagagttgtttagaacccgtcaggtggtgaagaagtactgggccatcactgtgcatgtccccatgccctcagcaggagtcgtggacatccccattgtggagaaggaggcgcaaggccagcagcaacaccacaagatgacattgtccccgagctaccgcatggacgatgggaaaatggtgaaagtgcggcgcagccggaatgcgcaagttgctgtaactcagtaccaggtgctcagcagcactctctcctccgccctcgtggagctccagcccatcactggaataaaacatcagcttcgagttcacttgtcttttggattggattgtccaatccttggtgatcacaagtactcagactggaataggttggccccccagaagctgtctgtgggcaccctgaagaagctggggctagaacagtcgaaggcccgctacatcccccttcacctgcacgcccggcagctgatcctgcctgccctggggtccgggaaggaggaactcaacttggtctgcaaacttcctcgcttctttgtgcattccctgcaccgcctgcgtttagagatgccaaatgaggatcaaaatgagaacaatgaagccaagtgtctgggagcacagtgaagaccatgggagcaccctggcacctgggagcacagtgaagaccctgagagcatcctggcacctgggagcgcaggttggcccctgaactgttctttgtttacaggactctgctaacttctcacttggaacagactgcgtaagagccaggtgggataaggtaaagcaactcagctgctacagggcttttaatggagaacaaagtctatttactgatagtttggctgcactgtggaaaagcctgctggaagtctccctgccgtgggctctcattgccaatatggaacagagcccagggccaggcagactggggcagtgactggaaaaggaaaactaaaggtcagaatccgggatcaggaactgtttttatccagcagtgaagctcttgagctcttaggaaggttcccgtggttggaaagaacataatggttaacaaatatcacagcatccagggattgcccagctatagtgtgggtgccctactgaactctgattagggaacctgtataagggtattgagtgtgaggttgaggtgggacatttgctgagcaaggagaaccgatgtgaatggcaggcagataacatgcacacatgaagctggctgggtgtaaggcagtagcggggagcagcatgctgtctaacagctgttagctccagctggttgttgccatgtgggaatggattttctcatttcttcagagaagctggaaacctagatatttatgtgaaacctcccagtgtattgccaactaaatcaaatttttaaagatgcttaggcacctaagcaaataatacttagaggttgaatttggtctacaggctagcagtttgcagtctatgtttaatgaatggtatagaagtttggggaaaggtgccatctccaagcctagaaaggatacatactacacgcagcgaaaatgccaaccactgatccagaattttcaagatggcacctttccccaaacttctataccattcatt

SEQ ID NO: 268820 - DNA, 1738 bp, Homo sapiens
cttggctcgccccgcccttccttgtaagatggcggcgcccaggtggagcgcgtcgggcccctggatccggggaaacggccaaggttgcgggagtctcttcactctcgtctcaaagccattttgtgccgctgccgctgcctctacggccataaatgcccagagattagcggagaagctccgagcccagaaacgggaacaagacacaaagaaggagccggtgtccacaaacgctgttcagcggagagtgcaagaaatagtgcggttcacacggcagctgcagcgagtccaccccaacgtgcttgctaaggcactgacccgaggaattctccaccaggacaagaaccttgtggtcatcaataagccctacggtctccctgtgcatggtggccctggggtccagctctgcatcactgatgtactacctatcctggcaaagatgcttcatggccacaaggcagagcccttgcatctgtgccaccggctggacaaggaaaccacaggtgtaatggtgttggcttgggacaaggacatggcacatcaagtccaagagttgtttagaacccgtcaggtggtgaagaagtactgggccatcactgtgcatgtccccatgccctcagcaggagtcgtggacatccccattgtggagaaggaggcgcaaggccagcagcaacaccacaagatgacattgtccccgagctaccgcatggacgatgggaaaatggtgaaagtgcggcgcagccggaatgcgcaagttgctgtaactcagtaccaggtgctcagcagcactctctcctccgccctcgtggagctccagcccatcactggaataaaacatcagcttcgagttcacttgtcttttggattggattgtccaatccttggtgatcacaagtactcagactggaataggttggccccccagaagctgtctgtgggcaccctgaagaagctggggctagaacagtcgaaggcccgctacatcccccttcacctgcacgcccggcagctgatcctgcctgccctggggtccgggaaggaggaactcaacttggtctgcaaacttcctcgcttctttgtgcattccctgcaccgcctgcgtttagagatgccaaatgaggatcaaaatgagaacaatgaagccaagtgtctgggagcacagtgaagaccatgggagcaccctggcacctgggagcacagtgaagaccctgagagcatcctggcacctgggagcgcaggttggcccctgaactgttctttgtttacaggactctgctaacttctcacttggaacagactgcgtaagagccaggtgggataaggtaaagcaactcagctgctacagggcttttaatggagaacaaagtctatttactgatagtttggctgcactgtggaaaagcctgctggaagtctccctgccgtgggctctcattgccaatatggaacagagcccagggccaggcagactggggcagtgactggaaaaggaaaactaaaggtcagaatccgggatcaggaactgtttttatccagcagtgaagctcttgagctcttaggaaggttcccgtggttggaaagaacataatggttaacaaatatcacagcatccagggattgcccagctatagtgtgggtgccctactgaactctgattagggaacctgtataagggtattgagtgtgaggttgaggtggactaatacatattcagacgaactcttctctgctgatacctagg

SEQ ID NO: 268821 - DNA, 461 bp, Homo sapiens
accccttcatcactatggcacatctcctgccaaacctttctctaaacatttgtctccatgtgtgtattgttaagttatttaaaaatttatgtttatataaacggtgtattgttgtcaattgctgccatgaacagtgacttgaaataacaaatatttactatctctcacactttctgagagtgagcaatccaagggcactaagctctggggggttctagttcatgatctctcctgaagttgtagtcagggtctaagccaggactacagtcatttggaagcttgactgggactggaggaagtgcttccatcatggctcaccaacacagctgttgcctggagtcttctgtccatcactggctattgacaggaggctgccacatgggcttctccacagggttcctggagtgtccttaaaacacagtagttggcatcctctagagtgagtgatgggagagtaaaag

SEQ ID NO: 268822 - DNA, 181 bp, Homo sapiens
cccttacctgcaatactctttccatatgatgtgatctctgcttccttcagactttactcaaacatctcactctgcgtgaggcctaccctggctgatgtaaaactgctaccctcggctgggagtggtggctcacgcctgtaatcccagcactttgggaggccaaggagggtggatcacttaa

SEQ ID NO: 268823 - DNA, 522 bp, Homo sapiens
aattttagcacatttaaaagaatcctaaatcatgggtttaaaactaatggggttgaacagacatttatttatcctgcaaagcaggccaataaacaattttatgtttccaaatgctaatttggaagtttgaaagtcaaagaatgtattgctaatgttaagtaaaaaggattacatgaagtagatagaaaaacaaatatacgcatgctgaaaaaacattcctccatgatccatgtgatgcccacttttaaaactgaagagaaataacagaaaatattgagcttcagttcttcaattggcacttaaattgcagggtcttgagaggtgagaaaaaggcatgaaacagtctgtgttgcctcagatccttaggtcagaaacaaaattcttatctgaaaacataagttggaatttgtggtccaagagactgtcatgattcacctggcacattggattcatctttttgcttacacttaaatcttttctagtattcgtttaagtcagtaacatattaaggttaaaaaaaaa

SEQ ID NO: 268824 - DNA, 373 bp, Homo sapiens
cccattcccttactgtagttctcccagataattttcattctagcacttttattgtgttttcattatggctcatgatcacacttttaatacaagatgaaaagacttaaatagtcatgcaccacaaaatgacatttttggtcaaggacggacagaacatgtaacagtggtctcataagattatgaaagaactgaaaagtccccgttgcctagtgacgatgatgatcttgatgatcttgaccctatgtagtcctaggctataggctaatgtgcgtttgtatcttaattgcatacgaaaacagcttaaaaaataattttaaaagttaacagaagagtactgataggataaagatataaagaaaatattttcgtacag

SEQ ID NO: 268825 - DNA, 695 bp, Homo sapiens
tttatggttttcatagaatttggaaattggggggcattttttcttctgttatggttttctctctgctcctctcatgcttctcctggggctctgatgacttggatgtacgttaggcccctcagaattttctcccagtgtgctgattctgtgcagctttttaaaaagcctttttctctctgtgtttcatgttgggtactttccagtgctgtgtcctcattgtttattaatctttctgtctaaagtatctaatttccttttaatcgtatccaggtatttttcacctccgacatatttttagtctttagaatttctgtctgggtctttatctcccatgtgtctccttcacatgctcatgccttcctctatttttttttttttcaacatctggagtgtattgataatagctctttcagtgtgcttgcccattctgtcatctgcatcatttctggtctgtttctattgattgattcccaccctaccccaacccccaccctgcccatattggattgtaacttccttcattacatgcctggtaatttctgtttttaatattgggtgctggagttcttttaagtatcttgaactctgtttggggacataaagttacttggaaacaatccgatcattttatagcttgcttttaagcttaataagacaggactgggacagcctttagtttagggctaatttgaccc

SEQ ID NO: 268826 - DNA, 518 bp, Homo sapiens
aaaccatctccatttcccgtttccttcatccttactcgttatgtcaagcctctgcaaactgtggctttcagaacatcccctccagattccactgtttgaggtcttcgccttgccctcttcatttgcatcctgcccactggtgacctatcccctcatgagccatggcaagatccctgtgggtgcccatgtttcactttaggatatggaatgatgcccagcaactattatgggttttgtatcctaacctcaagtctttatcaataaactttattttagtaactgctttaaaatatgcctcacactggttggttctagtcaagtcagaattcttcgtacttcttgtgttttagcatttaaaaatgacctatgctcttccctagaagtcttaaatatcctaatatctaagatagtttaagtacacttttacctggggttggagcttgaacagatacttctcaggcccctcttggagctgactccacacttgcttagtctaagaaccagacctgatgctaatg

SEQ ID NO: 268827 - DNA, 539 bp, Homo sapiens
acatggagactatagttaataacaatgcagtgcctgtagtcccagctattaggaaggctgaggcaggaggatcacttgagcccaggagttccaggctgcagtgacccctggtcacaccactgcactccagcctggctacagagtgagaccctgactccaaaaacaaacaacaatgtgtacttgaaaattgcgaagagagattttaagtgttttcacaagtatgtgaggtcatgcatatgttaatcaacttgatttagccatttcactatacatattttgaacagtatgttgtacgccataaatatatacaatttttgtcaattttaaaaatagatttttaaaaactactggagcatgcatttcccttgccctgcctctccttctgttgaggtaggagtgagaattctgcagccatttcagacactgagagacaagttgtctgtcaagtttgacaaagcagctgtatcggctgtggaccactcacctctgtaatttgagaaataaacttttattgtgttaagccactgtgttttgggtct

SEQ ID NO: 268828 - DNA, 1141 bp, Homo sapiens
gatcattatttaacaatgattaggaaggaaagttgtgacctctgttgctgttacctagggtccagtcttaactgacttgaaaatcaaatctgtggagggtttagtgaacttaaatcatacatcctacctagcctcagagcctctgataggaggtctctgtcgttacatgaggctgtgcatgggaagaggcagctcagcatagtggactgccgagttcaagtttggactccaccagttactaggtgtgtgacttcaactaaataactgtacctctttttttaatttttgtttgtggcggggtctcactctgttgctcaagctggagtgcagtgacatgatcttggctcactgcaacctcctgtctcctgggctcaagggatctgccacctcagcctcctaagtagctgggactacaggcacacaccaccacactgggctggttttttgtagagacagggtttctccatgttgcccaggctggtctccaactcctgggttcaagcaatcctctggccgtggcctcccaaagtgctgagataattggtgtgagcccctgcgccctgcctactgtacctcttagtgctgtcgtttcctcatctgaaaagtaggggtgaagataattgtgtctgtcttatatggttgttatgaggattaagttagttaatatttgtaaagtgcctagtacagtgctctgtaagtttttgttaaatgaaatatttttttaaattcctagggtattgtgcttgcttaagttagcatggggccgattcgggtcattggccaattgccttatagggcgatttcattaatgtgcgcgtttcacaagcgactggaaacctgggtcccaattataccttcgaaaaaccctttcccattggtaatccaaaggccaccgtgcctttcaaattggccctttagccatagaattagcgtattttgtaaaaccgtaaatttgtaaacccttttttcacaggcctatgcaaactctttataaaataccctcctctctttgtccctctagcgccttcagcccccaccatgcgtaactctttctcgggacgcctctgacaccccttatcatcttggcgcgcctcttccatgcctctggtctctctatacatgtacacactatcctctgccg

SEQ ID NO: 268829 - DNA, 227 bp, Homo sapiens
agatagtttggctaagattcatgagtcactactatgttctatttcctttaagtgttgtaatgaggtgcttatttgcatttttaaaatttcttttattattgcctgttagaaatagtctttttttggatgcaggaaaaaaatacatagagctgttttggcctttgagaacaactagccagttaaacttctagttcaccttaaacttcattttggttctgtgtttacag

SEQ ID NO: 268830 - DNA, 612 bp, Homo sapiens
atcacagaccaaatctattagattctcttaaatgcttacaaaagagaacatgtagttctagtaatgacagcaaaactcctgatactcacacttaatataagcatcagtactgtgggtttaattcatttctttgtgaatttctgaatctgttttatatttttccagtgatctagtaatcttaatagatattaaagcacaaacttggtggcttaagacaatagaaatttattctctcacagttctggaggccagaggtccaaagtcaaggtgttggtactgttggttccttctggacactctgagggagaatctgttccctgcccctcttgcagtttctggtggctgccggccatcctcgacattgctaggtttgtggccgcatctctccaggttctgctctgtcttcacgttgccctctcctctgtgggcgttttctcctcttctcctctgaggacacttgtcattggatttagggcccacctcaatccaggatgatgtcatctcaagacttttaactgaattacaccagcagggccgggcacggtggctcatgcctgtaatcccagcactttgggaggccgaggcaagcagatcacttcaggtcaggagttc

SEQ ID NO: 268831 - DNA, 416 bp, Homo sapiens
gttgaaaagcagttcatacaggtattggagccttggagaggttgcttgaagacaggctatatgcagtggatgaagtcacatacacagaaagaatgaacatttcagatggaactagaggacacggggagagaagtgtctaatgagcaaaacaaaagtaacaataatgagatgtgggagaaggggggttgaaagaggaagtgagtagctacagagatccattttagattataacgtgtagatttgcctaccaaaatgaaatagaagacgaccatgttgctgttaaggcattcattaagttagaacttacggctaaatttcttgatcatgtggtcacatattccaacatttctctttgagatacttactgcacaacagagaaatcataagaaagtaccatcagaagtaaatgactgatt

SEQ ID NO: 268832 - DNA, 442 bp, Homo sapiens
acagctctatttggggattgccacaaaccatttcccacaagctgtctgctagaaaactacatcccctggccagaggtgaccaactgggactgggggtggacatttgacatcatcctgaacttcaaagacagaaatttggatacggtgggggactgccttctggcatgcccatagaggaatgtaggaagcttctctgcagagaaatacagtaataaatgcggattgagcaactactgtgtgccaggcactgtgctaggcatgggcaagcctgaaggaaacaaatcaaacaaaatcctcgcattcatgaaactcacatctagtaaaacccaggaaataaaaatgagagggagggagaaaacagaagagcatggcccctgaatgctgtctttgggttctgtgagaaactctaatgattctccaataaacttcctgctttgctcac

SEQ ID NO: 268833 - DNA, 416 bp, Homo sapiens
gaagtctcttctttctggctctctttttctgagtgaggggttattccctgattccctgggctacaaattgttcttcctggctctctataaaaccactctgctctttctcttctctctattggatcctgcttctcccatgggagctctgtcacctgaaacccctcttctcaagtctctgctgactatttccatagctggtagtcacgacgaggagacaactgtgtagggtcaatatttgggccaaccaccctgaggaactgtgagggttagaactggaaattgtcaagagaatccgaacccagctaccatataagagagttcaacttatgttcaatgtgaatgccatggcaatattaaaaggtaagaattcaatccatacgtgcttgaggtaaataggagaaacctagaatttatgt

SEQ ID NO: 268834 - DNA, 232 bp, Homo sapiens
cccctggtgtgaacgatactgccagtgccaggagggcctgactcttcctagagtcctctttgttatcagcatcaccactgaaagatgggctccatgtggccctgccttcccatgagaccagcgggtctgattcctcatgttttgtttaagtgtcagatttgatggactgggggagatggaagcagaactgtgccacactgaaaggtgcctgtagctgatatctgcaaatgta

SEQ ID NO: 268835 - DNA, 443 bp, Homo sapiens
agaggcgagtcagaggtttggtggcattaggccagtttgagcattctgcattcaggtgagcctagcttcaaccccaaccttgtctatcccaccctgactttgatccttaatcccagtgctacttggcccattagacagtgttgttttgcctttaggatgctgaaaaaggatgaaaacagaggctcaaacatgtaaactgtacacaagtcacaaaaggaacaaaagccgttgacccttggattggagacttaacagtgctttctcctgttcttactttcagtctagaaataatttgatcctcctgcatctgactgtgacttaaagtgtagttcttcatgggagtttttaaacgatgtttacacacatgttagcactcattgcactggacttcacttctcccttcttgctaaatgggtgtgaaataaaaatatttttttaaatac

SEQ ID NO: 268836 - DNA, 683 bp, Homo sapiens
atttattctctcatagttctaaaggttagaaggctgaagccaaggtgccagtagagccacgcttcctctaacggctctaggaaagaatctctcctggcctcttccaacttctggtggcccttaacattctttggctatggctgagtaactccagtctctgtctccgtatttacatggccttattctctatactctcatgtgtcaattctaccactactttcttttataaggatgtcagtcactggctttaggacccacctaaatccaggatgatctcatctctaaatctttaattacatctgcaaagtacccattccaaataaggtcacattcacaggtaacttcaaatagatgttatttaacccactacagaccttactttatatacggtatttttaaaataactcaaaaatacatcaaagacctaaacataagagccataaaaaacttagaaggaaacataagggtaaatcttcatgaccttaaacttggcaatagattcttagatatgacaccaaaagcatgagaaacaaaagaaaaatagataaatatgacttcatcaaaagtaaaaacttctgttcctcaaaggacaccatcaaaaaagtaaaaagacaactcacagaatgggaaaaatatttgcccatatctgataagggactgttactagaatatataaaaaaaaa

SEQ ID NO: 268837 - DNA, 586 bp, Homo sapiens
tgctgtgagcatgtgagcctaagtgggtgagcccactcattcattgatttattatttggagccaatatgtgtggatattgaatgtatttgttggctgccacttgagcatttattccttccatttaagccaggcaacataaccattccctctagcagcagagatggtcacaagcccagtcagaaacaatgaacccacaaagactggggctgaggcttccagtaaactgtagcttccttgctcctctagcatggtgtaagtatatgatgcctggaaatgtggcaaccgttttcctcctataaggggaaaccctagagggatgggagtttagagggacagcaacaagtagagcctggggttgaagtcagtactgtcaaatgaatgcgggaaagatggagaagaaccttgtgtttggtggcatgatttgagctgcagtatcaaacctcacctgtttgattctatggactatcctatagactattcgggattgtgagcaaggccatcttacagactatccagaattgtgaaccacaaatttcctgtattgtttaagccagttcatattaaaattctaaaagtcctaactaa

SEQ ID NO: 268838 - DNA, 360 bp, Homo sapiens
tttgaagattacttcaaaattagcttccccccacttccagtaatgtgcttggttacttacgtattgaaagtaaccttgcagacaagttttgaaacacaattttcaaaatgatctaaggaatagttttccccatatatataaattaaatgatttgttaaataatagccatatttgaacagctaagtaaaatgtttgagttttaaaatcttggattaaattgttcaaactggctaggggaagtgggtcacgcctgtaatcccagcactttgagaggctgaggcaggtggatcacctgaggtcaggagctccagaccagtctggctaacatgttaaaaacccgtctctactaaaagtaccaaa

SEQ ID NO: 268839 - DNA, 508 bp, Homo sapiens
gaagctgaagcaactccatcttggaagctaacctgccacattgacttaactgagtgaccccagttccaaggcagggcctctacaatttccagtttatctattgtttcctgtgtaagagcagatacttactgtaagtccgtaagtgctactcgtaggtcaaacaaccttgatgatatcacacttcaattgtcttataaatcccatctgaaccactcctaccctatggtatatgagccctgggtttgggtgctaatgcggggatccaccatctcatctcattgccgcctgagacacctacatggcttctgttggaaagtcccctagctttctcagcctctttcttcaacttctcaacttcctcagactttggggtaggtttgcataggcctgtctactgcagaacaactcctgttctcagggagcttccagtctactgacagagaaagaaaataaaaacggatacgtccagcttctccgggagagtgagacgaatcagtggcgataataa

SEQ ID NO: 268840 - DNA, 405 bp, Homo sapiens
gtgcatttacaatcctttagctagacagaaaagttctccaagtccccaccccacccagaaacccaggcgacttcacctgtcaagctgagctgagctcttgatttttctcccactggaaggtcaacattgttcgggattcctcatcttgccgtggctctgagttggctaaatacgctgtaattgattttctgagcgaacctctgcatgttcctacgacattttgtgatcttccaagtgaacaacctgacagtgccaacatttatactgaagtaaaagaactcctgaaaattctcatataaatgtcagcaatattgtggaagtttgaccactttcatgagtccatacattggaaatcaaagtaataaggaaatatcttaactctattaaaatcattttttctccttt

SEQ ID NO: 268841 - DNA, 570 bp, Homo sapiens
tattagtgcagtctagaacgaccatgacagctatatcctcttcaagtcattgtacatcttcaatagacggtaagcatgtggatgtagtcagtgatcaggcagcccttcaactttcaccaaaagggaagttgtcggaatccccaaaagaagagtccttggaggagccctccatgcgccagagcagccccgcagagactgttgattaacccagcagaagcctgggctgcgcagacggggcctcagaaagagtggcctcgccgtcctggtgtaaggtgcctccctcggaaaggatactatctccaaggattttctaaactaattgtttaatctctccagattatgtatattaaccagcactgcgctcgaatagacctcaatgcgcgccttgtgcgcgctcctttccacgcctttaaggaaagccctggctggtgctgggtgagcggggcgcactgaacctccggggcaaccacatccattcaggagctccggggactcagaagagcccaggcgtctaagagtgggaagggacggactttaattaaaaagtttgactccctctctaatccagtc

SEQ ID NO: 268842 - DNA, 501 bp, Homo sapiens
agtttacctatgctctgggtagcactgactggtactaatttctgtattacttagagttttgtttacaaataccaaaaactaagtgtacttaaatattataacatttttagaaagacttattgcagaacaccagaacatcacacaaagccccttgctcagtggcttggggtttaatactctgtagccaccagcttgaaattcttcattttatctattaatttgtgttgcaagagaagtcccatgtgtcaagggatcaggtgccacggacttggagctgtggctcacaggtattgaatgaatgagcaatgtgcgaatgctgagtgttcaatcttttgggtagcccctgcattcatccaatctggagaaatattattttgtggtctaaggaggctaaagtagatccacctgtgcctggaggcacacacgcttctcaacagaaagcaatcgtgttctgccacctccatcattccttccctttgcagggtcgtgcctgaagttttg

SEQ ID NO: 268843 - DNA, 501 bp, Homo sapiens
atcaagcagaggagacatgtttctcggcttcccctctctgggacttaatagcctctgaaggctagcctttactgactcatgaagctgtgtctgcctggggtcagtggtggagacattgcgttaaccccagcaagcgagccatcaccagagctttgcacagggagacaccacatagaaaggcagatgaggcaacacacacaccatccccagacagccatgggtccccagagacaggaaaaatatgtgttttcttaaagaattagaaaagaaaaccttgctttttcctgtgtggctcattggtaggagatctcaaattctaacccttgttttctcttttacctctctgtctgctaaaaagcactccttagatccagtatctagcatggtgagcctcctggattcagtgctgcagtggccactgctgggtcaaaaacaaacactgggaaaggaggaaaatgatgtttttctctctttcaataaagcatttgaaatctctaattc

SEQ ID NO: 268844 - DNA, 406 bp, Homo sapiens
tctgcctcccaggttcaagcaatgtatgttcactgcagcactattcacaatagcaaagacattatacactccacctctcaggttcaagcaattcgtgtgcctcagcctcctgagtagctgggattacaggccccgccatcacacctggctaatttttgcatttttagtagaggctaaaataaaaatgtatcattaacaatccaacatataaaactagtgccaagtctaagtgagaacaattccacctaatagcgcttgtaaatctccatgcaggcaaagcacaagggaagggactaacaagtccttgaaacggaaacagaaaaaaagctattctcaattggaaaaataatttatatgcattaagtggcaaaacaacaaaccttaattttttatataatggaaaaac

SEQ ID NO: 268845 - DNA, 345 bp, Homo sapiens
gactctgagggtgacagggtcctaggagagtggatgggtggggagcaccctgtggtctcagctgctggggctgctgaggggctaggccttctccttggttatagaaaacatcacttctggggcattgtgagttggactctggtgaccctgacagctgacccctggaacctacatcagagaggttttccttgggggaaaatctcagtctccggcagactgatggtattgctgcctcagcaccatcagtagcaagctgaactgagtttcagctcctcctgagttttctagatcattcccatgttctgctccctgtacctctatcaccatcacttgtgggtaagaaag

SEQ ID NO: 268846 - DNA, 500 bp, Homo sapiens
cagatgaagagagaaatgatggaccagatcttactgaactgaattaaaacctgaaatttaagattgaaaggacacatagagtctcagactagattgatgaaaaaagacacacacatatcctgataaaatctcttactgataaaagaaaaaagcataggaggttgacggggaggatcacttgggtccaggagttcaggaccagcctgggcaacatagcgagatcctgtctctaaaaattaaaattaaaaaaatcagtcagatgggcatagtggtgcatggctatagtcccagctactcaggaggctgaggaggaaggattttttaagctcagcagttcgagtccgtggtgtgctatggttgcaccattgcactccagactgggcaacaccaatctgtctcttaaaaaaaaaatgctttgggaggccaaggcaagaggatggcttgaggccaggaattcgagaccagcctgggaagcataacaagaccctacccctacaaaa

SEQ ID NO: 268847 - DNA, 131 bp, Homo sapiens
tgctgggattacagtcatgagccactgcgcccggcctgtgatgtcatttctaattctaatacatttctccttctggcttcatgattctagacttagtttcaattaactgtatgttcacatcttctcaccta

SEQ ID NO: 268848 - DNA, 312 bp, Homo sapiens
agagccagagtaaacatccactggaggttccgtttaaggccaactcattagaattttaaccaatttgcaagaataatctcaattagcagagctcattagactttaattggactttaagctcttcctttaacctggtagccttggtggggctcctgaggattcgttgctgggggtggatgtctacatggatgtatacgtgtgggcatgccaaagagttaattttcccacagcagggtggagtaatccaaagaaaacaaacaaggaatcagactgtcttgacaaaggcactacatgattgtaaaaggcaacagg

SEQ ID NO: 268849 - DNA, 1214 bp, Homo sapiens
ccacgtaagaagtgcctttcgcctcccgccatgattctgaggcctccctagccatgtggacctgtcttctttctgaaaccagcccaacttttctcccagagagtatcatggaactgaactttcaagatcatggcatctggacatcgagaaaacggaaccctcatctggccacctgctgctttttgaccaattcccatataaaccgctaacttcagtcagttggagggatggatttgagatttgccttctgtctctcaggtgatgtcaccagcaataaagccttcttccctggcaaaaaaaaaaaaaaaaaaaaaaaaaaaaaaaaaaaaaaaaaaaaaaaaaaaaaaaaaaaaaaaaaaaaaaaaaaaaaaaaaaaaaaaaaaaaaaaaaaaaaaaaaaaaaaaaaaacaaaaaaaaaaaaagaagagagcgggcgcggcgagcgacgccaagactctcccccgaggaggcggaacccaatccaccacacaccccccaatatttagaaaacaaaggaggcgccccacaagagagagagcaacaaaaaaagaagagcgaacagcgctactaaaacaaaacacgccccgggcgaacacacacaccaccacagtagagacacaacatagagagaagacacaccctaacagtgtggtgatgaaaaaaactaggacagcaaacacacaccaacaaagaacacacaccaccacaagaagaaataacaaacataactaagccgctgagagatacaagatagaagaagcaccccacacacagcacaagcacttccggcgcaaaagaatacacgcacgcgcacggtacgagtcagaaaaaacaattactagcgggggaagaaacataacaaacaacagcaagcacagtgagggcaaggcgagacaggcacggacgcgacggggagtaggaggaaaagaagaggcagcgcgaagcaaacaaaggaggagatagagagagaagacgacaaccacaccgagagaaaaaaaacaacgcagaaagtcgagatacacaagggcggggaaagccagaccgaccaaccgacccggaggacaaggacaaaccagccagaaaaagacgagcagaagcgcaccaaagccataacacaaagagatagaatgaatgcagtagagctcagaagaagagagacgaaagacagaaaacgagcagaccgtgagagaatgaggtaccgcctcacactacag

SEQ ID NO: 268850 - DNA, 465 bp, Homo sapiens
ccacgtaagaagtgcctttcgcctcccgccatgattctgaggcctccctagccatgtggacctgtcgtcgctgccctcagcctccagatgcagcccccctgccaccttcaggacccctggctctcccctggactcagtagcgaaagggtttatgtgctcggagggagaccttcaggaatctgtgcatagaatgccatagtgcagaggaaagtcttctttctgaaaccagcccaacttttctcccagagagtatcatggaactgaactttcaagatcatggcatctggacatcgagaaaacggaaccctcatctggccacctgctgctttttgaccaattcccatataaaccgctaacttcagtcagttggagggatggatttgagatttgccttctgtctctcaggtgatgtcaccagcaataaagccttcttccctggcaagacaaaaaagaaacacaaaaaaa

SEQ ID NO: 268851 - DNA, 442 bp, Homo sapiens
ccacgtaagaagtgcctttcgcctcccgccatgattctgaggcctccctagccatgtggacctgtcgtcgctgccctcagcctccagatgcagcccccctgccaccttcaggacccctggctctcccctggactcagtagcgaaagggtttatgtgctcggagggagaccttcaggaatctgtgcatagaatgccatagtgcagaggaaagtcttctttctgaaaccagcccaacttttctcccagagagtatcatggaactgaactttcaagatcatggcatctggacatcgagaaaacggaaccctcatctggccacctgctgctttttgaccaattcccatataaaccgctaacttcagtcagttggagggatggatttgagatttgccttctgtctctcaggtgatgtcaccagcaataaagccttcttccctggcaa

SEQ ID NO: 268852 - DNA, 692 bp, Homo sapiens
ccacgtaagaagtgcctttcgcctcccgccatgattctgaggcctccctagccatgtggacctgtcgtcgctgccctcagcctccagatgcagcccccctgccaccttcaggacccctggctctcccctggactcagtagcgaaagggtttatgtgctcggagggagaccttcaggaatctgtgcatagaatgccatagtgcagaggaaacagccccagaaaatggaacagctgctaagtgagactcctcagccaggccagagaatgtgcattctgacggactgcttctcatttgcactgatcactgtgagtgtctgatgggtgggcatccggcgcccagagaaggagttgctctattatcctggcactccataaagaacaggtagaaataagcgcttcttaccaagatgaaatccacccatcatttctgaatggctcagttttgatttcatctcccaaggtcttctttctgaaaccagcccaacttttctcccagagagtatcatggaactgaactttcaagatcatggcatctggacatcgagaaaacggaaccctcatctggccacctgctgctttttgaccaattcccatataaaccgctaacttcagtcagttggagggatggatttgagatttgccttctgtctctcaggtgatgtcaccagcaataaagccttcttccctggcaa

SEQ ID NO: 268853 - DNA, 1611 bp, Homo sapiens
ccacgtaagaagtgcctttcgcctcccgccatgattctgaggcctccctagccatgtggacctgtcgtcgctgccctcagcctccagatgcagcccccctgccaccttcaggacccctggctctcccctggactcagtagcgaaagggtttatgtgctcggagggagaccttcaggaatctgtgcatagaatgccatagtgcagaggaaacagccccagaaaatggaacagctgctaagtgagactcctcagccaggccagagaatgtgcattctgacggactgcttctcatttgcactgatcactgtgagtgtctgatgggtgggcatccggcgcccagagaaggagttgctctattatcctggcactccataaagaacaggtagaaataagcgcttcttaccaagatgaaatccacccatcatttctgaatggctcagttttgatttcatctcccaaggtcttctttctgaaaccagcccaacttttctcccagagagtatcatggaactgaactttcaagatcatggcatctggacatcgagaaaacggaaccctcatctggccacctgctgctttttgaccaattcccatataaaccgctaacttcagtcagttggagggatggatttgagatttgccttctgtctctcaggtgatgtcaccagcaataaagccttcttccctggcaaaaaaaaaaaaaaaaaaaaaaaaaaaaaaaaaaaaaaaaaaaaaaaaaaaaaaaaaaaaaaaaaaaaaaaaaaaaaaaaaaaaaaaaaaaaaaaaaaaaaaaaaaaaaaaaaaacaaaaaaaaaaaaagaagagagcgggcgcggcgagcgacgccaagactctcccccgaggaggcggaacccaatccaccacacaccccccaatatttagaaaacaaaggaggcgccccacaagagagagagcaacaaaaaaagaagagcgaacagcgctactaaaacaaaacacgccccgggcgaacacacacaccaccacagtagagacacaacatagagagaagacacaccctaacagtgtggtgatgaaaaaaactaggacagcaaacacacaccaacaaagaacacacaccaccacaagaagaaataacaaacataactaagccgctgagagatacaagatagaagaagcaccccacacacagcacaagcacttccggcgcaaaagaatacacgcacgcgcacggtacgagtcagaaaaaacaattactagcgggggaagaaacataacaaacaacagcaagcacagtgagggcaaggcgagacaggcacggacgcgacggggagtaggaggaaaagaagaggcagcgcgaagcaaacaaaggaggagatagagagagaagacgacaaccacaccgagagaaaaaaaacaacgcagaaagtcgagatacacaagggcggggaaagccagaccgaccaaccgacccggaggacaaggacaaaccagccagaaaaagacgagcagaagcgcaccaaagccataacacaaagagatagaatgaatgcagtagagctcagaagaagagagacgaaagacagaaaacgagcagaccgtgagagaatgaggtaccgcctcacactacag

SEQ ID NO: 268854 - DNA, 656 bp, Homo sapiens
ccacgtaagaagtgcctttcgcctcccgccatgattctgaggcctccctagccatgtggacctgtcgtcgctgccctcagcctccagatgcagcccccctgccaccttcaggacccctggctctcccctggactcagtagcgaaagggtttatgtgctcggagggagaccttcaggaatctgtgcatagaatgccatagtgcagaggaaacagccccagaaaatggaacagctgctaagtgagactcctcagccaggccagagaatgtgcattctgacggactgcttctcatttgcactgatcactgtgagtgtctgatgggtgggcatccggcgcccagagaaggagttgctctattatcctggcactccataaagaacaggtagaaataagcgcttcttaccaagatgaaatccacccatcatttctgaatggctcagttttgatttcatctcccaagagagtatcatggaactgaactttcaagatcatggcatctggacatcgagaaaacggaaccctcatctggccacctgctgctttttgaccaattcccatataaaccgctaacttcagtcagttggagggatggatttgagatttgccttctgtctctcaggtgatgtcaccagcaataaagccttcttccctggcaa

SEQ ID NO: 268855 - DNA, 384 bp, Homo sapiens
ccactttgattctactgtgtgaagtgtcccatagtcccaaggtcttgcaatctttgtgctattgctattgagggcagatgctgtaatgatgtattaattgacatagttttcttttttcttctgagccaaatgtttttacttctactctaaaggtcttctttctgaaaccagcccaacttttctcccagagagtatcatggaactgaactttcaagatcatggcatctggacatcgagaaaacggaaccctcatctggccacctgctgctttttgaccaattcccatataaaccgctaacttcagtcagttggagggatggatttgagatttgccttctgtctctcaggtgatgtcaccagcaataaagccttcttccctggcaa

SEQ ID NO: 268856 - DNA, 148 bp, Homo sapiens
aaatgagcatttatataggtttataagtaccatctttattttagaaaataatcattttctaccttgaattctagtttattgtgaccaaagattgtaaaatttcaggatatggctgaattaaaatcttggtcctgcacttaagtagctc

SEQ ID NO: 268857 - DNA, 319 bp, Homo sapiens
tgaaaggtgtggcggggaatgggggctgtaattcagacttaactgtttgattgatcttctcggactcctcaaggttatcagagtaaaaaaaggaatatgtacaggacattgctttcatgaagtgtctgtcacagtccacaaaacctcggcttggattgtgaaagcagattgttttctgtctcctaggggactgtctattgtgttaatttccagatatggatatgactgtgccatctagcacctaacggaacttcttttttatctgttaatgatggaacacttcaaaattgcaagaaaataaaccctttgagtaaacact

SEQ ID NO: 268858 - DNA, 969 bp, Homo sapiens
atccataatagcaagtttcagtggatttcagaagcccctaaggcagaaaagcaaaagcaccttattttttgtccacttgacctgtgtcttatgttggactgaaatgtaggtctcctaattttagtgtagttttgtatatttctccctatatatctttaactttctgatatataaaggtagctgaaatacaacatcataatttttactggaaaatagccacaatgaaggaacaccacaatttcaccatgaaaaccagcacaaccttacacagatgacaaacatttcccctcaaaacttgttaaactgtatttgggctgaccaaattaaccagagttattctatttatgggggagcaggaagtaacttgataaaatgctttgagtttatatatcatgtcaaataaatagcataattttaaaggaaaaaaacttgttaggcaatgctctcttattttctgacatcacatattgtgacagaatgtaaggccaacctggtttttacaaattccgtggtctaatttttttgttgttgttagtgtataataatagcattgacttaaaattttttaaatttcttttatttagttaattaatttattttgagacagagtctcgctctgtcacccaggctggagtacagtggcacaatctcgacggactgcaatctccgcttcctggattcaagcgattctccttcctcagcctcccgagtagctgggactataggcgtgtgctaccacgcctggctaatttttgtatttttagtagagaggggatttcaccattttggtcaggctggtctcaaactcctgaccacaggtgatctggctgcctcatcctcccaaagtgctgggattacaggcctgagccaccgcactcagctgagtttttttttaatgaatgtactcctggttgtttttttgttgttgttgagacagagtctcgctttgtcgcccaggctggagtgcag

SEQ ID NO: 268859 - DNA, 1062 bp, Homo sapiens
atccataatagcaagtttcagtggatttcagaagcccctaaggcagaaaagcaaaagcaccttattttttgtccacttgacctgtgtcttatgttggactgaaatgtaggtctcctaattttagtgtagttttgtatatttctccctatatatctttaactttctgatatataaagatgtgaatcatgttttttgtttcttgatctctgcggttttttcaagtacgcgtattcattttgtgaaaattcaatgagctctacactttatatgtagctgaaatacaacatcataatttttactggaaaatagccacaatgaaggaacaccacaatttcaccatgaaaaccagcacaaccttacacagatgacaaacatttcccctcaaaacttgttaaactgtatttgggctgaccaaattaaccagagttattctatttatgggggagcaggaagtaacttgataaaatgctttgagtttatatatcatgtcaaataaatagcataattttaaaggaaaaaaacttgttaggcaatgctctcttattttctgacatcacatattgtgacagaatgtaaggccaacctggtttttacaaattccgtggtctaatttttttgttgttgttagtgtataataatagcattgacttaaaattttttaaatttcttttatttagttaattaatttattttgagacagagtctcgctctgtcacccaggctggagtacagtggcacaatctcgacggactgcaatctccgcttcctggattcaagcgattctccttcctcagcctcccgagtagctgggactataggcgtgtgctaccacgcctggctaatttttgtatttttagtagagaggggatttcaccattttggtcaggctggtctcaaactcctgaccacaggtgatctggctgcctcatcctcccaaagtgctgggattacaggcctgagccaccgcactcagctgagtttttttttaatgaatgtactcctggttgtttttttgttgttgttgagacagagtctcgctttgtcgcccaggctggagtgcag

SEQ ID NO: 268860 - DNA, 296 bp, Homo sapiens
ggcgagcgtttgtagtcccagctactcgggaggctgaggcaggagaatggcatgaacccgggaggcggagcttgcagggagccgagatcgcgccactgcactccagcctgggggacagagcaagactccgtctcaaaaaaaaaaaaaaaaaaaaaaattaattaaaaaaaaataaagtgttcagcgggtgctcacttcagtggtacatatactaaaattggaccaatacagagaagattagcatggcccctgcacaagggtgacatgcagattcgttaagtgttttatatttttaa

SEQ ID NO: 268861 - DNA, 406 bp, Homo sapiens
cacaaattctttaacccttctcccatctaaagatggaagctatttctctttctcttaaatatgggtaggacttagtgttatgtattataacaaacataatggggcagaaatgatactctgtgactcccaaggttataaaaagcatgaagtttctgcctggccctctttcaggagcctggcccttggacagccaccatactctgcagaagcccaggctgcgtggagaggctgacgctggtgtctggccaactgtccctgctgggccttcagcctgtagtcagcatcaacagtcaggcgtgtgagtgaatgagtcttcagataatgccagccccagcctttgcttcttccagccatgaccccagacatagtggagcaaggacaagccatcctcactgtgatgtgccct

SEQ ID NO: 268862 - DNA, 1116 bp, Homo sapiens
tctactccatatctctgaacagctggtgtctttcagtgcctaaactcaatcagaatcctgggagcaaaagtagctctccagtgcagtccatgcaggttaattcttgcaacatagaggtgactgaagcatggtaagcagatctagaaaggcaaacatctctagcagatctagagaggctagccaatgttagctagcagtgtctttatgttgataaacctattcagaatgttaactttgtttgttggtttgtttgtccatttttgtctcccaggctggagtgcagtggtgcgatctcggctcactgcaacctccagtaattctcccgcctcagtctttccagcagctgggattacaggctccccatcgccacacccagaattttttgtagagacggggtttcgccatgttgcccgggctgctctcaaactcccgatttcttagtctgaccaagtcagggtttagctatttcttagcgtagcaagttgagatttattccagtttcgatttctagttgtaacaatgctggctttaaccgtgcctacgtagtcgttgcaagttcctgttttgtaataggaacccccattatagccgttcgtacggtttttaagtcttgtagaaatctgggtactggagaatgtaattaaaaaaaaaatttagcagtgcctgaaatcttttagtcataccaagtgtgatttcacaatagagattctcgccctggctgtgcttgtgatttttcactcatgcagaagttgaggtgtctaggctacaggaactttttggtgtcgcaaataccggtttagccatggctgtttcttcttaatccgaggaattttcgaataggcgcaagaggcacaggtttagtgctaatacaaatatagccgtaggatcgcatcgttcaacactgcaatttctttgtagggttatttgtatgttttgtatactcaaaaaaattttttttgatgtgtctttttctgggagcgaggttactggtgtattttattttcatttctgtttgctttaaaaatttattttattttttatgtaaatgttatgtattttattttttcttacccactgccttccccaggagagtaaatgtggcataatttcttctac

SEQ ID NO: 268863 - DNA, 814 bp, Homo sapiens
cagaattgatctcggtggcagcacctctggtgggtcaagcctgcagcttctcctgagcagtttcgttagtttttgggtcctagaaccgctagtggtaccatagcggctcttcatgggttgcaggacgtttgccaactccaccccacgctgcctgcctaggttcggctacggggcaaaaagaacagactcctgcaaaggaagaaccccgagggttggatatttaggaaagacgtcctttgcagtgccacgtccgcggatgctgcacttggctttctcctccctcctggggaagaattgatgtttacttctccccactctccgggccgcattatccagggatttcggggactagattacctgagattttagcgcttctactggatcatccttttggaaataattatcacttacaataatgtctatccgggccgggtgcggtggctcacacctgtaatcccagcactttggaaggccgaggagggtggatcacgaggtcaggagatcgagaccaccctggccaacatggtgaaacctcgtctctactaacagtacaaaaattagccgggcgtggtggcgcgcgcctgtagtccgagctacttgggaggttaaggcaggagaatagcttgaaccgggaggactgcagtgagccgagatcctgccactgcactccagcctggcaacagagcaagactccgtctcaataataataataataataatgtctatccatgttctttaaaaaagtttgccttcactattctttatcaacgtttggttgtctttctcaataaaataatagagaaacatcaaatgc

SEQ ID NO: 268864 - DNA, 399 bp, Homo sapiens
tctactccatatctctgaacagctggtgtctttcagtgcctaaactcaatcagaatcctgggagcaaaagtagctctccagtgcagtccatgcaggttaattcttgcaacatagaggtgactgaagcatggtaagcagatctagaaaggcaaacatctctagcagatctagagaggctagccaatgttagctagcagtgtctttatgttgataaacctattcagaatgttaactttgtttgttggtttgttttccagcctggcaacagagcaagactccgtctcaataataataataataataatgtctatccatgttctttaaaaaagtttgccttcactattctttatcaacgtttggttgtctttctcaataaaataatagagaaacatcaaatgc

SEQ ID NO: 268865 - DNA, 1107 bp, Homo sapiens
  misc_feature (1077)..(1077): n is a, c, g, or t
caatttcgactgtgaagattcaggacacctgactgatagtgaatgtaatcagaaacacacatccaagaaagggtcactgatagagcgcaagaggagctctggtcgggttaggaggaaaggcgatgagccccaggcctcgggataccacagtgaaggagaaacactgaaagagaagcaggctcctagaaatgcctccaaaccatccagcagcaccaacaggctgagagattttaaagagacagtcagcaatatgatccataacagaccatccctggcttctcagaccaatgtaggctctcactgcaggggcagaggaggagaccagcctgacaaaaaaacctcctaggaccctgcctttacactctcgtgactgggaaatagagagtaccagcagtgagtcaaaatccagttcttccagcaagtatcgtcccacatggagacccaaacgagaatctctgaatattgacagtatctttagtaaggacaaaaggaagcactgtggctatacccagcttagccccttttctgaggattcagctaaagaatttataccagatgaaccaagcaagccaccttcttacgacattaaatttggtggaccaagcccccagtacaagcgctggggcccagcacggccaggctctcaccttttagagcagcacccccgactaatccagcgaatggaatctggctatgaaagcagtgagaggaacagcagcagccctgtcagcctggatgcagccctgcctgagagctcaaatgtctacagggatccaagtgctaagagatcagctgggttggttccttcctggcgtcatatcccaaagtcgcacagcagtagcatcctggaggtagactccacagcatccatgggtggctggacaaagagtcagcctttctctggtgaggagatatcttctaaaagtgaactggatgaattgcaggaagaggtggccaggagggcgcaggaacaggaacttcgaagaaaacgggagaaggagttagaggcagcgaaagggtttaaccctcatcctagccgcttcatggacttggatgaactgcagaatcaggggaggngtgacggctttgagaggtccctgcaagagg

SEQ ID NO: 268866 - DNA, 375 bp, Homo sapiens
tccaaaccgtacgtgaaagctttaccctttgtccttttggtggtggttgtttgtttctgtgttttattaccgcttcctaaattctaaggaaaaaattcacatcttagtgatagatggaaattgcttaaatatcagaaaggatccagatcaagcacttttctagtcatgctgtaatacaaaagttatataaagatgatttatgtctttagtaaaggaaaaagtaggacactggctaaggctgcctccctcttgtacattccaacatcggaaatggtcctaccacaaagcaaactaagcctaatgtaattagactgcatccccaaaatgtcacagtgaattgactaaggcaaaatatttgagacaagttatacaagc

SEQ ID NO: 268867 - DNA, 849 bp, Homo sapiens
ataaatactatcatataaacgaaatatactaataaaaacttagctggggaacctttaacaccatttttatgtaaatatttctcaactttcagtagagtaaaaattaaaacacatttttaattgaaattaaatttgaggctgggcctggtggctcacttctgtaattccagcactgtgggaggctaaggcaggcagatcacttgaggtcaggagtttaagaacagcctggccaacatggtgaaaacctgtctctactaaaaatacaaaaattagccaggcatggtggtgggtgcctgtaagtaattccagctacttgggaggatgaggcaggaaaatcacttgaacctgggaggtggaggctgcagtgagctgagatcatgccactgcactccaggctgggcgacagtgagactctgtcttaaaaaaaaaaaagtgttgaatcagttttgtcctttaagtgttacaaagctgaaagccaaatgtcagcccagctcttcaaggcaatgcattttgtgtacttattcctgtctttagctcactttccttaattttcttattttaaatatatataggtataagtatatatttgacatggttgcaagacccccatttctcattctcagttctcctttatttttctccttaacatttcactctacctaacatactatagattttactcatctgttttgtatctttcttttctcactagaatgtaaactccataggaacaagaatgttcttctgttttgttcactgctgtttccctgcagtctagaataggactaggtatatagtattcaatacattgttgttaaattaatgaatcctaaataaatatatttgtct

SEQ ID NO: 268868 - DNA, 391 bp, Homo sapiens
accaagtggaaattatagaactgaagaatttaataatttttttaatgctggcagatgtgcttaaaagtagactggagatgacagagggtaacatcagtgtatttgaaaaaagatcaaaagattcactcaatctgaacaaaagaaagaaagactggggaaaaaaagtgtagagcctttgggcttgtgggataataacaaaaattccagcatttgtatcattggaattgcagaagaaaagaatgagagtggaactgaaagaatatttaaagaaataatagctgaaaactccccaaattggtaaaagacataaacctagaaactcaagaagcttagagaatcccaaataggataaatccaatgaaatcaacataaaaacacatcataatttaga

SEQ ID NO: 268869 - DNA, 432 bp, Homo sapiens
gaaaataaaacaacttttatggattttaagaaagagagtaaaatgatcagatgtctattttagaccaatcactattgcagctgggagagaatgaattagagaaggattcctgcaaaggtagcaaagagaggtttgctgtaagatgcgtgtttgggctggccatgctggctcatgcctgtaatcccagcactttgggaggccaaggtgggtggatcaattgaggtcaggagttcgagaccagcctgaccaacatggtgaaaccccaactctactaaaaatacaaaaattagctgggtgtggtgatgtgtgcccataattccagctactcaggaggctgaggcaggagaattgcttgaaccgggaagcagaggttgcagtgagctgagatcatgccactgcactccagcctgggccacagagtgagactccatc

SEQ ID NO: 268870 - DNA, 462 bp, Homo sapiens
ggcaaggattaaaagtggaatctgaacaggaatcactatttcaaaaagaacaaattagaaaatatgaataaacaggtgaactacatgagcccttccattcagaatagcatggcgggtaagcatgggctctggagtcagacttctctgagttccaatcttggctcttttgctaacttcctttgtaattaaacaaggtcgtaacactttccacctctcagctttttcatgtgtgagatgagatcatgatagcagctgtgtccttgggtggtggtgagaattaaatgggaaatcgcctttaaagcactgaactgagcacacagtaaacatttaataaacgttagttcctattattcctaaaataatactattcatttagaatcacttattagtaatcaatgctaacttgaccttaacgattaaaataaagataaaaattcatgggctatcgaaacctataatgtg

SEQ ID NO: 268871 - DNA, 780 bp, Homo sapiens
actccgggttttcgcagtggctcggtggcctaccccgatcgaaaccgtgaggcttttgctgagggagggcaatgggagaggggaggatggacgcagagtttagaagtagtttgccgaggtgcagtcgcacgaatggatttcatcctcactggtgtatttaatagtttgtaatctaccaaacagcaactgccagaagccagtcccagctaacctactggcgtgcacgaaagaacccagcgatgctgatctcgtttcgttatttttctgacttaaacggttaaatctaaacgcgattactaagaaaaaaaattttatacctatcattgtacacagaaaaaaaatagaaaaatgtttatataagcgtaaagctggtaggacaggaaaggaagccgaaacaaaaagtaaagaaaaatccacaaggacaacttttggagctagtgcctgagattttggatttctgagtcccaggaggtgctgatatcatttatctgcggactcgtattatgaagcgcaaggtcctagagcgtgtgattttacaggcataaggaatataagatgaaggctgagacaaaataggatgggtggcctaattttcttcccccaccctctcgtccctcccatacacatacaacctgacaactaaaagggccgcactccatggaagaactcctgcagagttggactccccaccggcaaacaggaggaggctatgaagaaacttgcctgtctccgattttcttgggaattgaaaaaataaaatttttaagcctttcatgaaaa

SEQ ID NO: 268872 - DNA, 406 bp, Homo sapiens
tgagacggagtttcgttcttgttgcccaggcaataagagtacagtggtgcgatctcagctcactgcaacctccacctcccaggttcaagcaattcgcctgcctcagcctcccaagtagctaggattacaggcatgccccaccacacccggctaattttgtatttttagcagagaagggggttccaccatgttggccaggctggtcttgaactcctgacctcacatgatccacccacctcagcctcctaaagtgctgggattacaggcgtgagccatcacacccggcctcttttttacttatattctagacagtacagctgctgatcaaatgggttcagagcgggagacggcggagtaccatagggcctagacaaccacacaacagtctttgagattagctactact

SEQ ID NO: 268873 - DNA, 293 bp, Homo sapiens
gaaacagaatgagggacagggtgaaatctcacctcctcttccacctaagactggcacctctgctatcttggcctccttcaggaaggctttctggagactgaagcggacggggcaggtttgggaccttaccctcgattcttgcagcctggcaagaaccctgccttcatggcaggtccagtccatttgcagctttgccctccccatctcagtggctttcttttccgccagggtccctctcatatctgcagggcctcagaaaattaagaaataaaagccctttctcatcagatccg

SEQ ID NO: 268874 - DNA, 403 bp, Homo sapiens
agaagagagaaacatacaaagaggcaggcgttggctcaatgaatggaaggaaggactttcttgaccgttttatcagaatcgcaaattatcaggattaggaatgacctgggagttcaacccacctctgaggcttgaaccccgcttctaagaactctgtttagaaacctccagcagtggagcactctccatgtatggagcaacctcttccatttcctaaaagttctgatggcctaattcacacggaattgcacggcagcctttacttatgctccggggggtgatgttttaggggttagatccctgcaagtgcagcttaggtgatagcgtcaagagtgatctctagaccttactgttctgaaaagtattttagtctgctgctcattctcactggctgtgtttcttt

SEQ ID NO: 268875 - DNA, 156 bp, Homo sapiens
gcccgtgtagctaactgcattgatgttgcctcccgctggcgcctccctaagtccaccttcccttgaaatgttaagcttgttgggtcttaccaagtatggatgggtttgtgtagacctgaaactctcctgtactgctgttgggaacataaaatggtg

SEQ ID NO: 268876 - DNA, 353 bp, Homo sapiens
caaagccagccacagctaccccaggatccgattctagaggtaagaaaactttttcctgcaacagctgaaagagtccacttattgtacaaaatgatgcagagttggctgcatcaaaactgacacctgtttgggaggccgaggcgggaagatcacttgagcccgggagttcaagaccagcctggacaacatggtgaaaccccctctctacaaaaaagttaaaaaaaaaaattagccaggtgtggtggtgcatgcctgtggtcccagctactcaggaggctgaggtaggaggatcgtttgagcccaggagttttgaggctgcagtgagtctgggccacagagagacactgtcttta

SEQ ID NO: 268877 - DNA, 523 bp, Homo sapiens
gctttcttcccaggacccacaggctgccatgggattgaaagcatgtggaggtgggaaaggtgacagagtagcatgcctccaaggcccccttcatcccagtcctgctgtggggaaagtgggctttgaacgggatccaagtctaagatgtttccggtgagctgccagggacaaagggctctcagacatcttgggtccccagtggctggggtgggcaggggctgattcagccaaaggaggctctagcccagaacagaggaagccagagcccctgccccattcttgagcctcacagagcttgtccccgagttgattcactgtgcaacacaggcttcagattcatgtatttgaaaggtattcatgatgttgttctcttatcacctctgcccctcacctctgtgaattatcatgaagagtcctttaagagtataaatagaagacaaagaaagatgctattaatgttattttgccaaaaatatttttgtagcataatatattaataaaagatattatgaattcaaaaaat

SEQ ID NO: 268878 - DNA, 493 bp, Homo sapiens
cgctttcctttgcatgcctatctcttagaatattaatcccataaattataatttccccaaagagacactgatcttcaagggtatgactgtgtttttcttattacttaatacctagaactgtattttgcacatattagaaacttgacaaaattaagaaacccaaaggacattcaaattctttctcccaatttaaaaattatgggtacagggacaagagtggagttggaaaacgtcagtcaccctaataaacaaggcacatttaataaacaggatacgcatctctattttcttccccatccccagataattgtttttgagtgatgaaccaaaaaaaaaaaaacctaataaatgcacaagtttataatttgagaaactagcgtgacaaaaatgaggtcatcccatggatgtcataaaataagcatgactttcttctctcaattcttttacttattgcccatataattaaatacagttgtaatttaattctgttggc

SEQ ID NO: 268879 - DNA, 467 bp, Homo sapiens
atttggctttacccttaactttcgctttttgacaacaaaaatatctcctgatgttgattcagcatttatttttactactttgaaagcagttggggctgaattttgtattaaaaaagtgatgatttagtagcactggctggagctatatactgtgcaggaagattctgtgcaaacctctgcatagttctgccaatgcaccgccatgctggcctgtagcatcccttattattccatagctgtgtctttttgagcacagaaaaacagaaaacaccaccaccaacagacaaaccaaacctcgtgtgatttgatatgattggcaatatctctaaaatcaatgtgagattagaatgaaatcccaatactcatttgtccagtgatccaaaccaaaaagtgcattcatagatggtgaaagggaaaaccagtgctactacgtaaaaataaaagaaaaagaaaaaatctttaataca

SEQ ID NO: 268880 - DNA, 255 bp, Homo sapiens
cagagcagagtgagctgcggtcatgattgaaggcagggatgctagcagcaaggaccccaaagaattatcagcattggggcccaaacttccccccaggctgggggaaactgccgggcgcggtggcgggcgcctgtagtcccagctactcgggaggctgaggcaggagaatggcgtgaacccaggaggcaaagcttgcagagagcggagattgcgccactgcactccaacctgggcgacagagcaagattccgtctc

SEQ ID NO: 268881 - DNA, 342 bp, Homo sapiens
gttaccatcaagattcacaggaagatatgagtaccaaagaaaagaaattagtagcaacggtatggtctgcggagagccagagttcaggttcagatctgggctttgcacttactagttgtgtcaccgcgggcagttactaacctctcagtgcctgttccctcgtttgcaaaatgaggatgatactagtacctatcttgtagaattgtgagcatgtgaatgagttaacatacataaagcacttagaataatgtctattatatataaaatgctctgttactgattagtcttatcatccatatcattatattaacctgtgttgtgatactggaattttccaatgag

SEQ ID NO: 268882 - DNA, 364 bp, Homo sapiens
cgcgggtcccgtgagcccgtacgtgccttctgtgcttcacgtggagcacctgcgtttcccagccacccaccaggggcttcaggagattcaaacacagccctcacctccccagagcaggaagccgcagctgtcggccggcgggggctcgatgcagctgctccagccgtgccccttgctgctcccccagggctgccttggtgtgggacactcggtccctgagcgagccgtgatctggaggccagggatgctgaccagtgtgcaggggctcagcgagggcccctctgcaccacgtagatgctgtgggtacagaaagcagacagaaggacttctgctcttgagtgtgggaggcaggggtatggacgtg

SEQ ID NO: 268883 - DNA, 431 bp, Homo sapiens
ctggagaatgctggatttttagtttgcacccttagcagaactgtaactcatttctggaccaggagccagagttatttattagatgtataagttatattaagatgtttaagttacatatttgtccttgagcctgtaaaactcagattggactgggcatggtggcttacgcctgtaatcccagcactttgggaggctgaggcaggcagatcacctgaggtcaggagttcaagaccagcctggccaacatggtgaaaccccgtctgtactaaaaatacaaaaaatcagccaggcgtggtggcgtgtgcctgtaatcccagctactcgggaggctgaggcataagaatcgcttgaacctgggaggcagaggttgcagtgagccaagactgagccactgtacggctgcctgggcggcagagtgagactccgtctca

SEQ ID NO: 268884 - DNA, 499 bp, Homo sapiens
gtcatctcatgagtcccctggccagagctgagtggagcaggattagactaatctgactgtagaagaaacaatttatgatgggttgagcctatccagttctctgtgaataatgcaaactggtagaggatattcctattatgggatgtaaaggtctttatcattttagtttcaatagcattgaatataaggagctataactggaatgagatacaagaaaagtttaaaaattataccataatgtattctactaccactaccaccagaaacataaaagaccattacagaagatgacgttattcgtcctttacttggtagaaacgccatcacctcacaaagttaaagaaatacatcaaagttcctcctcaaagaatctgatgagtagtcctccaaggaagtctgaccaagaatcatatacactcatgatatgagtgtatttctagtaagcaagactacaacaaactttgctttgagtaatttaaatttaaaaccaagaaacaaa

SEQ ID NO: 268885 - DNA, 285 bp, Homo sapiens
gtgactgtggtgtaggtattgcctataatcaagaatcttttagggtctgctatgtgcaatccctgaagggtcatggatcgcagtttcataaagactgctgtattttaaagccttcaaatgccaacgtagtatcttcacaatgattttttttttcagttttattattttttgaaagcgccttcgacaaagttttcagtggattttgttgagggatattaagtatgccatctacataatagccatagtgataactccagcctgggcgacagagcgagtctccgtctc

SEQ ID NO: 268886 - DNA, 486 bp, Homo sapiens
ccatgaatgataatattaaaaactactgaatttacatttatgccctgacttccatgctcctttttaaaaataatgaattttaagccctagccatataattcagtaattttgatgagaaagacatcatctctttttatttttaaaaataagtttcttgaaatctcgtcactggcctgtgttaatgttctcattttccttgtggtgaatttataatcttttctaaactctccataaaaagaaaaactcatagtctttccttaatgtttcgatctcattttcagtgccttaattttactttcactgtaaaatgaaatagaattgctatggtaagcaatggtgaatctttgatgcattgctttttttttcattgacacttttaattctgtcttaatagaatctgatttcaagctctgttctgtggcctacagatattctaagatggtttaaacagtttggttaagcaataaatttcaatatattgataaa

SEQ ID NO: 268887 - DNA, 267 bp, Homo sapiens
acagatgaagaacatgagtcttagagaagtcaaagaagttgcctaaggtcacatgagcagtgagcagaggagttgcttacctttgttagactccaaatcctgtgtgactatgaaactcattaactgaaacaacccggcacctttggacctgtgcaggcaaaggcaagggagttgaccaggagcacacagcacagacgagaacagtcccaaagccttttgctgtatcccatctgtgcaaaccactcccaataaacaaacaaacacaca

SEQ ID NO: 268888 - DNA, 468 bp, Homo sapiens
gtttacctttccaagtcagctggtattagagacatccatgagtatctcaattttattaaccatttcttttatctcttttggaaaactagaatgcaacattatgtgtttaccactgaatgagattaatttatgggttttaatgttgttagtaacttgttataagtgtatctatgatatccacttataaccataaataaagaatacactatttggtaaatgaaataacaggaataattttcagtataaaaggtaaaaatgcaaaattcaaaatatgacagatggaagaatttcatagaagatttctctctggaatcacctatgacttggatggagtttggatgttcatcctgtgggaataggacagtgttggcaagcatattgagaacatcaggaaaaagggggtaccttcaaatttgaagtattaaaatattcatgagaagatttatttcaattactttgtacctattt

SEQ ID NO: 268889 - DNA, 805 bp, Homo sapiens
agccatcacccaactttaacaatgatcaactcatggccaatctcgtttcatccccttttattcttaaagtaaatctcagaaattagggtccaattttaaaattaagaattctcatgtttaatacttactaatgcacaatagtcttcagtgtgtctttgaatacaccaatgtggatcttttcaaccaaatattctactatattactaacttttccatgttaaatactatacctctcactatcctccccataagttgttctcatttaacattcaatggatacgttcacttgttgtcaagtatacattcctaattcctaggcaaacattcctacacacaacaattttttttcttgcagtcttgagaagtgacctccccatattgtaatactattcgtcagtattttcagatagctctgactgaatgcacagaatatttgactaaagttgacaatacaattatttattagtagcagaaactccagatgtagtcattatattgttacatcattctattttcctgcctttagttagctaccttttaggaaaaacagtatcttaaaaattctattaaattccatagtctgtatgagatcccactgatggcaaacaaacaaaaaaccaccaacttcaatatggcatgcagaagaagttcagtaccaagcctcaaattccctttttaacaataaagtctgttttcaaaaagtccatcaaagatatttggactagatctttgccacaataaaaaaattaaatcactttaatttctggtttcacttttaattctaacaggaagaagtaattctaag

SEQ ID NO: 268890 - DNA, 450 bp, Homo sapiens
gaagtattgacatcttaaaaatactaaatctttcaaaacaagcttttttaattttttgagatggagtcttactctgttgtccaggctggagtgcagtggtgtgatatcggttcactgcaacctccacctccagggttcaagcgattcttgtgcctcagcctctgagtagctgagattacaggcaaaacataaacttttataactattcacttatttaagccttctttaatttctccttgataagtttcaatgtagaagtcttacacatcttatataaaagttttttctttctattattacattttgatgataactatagcacgtttttatttcacttgtcagttttctttacagcatatagagtaaaatacttttctgtataataaacttgtatcccagcctgggcaatatagtcagacctcgtctctacaaaaaaaaaaatttttaaat

SEQ ID NO: 268891 - DNA, 488 bp, Homo sapiens
tcttgttttaaatttactaaacagataagaaaaaaaatgtagtgtgttgagaattagagtattactaatttctccacttgctaaaacctgattgcttggtctatgtaatataccatatttctcctgaagtagcaatgacaaggggcaagataaagcatctgaagatgtctagcaggcatcttagaattcaaaattttaaacataaaattcttcagttgtaatggtgtccatatgttggggaaaaaagaaaagcaaagatgttttatggaaccagttgcaggtaagactgctaatctctaaggcaaacacactcagctggtagatcacattctactaaaagatcttgaaaaggtgtgagcaagaaaagaaggcaagtctataccggggaagaaaattttgcctgcgttagtgtgctatttgtgttctgctaagggattttattctttgcctacccgcttctctcactactcagttatctgaagactaaa

SEQ ID NO: 268892 - DNA, 505 bp, Homo sapiens
aataaatctgatcacagcatttctttctttttcttttttgagactgagtcttgctctgtcgctcaggctggagtgcagtggcacaatctcggctcactgcagcctctgcctccagggttcaagcgtttctcctgcctcagcctcccgagtagctgagattacaggcgcacaccaccacgcccagctaatttttgtatttttactagagacaggatttcatcatgttggccaggctggtcttgaactcctgacctagtgacctgcctgcctcagcctcccaaagtgccgggattacaggccaccgtgcctggcctgatcacaacatttctaaaacattaaatttaaaatcaactcttgtacttttttctgatttaaaagtttaaatttgcctgtattccacaatcacttaaaactagaataattattcacatttagtacaattgtttccttttaacggacatatggatatccaatacctctgcccccaacccaaaaagtgtttttt

SEQ ID NO: 268893 - DNA, 329 bp, Homo sapiens
gtttgggccaacctgggctggacctggcgtcgtgtctttggacggactcagggaacatattgattagggaatggaggaccgggaggagggagacactaagccaggtgctattagctgcagtaaattaacgtcctcctgctggatccattattgatggccacgccatgcatttttaaacaaaataaataatgtacttcgaacagtgtcgatttgtgcctatttaccggttggataggtgaattgttgtactaaaacaatttgaaaatactttttttgaattaacgcaatgtttcggtaaagagacaacaaattcttacttttaaacactt

SEQ ID NO: 268894 - DNA, 353 bp, Homo sapiens
cacgaggcctgcctcggcctcccaaagtgctaggattacaggtgtgagccattgcttgcctggccaagaagctcagttttgttgctttctgcattttctacttctgtatcccttaagagtggtcttttattcctcttagtggttaacaacctttgactagttaacattttttttttttttttttttttttgagacggagtctcgctttgtcaccctggctggagtgcagtggcatgatctcagctcactgcaacctctgcctcccgggttcaagtgattctcccgcctcagcctcccaagtagctggtagctgggattacaggtgtgcgccactgtgtcagctagttttttgt

SEQ ID NO: 268895 - DNA, 712 bp, Homo sapiens
cagaatacttcttttccttagagaatcgtttttgtggtacatgtgggttagataagcattatcaccttggcttctctaatatggggctaatagtacataccacacagagttggtagtattaaatgtaacaatctaaggcactagaacaatgctgaacacataatagtgagtccaaagtctcaggactcttcactgatgctgcttctactattggaccctggaactcaacaatggcaaaagaaataattcagagacccctctccccaacacacatacctgctgcttggcccctgatcttttacttcctgaaacaggctgttctgataaatgtctattaatttggtgcagggaaggtgtaaggggaaagagttaagtgggtcactttgaagctaatatagtctaattacccacattctggtcattccattgtggctagaaggctctcagtctcccctctgggcctctgtccctctgccaacaatgtcctctctcctttccttcctctactcagagcttaagtcactttttaaccccaaacccaactcatttcttgcctcctctccagccacctgaacctcacttttgtcttggccaatgcaatacgttttgctttttcaagtctctagaagcagactcagcaaactatgacccatgagcaaaatcctgtctttcccacctgttgttgtaaataaagttttgaaatgcccattca

SEQ ID NO: 268896 - DNA, 444 bp, Homo sapiens
taaaccataaaaataaggactgttttaaaccaatacaggtattgttcattcaccaaacacataaatcacagagcttttgattccacgtagctctgtaagtttccagtttaacctataacatgccaccctcctccatggatctctgctcaactgaagaacttacatcaaaccatccatcgcgtgctgtaaccaaatggccccatccagcagcagcagtaatttcctgcttgaagaatgatgcctctaggactctggaggatggaaggactttaattaacgttgtttcctagtgtgatagctctttggtgcaaccataggaacagttacatacagggactgttaacatgcaatgtctcatttacacaattaccattaaatcttacggtattgacatttgtctcaataaggtttcattaaaacagactgtttactaaaactgttaaa

SEQ ID NO: 268897 - DNA, 564 bp, Homo sapiens
tgtagattaaagacatattcaaaatgcaaaaccgggcagagcagtggtaggaaatccatcagggttctgtgccactgctcctaagacatgaactgcagggacaacttggaatcatggctgggaaattgcctgctgtgtccccatcgccaattcaggtctatggagatgttactgttcttggaaggagttagcttgtccagggctagaaactctagagttatcagggcttgttttatcttaattggaaataccaatcaatttggcctcacttctgtcacctttcttttcctccaccccgagttccccaagttcatctagctgctgtccttctttcctggacttttgcaatggcctcttaactggccaaccccatttctgctctggtcccttctagagaaaatctcatcatgccaaccccctgcttcaacctgaaaggacttcctggtgtccctagtagaatgtcggggatccctaatgttgcctgtgaggccctgcacacttggtttcatagtctctgtcctcttgtctgtcaccttcttcactcctcctaggttccgcatctct

SEQ ID NO: 268898 - DNA, 318 bp, Homo sapiens
tagatgtagtttatcatggattgctctgtcagttggaataatatactcctgcacagtgagagcttgtcagagccttttagcaactgtcaagctatttctgttgtcttaggcttaaaaatagtaaaaatgagagagaaattcagtgtaggtagcctctgccagttattgcctcatagctggaatgagtccattgctagtagtcaattttgaaagtttttcaagccttgtgcatatgtacctgatgcaaataatccttatataactaaacttaatgaaaaaattttatagttgtaataaaagtaatgcagtctaaaaata

SEQ ID NO: 268899 - DNA, 303 bp, Homo sapiens
aaatgatgatatatttacataggagaaaagtctgaaaagtttctaaaatgtcagcatgaccaggtgagtgatgagactggggtgatttattctcctacctatatttctaagtttctttaatgtacattattaattttataatatttcaaaatatttggaaaactgaagaaaagcacaatataaatataactggtgaatgcaccaatatcattaaatatgttgatgctcttaatgaatagacatatttataattgcctttacaatttctgttaaatgagagaacatctgggagttacctgaaaa

SEQ ID NO: 268900 - DNA, 321 bp, Homo sapiens
caaaccctacacgaaggcagacccagcgtttgcaaaacaccagccccctgtgaacaagtcgacctgccgtgcagcccacctctgactccgtttcccccagcatacccggccgcattgggaggctccacctcggtccaacactccggcattagcaggacctgctgaatgagtggcaccgggcccatccatctctgccatctctgctcagccctctgccatgttcaaatatcacacagtccccaggtacctcgtaaatcactgtaattaggggctgctcacttaaaattagagcgcaattttttaaaaagcaaattgtcagta

SEQ ID NO: 268901 - DNA, 475 bp, Homo sapiens
gatgggaggtgccgtccctacatccaggccaatgccgggcacgtagcaggtagtcagtgaatgtttattgaattaaactgaagagactactgtgacccaggatgggatacagagcagtggcagagttcatataatccagtcccagaatgggagcttcagagatcattaatttcaaattgtggttcttggccatattcaaagtaaaaggcatcaatcagatcaatggggtggagatccactcttgcctggggatatcaatcccctcaagatctagcgttggtctcagatgtttccagtctttttcaaactcaacagaaacgtaacggtagtaacaaactatgggccttcaacctcatgaatttgaaatacaagggaccaaaaaaaggggaggcttttaatttattaggtatataaaagtggatattttcattaaataccaatagagttctgagcagacagggaaattacttgaaat

SEQ ID NO: 268902 - DNA, 439 bp, Homo sapiens
ctgctgctgaaagaaactgacgcttacttggatcacatctctgcaggaacaacacatttccagagcatttgtcatcattttctattgctcagttccacggtgacagctttaagaaaaactgtttctgatgttgcaggattctcttaaatctctgcaaagaatcttctttagaaagggttttctgtgactctgttttcatataacacatagtctagtaagaattagaaattagaaataactgagctttaatcacggaataatcttttccagccttgaaagagtttgtttctttgtaaatatttgtcatttcatcttgctcccgctgtcatctacctgaatgaactctaaagacttctctctcattgagcacatttcccctctatttcccctgcaagttctgtgttaataataaaacttcattttcccagtttcagagatg

SEQ ID NO: 268903 - DNA, 805 bp, Homo sapiens
caaaaacaaaacgaaaaactaaaccacaaaaaagacccgaaggcagaaagcctggaagaatgatcagattcccagcaagaagtcaaacaccaccgtccaaaacagaggccccaaggtctcgctgatgtgagctgggtgaggctgcccctgcctggtgtacggcttgacagcacccagggatgaagggcgccatgttggcaactattatcttatgtcacaagatgcgaagcaagtgctggcagaatgtggctgtcttcccagatgacggggaacacagccagcacacactgaagggataaggggagggtcctgtgctttgctcagggtcacggccagctctgcctccaagcagcagtggaccaaggccactcagggctctgggaaaccgagctacagtgatctgccctggggcagggtgttcaagggagacacccagcagcctccaccatatctagcacgccagcgtcaaagaaccaggaactgtgagcatgggttggtccctgatggttgagggtcttgggtggggttggaggctgccccacagaaagctggacaaagcaaggtcaacatggcattgtgcttggtcatcacaggcacttagaaagagccttagttagcctgggcaacatggtgagagccggtctctacaaaaaataaagaattagctgggcatggaggtttgcgcctggagtcccagctacttgggaggctgaggcttcagtgagccatgatgtaccactgcattctagcctggctacagagcaaggccctgtctcaaaaaataaataaataaaaggttaaaaag

SEQ ID NO: 268904 - DNA, 407 bp, Homo sapiens
cacctcactttgaccttcttcctcaaagacattctctgtgacctgcctggcccttattacctctctagctttgccacttccctatgtctccatctcccctctcacacgtagtagaaagagactctacctcatggagtaaggagaggcttcacagaggcaggattgctattagtcttcaaagatgaggtatttgctaaatgaatgagacaaagggattggggccacattacaggaaattgaggtatgtaatagcctggtgcaggttaagagtgtggactctgaaaccagactcagcctggaattgaatcctggctgtgtgatgttgggccagtgacttaacctctctgtgcttttattcactcttctataaaatggggattataataaacctaccttataaggttaaa

SEQ ID NO: 268905 - DNA, 319 bp, Homo sapiens
aaatgaggttatcggtggagactagaggataaggttattcagcaagcctaaggaagaaaggcaaattgtgactccggatctctgcataagcatatggcagatggcacagtggagaacaaggtgataagaacaggcagagaaaagtcacactgtcataagccccaaactgggatctctcgttgctgctggcttggaccaagctcaagaccttgcccttgcccataataaaaagctgcagacagtaaaggctgcacatatcttacttcttacaatacaatgatggctgcatccttaaataaaattgtaatataactgcaaa

SEQ ID NO: 268906 - DNA, 338 bp, Homo sapiens
tgcacctcgtagtcactacttttcctccagacattttctcaagccagaagaatgagcacagcccacatctgaagcagcctgagaggctgggcctgcaggggagataccggccctatggaaggcagttggtgggcaaaagtccggtttctacgctttgaggggacacctgtggggcaccctgaggcccagccctgctggcctgctggcctttggactggagctacaccatcagctctcggaggtctccactcgccaactcaccctgcagatcacggaacttgtcagcctccataactgcaggagccaatgccttataataaaatctctttctcttgtct

SEQ ID NO: 268907 - DNA, 345 bp, Homo sapiens
ctctcactgcagccgtttcttcacagggtgatcctcacagaaacactcaaagccttctgttacgtacaaaggaccgcgtgtcagtaatctacagccatttaccagttaccaagaaaacacggacgtttccactaaaaatcgcaaacgtttctttcaagcaaggagcgccctgcgccagaggctgtgggaggagtgaggagtctgggttcgttccagccgcagtgagtaaggcgtgggtgactccgagcattgcagaggcatgaggaaacgaaaacaaaacctgccgaagtggggccttactgacttatcttccactgtgaaataaataaaataatgtttttcttt

SEQ ID NO: 268908 - DNA, 345 bp, Homo sapiens
cattatgtggctctggcggctcaagtgatgcacctggaacatacgccgttcatgacactttgcctttatgggcccctttaactcgaggatctcaaagggcctcagcagtatgaccttgcgtgtcctggccgggcgcccaagggagggaggccagaaggtccacgctgctttccgtgtgagaagtcaggtcacggtgccggatcagaactaacacctggcctgcaccctcattggtgtggtactttggaaggcagaggtataagaggagaactagcaatgttggcaaatgctgatagttggggtcaggatcccaaaacatttaaattctgataggggtcaggccct

SEQ ID NO: 268909 - DNA, 405 bp, Homo sapiens
ggtttatacataggttaagtttcagaaacgttacagagtccttagatccttacgtgatgattatgtgttcagttgttttacctattagactgtaaactccttataatctagtaaaggcatagattatattttattcatccttgcagtttcattagagtctgtctcagtactttttcctagtagtgacccagtaaatatctatgcaacaaacttggctttgctggtgtgcaaagtgtaatataaggaaaattagtgacattttttgccttttagtgtgtaactggaatgtatagtatagaaaacagagagatagtatatattttaacaacttgaaattcataggtgttaatagattcctctttttgaaattaaatatctcctaggattttgatcacttacagtgtt

SEQ ID NO: 268910 - DNA, 435 bp, Homo sapiens
gtacggctctccaggtgacattgacctctggcccgcccttatggttgaagacctgattcctggtacaagagtgggaccaacacttatgtgcctgtttgttacccagtttcagcggctaagagatggagataggttctggtatgaaaaccctggagtatttaccccggcacaactcactcagctgaagcaggcgtccctgagccgggtgctttgtgacaatggtgacagcattcagcaagtgcaggctgatgtctttgtaaaggcagaatacccacaggattacctgaactgcagcgagatcccgaaggtggacctgcgagtgtggcaagactgctgtgcagagactgtaggagtagaggacagttcagagcagtgacgcaagagtctcaaaagaaacgctcagctcaatacagctatcctgttgataaggatatg

SEQ ID NO: 268911 - DNA, 707 bp, Homo sapiens
tcatgcctgtaaccccagcactttgggaggccaaagcaggtggatcacctgagctcaggagttcgagaccaacctaggcaacatggcaaaaccccacccccaccaaaaatacaaaaaattagccaggtgtggtggcatgcgcctgtggtcccagctacttgggaggttaagatgggagtatcgcttcagcctgggaagtggaggttgcagtgagctgagatcttcccactgcacttcagtgtgggtgacaaagtgacactccgtctcaaaataaacaaaaaattaatagaaatactcgatttgaataggagaaagggacagagttcatattgtttctgaaattaatgagcctgactggtgttctcagctgggcagaagggcataaagatttttataaaggtgggcctaaagaataactataggcgggcgcggtggctcacgcctgtaatcccagcactttggggggcccaggcaggcggatcacaaggtcaggagatcgagaccatcctggctaacacagtgaaaccctgtctctactaaaactacaaaaattagccgggcatggtggcaggtgcctgtagtcccagctactcaggaggctgaggcaggagaatggcgtgaacccgggaggtggagcgtgcagtgagccaagaccacaccactgcactccagcctgggtgacagagtgagactcaatctcgaaaaaa

SEQ ID NO: 268912 - DNA, 440 bp, Homo sapiens
aatagtagtgtatgtgttaaatgtttgtgtatcacttagttttaaaatttgttttatttggacaatgtctttgattcagttggggaaaaagaaatgactggttgatcagaaaaaaatttctgttcaaagtattttattattgcctatttttaaataattatactgaactaaatctgttacatcctttataaattgcaatgtccagagaggctgggcgcgacacctcacgcctgtagtcccagcactttgggtggccaaggcaggtggatcacctaagttcaggagtttgagaccagccttgccaacatgatgaaaccccatctctactaaaaatacaaaaaaattagccgggtgtggtgttgggtgcctgtaatcccagctacttgggaggctgagtcaggagaatcacttgaacccaggaggcagaggttgcagtgagc

SEQ ID NO: 268913 - DNA, 445 bp, Homo sapiens
gaactacattttatatattctgttacttgtaatcaaataattatatgacattcttaatgtctgtacctacaaacattgaattcatgcatatttataaggtagcttattgactataattcattgttgacctttctgatgattctgtagttagatttttaaaatatgattgaatgtggaatatctaggcatagactaacatgggtttgaatcttagctgtgacatttatgagctgtgggctcaacactttaaaagtaattaactgcatttttcatcttttaaatcattctctgagaaaaagtcaactccttaattagtccttgtttgaattatgatcaaatagtattggtttgtacagaatgatgctaacttaggatccaggctatagatggctgcaaccggaatagagccatttagtcatcatatgtacaatagagtaagaaatgc

SEQ ID NO: 268914 - DNA, 382 bp, Homo sapiens
ctgctaatgatggtggtttctttatctagagaaactttaagattatagaaggataagagattacttggagcagcatgcctgagttaactcttagttaatgagatttttaaatataataattccttccctccaggcttatattaaaagaaaaatcactgtataaaaagttattttgtgtatttgtgtggttatcttacattacatttataaaatacttagtatttgaaacattgtttaattttatgtccatttcctctcacttttcaaacatgacgtatgtagagattcttagtaaatgctttttgaaaatgatgacttattattattattatcattatttttgagacagagtctcactctgtccctcaggctggagtacagt

SEQ ID NO: 268915 - DNA, 378 bp, Homo sapiens
atgctataaataaaggtagaaacaggtataatgtcaatacatagggcaaattctgacttattcttctggagtaaaatgttgcctccagaagaagatttttgacattcaccttcaaagtgaagcaggatatggcagaggaaaaggtacctagcatgaagattttagaagtcatggtttattaaaaggctactggtagtacagaaaaatattggactttcagacaattttatgatgaagatgagaaaaaatggacagtaagagtcatactactttagctttatttgtcctcttaaagaaagtttactctttatcctacgatgtgatagctagctactgaaggctttcctgcaaggagctaatgatgtcaagtttactctt

SEQ ID NO: 268916 - DNA, 718 bp, Homo sapiens
acagcagaagcctcccctgcacctgcaaatagaccagtgcaggcattgaacatctggggcaagactagcgtctcccagcagccccaggctttaaatctgattctcctccttcaattactgcttatcttcagaaaagccatgcacctcacgaacgtcacctgtcagtggccaccctaccttcatcttgctggtgggtgaggatgagagagttcagaacgtatgacctgaaactggtcccgaggaaacatcagatggaccacgttgagcatcacactgcagaatgtagggctgcattcttccaaactgttgggacgatgaaagtcagggaaagactgaggaaatgctccaaactggggcagactgcaaagatgtgacaattaaatgcaatgtgtaactcggggtttctgcactttagctctttcaagatttttgactggataattcttggggtctgtcttgcacactgcacggtgtctggcatcatctctggtgtctaagccctagatgtcaataccaattcccacttgtgtgatcaaatgtctccagacattaccaaatgtaccatgggtggggtcagaggggagtgcaaagtcagctccagatgagaaccattggtgtaactggatggaatcctgggccagatatgaaaaagagacatcactaggacagctggacagatctgaggttaatgaagatttctcactgttgcagaaggtat

SEQ ID NO: 268917 - DNA, 646 bp, Homo sapiens
tgctgggattacaggcatgagccaccacacctggccccataccatggtttgtagccactatgccatcttacattcccaccttagaatatttgcataatgatataccaaacgaagcatagtattttaaaataattgcttgtattagtctgcttgggctgccattaaaaaatgccacaggctttgtggcctgacagaaattattttctcatagttctgaatgctagaagtctaagatcaaggtccctgctagtttggtttctggtaagggctctttgtagtttacggacagccactttgccctgccatggcctttctggtatctcttcatatggcactgagcctgtcagaacaaggccccactccaatgacctcacttaggttaattacccctttacttcaaaaacagccacattgggggttagggcttcaacatatgaatttggggaagacacagacattcagtctataataatgttcacttttttccctctagactgtaaccctcttgagcacaggattatgtttttattcatctttgtttccttagcacaatatatggaatatagatgctacctacatcagtgtctgttgaaccaaactaataacttagaaaagttaatgaaatacattacttttcttggaaaaa

SEQ ID NO: 268918 - DNA, 464 bp, Homo sapiens
ttttagaaaagtgtattctacatatatgttggacatgaagacagtgtctaacaaacatatacattcaaatgttaaccggtatttttggtatgggattatgggtaccttttcaatattgagctttttttttttcccattgaaaaactgatttgcattattttaataaattagaatacaaatacaaacaaatgataaaaagtactttaagcattctgagaaatgcttcccaaagtacattctacatctgtactattcagtatggtagccactagccatgtgtgggtattgagcacttgaaatatggccagtccagattgagatgttctgttaagtataaaatgcacactagactttgcagacttggaatgaaaaaatgtaaaatatctcagtatttttaatactgatcacatgttgaagtaatattctacaaatgctctattaaataaaatatattattactctta

SEQ ID NO: 268919 - DNA, 463 bp, Homo sapiens
gaggaggcctgcaaagtccttgggcatgtgcagttatctcttcatgggtcccatgtgcaaattcaggaagagttagtataaaccatgtggtggaaatttaggctgtgacattagcaagcttgttctgtacaaactttagttggacatcctggttccaactgatttcaaccagttctttcgtcgcctaagcaaggaagtttctgtgtttcagcaagtggtttctttttctatctgccattctacaaactcaaaaatttctgttagtcattggtctgtttaactcttcggggtattgtttcaattgacaaataaagcatgaggcaaacatcaagcaagcaaagtttaaagaagaaaaaggctggagtaaaggaagatcccaaagaaataactggggcaaagctgaagaaaaagagtttaaaggaatttctgatgaggaggctaaagaaaatatcaatactaaagg

SEQ ID NO: 268920 - DNA, 368 bp, Homo sapiens
aaggcactcaaacctggaaagggttttctgatgcaaaatatctgcaactgactgtcccctctgtaaggctggaggttcagtgggggggtctcctgggaagaatattcaaaacggaggcaaatatgtaaacactcagagaagaagacgcttaccattttgtcagaaaggaataaattgttactattactgaaggggaagggagtgggcaaagccaagaggaactagggccagggaatagctaaccaaacttggaaatgcacatggattcacattcccagtgcccaggcaaaactgtgcaggctttgctctagagcttcatttccccaaaactgtctgtggaaacttcttttttacttaaaaaaaaaaaa

SEQ ID NO: 268921 - DNA, 432 bp, Homo sapiens
ggcaaggacacaggtcacggggcaacctctgccctcatgtgtgcctctcatctctcgctcatgccttcagcacagaactgagcatttgctgtccatcaggccctggggtggctctctggctacagagagaaaggaagattcctgccccggaggggctcccactctatgggctgatgctggagggagagagatgacagtagctggtgagtgggagaagtctttagactctcaggccccacgtgccatcactgacaggctgctcatgacagccaacatcagaaagccaaatgtcctgggagtaggaatctctgtcttcccggggaaggctccatccatgcagtatctgtcacgtgcaaagagacagcttccaagacacagcgtgtgcacgtggtattgaacattaaagagaacgtaggctgccgagtgtgctgt

SEQ ID NO: 268922 - DNA, 591 bp, Homo sapiens
gtgaggccaagaaccccaggtcagagaacacgaggcttgccaccatcttggaagtggcctgccaccatcttgggagctcgggagcaaggaccccctcgtaacagtgaaattctgaagataaatgacatacaagtgccaaatttacagttccaaaatgaagagttctgcattcaaaaaaaggatgagaaaggatgttatttgagctagaccttcaagcacaagaggaattccgataagtacgaggcactggaaaattattatagtcaaggataatggcaaaagcagagaataaaggcaggaaggggcatgtagtgatcagaagccaaaacaaaaatcagtgggcagatacattctttagaacaactcattattatcgtcattatatacacaagaaaacagagttcatcagataggttcagcagattgttcaaggtcacatagcaaaagatggagactcttggattttatcccagccagaccaactctaaccaccatcctgtgcagcctgagaccaattgttaaagttacatgtattggtatgaccatttccacctgacagcaaatgcaagggaaccataaataccacacaaa

SEQ ID NO: 268923 - DNA, 405 bp, Homo sapiens
ggctcacccagatagtgtaactggtccgaggtcttctaatgattgggtgtcaattgcattaaatcctaattttccaatactcagctagagttactcctgctgcttctcaagtaccagggcctttatgggttttaagagctacaatttgtgctgaaaaaactgtcaggcaagatactcttatcccttttattagttagttgattatgttaggtgacagtggcaagtgggaccttacaattgagatatattttgttctttcacttttattgtttcctgattttatgtgtttggaaatatgtttacagatttgttacaatgattggaaaatgtatatttttgccacagtgactttataaatcttaacttatacaataaactaaagttatcaagcatttaaatagtgtt

SEQ ID NO: 268924 - DNA, 237 bp, Homo sapiens
agccaggctgggtctgaggccatgaatggccaccttggagctatgaagtttgtccacacagcctcctctctcaggagtcagggcacaggttcctgcagtgtgggtttagaagttggcaggccaggcacagtggctcacacctgtaatcccagcactttgggaggctggggcgggagggtcgcttgaactcaggagttctaaatcaacctgggcaacatggcaagaccccatctatac

SEQ ID NO: 268925 - DNA, 309 bp, Homo sapiens
gcaaagctcttctagaagaaacagagctctcacgccaccacttccagttggtttctgccacgtaaccaaagctgaaacacaagccactggattttaacctcttccgttcccaggcctgagccctggcgagaaaacagcgcagacggcggtttggccatcctgaacggttccttattgttcacgttctatggatttcctgtttatttcatcttttatttgatatctgctttggccacgcgagttacaagggaaacttctgctgagtctttttactgtatcacagttattatatttttatatttttttatt

SEQ ID NO: 268926 - DNA, 511 bp, Homo sapiens
gaggaagctgctgctgatcaccagcttcaggtgttttctatctatggggagactgccttttcttggcaccagctgtgaccagttattatcttagagagacagtgtagcaactgcctgacaatcacctgatggtcactggacattgctggtcggagggacccctctccagccctgcttgtatctgcctgactacttgctctaacgtccctacactggctgcccaggatgtcagacgttctggctctccacctgggagcccaactcatgtttttgttttcttccatccgtgaagcaagtttgacaagcactacagcccatcagctcctgctggtgactcctgacggccatgagcaccaggaccctgagaagccgtgtttgaaaggtacctggttttctttgcttagccgtacttgacttttctttgagaagcacctgtttaacattcctggcgattaggctccacatcaagttcttccttatattgaaataaaagctgttgtctcgtaaaaaa

SEQ ID NO: 268927 - DNA, 325 bp, Homo sapiens
aaacttaaaaacgagagtgtaaatcaatgacatttaaaacaggaaaataatagagaaaatcaatgagaccaaaagcttgttctctgagcagatcaataaaattgatatacttctagccaggataaccaaaagagagaagacacaaattactaataatagaaatgaaagaaactctaagctcacaaatttgataactgaaatgaactagatcaattccttgaaagacaaactaccaaaactcacacaagcagaaatagaaaacctgaaaagccctttatctgttagagatattgaaccaataattaacaactttccaaaaaaagaa

SEQ ID NO: 268928 - DNA, 453 bp, Homo sapiens
gaagagtccaggagcttgttaaaagtgcagatagactgattccaccccagaatggacaccgagaaatcttggatcccaagagtttggttggctttatcatgccccttagtcatttctgagtggttcctcatactctgcatccatgtgatgagaggcaaatttcctcatgatctgctttgcttcctcatcaagctactatgccccaccattgctggctctgcttatggttgctgcaatgtaggcagcgctgtttcttgttcttaccacttttaactatcttaaaatagaacctgactctgattctccattaagaagtggaaactggctgggtgtcgtggctcatgtctgtaatcccggcactttggcctcctatctgaggctaaagcagggggatcactagaggccaggagtttgagactagcctgggcaacatagtgagaccctgtctctatc

SEQ ID NO: 268929 - DNA, 344 bp, Homo sapiens
atcgctgatggagcccaggttcccccagcagtgcctggccctggtggggcaggataaatgtttgtgaaactaaatgggaacccaggtctcagcactgtgtcaggttctagaatcttctttgatgtctccatcctgcttgtttctcactcagcccttcgtctggcctgacatccacaagaatcccctacctcaatccctcctatttccagtgcccccatcccaccaggcctcgttgccctgggtcttgctctctgcagaccacaactgggcaggccctctttcacaccagctcctcaccaccctccaggtgaagccttcgttaaaaccgcattttctgtagaggc

SEQ ID NO: 268930 - DNA, 412 bp, Homo sapiens
ccaatgagagaatttagtaaaatagcaggttataatatcaacattcaaaaattaatagcctttatctacacacaaaaaagatagaagatatgagaaggcttattttaaaaggcaagaaataatacatgataaagttataagactacaagaacatacgacataaactataagaactgttcaaaaacctatataaggaaaattatgaaacactcctgaaaacacaaaagtagaggctggaacacatggaaagacagtgtttttggatacgagacttcaacatcataaagatattaatcctccctaagttaatgttaaccccaatgaaaacaccgtcagtctttttctgcatctagataaactgattatcaagttcatttggaagaacaagcaagaataaccaggaaatctctgg

SEQ ID NO: 268931 - DNA, 433 bp, Homo sapiens
tgtgagatgcggcattcctctgagcccagtgacctctgagcacctctctgttataacaatgatcacaaggctctgtccctgcctgagctgcttaggtaaggctcatctcagactagtacagaagccgtttagaagctaaacagatttacgagctgtaccaccagactcctctcctactgctaattagctgtgtgacccctgggcaaatgacttaccctctctcggtctcagcttccttatctataagatgggaatcataacaatatctatctcatagtaatgttgtgagggttaaatgaggaaatacacatggaatgtttagaatggtgcctggcacacagcacattgtaagtataggtaattattattatttgcttttgcctcacagtaatctagcatggtggatacaaaatattaataaaatgaattatac

SEQ ID NO: 268932 - DNA, 534 bp, Homo sapiens
tctctgcgttctgttctctatctctctctcttccccccaccgtgtgtgtgtgtgtctgtgtgtgtccgtgtgtgtgttgctgagtctccctttaagtcaggtagaagaggaaaactaccatattaccattaataagtccattataaattatgagctaatattatttaaaacatagatgaaaataaaaaattcaaaacttttgaaatgggaaacaatcatgaaatttctgtccaggctattttctatgacattataaaactaaatagcccctcctgaatttaacattactattttgtcttaggctttttaaaaaatacagatatgtaggcaaataattcttctactcaaacatatccctactttataaggtggctttcgtgccacttactgagtaattttatattcgtgaagtgctttgagctacgcaggaaatctgtgaaaaatgaataaagaaccagctatgtcttcaatttactccaagatggaatgaaacttttcatcctgattagggaataaatattaaatatagataat

SEQ ID NO: 268933 - DNA, 442 bp, Homo sapiens
tgagacaggatcttattctgttccctaggatggagtgcagtggtgcgatctcggcttactgaaacctccacctcctgggctcaggtggtcctcctatcccagcctccgaaggagctgggactacaggcacgtgccaccacacccggctaatttttgtattttgtgtagagatgagtgtcgccatgttgtccatgctggtctccaactcttgggctcaagcattctgcttgccttagcctcccaaagtgcgggattataggcgcgagccactgcgccctgccgtaatattcttacagttttcactttgcaaacatttattccttgattggttaaatccagtggtggttataccaccactatgaccactgtcactttctgactcacccaaaattaggtacgtaattgtctttcttgttaatcttttaaaaatgtgtgtggctca

SEQ ID NO: 268934 - DNA, 563 bp, Homo sapiens
tctagggtccctcttcggtttaatctccctttttcatggactcctcttccttcgtttactttcatcaacatgtttttttcctgccttttggatttggtaaggccgaagcttaaaacttggcagtctagaacagtgttgtctgatagaactgtctgtaattctgtgtgcttttcagtatggtagccactggccacactgagtggctaaaatgtggctactgtgactaaggcagttaatttaaattttattttattaattaaaatttaaatcatcacatgtggctagtgtggctagtggtactatattgatcatgtccacaatcacagatctgcgtatgtgcccatatgcgcttgtgtgcatgtgtgtagttttcccctcccaagggattaatagtttaaaggtgatatatttgactttggtgagatttttatctgatgataaacaccataaaatagatttaaaatgttaaagatagctgggcgtggtgggtcacacctgtaatcccagcactttgggaggctgaggcaggaggatcacttgagaccaggtgtttgaaaccagcc

SEQ ID NO: 268935 - DNA, 328 bp, Homo sapiens
tatctccttcaattcatcttccactcctcactggaatctcttaaatgaactatttgatcatcagtaaattgcacttttcttatgaaaaagctgtggccttcacagtggaatatgcagcttctgtccttgacaccggagcagaatctgtcattcttggcaccttcttccagcctctcgccttgacctcaaagttggatgatgtttctgtgagcacattgccttccaaaataggcttgacttagaccctcctacctgtgtgagggtatgaccttcagctcctctcccgacattgtggcatggcaataaaaagaaagaatccagcctggtg

SEQ ID NO: 268936 - DNA, 427 bp, Homo sapiens
gtttcatcctcaaattacagagatcttgtttttcatttttttaaactcttattattctcaatcacaatcataatacatgatgcaatgtaaaccttaaattatttatttaatcttactacactaatcagctaacaagatctctgtcttcttagatcttggagcctggaaaaacccagttattaatccccactatcccttcccaaaattctctggttagctgacatgttaataagattccaagaatgttctaaagaaagcaaaatcaccacaaaaaaggactgtgttctgaaagtaaaaactgtgcttttttttccttctctcataatttatttttaattaaaataaattctgtccttgaatgtgtatacataattatttggtcaggctgtgttcccttataatcaaatataaatactgaaagccgtac

SEQ ID NO: 268937 - DNA, 367 bp, Homo sapiens
tggaattattagagaggaaagtttaaacaactatgattactatattaagggctgtaatggataaagtagacagcctgaaaggataggcaatgtaaacagagagatagaaatcctaagtaagaactaaaatactagagagagagagagagagagatactgtaatagaaataaagaatatctttgatgagtctattaatagactgagcacagctgataaaagaatctctgagaatgattatatactcatagaaaccccccaaactgaaaagcaaagagagtaaagacttaaaaaacaagcaaacaacaacatatccatgaacaatggaacaactatcaaaaggtataacttacatatactgggaatatc

SEQ ID NO: 268938 - DNA, 490 bp, Homo sapiens
ttgtttttttttttgagatgtcttgctctagcctgggcaataaagcgagactgtctcaaaaaaaaaaatcataaaatagtaaaaggcatcaaatttttgaggggaaatacctattggtgaactgaaaactcgacaacagttctggtgtgtgggataacatgttaatagccttgatcattttgaatttcataatcataaatgggattttgtttttgagatggggtttcgctcttgttgcagtgagcagagattgcgccattactccagcctgggcggcgagagcaaaactccgtcaaaaaaacaaaaacaaaaaaaacaaaccatgctttcaaatctgcctaacaattatagcttcagagtccttgtattcaggattatctatttgtaacttactactttttacaaatatttttcttacactaaattagaaagaatgtttggtctcgcaggtgtctgagaatctttagtaaaatacccctacagattctat

SEQ ID NO: 268939 - DNA, 254 bp, Homo sapiens
tctctttttgcacagatgaaactatggctcaaaagggaataagagatcaaggcaagcatggacatcttgtacgtggaagtgcagaccagaacttgtatcacagccagtcatatctggtgctttccatgctacttttacatacatgtatccttaaatttgatcctcttctagtttagtctaaactctttactttgtaacttccaaacctaaaaggtgcagcagacattgacaatcttaattcatttgtcaggtca

SEQ ID NO: 268940 - DNA, 470 bp, Homo sapiens
ggtttctttttactagtcaggttccacaggaaaatgtgagaacttatacttagggaagaaagacattactcaggtccctgcaaggctggaaaatgggaatgattctccactttcccctccagatttaagcactacaaagactgtcaacatctcttggcattttgtacagtacagagagatagacaccctacattgtgtaatgtttatatttaatatcagtgctgctttccgtctccattgagttcccacattcagctcactcacagcgctccaaaggcctaggataagtgacctgtgtgaagacatggggaggcggttctggagcaccttcaggtactcctcaggaactgatgttttttcacttgttgtttgcctaaggccaagttctctttacccgaaggcatcattcagccccccttgctaggtaataaagcacaatattttgtagcgctggtcacagttggttcaca

SEQ ID NO: 268941 - DNA, 578 bp, Homo sapiens
aaaaagaatcttgggttggaaaggcagctgaccaagtgattctggtgtcttctgagtttccccttgccccttggggtatctcgttctgccacccctttagttggctcccatgtgtgcaccaccggctcagcagaggcagtaacttctttacttggtttccctcagtatgagtaaaaaagttggtgagttaaaaatacttttagggttttaaaaaatttttacagcctggcccatagggtgaaaccctgtctctacttaaaatacaaaaattagccaggcatggtggtgggcgcctgtaatcccagccactcgggaggctgaggcaggagaattgcttgggcctgggaagcggaggttgcagtgagccaagatcatgccaccacactccagcctgggcaatagagcgagaccctgtctcaagaggacatccaatggccgaatcacggctcactcgacattcaccctctgggtcatagccaatcctctcggctaaggcctctctattaccaggcactatatccccaatgcagtcagcctagcccctttgcgccattgctcttcgatcccaggcctccccc

SEQ ID NO: 268942 - DNA, 521 bp, Homo sapiens
aaaaagaatcttgggttggaaaggcagctgaccaagtgattctggtgtcttctgagtttccccttgccccttggggtatctcgttctgccacccctttagttggctcccatgtgtgcaccaccggctcagcagaggcagtaacttctttacttggtttccctcagtatgagtaaaaaagttggtgagttaaaaatacttttagggttttaaaaaatttttacagcctggcccatagggtgaaaccctgtctctacttaagctgaggcaggagaattgcttgggcctgggaagcggaggttgcagtgagccaagatcatgccaccacactccagcctgggcaatagagcgagaccctgtctcaagaggacatccaatggccgaatcacggctcactcgacattcaccctctgggtcatagccaatcctctcggctaaggcctctctattaccaggcactatatccccaatgcagtcagcctagcccctttgcgccattgctcttcgatcccaggcctccccc

SEQ ID NO: 268943 - DNA, 303 bp, Homo sapiens
tgagatggagtcttgctctgtcaccaggctggagtacagtggcacaatctcggctcactgcaacctccacctcccaggttcaagagattctcctgcctcagcctcctgagtagctgggagtacaggtgcgtgccaccacacccagctaatttttgtaattttaggagacggggtttcaccgtgttggccaggatggtcttgatctcttgacctcgtgatctgcccacctcggcctcccaaagtgctaccgcatccggcctctctctgctatataattctacggcaggcaaccagaagggcctt

SEQ ID NO: 268944 - DNA, 1117 bp, Homo sapiens
aacatagtcctgaaagtcgtagccacagcaatttaacaagataaagcaataaaatgtattcaaatagaaaaagaggaagtcaaattatcttcactggtgatataattctctacctgggaaacttcaccgaaaaagatttcaccaaaagatttctaagcctaaataatgacttcagcaaagtctcaccatacaaaatcaacatacacaaatgagtagcatttctgtgcaccaataatattcaagctgagaaaaaaagaacatggttctatttacaatagctacaaacaaaaaaatatgtacctagtaatacattaaatcaaggaggtaaaatatctctacaacaagaactacaaaactgctgaaaaaaaatagagacaacgcaaataagtaaaaaggcactccatgctcatgaatttaaagaatcgatataattaaaatgtccgtgctgcctaaagcaacttacagattaagtgctatttctctcaaactataaatgcaactttttatggaattagaaaaagaaaaccattctaaaagtcatatggaagaataaaacagcccatttagccaaagcaacattaacaacaaagcaatcctggaggcctcacattacctggcttgtactacaaagctacagtaatccatattacatggcttgctacaaaaatacacatgtagaccaatagaaagaagagaaagccctgaaataagtttacatttctacacccaacttttttctgacaaagtcaacagaagtaaacaaggaaaaattgtctatccaacaaatggtactgggaaaactggttaatcatatgtagaaggagaaaattgaaactgtacctctcaccatataaaaaatgtaattcaaaatagattaaaaacttaactgtgaaacttaaagctataaaaatcgtagaacatcaaaaaagtactcttctagtcactggcctctggaaaggatttatgactaacaccataaaagtgaatgcaacaaaaataaaagtgaaaaattaacacctaattaaactaaaaaacttctgcacaccaaaagaaaccattgacaaatatgcagacaacctagagtatggaataaactattttcaaacttcatacaaga

SEQ ID NO: 268945 - DNA, 453 bp, Homo sapiens
agttttccgtttcattttcagttttattgttattttattgactgatacttttgtaacacacaataaagatgaatcatatagcttcatccactggaggtatcctttataaaaagtggttcttctatgcctcttaaacccaggtgttctcgttatcctgtagcatcatcaacaaggtaggaaagaagggtcatgcacgtggatcttgcagccacatagatatcttatcgtggaccaataacagtttgtggaccactgtagtccaaggactgcactgcagcactgtcaagctttcttgactatgagtcaataacttctttttattgtttaaagtaattttcagttacaagaggcagattccaattgaagcactctatcacagccatatccatctaggctgcagtcatcggatgacatgttgctctctctttctatctctctctttcccacaggaga

SEQ ID NO: 268946 - DNA, 557 bp, Homo sapiens
tttttttgcttttgaactacacttactctccatggcagcttaaaaagagaagccccatgaaagttttaaactctatccaaacccaggacaatccagcctctgtttagatgtgcctccacccatctcagattttgatataatttgtcactctgccatgtccttgttcaaatactacagtatgtactctctcagcttttatgccagaaaccacgagtctcctaactttaggaatatgttgggtaaatattcttacccaatgaactgcttttgaacacttaatggtttgcatctaatattatatatcactaatttttatcctcttcacttcaaaaaacataaaattcaccctttgaacacatcacatgtccctgaatatgtaagccctgtaaccaaatcttcagctgccattctcatgggagttttttatctaatgagattatactgaactcaaatctaaaatagatttgcatttagaattaaagtgataattctttctcctttataaaatttgcgccaaaataggttcatagttagaatacctccacaaggctcttgat

SEQ ID NO: 268947 - DNA, 670 bp, Homo sapiens
aaggagggcagtttaactgaaaattcagaggtattatagctctgaagaaaaatactgatgagcagttatacaaaatgagaaattgagttctaagaaatgcatccctaacttcaacataaagatagctatgagaaaacattctttgtacccaaccataaatgaataaaaatcacctcatttctcatcagatgtttactgggttgctagttatatatagaatcctgcaagaggctcaacagggaagtccaaagagtcaatcaagaaggtatgataatggctaaagatggggactgtaggtcaatgctccacgaggttcttcttttgttgcaccaatatagctgcactgttatacccatatggttacaatccaggcctcagaaaatgttgcagatgccctcaccagaaggctgagaaccagttcctcagtttgcatgcctccagacagcactagaagtcaaactcaaattgcttacatggtaacttggtttatcccaacaccaactaggatattccctcaatcacatgattgtactgaaaatataaccaagttttatttatgtttttcatttggtattagccatctggtatttaacctctgaaaaccacacaatcttctatacgcttttttcactggaataaatgaaactgcttacttttgacttaagtctat

SEQ ID NO: 268948 - DNA, 640 bp, Homo sapiens
tataggctcctgcctttaaggtactgtttcccttctgggacaaaaaacaagggcttttacagggggacttggcataaatggcatgcagaagagggtgcaagcaggtgcacggtctatgtgacttcttgggtgccttatctacccgatggtcaagctgacgccattgtgggcagagctagattgtaaaatggccattgtttcaagacacttggacagagttccctcatgggcctaactgaggttgtaaattgactgttgtctcttaaggccttctcctggtgggagagagtcccagctctcaagcattgaagtgagcacatacataagcttgccatgcagggagtgtctggtaaaagggaaggtaaaagttatgattccatttctaaagagctaagcaggaagtagagaacagggaaaaaggctgaaagagaaaagaaaaaaattgttttttaagtaactcattctctttctcttagaaaaatggagtactcagttatagtaggaaaagactcaaattataatccaaattaaggtatttttaaaaaatgttctttcttccatttttactagtgaacagataagcactcttgcaaaaaaaaaaggaaatgtcagaaagaaaatatggagttggtttagtcac

SEQ ID NO: 268949 - DNA, 242 bp, Homo sapiens
ctaggatttgagtaattttctgtaatattatatctcatcgagtaattgttgatcagttaaaacttgaaaagtagctttccttttggcctatgtgtcttcttttattcactgaaaaaacccttgcattcctatgtatattcaagtcattaaattattaaagaatcagcttctgcaatgaaaaataattattattgttttatttatatgttgaaataaagtaaaaaaaaattatatggataata

SEQ ID NO: 268950 - DNA, 254 bp, Homo sapiens
tctcagcctcagtcacctgcattggcgacatccagtcatgaatatacagcaggaccccaacatcttagtagttttaagcctgaataacttcagaagtacaagtcctataaacttacaaaaacaccattttaaagtttaattatttaatgttgtgtgcatggttttgtgattttcgaataataaatgtttcactttaagttttggtctccatcctcccaaagatggaaaatgctgactcaaaccaaaaatgaaaa

SEQ ID NO: 268951 - DNA, 509 bp, Homo sapiens
gatttgcgtctatttctgtcctccctccagactctagcctcatggttctcagacatgggtatgcatcagtctgggcttcctgggtctgaagacttcccaggtgattctagtgtgtagccaaggctgagagctactaatcttgttaagtctttcaatgaaacatgagaacactgagagtgtgaaaggtgacacactctgcccaagtccctgagctcgttaggttctgagtctgcactcattcccagggctgattttcaagacagtcccacgggttctccatactcagccttgcaggtgcagggggtagaatcttatatagaacctgcatcttttctactcttaatttgaactgtaatccttgaattagagtgtagtcagtgctgctataatgcttgttttggaatgtaaatttgtttctaacgtgattgatgtattagggaacaatattaatgtgttagggaagactattgatatgctggagaataatattaacatattcaagaatgtga

SEQ ID NO: 268952 - DNA, 403 bp, Homo sapiens
tcaaccccttctacaatagctgcacaaaaaataaaatacttaggaatatacctaaccaaggaagtgaaagacctctacaagaaaaactacaaaatgctgctgaaagcaatagatgacacaaataaaaacacatcccatgctcatagatgggtagaatcaatactctaaaaatgaccatactgccaaaagcaatctacaaattcaatacaattcccatcagagtactgacattattcttcaaataactatgaaaaaacaatcctaaaattcatatggaaccaaaaaaaaagcttgcatagccaaagcaagactaagcaaaagaaacaaatcaaaaggcttcgtattacccaacttcaaacaacacaataaggccacactcaccaaaacagcatggtaccggtat

SEQ ID NO: 268953 - DNA, 306 bp, Homo sapiens
gatcaatatcacattaggagttagttaggcccagtagtaaattgctaattaaaagaagaattctttttaattaggcaataggagaataaaagacacagggtaatagaattatgctttcttggttactctgtgctgaggtgatatgatggtttatatggctagctgagaaaacttattgttgaatgagcacctactttgtgataggcagtttcctcatccagaaagtagcaatagtacaatttaatttgaataatttgaagtctgtagtgttttttaaattttctacgtttctttttactttttttt

SEQ ID NO: 268954 - DNA, 432 bp, Homo sapiens
gtatttattttactattcttttagcttttctgaaggtttgaaaaaaattaaaataaaaaataggtgaacaaaaagagtgagggctgtggaattcagactgcctggtgttggaattctgacactgctaatcataggctctatgatctggggcaagatccttagctgttattagtttccattccttcatctgtaaaatgagtataataacagttcctctcttgtagggcagccatgaagattaaatagtattatatgaattaactattattaattacaagcttggaactttaattcttaatacaaattacttaggtgacacatcacaacggactgatcctggtgggttatgtcattgttgggtacaatgccttctccatagagctcagggaacagaaccagcatgctccttcggaattgccaggctgatttaaa

SEQ ID NO: 268955 - DNA, 505 bp, Homo sapiens
aacattcgagaacaaagttttgtcatgttactcttattccagtttcctgccatctgattcacatgcagatgttctattccagagtagtccaaatactatgctctgctgactcaagtcatgtctcaaacctatttcctctattaagtaagtcagtcaatccatagtgaaatggactcttcctaccgcctgtagcatttactgttgatactgagtattttccattttaatagttcccagcctttataacactaagttttaagaaatgttgattaggcatctgctaaggttacatgctaagcagctacttatattgtatttggtatttaattttgtttattctccagttgaacagtagggaacaattcaagctacttgaattgtttttcaccctcaccatccaagaccgtgttaagtacatagaagatgcatggtgaaattcgtttctgctgaggtttctattttaaatggcaaattctcataataaaatggagcattgatgcctaac

SEQ ID NO: 268956 - DNA, 503 bp, Homo sapiens
cctcttttttttctggccatatataccaggaagtgcagtttttgccagatgcagttatagtgttgtaaaaatgctgaaaaatattgccaaaaatttgttaggttgttatattggccaagtatagtaaactaaaagaaagtaggtgaagtgatcattaaagctaagactttattaatggaaaagatattaaaattagatgaaaataattgaaaagagaagactgtattttggtcctacatattgatgagcaaaaatgtgaagagctagagagagcattctttttttcaaatttttagaaaggaaataatatctgaataattttaaacaaatacagtctctttacatgagtgtattaagaaattaaggttgtttagataaggagtagcttaattagtttataaaaatatatgaagtgtattctacaaagaatatggactaattcctctccattttagagtactgaggaaaaagacttagttttaaataagtatacaggaattaat

SEQ ID NO: 268957 - DNA, 209 bp, Homo sapiens
accattgtgaatgtgcctatgtatccttcagcacattttctgtgtatattttgcacccctgttgcttacataaaatgtacatgggaagaattattattcagaaaatattaaaaagtcctttaaatcacctaaggaaacaaaatgacagaacatcagaaaaatgggccaaaggtatggaccagggatttggagaagagttaaactgaatc

SEQ ID NO: 268958 - DNA, 268 bp, Homo sapiens
gtcagttattccttagaggcctaagtgtctccagtgaaaggggccattgtctcagcctatggtagtgtgactgtttgaagtttgatagcctgaaggtgaggagaatcaaactgtgttactaaaaagcacgtattaaaatgaaccaagggaaatgtggaagagacagctcaaaaaaaatccagggttttcaccagtttgcataggtagagggaggccaaaagcccaacaggaaaaaataaaagaaagaaagaaaaagaaaagaaagaaa

SEQ ID NO: 268959 - DNA, 488 bp, Homo sapiens
gtcggcacctagagccgcacggaggttcggaccccgcccgccgagggcgcccacacctggagctgggtttcggcctctgcgaaagtgaaatgcccaagcctccggccaaagcccagaccagtacagtatgaattgtcctatgagactgaggggttcggcttcattcctacctgcccgcaaagctcgcccccagcctcgaaaacaaagcgactggtctgacgtggggtccctgcgcccctcctctagcgcgacaggacccccccagggaagagccagtacccgtgggatgtcaccccgtccccatctaccggggtggggggcctgaaaggagaacgatttaaaataatcttcagaaagaaaagggaggagggagcgggtgacacatcgttcacataaacccaatttctggtttcgagtgaagtcaagatctccgcccctgcgcctgcacacacacctcctgcctaacattctcagctgcaaatgccaaa

SEQ ID NO: 268960 - DNA, 434 bp, Homo sapiens
gtgcctagtaacatcctggcacacagtaccatatgcatgggtcttaggtatcttggtgcctagtaacatcctggcacacagtaccatatgcatgggtcttaggtatctttagtgcctagtaacatcctggcacaccgtaccatatgccaggtgaacatgtgttggttgaatgttctaaatgcatttttaacatttggaagaacatcttctttatatgtccccatcttacactttggtttatttcaagagtctatttgtacttcaagtcagagtttttcttagaaatgatgttatacctaatgaagagcgtaatagaatacactataaaagacttccctcggccgtgcgcggtgactctcatgcctgtaatcccagcactttgggaagcctaggctggcagataacctgaggtcaggagttcgagaccagcctgg

SEQ ID NO: 268961 - DNA, 205 bp, Homo sapiens
gctgtaggccttgggaatggacgagaatagaatagaggaatagcgtgtttgtgttttgcccgcaccatggtgatgtgtgttgtttaactaaacaaccaaaccaaagaaaggtgttgccctacaaacaacctctctcccaggctccctgtgtgaccttctggcccttggaggaggcacagatgcgtggaacagagccagcagacac

SEQ ID NO: 268962 - DNA, 424 bp, Homo sapiens
cagaagtctgcaaagataatttataggacaactccccaaatcaccccacgtagtctttcctaaaatttccaacaatgcaatttcttagtacttttttaagaggtaggtatttaataaagttaaggcatttctagactaaacaaaggtaaagcattagctaacacatacgcagggtctagtttatatgattaattcccattaccaatcataaattcttaggcagcatagactcagttcttcaaataagtattaaaaagaacaatattgagagcatgacactatgatgtctcttgagtgaaagaaaataagagaattgaacttcaatctctcatacattataaacatgtttcttacacaaaacacataccagtcaatgaaaaggtcgtggtttttcacaagttctttaggactcgggcccagaatt

SEQ ID NO: 268963 - DNA, 497 bp, Homo sapiens
ttgagctccttttattaggattatttttcatagttgtatatgcaaaacagttcagaaactcttgtaggattgaggaaatgagtaaatgtctcaatgttcttgggagccaagattctcactatagaagaagatatacgcaggtacggaacagggcaaagtgagaaagaatcctgtggcaatgggtttgaattggaggcattggtgtgaattcaagctttgtaaagtatgtgtgtgaatgtgtgtgtgcgtgtatgtatatacgtgtgtctgtacttgcatatatttctcagctttgtccactgaatggcctgaaagcaaagaaaccccaataatgacatgccttgtatccagataatggtctctaataccattccccactaaagggaagcagagctcctttgagaaatggttgattccagggcttgggcagggaaaatataaggggaatcttgaatattatgttcctttgccagaaggaaaagatacttaaaaaaaaa

SEQ ID NO: 268964 - DNA, 825 bp, Homo sapiens
ggtcaaagaacgaccagcctacagtactgtttattggcctgagcatacggaaggatgaagttgcaccagcgaaatgggattaagctgcaggtgcgggctgggcgcggtagctcacacctgtaatcccagcactctgggaggctgaggtgggtggatgacttgagatcaggagtttgagaccagcctgaccaacatggtgaaacctcgtctctaataaaaatacaaaaattagccgggcgtcatggcgggcacctgtagtcccagctactagggagaccgaggcaggagaattgcttgaacccgggagatggaggttttaatgagccgaaattgcgccactgccctccagcccgggcaacagaccgagacaccttctcaagcaaaaataaaaacaaaaagctgcaggtggaaaaaaaagtctggattttggttcagagcccctggggccttcctcagtagttttctctttccttgaaaaaggaagcctgtctcagtctctgcatctctctgagtccttttggagattgaggatggtgaggtctcagtgcttggcccccttctaactctgggtacctcccctcccgtgggtcaacctggtccagtgcacaggccccagctccgacgaccatctcccccctaccctttgctcccagcaaaggccatttctaggtcagtcgtgaggtacagccaggacagggcagctcgctccgagatttttggctctcgaaggccttgagcgctgtggttctgcagaacgctgtctgcctcttgtggaggaactgacacccgctggagaaagtgtggagggaagcgagggctgcacct

SEQ ID NO: 268965 - DNA, 486 bp, Homo sapiens
agggtatattctggttaacatgatggagccccataaggcatcaccatgggaatgaggacttggcatggacacctcttggctcgtggagactgcccagaatgtggagcctgcggctggggctcatcttgctgatttgggcttcccgtcactggcagctcccacagcaggtggcgttcccataactagcaacttcactgagccactatttcttagctgttctttgaaagacgttgaagacccctctcttccactggccaaagcacttctaagggattttggagagaaaaacttgggagctttccatgaagaaaacagaagaatctggcagccgtttccatagggctgaacaggcaccttagagaattccagtgaagagggcagctgctgtgaagtttcccattcactgcaagcaaagtccaggtgaaagcaaagattcttcacccgcagaaaccctctgggcaggtaactcatgatgtattcccagcc

SEQ ID NO: 268966 - DNA, 793 bp, Homo sapiens
ggatgggatccaggagaaaacgtgctgaacgtgcagcttgctcctaccgattacagcccagcagatgacatagttccactgtgctctagtccattaaacagaaagaaattgaagacagagatgaacacagatcaagagcccaggtttcttgatatctaatactaatatactgatggagttaaacattccaaggaatatagcatgtcttggtctctgagagccaatatatctgggttacactgaaagaggaataacgagataatatttacactgtacattgaagatgacctgaaaagctggaagagctcagacagacatcagctggatgaagccccaggttcaaacaaacttgccttggatatcaaagtactagtaacaaaggaactcccaattcctcacctgctgtgaagtttcccattcactgcaagcaaagtccaggtgaaagcaaagattcttcacccgcagaaaccctctgggcaggccaggcacggtggctcacgcccagaatcccaatactttgggaggccaaagtgggaggattgcttgagcccaggagttcgagaccagcctggacaatatagtgagaccccatctctacaaataataaaaaaaagtagccgggcttggtggcccatgcctgtggtcccagctacttgggaggctgaggcaagatgatcgcctgagcccaggaggtcgaggctgcagtgagcgaccgcatcctagcctgggtgacagagtgagaccctgtctcaaaaaaataaataaacaaaaataaaaatatacgtttattcta

SEQ ID NO: 268967 - DNA, 571 bp, Homo sapiens
acagctctctaacaaaggacacaatggaatgtgcctgttttcaaattcctgtaaaaaagggccctggaagacctccaagcctgctcagacagacatcagctggatgaagccccaggttcaaacaaacttgccttggatatcaaagtactagtaacaaaggaactcccaattcctcacctgctgtgaagtttcccattcactgcaagcaaagtccaggtgaaagcaaagattcttcacccgcagaaaccctctgggcaggccaggcacggtggctcacgcccagaatcccaatactttgggaggccaaagtgggaggattgcttgagcccaggagttcgagaccagcctggacaatatagtgagaccccatctctacaaataataaaaaaaagtagccgggcttggtggcccatgcctgtggtcccagctacttgggaggctgaggcaagatgatcgcctgagcccaggaggtcgaggctgcagtgagcgaccgcatcctagcctgggtgacagagtgagaccctgtctcaaaaaaataaataaacaaaaataaaaatatacgtttattcta

SEQ ID NO: 268968 - DNA, 324 bp, Homo sapiens
gaaaatgccacccgagctgcccacccacatgagttttaaccttctaaagatatctgtgtaagcaagctacaaaaactgtgtgttcctcctttaccagaatgtgtgtccttcagaaaaggtaccaggtcttacaccccttcccacaatcgctcaagacctggacatggtatgcagagtcatcagaaatgtgttctaccatcgtctgatacccctgcaggctcagaaggccccttctccagagatactgaaaccgcatttccagccttaaccatcacaggttccacaccaatgatgaataaatgccctcacacccccccatctcca

SEQ ID NO: 268969 - DNA, 312 bp, Homo sapiens
tagaaagctaagaatggcttcacatatttagtagttgaaaagcagtcaacaggcgaccaatactttgtgacatgtgaaaattacgtgaagtctcagtgttcatcagtgaagcgttctgggcacggccatgcccggctttcacatgttgtctgtgctgttctcactccagtgggagagcggagtagtcgccacagagagcacctggcccgcacagcctgttctgcattttacagaagtttcccaactcttgctttgttacatgcaaagtctagaaaggataaatgcaaaatattagcaggtgatgttgtgaag

SEQ ID NO: 268970 - DNA, 405 bp, Homo sapiens
gaaaccccatctctactaaaaatacaaaacttagccaggcgtggtggtgggtgtctgtaatcccagcattttgggaggctgatgcatgaaaatcacttgaacccaggaggcagaagttgcagcgatccatgatcatgccactgcactccagcctgggcaagagagtaagactctgtctcaaaaaaaaaaaaattgcctaataatagcttggaagtgcacatcttcaaaacacaaataagtaactgtgtttaaatgaggccttctgtgtaatatctagggaaaatcaatgtggctattcaaatttgtttccccttccaagcacagagaagttgctcatgactctgtgatccgttttgtccaatgaaccatgagcagcagcagcaacttgagtcacctccaggtgga

SEQ ID NO: 268971 - DNA, 506 bp, Homo sapiens
ggtaagtgggtaagttcagttgaccatcacctgacagtaagatacagaattgagatgtattggtggtggtggatttaccagaataacacagatatgccttttatgtctttctttctttttcccttgtggaacagtataataattgtttttatggacaatctcatttgaactttttttgtctgccccaatatgagaaatattccaaattcttgatgtgtttccagccctagtaggctagtcatttccgggatgctgttgagcctgacaggtctggcctcaattaggcaatggcttacatggcatgaaagaggacattagtcaaactgatttacagcttcaaggttcagaagtgtttcttaagtttgagggtgtgaatactagtgatgtacctggcattgagaaattccaaaattaaacttgtattcagctctagcctgcttaatctcctatcaaactaagatggtacgtttgtaaatacaaatgaagttaattgcattttaaactga

SEQ ID NO: 268972 - DNA, 481 bp, Homo sapiens
ggagcattatctccataagaatgagaaaaatgacactgcaggatagaacagtagtgttaatgggtcagtgagtgacagctgagccttctctcagaggtatcagccaggccagtgctgccaggaacacaagagctgtacagtaaagtgtgccaatttaatcttgtcacacgtagcctggactgcaaagatagagctccccttaaaagcccagtgtgtcaagcctaaacccgactcatgccagaagagaacatacaaagatgctaattggaaaatatctgtactacgggttcccacagaagatgtcctttaaaaaaaaaaatttctcaacaggatctagttaagataataaataataaaatgtgaaactcccatagacctcttggtcatcagttaccctatatatcctaaattcaacttaaaaatagacatctgaaatcaaacaatgttgaagcatttcaattaaactgattaatcttgataa

SEQ ID NO: 268973 - DNA, 516 bp, Homo sapiens
ttgaattaatatgttttgtgattccactttatttccactattggtttattatttgtacctcttaagttttacttgttaccttaggtttacaatctgcatctttaattaacatgtctgcattcaaataatattatattacttcacatgtagtttaagagccttagaacagtgtactcccaattcttgccttccattctttgtgctgttatcatataattttatgttattttctctttaagccccactaatgtttatactttaaatgattctgtaaccaccctcactgttaagatttttctaggtttgtgacagtaagttacaagattcataaatttgcactgttttacaggtggagaattaggaatatagagacaataagaaaaaagcgttagcctgacaaagtcagagtgctagaagagagctttcaatagctacagataacatttcctctcattcttaccactcagtgtttttctttagtcattaccttaattataactcttactttataagaaa

SEQ ID NO: 268974 - DNA, 206 bp, Homo sapiens
gattcaacactgccccaatatttaaaaaaggaaaatatattaattcaacttataaactgctgagacttcctatccacaagccaacaaattcagttgaacactgtaatcaataacaaagaaataaccaaaatctatgagaataagaacgtggaaaatcaaccaaaggtatcaccaaatgaaccaaagatttcattactgttttagtc

SEQ ID NO: 268975 - DNA, 429 bp, Homo sapiens
gtgaacaatcagcgatgtctgctgaaatgaaatgatttgaagagtataatgtaaagaggaaactcatttaaggagccctgtcatggtacggtttcccagatggactcaaagcgaaagagcgaggagcagaacagtgagtttcgtgggctgcactgtgttgggggaggaggcgacgtctgcaatcgggctacacatgttcatcaagacaggggagcagcttcgcccactgggagcagaatcagggacttggtcagagggagacgttttgctctactcccttttgtgctgtttgaatttatcttctgcatattttcctttcaaaatgaaaataattataacactggatagatgagaagctgcaggcacttctgctatcggctgccccagctggcctttggtaccacaggtcacaagcccccttaccctcag

SEQ ID NO: 268976 - DNA, 554 bp, Homo sapiens
ggggcattttaaagcccactgtcttattcgattctcctgacaaccctggtttattcacttttcagaggaggaaactggcaaagtcaattgctagttataggcagagctgaattcaaacccaggactgagccctcgtaatgtcccctttcctccttgggtttatttgttctccattctctgggacattcgggtcacaagacctgtttccagttttggccctgccatttactggcagaggaacttaggcaactgacttggctttcctgtgcctcagtttccccatctgcaaaatgggacagatatgccctattcagagggttgatgtgaggcttagctgctcctgataacaatggctaatgtgtcctgaaagcttctgtgtatgaacactttgtgggtattatgctcatggcatgtctgggcaagtacgtagaactatgtgtcccattttgcaaaagtcttgattaaggcttagagaagcgaacaccttgcccaaggccacgcagagagtaaagatttgaacgaatgatgtcttgactccagggcccaggctctta

SEQ ID NO: 268977 - DNA, 452 bp, Homo sapiens
caaagtgctgggattacaggcatgggccaccgcgcccagcctatttattatttctttagtacaaattcccagaaatggaattactgggccaaagagcataaatatttaaagcttttaatatctgttaccaaatttgccatccaaaagcatattgccagtttatatttccagctttacgcatatgacagcctcttgtttctccatagccttgatagcattagatatattaaattttacaatttccctagttttaatagcaaaaatttgtgacatctaaattttattttttatttttaatagtgaagttgaacattttgagtaagaattaactcttagtgatagaaaaagataatcttcccaccactttgtggcttataaaaccctctgtaatcttatagagggaagtagcaaaagccagaagagagaccaaaatatgacaaagtgggatctca

SEQ ID NO: 268978 - DNA, 327 bp, Homo sapiens
gacagtttttataacctctttgagctctaaaccatgtttcctgtgcacttaggagatcttaatagaaaccaagtacttcttttaggcatctatactcttaatgccgtaagtcaagtcaagtacccaggtggttaagataactgtaccaacagaaacatttttaaaaaatatcctaacacaacatgaagtgaccatcgcgaattcaaagaagcaggcatatttcttaaaggttgaaaagaggtgagtctttcacaagattctagctcaaggccatatttgcacaagtatagtcattcctctagcaaggttttgtttatctggccatta

SEQ ID NO: 268979 - DNA, 478 bp, Homo sapiens
atgtacaagttacaggtggagataagtgctctgcagaaaggagcatgactcttgtgagagaaacagaagaccatgttctgaactgggaatcaaggaagacttccctgaggacgtgacccttgtttggactctattctgtttatgctaaggattttaataaggagcaggtgatggacatgatccagcgtacatttttagaggaatatcatgagtcctatcacttcatctcctaaatatttctgacatctgttctctttcctccatcctcacgaccttcactggcatgggcctccaacagctcactgtgggggaagtttccctcaaagggcactgataacacatcttattaaaactataccacatcattatacctccccaacataatatgtacatgtatgtatttgacaataatatatatgtattactgtcctatttattatatacattaaaaacattcacaaaaaattaaaaatccaaa

SEQ ID NO: 268980 - DNA, 386 bp, Homo sapiens
taaagactacccagcagggctttccagcagccacatgaatgtcctataaagcctctcttcacacctgggtcacacaaaggtgggaaagactcagtgctgtcctgaagactgtccagttcctgaaatccatatgttcactggatctttatgtgtacaacactcctctttagccctcactggcgagcatcctctcatgccagtgtctccactcttaactactctcccctcctccctcctggaatcttggaggatttctgagagtctaccatcattgcaacacatttctcctccattataacatcaaccatgccacactttccatcccaactgctagcaatagacacttgcatgtaataaaaaatattaattgaattaattaagagaaa

SEQ ID NO: 268981 - DNA, 1107 bp, Homo sapiens
cgcatttgtcatttcagtcaaacatacgttggcactttgggaaaaatgttatctgttattgctctcacagtaagcttttaaggaaaggtaaatagactgtttctttgatgaaatatttaattcatatctcaataatggatcaagatctgtacctatatggtaggtatacaaaatacatgaaagatcaagatggggaggcagtgaaacagcttttaaaataattgtgtcaatgcagataaaacattaaattcctttcttgcctcttctttaaaccaattctgtatctactgagtacctaaataagaactctgtagatgtgaactgagtaattcttttcaggaactgagaatataaatagggaaagagaacacagaagaaaatattgatataagacacaagagcaagttcattatacttagggtaaaaattgtataaaagaccagagataagatttaaaaatccactccaataaataaaggcttcatctagaaatgcttcaaggaaacttactgggaactgaaatataccaagtgaacctggacattaaaaaaaaatagaaagctgttggggccgggtgtggtggctcatgcctgtaatccaactttgggaggctgaggctggaggatcacttgagtcctagagtttgagaccagcctaaacaacatagtgacaaagtgagacccctgtctttacccaaaaaaaaaaaaaaaaattaaaacttaggcacggtactgtgcatctgtacttctagctacttgacagagtgacctggaaggactgcttgaacccaggaattcaggcaacagaatgtcaccctgtcttaaaacaaagggggtgttggacaggtaagatgttattgttagatatgaagaataagctcaggtgttctcttgcatggtaaggtgattatagctaataataatgtatctttcaaaatagaagagagaagttttgaatgctcttatcacatagaaatgatacacatttgaaatgatacacatttgagataatggatttgctaattaattttatatgatcattatacaatgtatacatgtattgaaacatcacattgtacttcataaacgtacagtcattgtgtcaatt

SEQ ID NO: 268982 - DNA, 364 bp, Homo sapiens
aaactttaatatatctatttctccatttccatctttgtatttatgcaccgtaattaaaactttcatgtttgtgtgaatagaattactcatgcagatgttaaaatgtattaagttcatattaggccaggcacagtggctcacacctgtaatcccagtgctttgggaggctgaggtgggaagactgcttgaggccaggtgtttgagaccaggctgagcaacatggcaagaccctgtctctgccaaaaaaaaaatgttttttttaaactttgctgggtgtagtggtgtgtgcctatagtcccagttacttcaggaggctgaggcagaagaatcacttgagcccaggaggctgagactgcagtgggcc

SEQ ID NO: 268983 - DNA, 425 bp, Homo sapiens
aagacttgatatactctggttgcttcatctaaaaacataaacccagcagttacaaaggaatttgtatacttttattgttgggggtgcaaatgaaaaaataatcgatcctctgttagtcatccctagtgtgttagtgggggcacttggacttacacactattgaggttctggattaattcaagcattcatgctttttctttcatatacagtttattgcacaataaataaagtcaccttaaaccaagttttaatgcctggaagcttaaagtgggggaaaggttgaaatcttttactttgagagtagcttgattttttctgacttccctcaaaaattacaaatccttcagaagttgagtacattatgattcttgatgtatgtagcttaatgttattgacgtttcggttcatttctctgcaaaaaaaaa

SEQ ID NO: 268984 - DNA, 528 bp, Homo sapiens
aaggaatggaaaaagatactccatgcaaataggaaccaaaaagagcaggagtagctagacttatatcaaacaaaatagatttcaagacaaaagctagagacaaagaaagtcattatataatgataaaggggtcaattcagcaagaggatatagcagttgtaaatatgcatccaacattggagcacccagataatataaagcaagtattattagaactaaagataaaccccaatacaataatagctagagatgtcaacacaccactttcagcactggacagatctttgatacagaaaagcaacaaagacacttgactttatctgtactttagaacaaatcaatctaaagatacttacagaacatttcctctagtggcttcagaatgcacattcttttcttagcacatggatcattcttaaggatcatctatattaagcacaaaacaagtcttaaaatttttttaaaaatgagattcatctcttaaaaaaatataattttatcaagattcttctgaccacaatggaataa

SEQ ID NO: 268985 - DNA, 461 bp, Homo sapiens
caaaaaggtggcctgtaatcccagcactctgggaggccgagataggcggatcacttgaggtcgggagttcgagaccagcttagccaacatggtgaaacctcgtctctactaaaaatacaaaaattagccaggcgtggtagcaggcacctgtaattccagctactaggaggctaaggcaggagaatcacttgaacccaggaggcagaggttgtggtgagctgagattgtgccactgtcctccagcctgggcaacagagtgagactccaccccaaaaaaaaaaaaaaaaaagtttgtcagccatggagaattatgtttaaattctagctaaaaatgttatgttgctttgataagaagtgttgaattagagatgctaatgagataataatgtatttaatgtaaaaaatacattattaataatgtataaaagtctataaacttgactgcatttttaataaagctc

SEQ ID NO: 268986 - DNA, 725 bp, Homo sapiens
atgaatcctacagattgcagcatgctgagtgtgttttgcaagatgcacatataaggtgatgattaatgtttaatccctttcaaaatcactagtgagatctgctaggtacagttactggatctgtttattttaccggaaatgtacgtgggtactctgaatgactcactgtctacctttaggtttctagaacaatctctgcttcctgacctcttttttcctgctcctgtgcccttgcaacagacagaacaaacacaatctctctctttctctttatacctggattatatgttaattaaaattaatattaggaacataaactttccctactgttagttgtaataatctcattgtcacactagactagttgttacagaactctcattttggtttcagatatttcattttttcctgttaaaattaatatttttcctttgtctatgatttacatactgataatatttttgcctctatgaaactaacctgctaataatatgttaaagaaattattttatgttgccatttatacttaaaaccattgccacattcaacgttaacaaaatttatatatacttatccaaagatactgtatctgactgtcccatttttaaatgttttttgttctttctctttcctgcctgttccttgtcctgcctttaataatggaataatattctactttccttctttctgccacatacccccttgcacaatgtttcccttatcta

SEQ ID NO: 268987 - DNA, 481 bp, Homo sapiens
ataattatatgctgagtcctacgaatcttcctaggaaatcacatatatatgaatgaaacattttatatcgatttttaaatgctcactacatgcctctgaagcagtcaagcagtttattgtggtttaatgatgagatgcatgtgctgaggaggtaatcagaagaagtgagaaaaggagacggtgtgaaattttgaagattttatatgccatgatgcagaaataaaagttcagcagggtcaagtaagttgtccaatgttcagtatgatggagtgggattcacatgcaagactaactaccactgaaccatttacttctgactttgctattctgcttccactcactgaacatctctctgagcaaggctcagcacctggtatgaaggctgaaacaagagcggttgcacagcaaatgttttgctataatgagagaatacatgaattaaatgcgaattaaactgcttctatctccttatggtggcaaa

SEQ ID NO: 268988 - DNA, 273 bp, Homo sapiens
ataattatatgctgagtcctacgaatcttcctaggaaatcacatatatatgaatgaaacattttatatcgatttttaaatgctcactacatgcctctgaagcaggtattgctacttccattttaccaagaaattaagtaacctaagatcactcagtgaagagttgatccatttgactccacaacctgtgtgttttcttgattcagtctacaatgcctatgaaatgtgactgaggagaggtaatattaaataaatcatccttacagtgttgatc

SEQ ID NO: 268989 - DNA, 748 bp, Homo sapiens
cctaaatcctcagaaagccttgcctttagagaacgtcactgaacgaatgattagaggagtgctactttttcactcaaaaaatagcatccatgggactttttatcatctaagtaacctaagaattcaaaagctggatagaattttagaagcaactacgtacatcattattaatataaaaataacaggcagactcaagaatgtgctgagatttctctggaaaacaagctctgcctctccgggttttagtcaacctaacaccaaaccaaaatagaatgttagctgttcaagaatctgggaccagccaacctgtatgtatgcatttttgaagcaagagaaaattccattttatagttagacccaaattcactaaatagtgtgtatgttcactttgtttaagttgtatagacatagcccagaatgttttgtgaagatttgcaatatggtgttttggaatgtgtagaatacaaatcacagtttttactaccttcttggcatatgcttacaaagaacattatattttgttcatgttttacatgaactaatggataaaaaacaaagtatacatatatgtctatatatatatatagacacacacacacagacatatatttccttctttaaggtaatcatacaaaaggtctatacatacaggaaggtatatattgtctcaatgcaatcaaatcatcttttactggggattcaaataaaatgtagcaaataagagaaaaataaaatgaaagaaaatagc

SEQ ID NO: 268990 - DNA, 349 bp, Homo sapiens
atcacccacctcaggctcccaaagtgctgggattacaggtgtgagccactgcgcccagccaacaacaatttttattttaattgaaaaagaggtcggttgctctgcgagtgcacctcttcactccagaagggtcacaatagtgggggcgggagcccaggcgtttattcctgttcagtggccattcccagacacacttcaggtgctgttctcactgttcctccaggcccttgtgcctcttaaaaaaaaatttttttttccactttggaaagctgagacaggagaatagcttgaggccaggagtttgagaccagcctgggcaacataccaaggccctgtctcctcaaaaaat

SEQ ID NO: 268991 - DNA, 330 bp, Homo sapiens
caggggcagtcatgcaaaggccctgggacatgagcatttgggggaaaccaagaaggccggtgtaggccgcgcgcagtggctcacacctgtgatcccagcactttgggaggctgaagcaggaagatcacttggagccaggagtttgagaccagcctgggcaacatagaccccgtctctactaacgatttttttaaaaataagccaggtgcagtggtgcacacctgtagtctgagctacttgaaggctgaggcgggaggatcacttgagcccaggaggtcgaggccacagtgagctgagatcataccactgcgctacagcctgagcgacagt

SEQ ID NO: 268992 - DNA, 380 bp, Homo sapiens
tgagaagttccaggacaagatgtttcaggatgctacaattttgccatgatgtttatggatgcttttaaatgagaaatgaaaattaactccagaaaattgtcaataatccttaaatcaagtctgcagtattttctgagaagtcctttagttagaatggttgagatcaccacaaatttgcgaagattgcaatgaagattgtgctatgactgtgcaatcaacctcctttaaggaggagtcaacagttacagatccaagatccagggggaggatgaaggaactctcaggaatcactgtccagtattgatgcctaacaaagaatataaatgcaggccattataggggtttacaaaagccacattagcaactatttgttcattctt

SEQ ID NO: 268993 - DNA, 459 bp, Homo sapiens
caaacacatccttctttacatggtggcaggaaggagaagtgcagagcaaagtgagaaaagcctcctataaaaccatcagatctcatgagaactcacccattatcacaagaacagcagcatgggggtaactgcccccatgatttaattacctcctactgggtccctctcacaacatgtggggattatggaaactacaattcaagatgagatttggttggggacacagacaaaccatatcaccctcttagttattcttgttcactttatcttcatagtacttctcacactgtgaaattaccttgtatatatttttacttactgttatctcccccactagaatgtgagctccatgaagatggtaaccatgtctgtcttgttcattgctttaccttcagtgcctagcacagtgcctggctttcagcaaatatttactgaataaacgaatgagttgggtatgga

SEQ ID NO: 268994 - DNA, 536 bp, Homo sapiens
ttgttgatgatatgtgaggacagataacgccacttagcatgtgttcagcaaatgaacttcccctccactctcttccttttctccaagaaatatttttttgaatgtcttcacttgttgaatgtttgctcttctgttccctaattcctacccttccatccagtccagggatttataagggagacctgggggtaaaattcatccattcttgtccagaacacctgcatcattcatccatccagtcctcgttcagcaaatactctcatactgcattccaacccccacatctgtgcacagcatctttctgtgctctggagacctgggaaggacccaaccagggatctattttccaggtgctcccagcctggtgggggaactgtccctgggcaggacagtcccagcccacgtgggcagggatggggtttacagtaagggaagcaggactaggggggtatagaaagtgtctcagttgaaagcctgaataatgatcagtagataattgggtacagttggggagcagtgctgtaggtcaagaagac

SEQ ID NO: 268995 - DNA, 256 bp, Homo sapiens
gggctccagaggaccctacaactattgtggggggaactggatgtggtgggaaaaattgtatacctcttctcagacttcataccccaccaatgggctctcaccacggtttgcagactgttcacaccgagtttgtgtagaaaggatgaaatcttaagattagaatgagagtgaacgcaggttggtcatgcctgcagctctctttgaagacactcgctatcatggtgggctagaaatagtcaccatagatagtattctt

SEQ ID NO: 268996 - DNA, 710 bp, Homo sapiens
taggcaatccgtccacctcagcctcccaaagtgctgggattacaggcatgagccactgcgctcagccatctgactgctttttattctggtcaagctggcagctgattacgttgtgcccacctagatgaaaggtgggcagcctttctcagcccactgactcagatgtgaaatttcctttagcaacaccctcacagacatacccaggatcagtactttgcatcctcaatccaatcgagttgacactcagtattaaccatcgcagtagcttttgttgcagagttgtggtggccgaaaacctgatcaccaacttagtggggcatttgctctttgtgtggctggtagaagcatacagtgtaaattcaggcaaggtcatatagtttaagattaatggaaactatacagagcattcgtttcttttttaagagacagagtctcactttgtagcctgggctggagagcagtggcactatcatagctcactgcagcctcaacctcctgggctcaagggatccttcagcctcaggctccccagtagctgggactataggtatagtctacccctattttcttttcatagggaattctaaaaataatgttgattcttctatagaaatagtcaccttaggtagtcacttttgatatgtctgatttatcatttccaaacctcacatgtgttccaccttgtaaagatagcaaatacagtgagctat

SEQ ID NO: 268997 - DNA, 496 bp, Homo sapiens
tcccaacggttgttgttgttgaattatccccaggcactcatggagttgtcctgaaacccatcttccgtgtgccttgatttatccatgctgttcttacccatgtcatcttcagagagaaaagtctttttcccatgcacagccaagagactgactttacttgttttgtacgtagttaagaattccaccaaaaagaattccactgccataccagcatctccaaggatgtcccataaacttggttgcagagttttgtgaaatgttgcactccagtagaaggcagcagactaggcctggtgcggtggctcatgcctgtaatcccagcactttgggagaccaaggcggcagatcacctgaggtcaggagtttgagaccagcctgacccatatgatgaaacctcatctctactaaaatacaaaaattagccgagtgtggtggtgggcacctgtaatcccagctacttgggaggctgcgacaggagaatcgcttgaacccggga

SEQ ID NO: 268998 - DNA, 470 bp, Homo sapiens
  misc_feature (344)..(344): n is a, c, g, or t
  misc_feature (363)..(363): n is a, c, g, or t
  misc_feature (407)..(407): n is a, c, g, or t
  misc_feature (423)..(423): n is a, c, g, or t
aaacaatcccggcgcctatcactcgcgcgcaggctcctaatggctcctaaattataaccggtcttcctacatcttcagttatctcttccactagagcagtcccaccagcatgtaaacatgcgggaatgtctctcatcttaaacaaacaaaaggaaaaatccctccagaaaaaccagcaaagcttcctttggccctgtattcctgtccatctactgccctcctccattttatagtaaaactccttggaagagttgtatgttttcacatccttttctgtcattctgtagcaagccactctgatcatgtttttctgctctgttctacctgaccaaatccaggggctnggctgaatgatattccatngtgtgtgtgtgtgtatggcattttctttaattcattcatccttngatgaacacttaggtngattccatatctgggctactgtgaacagtactgcaataagcataggg

SEQ ID NO: 268999 - DNA, 733 bp, Homo sapiens
aaacaatcccggcgcctatcactcgcgcgcaggctcctaatggctcctaaattataaccggtcttcctacatcttcagttatctcttccactagagcagtcccaccagcatgtaaacatgcgggaatgtctctcatcttaaacaaacaaaaggaaaaatccctccagaaaaaccagcaaagcttcctttggccctgtattcctgtccatctactgccctcctccattttatagtaaaactccttggaagagttgtatgttttcacatccttttctgtcattctgtagcaagccactctgatcatgtttttctgctctgttctacctgaccaaatccaggggtcaattttcagttctcatgctacccattagacctatcagcatgttacattctactgcatttgaaatccattgccttagtatggcctgtaatacctatagtattccaccctaccataatctcacccctttctctctccatagctctttactctccagccaagtggactttttttctacttctgtctttctgtaattgacgtatactatcttggctcattttcggaattgtgtatttaattctgtttgtacccatctacaatttgtaaatgcaatttcatttctaagatttgaaataaaaccagaacaacttccaacatgactttaaaaagaaatcaccccttcagaagggcttttggttcagaagagctatcaaatttggaaccctaagatag

SEQ ID NO: 269000 - DNA, 353 bp, Homo sapiens
ttaaaccagggttatttagctataagtccaaatgggttttatattcttgaaagtttatattaacaccaaacagtaaaatcttattgactatattttgggaaaattctgccttgtgagattgatttattcatttatcaagcatttactaagcatctgttatgccacattttctgttaggtgctgggaataccaacccctttgctttcaggagactttaggtttactagtgggtaatacgttataagcatttcattctggagtaaagttttttcagttaattgatttgcatattagacatttctattatgttttagtacaagaacttggaggattttacctttgtaaatgtttta

SEQ ID NO: 269001 - DNA, 410 bp, Homo sapiens
attagagaccagaaacagttggggcagaataaatagctggcccagaccaggacttgaattaggacacgaagtgttccagaggaatcccactaacatgcttgaactacatttaaaagtggaagaagcatataggagagggaattcaagactataagctgaaaagatccagtgaggctagcacagagcatggctaagggcatggactccctggacttgaatccagacttgccagctggatgcacttgagctggttacttgatctatctgtgcctcagttctgccatctgtaaaatgggaacaatgatagtactttactcagagttgcttcatgaaaactaaatcattaatttatgcaaaaggcttagaagtgttaggcacacagtaagcggcatgtaactgtttcttaaatt

SEQ ID NO: 269002 - DNA, 529 bp, Homo sapiens
gtttactggatgagttcatcttctagaccttgaatttaaagttcacattatccagcctccttcacttattgtgaagattctctgatccaaacatgctagatgatttgcgttgtcacccagctggttagtggtaagagtaagggttagaacctatcttctggccttgaactagtatgtaatatttattttttattaatttattattaaacagagatcaaccatattggcatgtggggtgttggcaagaggcagccctcaattttcttcccatttaatgtatatgctactcttactaagttatggaattattatttgttagactatcttgttaactaaatagtctggtttgtagtgagttatcatgtgttccatccgtgaataatctttttcaagggttgcaaacactaccttcaggggctgactgtaaaataatggaaggtcacgggatctgtggaagtcgagagtaaccacctgaatgcatccagatccgattttcctgtattaaaacacccttcaatccaaataatac

SEQ ID NO: 269003 - DNA, 848 bp, Homo sapiens
aaagaggtggaaagttaaccaaagaactaacacccctccccccaaaaaagaaaaaagtttatgtgccaggctttagaaaacctagatgtgtcaagctgttttaacctttgctagcctcctcccatgcaaaggtgacaaggtccagatcataatatgtccttcagtatcttcccagtgacccccaaattgaatcctgctagtcacttagcaggaagttagtagtttattttagtttcaccttatcagcttggcgtcttttcctaaccttattcccctgtcaccctcagatgccagacccccaaaggggaagattgacaggtagttcccatagctcagttttaccctcaaacaacagggatttagtttcttgtgcctttgccaatgtttatgtagtcaaagtttagatctcgccttaaggagtctcttttttacgcgtcactgcaataggaaagccacaaagaagtttttgaacaaacccttgcaactggaaccccatctagtgttcagtttgattcatccatgggaaagacattttcccctttcatttattgtgtacattaggtgggcttggatcactattttaaaagcaacgcctcgtccatgttgttattttttcagagatttcacttgtattcttccacaagagaatactctaatccccgtcagaacagtgagtgaacttgaagggtaccaggaaatttgtcatttggtggcatatcacatagaggaaactttagacatcacagaaaatatgcccagcatatgtcgtagtgtttaaaatttctttggaatcctaagttggattcagacttttccatttggattcagacttttcccaggtcgatgca

SEQ ID NO: 269004 - DNA, 356 bp, Homo sapiens
tgctagcttgagatggagaacaggcaaatttcggaaaaagatattctagagcttataaacagaaggaaaaaacatttcaatgagactgggaccaactgtcccaaagatccaagaggatctcctttctaaagtcctgaatctctaaaagcaaaattgattttgcttaaagctttcttcccccgcattacattaccttcgacggttggaaattagataaaataataaatagttggccgggcgtggtggctcatgcctgtaatcccagcacattgggaggccgaggtgggtggatcacaaggtcaggagttcaagatcagcctggccaatatggtgaaatcccgtctctactaaaaata

SEQ ID NO: 269005 - DNA, 850 bp, Homo sapiens
ctaacacaacagtaagaatgcaaacaattagaccaagggcaaagatataaataaacattttaccaaagttatacagatagcaaataagcacataaaaagatgtccaacacctagggaaataacaattaaaatcacaatgatatatcactacatacctacctatcagaacagtaaaataaaaatagttcagcctgggcaatgtagcgagactcttgtctgtacaaaaaaataaacaaataaataaaattagctaggtgtggtggcatgtgtctggagtcccagttacttgggaggctgaggtgggaggatcgcttgagcccaggaatttgagaccacagtgagctatgactgcaccactgaacaccagcctgagcaacagagtgagaccctgtctcaaaaaaaaaattcaaaagtgacaacaccaaatgttggtgagaatgtagaggaactggagcactcgtatattgtttggttgatagtttgaagttctgctgaatttcgaagccttcaaagtattttggtgtgtatttcctcatataatttggcaataattatttgaggtggtaataggaaaggaattcttactacttctcttcctaaataagtaaacaaatttgtggagtggctaatttactacctaaggtcacacaataatgtcagagaaccattgaccatagaagtcaattaatattagtcttaggactttttcttagtgttccaagactatcatgaggtggttttatttgtttctgtcgtggtttataatctcaagcattttttgtagtaaaacgtctgaggatcattaataaacctatgatcataagattttgtaaataaaatgtccatggat

SEQ ID NO: 269006 - DNA, 453 bp, Homo sapiens
aataccatgcagccattacatgattattaaatgggaagcgcaataaaataagtgaaaaaaggcatatgtccacttcatgctttatttttatatgcacacacataaacataggtatggaagagagatgggactagaaagaaatgcaccagctctttttccattttctgtaacattgtaaagtacaggcctaatctggatcacctaattcagtacttttgattgagaaagaaagaatattttatgtggtttttaaatgtatttgcagtagtcctgaacttcagcacctcagactgataagaagagccaaaggcaaattacaaattggggaaatatttacaatttgtatcacaaaaggttaatgtcacaaatatataaggtactcttggaaatctctttttaaaatacctacaatcagatagacaaatgagcagaggatttgacagacagttcacc

SEQ ID NO: 269007 - DNA, 421 bp, Homo sapiens
atccattagcaaatcatttaacttaaaaatattttatccatatgttaaattgggctactaaaacatataatgaaagggcatatagagctatgggcttctttaaggaaatacaataacagctaatattcctaggagctttatgcatatcaggcactgtgctaaacactgaataagcaatttcttaaccttcacatgaaccccatgagatagacatggttttcccccattttacagttgacgaaatagaagagatttcagccacttgttcgaggtcatttgttcaaggtcagacaggttccacggtggaacctggaaagtaatctcagatagtttctcaaattgaagctctcaaccaggaactctttttacctccagcatatattcagacatggcataagcagaggacagaggctgttctatg

SEQ ID NO: 269008 - DNA, 308 bp, Homo sapiens
gagaattgagaaatttattatcagattcaaaacttatacacttgggtgggaatctgtgtggaattaaatagctttctctcctgctaaataaagtaacacatgctccctgtagaagatttggaaaaatatgtacaagtaaatgaaattccactcatagcccgtagataataacttactgttttggtgactatatatctggttttaaaacagaccgtatataggaatataagaataatatttggatgattgagatcatattatgtaccatttcatatcttttaaaaaacttatgatgtggtgagttttcc

SEQ ID NO: 269009 - DNA, 567 bp, Homo sapiens
cactcacaagccatcaggtgctgccgagagccttcagtgaaggtcacagtgatgctactttccagaggaacctgaaaggcattgaacgtaacacagggcatggcatgtcctagcacaaactgatgagccgggtagatgctgcctcagcaggccgactcctgttgggcaaaggcaggctcagttcaggtctgactgaaatgccactcagcagccacagactcttcaccacaggaggggcgggccccatcatacacagctcaggaaatggagcctgaagtacaagggcaaactctgtgagactcgccccggcctgcttcaagacagctatgaagaaaaagtgcctctcttcatgccttcaaagcaactgctttcaccttggagcaatgtggacctgaacacacaaaaccagcgaatatgtgctctcagcggcttcaatgaaccccttcatcattcacccctactcaatatcccaccctctccaaacacagctccaaacaagatactttggacctgggcactgactagaactttgattaatgcagaaataaatataaaattgtcctttaa

SEQ ID NO: 269010 - DNA, 489 bp, Homo sapiens
cctgtagtgtagattccagtccagattcgaaggcctgaggaccaggaatgccaagggcaggagaagatcgatgtcccagaacaagcaatcaggcagagatgaaattcaaccttcctgtgcctttctgttctattcaggccttcagtgggttgaatgaggcccaacccacattgaagaggaccatctgctttactcagtctcctggttgaagtgatgatctcatctggacatactcagaaatgctgtttaaccagctctctggaaatcctgtggcccagtcaagttgacacacaaaattaaccatcacactgcagagacacagtctatcccaatacctgtatttactgggtaacgtgcatctcagctcaccaggctggtttgattgacttggcccaaagctgccctttgagtgttgagccctagctgacccctttgatccttcacagccccatcattaaaacaaggaccctgaatcaagtgactgtaaga

SEQ ID NO: 269011 - DNA, 427 bp, Homo sapiens
atcttcatgacgtaaacacctcccattaggacccccctaaagtgggatcacatttcaacattaggtttgtaggtgacaggtatccaaaccatagcatacatacagtagaatattatccagccttaaaaaggaatgaaattctgggccgggtgcggtggctcacgcctgtaatcccagcacttcggaaggccaaggcaggtgaatcacgaggtcaggagatcgagaccatcctggctaacacagtgaaaccccgtctctactaaaaaatacaaaaaattagtctggcatggtggtgggcaccagtagtcccagctacttgggaggctgaggcaggagaatggcatgaacccggaggcagggcttgcagtgagccaagatcgcaccactgcactccagcctgggtgacagagcgagactccgtctcaaa

SEQ ID NO: 269012 - DNA, 419 bp, Homo sapiens
gctagaccagggcttccatattcatttgaaagggcaggtcctaggaggcaggctcctctccttactttgagactgctgggtggcatttccatagatctttatgcaagttaggaaaaggtgctcttcacacctttaacttccatctgtcagaaaattgttttgccgggtgtggggtctcacacctgtaatcccatctctttgggaggctgaggcgggtggatcacctgaggtcaggagtttgagaccagcctggccaacttggtgaaaccccgtctctactaaaatacaaaaattagcctggtgtggtggcatgcgcctgtaatcccagctacttgggaggctgaggcaggagaattgcttgaacctcctgccactgcactccagcctgggtgacagaatgagactccgtctccaaaaaa

SEQ ID NO: 269013 - DNA, 435 bp, Homo sapiens
gtcaatgaagtgtgtgagataaaggcagatggtgccacaggaggcacggcatagcatggaagaaagcagataaaacaaaggaaccagaaccacatccactgatcggatttgcctggggaggaggggtgctctctcctttgatcttctcttctggaagagatggaccaaaagcctctccagcaataatccgtccacttacatgcagattttcttctgcctctgccacccctgagacagcaagaccaactctcctcttcctcctcctcctcctcagcctactcactgcaagacgacgagtatgaagatctttatgatgatccacttccatgtaataaatagtaaatgttttctcttccttgttatttgcttaataacattttctttcctctaactcattttattgtaacagtactgtatataatatatataacatac

SEQ ID NO: 269014 - DNA, 2403 bp, Homo sapiens
cggtccacgcttcccgccggcccggcaaggggttccggagaacggcttgggggggcgagaaccatgggcgggggaaatggaagacagagggaactgaagcacgggggtcttcgatgagcagtgcggatgttcgactccaaacatcaaagccaacgagaggttcaggttactcctccttgaccccaaacatccagtgagtggagactggcctgttcacagagtaaaatatgtcgtctctaattcggcaaagacggtgatgactgtatatatgcaggccaattccataaaacaaaggaaccagaaccacatccactgatcggatttgcctggggaggaggggtgctctctcctttgatcttctcttctggaagagatggaccaaaagcctctccagcaataatccgtccacttacatgcagattttcttctgcctctgccacccctgagacagcaagaccaactctcctcttcctcctcctcctcctcagcctactcactgcaagacgacgagtatgaagatctttatgatgatccacttccatgaaatgattcttgaagactatctttccagcttgtcacatatgcaaggtgtatttacaggagacagcaatggaaacctggtcagttgagcaggtctgcagttggttggtggagaaaaatttaggagagctagttcatagatttcaagaggaagaagtaagtggggccgctcttcttgcacttaatgatcggatggttcagcaactggtaaagaaaattgggcaccaggctgttctgatggatttaattaaaaaatacaagcagaacactcaaggactgaagtccccagaaaaccccaaaaaggcagccctggtcatgcaaacagaagcagctcgagattacagggatgaagagtcctccagtccagccaggcatggggagcagatgccatctttctatccagctgaaaaccttgataatggactaattgaccaaagagtattgaaacagagaagaaatgtgaaacaaattctagcaagaagcaaagcattacagtggacgaagtcctatgttttaccagagtttccctatgatgtcaaatgcatgttagcagagcagaagtgcccggatcacagcatgaggataaggatcattgagtttctccaggccgacatgactaagtatctggaaggctcactgtaccccagcacccagcagtacaatgacgtggttaatgccctgctgcaggcccaccctttcctggatgaggatggctgtggcttctttttatggaaacgagccctcaaagatcgctttaaatatgttcgaagacccatagaagatgatgagcaagtgattagaaataagtgtaaatttggacaccgaagaggccagacaaggaaatctcttgctgatataagatttgatgaaattaaacttgtccagataaaagaagaagctgtttgttttgattctgagctagatgaacatattaagtggttccagcaagaatacgtgaaaacagaaaaggactggagagaaattgacaagagaatgagccaaactttggaaataagaagaaagatgattggcagccgaacacctctgaaggacattcttaaactgtttcctttcttgaagtgcccttatcagatgttcagagaattccaacttcttacaagaacagatatttataagaaaacaaggcacattttggaatcctattcagaaaatatactgacttctttttcagtggtggacaatccaatcaatattgtattgcaagaaaaaatgaaacattacacagatgaagacatgttgaaatacatgaagatgacagccacatgtttactcctcccagatgtttttggggatgatcccagcctttttgtcatcatgaatgaacaggtgcaagtgtccacacctgtgttggaagttaaaaaccctttcaacatggaggtctgcgaattttctttatatttagaaagggagaggctcacaaaggtggacgactgtgttacagccttggctgcgctagtagctgcctttcatgtatttaggattgagtgtccaagaagactgtcccaaactttcaacttcctagaaacgctgattttcgatatgcacagtccttattttccttctttgaaagaaaaggaaaacgaagtaggatttcagcacccactcacttaatagcatgccaaatattgtactggaatttacctctgggaaaactgaagcttcataagaaattgttttgatttagggttgtggtagaggtaggtatgagaaaatcatcttgtatttatagatgctaatgaatttcaatgctttctatctttacacttagatattaagttctttgtgaaattctgtaataaaattctacttcattaaagagctgtcgatttattttgagttttt

SEQ ID NO: 269015 - DNA, 2383 bp, Homo sapiens
tgctaacggaaaacaatgagaagcagcaagttacaatctccttctcctagccaggagaagcaaggggttaaccagtctactaaggggttaaccagtttactaagtatctctgtcaggcttttatctgatccttcctcccttcctctcctgcccaccccttctgtaaatgtcaaccacttcctgaggagcctggtagtggtgaatttcacacctttcttttctttgtgaagaaacctgggtgttaatggtacaggattgggtaccattgtatgtccctggctgtctgttagtaaagcttagagatgcctgtggaaaaaaagtaggagaaggtgaagaaatttgagaaatgggatgctaggaaataggtttaaatcaggtcttatttttaaagtgagtgtgtgttttgttagcaatttttaaatgtacattgtaaaaatagtaattttaaaaaagcttaacattgagaagataaaggagtctagcaaaggaagcggctgactgttaaaaaaaaaattaaggcacaatcagaaagaaaagctggagaattctctgaccttttgctctacaggtgtatttacaggagacagcaatggaaacctggtcagttgagcaggtctgcagttggttggtggagaaaaatttaggagagctagttcatagatttcaagaggaagaagtaagtggggccgctcttcttgcacttaatgatcggatggttcagcaactggtaaagaaaattgggcaccaggctgttctgatggatttaattaaaaaatacaagcagaacactcaaggactgaagtccccagaaaaccccaaaaaggcagccctggtcatgcaaacagaagcagctcgagattacagggatgaagagtcctccagtccagccaggcatggggagcagatgccatctttctatccagctgaaaaccttgataatggactaattgaccaaagagtattgaaacagagaagaaatgtgaaacaaattctagcaagaagcaaagcattacagtggacgaagtcctatgttttaccagagtttccctatgatgtcaaatgcatgttagcagagcagaagtgcccggatcacagcatgaggataaggatcattgagtttctccaggccgacatgactaagtatctggaaggctcactgtaccccagcacccagcagtacaatgacgtggttaatgccctgctgcaggcccaccctttcctggatgaggatggctgtggcttctttttatggaaacgagccctcaaagatcgctttaaatatgttcgaagacccatagaagatgatgagcaagtgattagaaataagtgtaaatttggacaccgaagaggccagacaaggaaatctcttgctgatataagatttgatgaaattaaacttgtccagataaaagaagaagctgtttgttttgattctgagctagatgaacatattaagtggttccagcaagaatacgtgaaaacagaaaaggactggagagaaattgacaagagaatgagccaaactttggaaataagaagaaagatgattggcagccgaacacctctgaaggacattcttaaactgtttcctttcttgaagtgcccttatcagatgttcagagaattccaacttcttacaagaacagatatttataagaaaacaaggcacattttggaatcctattcagaaaatatactgacttctttttcagtggtggacaatccaatcaatattgtattgcaagaaaaaatgaaacattacacagatgaagacatgttgaaatacatgaagatgacagccacatgtttactcctcccagatgtttttggggatgatcccagcctttttgtcatcatgaatgaacaggtgcaagtgtccacacctgtgttggaagttaaaaaccctttcaacatggaggtctgcgaattttctttatatttagaaagggagaggctcacaaaggtggacgactgtgttacagccttggctgcgctagtagctgcctttcatgtatttaggattgagtgtccaagaagactgtcccaaactttcaacttcctagaaacgctgattttcgatatgcacagtccttattttccttctttgaaagaaaaggaaaacgaagtaggatttcagcacccactcacttaatagcatgccaaatattgtactggaatttacctctgggaaaactgaagcttcataagaaattgttttgatttagggttgtggtagaggtaggtatgagaaaatcatcttgtatttatagatgctaatgaatttcaatgctttctatctttacacttagatattaagttctttgtgaaattctgtaataaaattctacttcattaaagagctgtcgatttattttgagttttt

SEQ ID NO: 269016 - DNA, 1514 bp, Homo sapiens
cggtccacgcttcccgccggcccggcaaggggttccggagaacggcttgggggggcgagaaccatgggcgggggaaatggaagacagagggaactgaagcacgggggtcttcgatgagcagtgcggatgttcgactccaaacatcaaagccaacgagaggttcaggttactcctccttgaccccaaacatccagtgagtggagactggcctgttcacagagtaaaatatgtcgtctctaattcggcaaagacggtgatgactgtatatatgcaggccaattccataaaacaaaggaaccagaaccacatccactgatcggatttgcctggggaggaggggtgctctctcctttgatcttctcttctggaagagatggaccaaaagcctctccagcaataatccgtccacttacatgcagattttcttctgcctctgccacccctgagacagcaagaccaactctcctcttcctcctcctcctcctcagcctactcactgcaagacgacgagtatgaagatctttatgatgatccacttccatgaaatgattcttgaagactatctttccagcttgtcacatatgcaaggtgtatttacaggagacagcaatggaaacctggtcagttgagcaggtctgcagttggttggtggagaaaaatttaggagagctagttcatagatttcaagaggaagaagtaagtggggccgctcttcttgcacttaatgatcggatggttcagcaactggtaaagaaaattgggcaccaggctgttctgatggatttaattaaaaaatacaagcagaacactcaaggactgaagtccccagaaaaccccaaaaaggcagccctggtcatgcaaacagaagcagctcgagattacagggatgaagagtcctccagtccagccaggcatggggagcagatgccatctttctatccagctgaaaaccttgataatggactaattgaccaaagagtattgaaacagagaagaaatgtgaaacaaattctagcaagaagcaaagcattacagtggacgaagtcctatgttttaccagagtttccctatgatgtcaaatgcatgttagcagagcagaagtgcccggatcacagcatgaggataaggatcattgagtttctccaggccgacatgactaagtatctggaaggctcactgtaccccagcacccagcagtacaatgacgtggttaatgccctgctgcaggcccaccctttcctggatgaggatggctgtggcttctttttatggaaacgagccctcaaagatcgctttaaatatgttcgaagacccatagaagatgatgagcaagtgattagaaataagtgtaaatttggacaccgaagaggccagacaaggaaatctcttgctgatataagatttgatgaaattaaacttgtccagataaaagtaagattgaattcctaaatgttctgatgacttgatagattgatatattgattaagggataataaataatagcatttaaaata

SEQ ID NO: 269017 - DNA, 331 bp, Homo sapiens
caggtaaggtcatggcaccaatgaacttgacctcggttttcccagccccttagaaatcctcgctccctttgctggtcttctcctgatactattgtgtttagtggcctggtagaaagaagatgagtggcatgtgagtgtgagtgtagggcatgtgtgtgcccatgagtgttggggggcagagtaaggtattaatgaggttaaggttgcagtgggtcataccttgctcctgaataggaagattcaacattgtgaagatgtcaaacctcctctacacagtcaataaatttaagcacataattagatactagaaaattaaaaattagttttttag

SEQ ID NO: 269018 - DNA, 646 bp, Homo sapiens
ttagcatctgtcttccatactacaacccaaacttcctgtaggcaggggtgtcatctcttgatggctgctgtcaaccctgtgcattgaacagcgcctggtgggtactgagcactccatgcatgttggctataaaaaagattttcagtaactacatgggatactgctttttttaatttgggaatttctctattatgaatagtttcaaaggcatagccaataatcatctccaactaaatatttatagttctaatagcccaagttgggtctccacatatatttgtttctttgatgattgattgagagagacagggtcttgctctgtcacccaggctggagtggagtggcacaaacacagttcactgcagcctccatctccagggctcaagtgatcctcccaactcagcctcccgagtagctgggattataggtatgcacaccagcatgcctagcttttttttttttttttaatttttcatagagactggatctcactttgttgcccaggttggttttgaattcttggcttcaaacgatcctccctcttcagcctcccaaagtgctgggattacaggcacaagccactgtgcctagcctctatcattgttttaaatttaccaatatttgtctttttgaagaaatacaacag

SEQ ID NO: 269019 - DNA, 426 bp, Homo sapiens
ctttctgaaggttggtacatttgcccagggctctgcttgggtttggagcctttactaacgtgtgtcaataatgcgggtccaccttccataccatcttgcaaccaattatcagaaagagaaggcctgagcagggggatgtgcattttgctttctttcggcgtagcatctcatgctagatttttatctgggggcctttgaagagccagccggcacagaagcatggtggcaacgctgtgcctggaaaactcatcagtgtcactctggtttattttcctctcctctttgagctctttcccatggtgtggggctctcagtgacaactggcaagcggcggggcggttgctcgttgtcattctggtaggcgctggtttccggagggctccgagtgctttgtgagtattcgcatttgtttctgagatgctggga

SEQ ID NO: 269020 - DNA, 680 bp, Homo sapiens
aatataaaaacttagctaggtatgttggcgggcacctgtaatcccagctactcaggaggctgaggcgggagaatcgcttgaacctgggaggtagagaggttccagtgagccaagattatgccactgcactccagcctgggcaacaagagtgaaactccgtctcaaaaaaaaaaaaagaaacagggccatctgtctttgaggcagagggatttacacccttgctaagacactaaagttttttgctaaggcactaaactttttaggcccttcccccagtattacacatgagagatgataatcaagcctttgttgcctatgagtgaaaaggaatctaaaaatcactgaaataaataataatagtttttcaaggaatttcaaagaagttttttcacatgggaaaggactgctaggctggatgtggtggctcacacctgtaatcccggcaatttgggaggctgcagcaggaggaatgcttgaacccaggagttggagaccagtgtgggcaacatagtgagaccctgtctctaccaaaaaaaaaaaaaaattagccaggtgtggtggtgtgcacctgtggtcccaagctacttaagaggcttaagtaggaagattttttgatcccaggaggtcgaggttgcagtgagccatgactgcgccaccgcactccacccttggtgacagag

SEQ ID NO: 269021 - DNA, 325 bp, Homo sapiens
cactcataaatgccttctctttctataagcaaatttacatagaaagtccacttttaagtagatggcttggtgagcataaaatcagagcatcacattaagctgaatgactttaatggctggtgaagataattgatgcaagagaagctggatctataaactttatagagatgcaacctctgttcaggtcacagaccagtatccgttggtattcattgtaccagtgcattagaatttatgaaccactgtggcaggataatttattgaggaattcatttgtattttgcggctgctgataattaataaattgctttgttttgttcttact

SEQ ID NO: 269022 - DNA, 418 bp, Homo sapiens
gcccaggcaactactgatttgctctctgacacacacacacacagacacatacacacacaccttcctctttcatatacttttatataaatggggtcatacaaactgtgtgatcatactttcacttccctcgggtaaatacctagaagtggaggctggctgcggtgggtcacgcctgtaatcctagcactttgggaggccgaggtgggtggattgcctgagctcaggtgttcgagaccagcctgagcaacacggtgaaaccctatctctactaaaatacaaaaaatgagctgggtatggctatagtcccagctacttaggaggctgaagcaggagaattgcttgaacccaggaggcagaggttgcagtgagccaagattgttccactgcaccccaacctgggcaacagagcaagactgct

SEQ ID NO: 269023 - DNA, 307 bp, Homo sapiens
gaggaacacacccactggggcttcaggagctgtaaacattcacccccagacactgctctgggatcagagcctcacagcctgaccatctgtatgctcccctggaggtctgagcagcgggcactggagaagagagccacatcgcactccctgcaaggggaacaagggaattttttctgtttcaaaaacatgtagctaagttgactcttggacttcagcattcttcagcataccccaggtaccaatctactgaattgtccaaactctggaatatgtatgtacattaaactctccaagaggtcttttcata

SEQ ID NO: 269024 - DNA, 143 bp, Homo sapiens
gaacacaaataactttggctttaaaactactaaatcccatgtaggttcaatgcattgcacaacgtatccatttattttatcacatttgtaagtgaacatcatatgatgctatctccaaatagaaatgtttataaagctcatga

SEQ ID NO: 269025 - DNA, 1151 bp, Homo sapiens
aagtactggttctagtactagctttcataagaaagtactggttctagtactagctttcagtactctcttgtgaaattttcaatattcagtcatttcaacctcaaaaatggcaacataattatgtttcaacataattgttgttttaaacaaacaattttgtttcaacataattctcctgaactgggtggaaggctatcaagaaaaagcttagcttcttcttcaggtaactgcaagagacagggttctctagagaaacagaacaaatatacaaagagattcattataaggaattggaagtccaaaatctccagagcctctgtacttgtacaagtctgaaggccgacaggcaggagaattctctctttttggggcaaaggtcagtgttttgttctatccaggctttcagatgattggttgaggctcactcacattagaagggcaatctgtcttactgccattagaatgcaacctgttttacttagcttactgatttcaatgttaatctatttcaagagcaccctcacagaaacacccagaataatgtttgatgaaatatctgggcaccctgtgacccagtcaagttgacacatgacactaaccatcacagtacgcttagggtcttgtcactcggagtgtggcctgtgaaccagcagcatttttatcttctgggagcttgggcacgatctcaggccccacctcctgcttattgattcagaatctgcattttaacaagatccccaggtgatctggatgcaccgtaacatctgagaagcactcaaactatgtgccgcaaacaaacgccaaattcttaggcatttgtgtggcttggagcacatagttggttctttctactgtctaattcattacattttttcagcacattcctgtctataaaatgtttttttgtatgcaccccaatatatgcacatttataagcatatgcatgaacccacgaacaatgattaggtacattatgaagcatacgtaaggacagaaatttcaaaccaagcttgagggtgaaataaatattatttgaaaacctgttgctaattgtgatgacttcatactatcattagttactatctcaatgcataatgtacagtgacgggtgaagtttatcattaataaaaaaaatctggattttaaccatt

SEQ ID NO: 269026 - DNA, 527 bp, Homo sapiens
aagtactggttctagtactagctttcataagaaagtactggttctagtactagctttcagtactctcttgtgaaattttcaatattcagtcatttcaacctcaaaaatggcaacataattatgtttcaacataattgttgttttaaacaaacaattttgtttcaacataattctcctgaactgggtggaaggctatcaagaaaaagcttagcttcttcttcaggtaactgcaagagacagggttctctagagaaacagaacaaatatacaaagagattcattataaggaattggaagtccaaaatctccagagcctctgtacttgtacaagtctgaaggccgacaggcaggagaattctctctttttggggcaaaggtcagtgttttgttctatccaggctttcagatgattggttgaggctcactcacattagaagggcaatctgtcttactgccattagaatgcaacctgttttacttagcttactgatttcaatgttaatctaagtaaaaaaagttggcggccg

SEQ ID NO: 269027 - DNA, 1063 bp, Homo sapiens
gctgggcagcctggttcggggcaggttgtgaggccacagcaatgctgtcccaagtgtgtggaacctcacactccctctggactccgggccccaccaaagtcctgccagcacaacgggaccatgtaccaacacggagagatcttcagtgcccatgagctgttcccctcccgcctgcccaaccagtgtgtcctctgcagctgcacagagggccagatctactgcggcctcacaacctgccccgaaccaggctgcccagcacccctcccgctgccagactcctgctgccaggcctgcaaagctggctccagctggggcctgctatgctcagtcagtgactttcatccttcctgccatttgcagagacatcctcaggatccatgttccagtgatgctgggagaaagagaggcccgggcaccccagcccccactggcctcagcgcccctctgagcttcatccctcgccacttcagacccaagggagcaggcagcacaactgtcaagatcgtcctgaaggagaaacataagaaagcctgtgtgcatggcgggaagacgtactcccacggggaggtgtggcacccggccttccgtgccttcggccccttgccctgcatcctatgcacctgtgaggatggccgccaggactgccagcgtgtgacctgtcccaccgagtacccctgccgtcaccccgagaaagtggctgggaagtgctgcaagatttgcccagaggacaaagcagaccctggccacagtgagatcagttctaccaggtgtcccaaggcaccgggccgggtcctcgtccacacatcggtatccccaagcccagacaacctgcgtcgctttgccctggaacacgaggcctcggacttggtggagatctacctctggaagctggtaaaaggtcactggaacgtcttcctagcccagaccctggagctgaaggtcacggccagtccagacaaagtgaccaagacataacaaagacctaacagttgcagatatgagctgtataattgttgttattatatattaataaataagaagttgcattaccctcaaaaaaaaa

SEQ ID NO: 269028 - DNA, 352 bp, Homo sapiens
caggtgacaggagcaggatcagcaaagagaacagacagaagaaaacaggcttcactgtggaggcgacaggacgtcagggaaggggaatgacagggaatcttccacttgactcagatcaagaaagtcaggaagcaagacttccagaaagaggcacagcacttccgactgctcgctggcccccacgaaggtcactggaacgtcttcctagcccagaccctggagctgaaggtcacggccagtccagacaaagtgaccaagacataacaaagacctaacagttgcagatatgagctgtataattgttgttattatatattaataaataagaagttgcattaccctcaaaaaaaaa

SEQ ID NO: 269029 - DNA, 1211 bp, Homo sapiens
gctgggcagcctggttcggggcaggttgtgaggccacagcaatgctgtcccaagtgtgtggaacctcacactccctctggactccgggccccaccaaagtcctgccagcacaacgggaccatgtaccaacacggagagatcttcagtgcccatgagctgttcccctcccgcctgcccaaccagtgtgtcctctgcagctgcacagagggccagatctactgcggcctcacaacctgccccgaaccaggctgcccagcacccctcccgctgccagactcctgctgccaggcctgcaaagctggctccagctggggcctgctatgctcagtcagtgactttcatccttcctgccatttgcagagacatcctcaggatccatgttccagtgatgctgggagaaagagaggcccgggcaccccagcccccactggcctcagcgcccctctgagcttcatccctcgccacttcagacccaagggagcaggcagcacaactgtcaagatcgtcctgaaggagaaacataagaaagcctgtgtgcatggcgggaagacgtactcccacggggaggtgtggcacccggccttccgtgccttcggccccttgccctgcatcctatgcacctgtgaggatggccgccaggactgccagcgtgtgacctgtcccaccgagtacccctgccgtcaccccgagaaagtggctgggaagtgctgcaagatttgcccagaggacaaagcagaccctggccacagtgagatcagttctaccaggtgtcccaaggcaccgggccgggtcctcgtccacacatcggtatccccaagcccagacaacctgcgtcgctttgccctggaacacgaggcctcggacttggtggagatctacctctggaagctggtaaaagatgaggaaactgaggctcagagaggtgaagtacctggcccaaggccacacagccagaatcttccacttgactcagatcaagaaagtcaggaagcaagacttccagaaagaggcacagcacttccgactgctcgctggcccccacgaaggtcactggaacgtcttcctagcccagaccctggagctgaaggtcacggccagtccagacaaagtgaccaagacataacaaagacctaacagttgcagatatgagctgtataattgttgttattatatattaataaataagaagttgcattaccctcaaaaaaaaa

SEQ ID NO: 269030 - DNA, 1156 bp, Homo sapiens
gctgggcagcctggttcggggcaggttgtgaggccacagcaatgctgtcccaagtgtgtggaacctcacactccctctggactccgggccccaccaaagtcctgccagcacaacgggaccatgtaccaacacggagagatcttcagtgcccatgagctgttcccctcccgcctgcccaaccagtgtgtcctctgcagctgcacagagggccagatctactgcggcctcacaacctgccccgaaccaggctgcccagcacccctcccgctgccagactcctgctgccaggcctgcaaagctggctccagctggggcctgctatgctcagtcagtgactttcatccttcctgccatttgcagagacatcctcaggatccatgttccagtgatgctgggagaaagagaggcccgggcaccccagcccccactggcctcagcgcccctctgagcttcatccctcgccacttcagacccaagggagcaggcagcacaactgtcaagatcgtcctgaaggagaaacataagaaagcctgtgtgcatggcgggaagacgtactcccacggggaggtgtggcacccggccttccgtgccttcggccccttgccctgcatcctatgcacctgtgaggatggccgccaggactgccagcgtgtgacctgtcccaccgagtacccctgccgtcaccccgagaaagtggctgggaagtgctgcaagatttgcccagaggacaaagcagaccctggccacagtgagatcagttctaccaggtgtcccaaggcaccgggccgggtcctcgtccacacatcggtatccccaagcccagacaacctgcgtcgctttgccctggaacacgaggcctcggacttggtggagatctacctctggaagctggtaaaaggaatcttccacttgactcagatcaagaaagtcaggaagcaagacttccagaaagaggcacagcacttccgactgctcgctggcccccacgaaggtcactggaacgtcttcctagcccagaccctggagctgaaggtcacggccagtccagacaaagtgaccaagacataacaaagacctaacagttgcagatatgagctgtataattgttgttattatatattaataaataagaagttgcattaccctcaaaaaaaaa

SEQ ID NO: 269031 - DNA, 472 bp, Homo sapiens
tgaagaggtacagccaacgtttattgaacacttcatgagcttcttgtctctccagaggacaaagcagaccctggccacagtgagatcagttctaccaggtgtcccaaggcaccgggccgggtcctcgtccacacatcggtatccccaagcccagacaacctgcgtcgctttgccctggaacacgaggcctcggacttggtggagatctacctctggaagctggtaaaaggtgagtgctggcccactcccagtggggtgtacctctggccagtcccccttcccgtgccccagaccccacaggggccttagggacgttttgctgatcaggtgcctctggctgccccgccaggtttaagagcccctgattccaagatgcaggaagatagtgagcctgactggttctctacaattctgataagctcctcctgctaatgccaaggctcgatagtgctccctctcctggggggaaggc

SEQ ID NO: 269032 - DNA, 362 bp, Homo sapiens
ctctaatatgttctaagagccctgcttaacacagaaaaacaaaaggaaccagcataccataaatagactacagtgtttatttttgatttggggtgtctcctcctactagaaatctaaattctgagaggaaagatttttgcctgttttgttccccaggactgagaacagtgcctggcccaggaagggtggatatttgatcagttgaaaccagtttaactagctacattaaagaaaaataaatgcagtgaggcacagaggctcatgcctgttatctcagcaatttgagaggctgaggtgggagtatcgcttgagccaaggagttcaagacctgcctgggcaacaaagcaagaccctgtctctgc

SEQ ID NO: 269033 - DNA, 530 bp, Homo sapiens
tgaaagatgaagtcaagtgcgaagacactggtggcacggagagtgttgctggcactcaggctggagagatgatgaatgtttggacaaaagtggggtcagagaggagagagcagcacagccagattcaagagttgctgctgggatagagtctacaggactctatctttggtgacatatttaagatgatgagagagggaaagcaaagaattgagaatgaagtggatgtttctgattttggaggccagaccccttgtgccattcatcaagataaagtaaatagagaggagctgcttttggtgagagaagataatgaatttagtcatagaaatgttcagtttgagatgtctgaaggaaatctctgaaggtaagttcaatggggagaattctggtcaagatggctctctgtaaggttcatcttttgagtaccccctcccatacacacacaaacataaaaaagcaacaattcgatataaaaagaaaatgtaagagctacatttttgtttataaatgatataaatacccaagaggac

SEQ ID NO: 269034 - DNA, 927 bp, Homo sapiens
agccttactccttagctgtcttgcttttgaaaaaatatagaaactaaaagggtttttgagctttggaaagaggtcagtcactagccagtcaggtttctgcaatgtattctgtgctgtcaatccattgtgaacactgattattcaaagaaataatagttatttagatttaaaatattttaagtttaaaataataggttattaagatagctatttattaatggcctgatttattaaaattagtcatttaaaatattatcaaataataaagcagtgtctgaattatttctcctaaatgttcatttgaggcagtaaggtgattgcctgcttttcctctcttcactctttttataggtattgatgatattgatggaatttggaacatgagccattaaatacctagaaaaaaattccatagggttttaggtaattgaagcaaaattaatattgctacttttagtaggagactatcttattttgcctttgtgaggcagaacctttttcctgtttgttggagccactggccaccaggtggtgctttttgcattctttacagaataacacgacggtttttcctctggttactgtcagacattgtcatatttagctaattaaaatttccaatgacaaatataatgtaggaagttagaactaatatgaaacttcttgctgtggtagatagctgttcaaagaaggaagagtttgttactgaatttgttggtatccactgagctttagtgttgtctgcttccctctctctgattcttaggctatggtggcagatagtttcttgcagttgccagcaactaggttctcagattattcgaggtcctcagtatatagaacctttggacttgtccacctcagtgctaaacattttatcttttattgggtgcttatttcaatgccttatctgaaatttatctgaaa

SEQ ID NO: 269035 - DNA, 301 bp, Homo sapiens
gctctacccatatgaagcaattcgtagttctgtagccgagacttgatatctcaggccctgcacctttctttacaggcctttccatcttcctagagtgcctaacctggcctgtgtgcttgtaagcttctgctcattcttcaatacccagcagagacttcctcctccatgcagccttccaagacccacctgagtacaggtatcagacctttgggccactcctagtcctactgctgcatttatctcactggatttcagtcaagtgtgtagacagctaatttgtgcatgcctggtctgtgagctc

SEQ ID NO: 269036 - DNA, 774 bp, Homo sapiens
tggaaaattgttagggaaaatctaatcaacttaatttaaatggcataaatgatgattagagctaattatcgtcagaatttgggctggtgtttctaaaatgaaactacagagtttctttaaatggggtcatcaggttaggattcagttgtcaagaaagatcaatgatttgtgtgaactcacagtcttctcagcttacctggtagccaggggtaatatttcacacttcggagtgaattgcatttatattctttttcttcatagctcactcaggatttttagaagatgaaagaattgaatcttatggcaacaaagcccatttcttcacagtggaactataaatgcagacttaagtaattaatttgtaaacctttgtatctttttaaaacatcatcctatccccaaggcctaacataagttttgttgactaggtgaaatgattgaatcagtgaatgattgaataaatgaaaaatataggatgcagttcaggaaagaaaaccacaagagtgcggcggctatttaaaaaatgccatccctgtaattactgttattgccaattcctgtttgtgtttatgaagcctgaggaattttggagggcactaccagtaatttgtatctcattactcaagctaagggagggataaatgaatcctaaatgtaaaccttttaccgtcaaaatggaaaacctgtgtttttccagtgatgtgtcagcagtagctattaatattaaaatcacgaacctacacacatacctttaagaaatggactccaggcttg

SEQ ID NO: 269037 - DNA, 711 bp, Homo sapiens
atatgctgtttcttatagctaaaaccattgtagcttttgtgagatattatagtaggttctggaacatagaagatacatgctcaagttagctaccatatgccctagagactgccagggtcagaaaaccatgcatgccaccaacacatctgtccctcagcatttttatatagacaaaatcaagttaaaatgaataccatggatggtcttaagtgggcacagaaatccttagccttcttcagtattatggagggggctatctaacctttttttactttcttgaaggtagagctgattggggtgggcagtcagtggtgctagtatataagctttctgctttttttctttctctttttatttttattactattattattattatttttttggctgcttctctgagtcactgccaaagattgtaggacatcttattattaagatggggtgattactgaaattagctctaacttcacatggctctgcaagaattgggtgaagcgtgaaccctggagatagtcatctctttctcaagagtcagctacatgcacactggtctgaatgtgatccttcactttgtccaagggtaggaagcattagtccctttgtaatgatgattatttttgtttgagggtgggtgggtaattacttttggtgttcatattcttttattgaaaatgaaaatatattttattttctgataatgccttaaaaaaa

SEQ ID NO: 269038 - DNA, 520 bp, Homo sapiens
gtttttaatcctttgtaatttttggtgataaccctgggattctctttccctgaatgggtggcaggagaattagtccaggttttttcatgtgattgtatgcacaggaccaacattctatatagtgtgtgaaaggatttatttttcctgaactttctttttttagatggagtctggctctgtcgccaggctggagtgcagtggcgcaatctcggctcactgcaagctctgcctcccgggtttacgccattctcctgcctcagcctcccaagtagctgggactatgggtgcccgccaccacgcccagctaattttttgtatttttagtagagacggggtttcaccgtgttagccaggatggtcttgatctgaccttgtgatctacccacctcagcctcctaaagtgctaggattacaggcatgagccaccacacctggccaatttttcctgaactttcataggaaactcctttaagggtacaactgttaaatcaccttgaaaggcatatttaacaaatcacct

SEQ ID NO: 269039 - DNA, 490 bp, Homo sapiens
atccctttgctctcaaactccccgatgcaatgccttctgatttcaacagaaaagcaagaggctccaggcaccccattcagggactgccaccaaagtacccgcaaatccttcatgaaaggggagacattgacacattctttttttattctctggcatggagatgaacatacttggtatcatccactctcctgcactgctggctcagtcaccagccttttcaggcacggggtctgcaacctctctcatggtttgtgccatctcttgagtcaggagccacagacctcatccaggacttacagcctgacagattaaggagtccgataaatccacacattctgagttgttatgctggcaaaagccatgcccatccacaagccagactcttggcctccactggaagctttggaactttattcccatcaaacactgacctaatccttgcactgagactgctatttacattaaaattggtcacataatgaaaaaaaaa

SEQ ID NO: 269040 - DNA, 368 bp, Homo sapiens
gctctccacatacagggctggggagcaggggctgatcttggatcttaggttctttttgctgtagaaaatagtggttgactggtcccttaattttattttctaaaatcaactttcttgaggtatacatgtaatcccagcacttcaggacccagggcgggcggatcacctgaggtcaggagttcgagaccagcctgaccaatatgatgaaaccctgtctctcctaaaaatacaaaaattagcccggtgtggtgcatgcgcctgtagtcccagctgagacaggagaatctctagaaccgggaggcgtaggttgcagtgagctgagatcgcaccattgcacctgggcaataagagcgaaactccatctcaaa

SEQ ID NO: 269041 - DNA, 411 bp, Homo sapiens
catttctgtaatcacaattttaacatggaaaaaggaaaacacacacacattcagggagtgggagcattaatgaatttcctgccattttctttctctgaaaacctccgtttaggataatttcatattagtcctgtaaagcagaatgtttttcgagtgcattggtttctcacactccaaaattgaggtttcagtggcagtatgccgcttctacccccagctttcaaacatttctccagcttctcataatcacagcttggttagtctgaatccaaacatttgaatctaatagaggggaattctagtcactaacaggtttacaatatagtaattttccccaaagttatccatgataaatgggcttcccaaatagcctctagcaatcacagcataacgcattagatggaacactcc

SEQ ID NO: 269042 - DNA, 479 bp, Homo sapiens
tgattaaagcattcctttcacagtacattcagaggagcagcaatcagataatttactacaagctgtaaaattaaattataatcactagaaccagttattgttaacatagttcattctgtgtaatctctctcaacaacctcctcctacacatataacacagtggggaatggtgttgatgagcatgtaatcctatcagagttgctgactaccatagaccaccaatgatccatcttgtatttggtttaggaataaaagcatgttgtttgaacaagaattttagggttttggccaggcgcagtggctaacacctataaccccagcactttgggaggccgaggtgggcaaatcacttatgaaggtgtctgaaattgcttgaaggtgagaactgctcaaaccaggaaggtggaagttgcagtgagccgagatcgcgccgctgcactacagcctgggtgatgatggagcgagacgctgtctccaaa

SEQ ID NO: 269043 - DNA, 334 bp, Homo sapiens
ggctctgggcagaagaccctagatgttaaagtagggtaacctgaggttctctcattggtctccttttaggtccttcttcattttcatgtcaccagattatcccctccctctgaaccgaggtgcctgtgttttagaaatgccagggaaatgcttactggggctggcaaacaggagcatttgtgggctctggagcacccagtgctggctgcctggcactgccagtccactaagtggccttgagcaagtggcctggcctccaggagccccaatttcctcacctgtaaagtacagataatccttccccactccccgtgggattgtgatgagcaccaaa

SEQ ID NO: 269044 - DNA, 302 bp, Homo sapiens
tcccactagcttcccaccttccgtatgggcacctcctgagcatctgatgagcatcacagagtagagaatgtcaatgtgttttctcccacatcctgctctgaatttataaggccaatttatcctcgcctcacacatgagctgcccttgtcttcagggatgtgatccttgtttctctcacatcctgtcacagtgttgacaacctagttttgacttcactccatgaatccttttggaaatattatggtcaacaagttgtcgtccttgaataacacacaataaaaataacaaatattcagaaggtt

SEQ ID NO: 269045 - DNA, 970 bp, Homo sapiens
ttttctctaggattcagaatttcccatagatatgcaaccaaatccaaacctgaatgtttctaaagaaagtctttctccagcaaaatttgactacaagctgaaaaacatttttagactccatgaacttccagtgagctgtgtctccatgcaaccccacaaagacatcctagtctcctgtggcgaggaccgactctggaaggtgttgggccttccaaaatgcaatgtgcttctcacgggatttggccacactgactggctttcagactgctgcttccatcccagtgaaagatgcagatgtactttgtatggacatacagattctgtgaacagcattgagttttttcctttctccaatactcttctcacaagctctgcagacaagaccctgtctatatgggatgcaagaacaggtatatgtgagcagtcactttatggtcacatgcattctatcaatgatgccatttttgatcccaggggtcacatgatagcatcctgtgatgcctgtggggttacaaagctgtgggactttcggaagctgttaccaattgtgtccatcgatataggtccaagtcctggcaatgaggtgaattttgattcatcaggtcgagttttagctcaggcaagtggcaatggtgttatccatttgctagatcttaaatctggggagattcacaaattgatgggccacgaaaacgaggcacacacggttgtgttttctcacgacggggagattctcttttctggaggctctgacggcacagttcgaacgtggtcttgaccgtcagcacatcccgctgcagagggcattccctttaaggcttgaaaatgcctcctgtagtcccaaaccagcaaagaactggttaaatgtgccagcaggtaacatttacagtctgctttaaaacatgctttggacatatattttagtgctcatactgttactaataaaaaaataactttatgctcaaaaaaa

SEQ ID NO: 269046 - DNA, 631 bp, Homo sapiens
ttttctctaggattcagaatttcccatagatatgcaaccaaatccaaacctgaatgtttctaaagaaagtctttctccagcaaaatttgactacaagctgaaaaacatttttagactccatgaacttccagtgagctggtaggatttttgatgttttattaatacttttgagattttattttcatgtcaaaattttaatgctcttacagccattcatggttgaaatggtttgcttttagcctttcaaaattgctactcatagcatgaaagaatctgcttatagtagctgtaagaatcttaaaagtaattggtttaagcacttggtggcagtacagactaagtgcactattgtgtattttattgtagaggttggagtaaaaatgcacaaatcatttttagagaagtttctaggattactttaaagataggatctcagcaactatacatttcatttgtttattttactcaccaattttaccaatgtactttttccctgttaataagttctttttacttgtttgttatgaggactgtaattttgtgaactataattacataggtttaaagatgagacttagtattactcaacatttattgaaataaattgttttatgaatctgcgtatttatat

SEQ ID NO: 269047 - DNA, 1029 bp, Homo sapiens
ttttctctaggattcagaatttcccatagatatgcaaccaaatccaaacctgaatgtttctaaagaaagtctttctccagcaaaatttgactacaagctgaaaaacatttttagactccatgaacttccagtgagctgtgtctccatgcaaccccacaaagacatcctagtctcctgtggcgaggaccgactctggaaggtgttgggccttccaaaatgcaatgtgcttctcacgggatttggccacactgactggctttcagactgctgcttccatcccagtgaaagatgcagatgtactttgtatggacatacagattctgtgaacagcattgagttttttcctttctccaatactcttctcacaagctctgcagacaagaccctgtctatatgggatgcaagaacaggtatatgtgagcagtcactttatggtcacatgcattctatcaatgatgccatttttgatcccaggcacaaaggccttcatgaaatgatggtgccatgctctgggacttcccagcctccagaactggtcacatgatagcatcctgtgatgcctgtggggttacaaagctgtgggactttcggaagctgttaccaattgtgtccatcgatataggtccaagtcctggcaatgaggtgaattttgattcatcaggtcgagttttagctcaggcaagtggcaatggtgttatccatttgctagatcttaaatctggggagattcacaaattgatgggccacgaaaacgaggcacacacggttgtgttttctcacgacggggagattctcttttctggaggctctgacggcacagttcgaacgtggtcttgaccgtcagcacatcccgctgcagagggcattccctttaaggcttgaaaatgcctcctgtagtcccaaaccagcaaagaactggttaaatgtgccagcaggtaacatttacagtctgctttaaaacatgctttggacatatattttagtgctcatactgttactaataaaaaaataactttatgctcaaaaaaa

SEQ ID NO: 269048 - DNA, 578 bp, Homo sapiens
tactttatagagatgtttgaatctggctgttttggtcagatatttttcttctttgcatacgtagctgattttccatgaatatcaggaaaaggcatagaattctgatcaagatttctctctctttgattaccttagtcccaggtggtatcagagccagggaagtactcaactgtggaaaatatagagggcagttcttttggggactaatatggtatatgatcggagactaaagttcaaaaggcaatatgctgagtcatttagacactgaagatagaagaacagataccatttgtaatttagtttttagatgtactggacttatacattgttgagaaaatgaatagaatttagcaaagccagaaaagataatctatactaaatttgaaggtgggaaacaatcacatcttactcttggttcaaagctgcttctctttcagggcagttagaaaccttttacccttttatttgaagacaacttccaaaaacatattcatctggatatttcattaaatacagaacagagagagtaccacatgtacagtactaactagtgttgccacgttttggaattccacgaa

SEQ ID NO: 269049 - DNA, 300 bp, Homo sapiens
ttctttgttgataattatgttgagtgatagatttcacttcagatatttttttggctgggtacaatggtttacgcctgtaatcccagccaagacaggaagatctcttgagcacaggggttggagaccagcctgggcaacatagctagacctcatctctacaaaaaaaacaaaaaatttagccgggcatggtggtgcacctgtagtctcagctcaggagactgaggtgggaggttgagaccccagtgagctgtgacattccactgtactctagcctaggtgacagagtgaaatcctgtctca

SEQ ID NO: 269050 - DNA, 255 bp, Homo sapiens
taatattgtataacataataatagtaatcataggtgatgtcatttattgagtacttagtatgtgctgagtgctctgctaagtctggtttagacattatctcagttaaccttcctggtgtcccccaagatggatattgttacctccattttctcctaggaagaaacggacttgggggggatgattaggtatttgctagatgtctattctgtaccatccctgcactaggccctgtgaatacagagataaataaagac

SEQ ID NO: 269051 - DNA, 644 bp, Homo sapiens
tgaaactctagggggtggagagtgggcaaagcttgcccttagcacactcccattttcctcttgccttgaccaagagactggttggcatttgctgactctaagcttttcctaatctctgtgaaaaaaaaaaaaacagaaaaaacaaaaacaaaaaaacccacaaaaaacaacttgggacccaaatttactatattaaaggggaagttaagcttggggactgagtcaccaatattgtcttccttttgttcttaaacccatagttataatttcacaatcccatatcagactcatttcctctactccctctttttatgtgtttatcttatataaaatgtagatttactaagcaagagacaatgagaaattgacttttttttttcctctactccttttcacatgtaaaatgtagatttatgggtggggtgggacgggacgggggtgggcttagcagagcctcacaaaaatgtaaccatctgcctcactgcctatcctccctccctttgttccccctcctgcctgtcttccccctttaaagactgaagttcccaaaaccccctttagaaaagagatcacagatgctcctgcgatttgtgtttgtttttccagggtgtgtccttggataaataaactgtgaatcgattgag

SEQ ID NO: 269052 - DNA, 624 bp, Homo sapiens
gtagcatgtatcagtactacattccacttcattgtttaataataataataataatagttcattgtatgggaataccacgtttgtgactggcttctctcacttagcatagtgtttttaagatccatccatattgtagcattatcagtatacattccacttcattgtttgaataataataatacttcattgtgtgggtataccacatttatccatttatcagttgatggatatttgagctgtttccactttttagcaattatgaataatgcctcatctaacactttgattatactttttattatcatatgtgtggcttcaggtttttgtttggttggttggttttgcctgtgtctgtttttatcacttgattataaacttctggaaaaagatcattattttcactctgaaatttccatacagcaagtattcaataagtgtttggcagatggatgaatgggcagatattataggttcttaccatgttgattatgaagaagtacaaagtattcagaataaaaacactaagcacagtaataaaccaagggtgtgccagtaaatttacccagtaaattataactttcaaaaactgacggttcttaaataaactttaatctctgcactatt

SEQ ID NO: 269053 - DNA, 482 bp, Homo sapiens
ctctgtgcctgatgtaagatgctaattctcatattatctcctctgcaataagcttctaattatatccagataatcaagaccaatgcctgtgcacgctttctctaactttctctaaaaggactgcatataaagacttcaaataactgaaatgctgcattagaatttatatgtttttgccttaaatacttttccaaaataaaagtggtagccagtagcaacctcagtgacaattaatgtacatgatgctctccagccgagtacaaaaatatgaatacttaacaatgaacaaaaatggtagaagtgtgggtggatttacaattatgaacaatcaccgcactgtttgttgctctgcaatctgggagctttgcagccagggataatcatgtgatcataaagagcagcccccaaaaagcctgggcacaggtgaaagaaactctttatatgatgtataagaatgaaactgaagcaaccaaaatgacaaa

SEQ ID NO: 269054 - DNA, 360 bp, Homo sapiens
ttaggggtggctgctggtctacgagaaaacagtctcggagctaaaaatgaatgggaataatccacatgagagttgctccttctgcctgggcctgggaatgagaagacctgtggagctgagctactgcttacccacaacctgcatatacataaatcagaagccagcactggttgttcttgatgaagatgaccttaggcacagtgaccctgaaggccacatgttaaagacagtggagccacaggatggaaggaagctggttccctgaatcatcacgtggcagagagcggaccactaatcaggatcatgtgtttcagatttcacttgaccaataaatcaatttcaattttgttacactgctaa

SEQ ID NO: 269055 - DNA, 381 bp, Homo sapiens
tcccttaggagggggccggctgcattaggggtggctgctggtttgtaacaatgggaataatccacatgagagttgctccttctgcctgggcctgggaatgagaagacctgtggagctgagctactgcttacccacaacctgcatatacataaatcagaagccagcactggttgttgtgagtcgcttagattttgggcttgatgaagatgaccttaggcacagtgaccctgaaggccacatgttaaagacagtggagccacaggatggaaggaagctggttccctgaatcatcacgtggcagagagcggaccactaatcaggatcatgtgtttcagatttcacttgaccaataaatcaatttcaattttgttacactgctaa

SEQ ID NO: 269056 - DNA, 383 bp, Homo sapiens
gtgtaaataggctgaaagcatggagaatctgcaagaaagaagagaaaaggaacagctcatgtgagcctgtggctgtggattttccagaggaggaggaccggatgtccatcccacacacagaatgacaaatggagcacaggatgcagtgtctgagaagctttctacgtcctactggctctcacaggcttgctctcttggtttgtttttactggttggcactgccagggtgtttaatatattcaccaaaaatagactgaaataacagcacactgtaaaggctttcttggttttctgtgccactgatccccaggtatcttctgtgtgttatgcggtatatcgttaataatgttttagtttctggaataaatcatcttctaattaaa

SEQ ID NO: 269057 - DNA, 1977 bp, Homo sapiens
ttattattgtgaacttagtgacaagtgtggcactattacccatttccttgtctgcccccaaccctggggtcttgggcagagaacaggagttcttgccattttctcccagctcccaccttgtgctggcttgcgggtgctgaggtcatatttgctgggtgagagggtgcaggccagatatgagccaggcctggcagagagggttttggtcagcagtgatacctgcagtgttctctgcagttggtttgggctggccctgctcctgagaactcctgggttgtcccttcaggcaaccagggaaggctccttggagcagcagcatctccccttaccactcgccgacaccagcttccgcctgacccagagaaggagtttggggacagccacagcacgtccagggctcccaaggcagctggcagagccaatgaggagaccccaacacccatccgacggctgcagctctccctgacgtgtgtcacccgcagccctggtcccagccgctgtgcttctcagggcctgcctgcccagcccgggtggatatggtgcccaggcgggccccggggacacaatgagggccattctcagagccaggcagagcgtgtggggcagtcctgtcagtcctatgtgcaacagctgggatattgtttagggagtgctggcatcaggctggggctctcctcctctggccctgccctttgggatgagcaagcccccaaaggccttcctgggttcctctggtgcacgtgccctggagttacccttctgaaggaggtagacttgtcctcctgtcctgggtgcctggggtgcaggggtgtgaattgggctatgtcaagatatgctgggcagtactgtgaggtgggggcagaggggagaaggtgtcccaggaggagccttcctggaggggatgatagtccagcatgttctgaagtgggagtagggtgcggcaggagtagggtaccagagaatgagtgagtcaggcagcagcctccactgcgccttggacacaggtggctgacagtgtccacctggactggctttgcaccccttctgaggtcacagttgtgtcccttgaaaacttgggcaggagcacctgactggcccagcttgggtcatgccctaggcccagcagtgcgggaggccaggaaagtaggcttggggaggctggcctctcctccagtttgaagcatggcaggggttccgggggaggctgctggggggcctgcgagcatgtccagagcaggaatgcttggggtggtgtgtgctttgctcgtctgggcttatctggccgtggggaagctggttgtgcggatgacgttcactgagctgtgcacgcatcatccatggagtctgcggtgtgagtccttttgccgctccagggtcacagcctgcctccctgctccagccccctggctgaggcccttcctctgccccatgctcttctcagacaggaatcctgtggaatgtcatctctttggggaggccgtctctgaccctgtatgcaaaggccttctcccacattatttttggcaccccactttcttccccgtgaaagcaaattgtttggtgtctttctgtcccactacagtataggcccggttcagacagaggccttgtccactaggcctgcgctatctctgcggagcccagccaaagcaggggccaggcgaatcttttgttaaaagaacaatgcgcgctgggcacagtggctcacgcctgtaatcccagcactttgggagtccgaagctggaggatcacttgagcccaagagtttgagaccaccctgggcaacataaggagaacccatctctacacaaaattagctgggcgtggtggtgtatgcctgtagtcctagctacttgggaggctaaggtgggaggtggctgaggtgggaggatcacttgagcctgggaggttgttgcagtgagagccatgatcgcgctactgggcaatagagcagaacccagtctcaaaaaaaaaaaa

SEQ ID NO: 269058 - DNA, 182 bp, Homo sapiens
ttgtcagtaattttttgaacctaataatagttttattaatgttaatttcccttccatcaactatcaatgacacccatgtgccagcagggtaaagttcatagctattaattgatcttcacattttcttgtcccaatgcctgttttaactttataactctacttacaggaaattttgtcacagt

SEQ ID NO: 269059 - DNA, 413 bp, Homo sapiens
tgacagcaccaccatgcaaaagactagattgagtactggtacagcaaatatgactactaagcatttctatccaatattcaatagataggtttattcaaactttatggctttcatgactccctactcatattctgtatgaataataaaaaataataatttccaacccagtttttcatgagagatagtgtggcatgatgtaaaaagccctggctttggagtaagaaataactggattcaacttatggtcctcttaggctgtgtgacttgaggctaggtatatgagctctctaaacttcagtttactcagctaaaaagtaggttataacataaagggctttgtagggattaagtgagcaaaatcatttatattacattctttttatttatgttgtaactgctagagaaggagattt

SEQ ID NO: 269060 - DNA, 502 bp, Homo sapiens
aggggagcttttccttcatttatgtttatttaggcatttcatcttaaaatgccctaatttggggttgtattaggaaagtttaagaatattacagtgattgtaggagtgcttttagccaagcagactgtatggagaatcgagggcagctggtttcatttaaatttaccaatctaagaaggagtggaaaacacatgtggtttcgctttctcatcagctgagccaaacacctgatgcttcagaggaagacggcagtagttcaattctcccttgcccattactcagagactgcaatgcagagaagttattatgattctcctgagtgtcataagtagactgtggtaaagatggtctgattttagccttcagggtaaatgctttggcacagaactttgaaactgctgtccgcagctacgtgaggggacagagcgttgataacatttgattgccacttgaattctaagaagttcttttaaaacagaatcaacaataaaaggttttattg

SEQ ID NO: 269061 - DNA, 354 bp, Homo sapiens
ttttcttgctatttccaccacactgcagcaacttcctctactggtcttgaacccctcagagttgtccatgacagttgtattcaccttctaaacccttgctaatgttcttttgagctcctcccatgaatcacaaatgttcttaatggcaaatagaatggcaaatagaattactaaaatttagtagtactttttaacttgccttaacataatgcatgatattttaaattattaaacaggacaaggtaatgcttccattttgaatacaaataaatattataaatcaaaatgctttgctggaaaaatccatgatgcattgatgcaataaaaatgaaatgtcttgttaactttcagaga

SEQ ID NO: 269062 - DNA, 876 bp, Homo sapiens
ctgttagccgagtctgagcatctcggaggatgcggcgcggcgatcggctgcagtgacgcgcgcaaggtgaacacgggggctgcggcgcgcaggctcatccagtgaggactggaaggtgggggctttaggcccaggcatcggagtagaccatggcctccagcccatggggctgtgtatgtggccttctgctgttgctgctgccactcctggggactggccctgccctggggaggggctttcccaggccacttgaaaactccgaaatccctatgatccctggagcccaccccaagggctctgtgggctcagagccccaggcctttgacgtgttcccggagaaccccagagctgacagtcacaggaactctgatgtccgccacgcccctgctgaagagatgcctgagaagcctgtagcctctccccttggcccagccctgtacgggcccaaagcagcacaaggagctcagagagaacgactcccagtaactgatgacctccagatggctcaaggaccaagctcccacggctggacaggacctctggactcacaagagcttctggagcaagaagcagtggctccccacccagtgggccaccctcatctcactttcatccccacaactcccagacgtcaactcagggtagccacagttcctccctccctgcagcatgaaggccaagagggacagtggccacctagagatgagggtctgaaggccaaaactaagagcagggtcccacccacttctccctcagaccaccagggcccaccccacacccttgtttcccactcaggtactgtcaagaggccagtgctggaaggacagggtgggtttgaggaacacttgcaggaggcagctcaaggtccccacttca

SEQ ID NO: 269063 - DNA, 828 bp, Homo sapiens
ccaggaggtgacggtgctcagtttccctcctgtcccaggaccttgtgctgtgcgcgactgtactcgtgtgtgctttgtgccctggtcattcggatgtcaccatggcctccagcccatggggctgtgtatgtggccttctgctgttgctgctgccactcctggggactggccctgccctggggaggggctttcccaggccacttgaaaactccgaaatccctatgatccctggagcccaccccaagggctctgtgggctcagagccccaggcctttgacgtgttcccggagaaccccagagctgacagtcacaggaactctgatgtccgccacgcccctgctgaagagatgcctgagaagcctgtagcctctccccttggcccagccctgtacgggcccaaagcagcacaaggagctcagagagaacgactcccagtaactgatgacctccagatggctcaaggaccaagctcccacggctggacaggacctctggactcacaagagcttctggagcaagaagcagtggctccccacccagtgggccaccctcatctcactttcatccccacaactcccagacgtcaactcagggtagccacagttcctccctccctgcagcatgaaggccaagagggacagtggccacctagagatgagggtctgaaggccaaaactaagagcagggtcccacccacttctccctcagaccaccagggcccaccccacacccttgtttcccactcaggtactgtcaagaggccagtgctggaaggacagggtgggtttgaggaacacttgcaggaggcagctcaaggtccccacttca

SEQ ID NO: 269064 - DNA, 364 bp, Homo sapiens
atggggcatgtaaatatgggaatttacaatttaatttaagggacaaagtatattttttcataacacagtcatcacattttaaaaaataaggctaggcgcagtggctcacatgcctgtaatcccagcactttggaaggctgagacgggcggatcatgaggtcaggtgttcgaaaccagcctggccaatatggcaaaactctgtctctactaaaagtacaaaaactagctgggtgcggtggcaggcacctgtagtcccagctactcaggaggctgaggcaggagaattgcttgaacccgggaggcggaggttgcagtgagctgagattgtgccactgcactccagcctgggtgacagagtaggctc

SEQ ID NO: 269065 - DNA, 312 bp, Homo sapiens
gcactttattattcccctacagatagcagtcttatgaccaaaaaccctaaaatgtgtcagattccccttgtgataaggtcttgctcagattcagattgtcagaccctgacagcaatgaattcaatcctgtcttgattgtctgactatatactagggctcctttccaatttctttttctcttgatggctctgttcctgaagacttgagatgacagtaacaaaattttaattagacatataatggagaaaataatacaagtactttttttcagggttgtaagataagcattactaatctatatattatcttaaa

SEQ ID NO: 269066 - DNA, 407 bp, Homo sapiens
atggataatacatatatgtatatgggtacatatgtatgtgtatatctatcaaaaattggatatgtatcacatataaatatgtgtatgtatatgtaaaatcacaaaatagataagtgggatatgcctggaatgatatacaaaaaaactggtaacactagtcacgtgcctctaggggacaaggtattaggaaaaatgcttgctgtgtgtgccttttgtaccttttgaattttataccatgtgaaagttttgcctgtctaaaaagttaaactacaaattgatcataaaaaagaacaatgtgacacatacataaaaactctgaagcagaaaataaaaagagcttagagggaaatagaaaaggcatgtagctagccaagggtgggcgagattccaagctcctggtaaccagg

SEQ ID NO: 269067 - DNA, 1084 bp, Homo sapiens
gtattataataattattagatatgatacctggcacaaagtagtaattcaggtgtttttttgtgtgcattagtgaacaagtaaaaacaagtatatttcttgaatataatgtatagaagtaattttattctttttatctttaagttagaagaaaaattaaagtatattccaaaggttagataaatgcagtgtgtatgggaatcccttgagtttttcagtaaaattctatttgggtggctgtcaagtccagtctgcatagtcttgacatgtcttggataagatccttatactatcacttttcctgtcatggacactacaaattatattgaatcagaaatctaatttaatccattcttattcaattggaagcagtaattgctttcaatttaatgggattggattcagtattagaaattttgatgttccttcaaacttaatacagtatggttatatatatttccatttatttgtgtgtgttcctgtgccctcgcagagagatgatcttggagtattacttgtattcacttgagttatttgcaacggttggtaaagaggcatattgtaagggtgggaatgagagtggcattctctttgttttttttcttttctacccatggaataatgaagagagaaataataagggccttcaaaatgggatttccatccactcagaaataaggaaaggaaatttagagtctctggagaagatctggaatgctatttactcttgagggtagacagcatccagccctactaaagatgaaaaaaggagagcctggggatgaaattaaatccatcaaaaaattcactgttggtcaggcctggtggctcacgcctgtaatcccaggctgaggtgggcggatcacttgaggttaggagttccagaagagcctgaccaacatggtgaaacctcgtccctactgaaaatacaaaaaaaattaatcggctatggtggtgggcgcctgtaatcccagctactcgggaggctgaggcagaagaattgctttgacctggaaggtggaggctgcagtgagccaagatcatgccactacactccagcctgggcaatagagtgagactccatct

SEQ ID NO: 269068 - DNA, 617 bp, Homo sapiens
aaaaaaaaaaaaaaaaaattatcaaagaagaaaaaggtcaggcaaaagttggaaagataatttaactaactctataaagcactgtagtcctggatttatatgatcagtgggtatccgagagtctttttctagttatattttatttcatattctagagacagttatatggaggcatatacttgggaattctcaaaagtcttttatcctctagaatatcagatgttttcagtagaattgacaagcgttggtctataattttcaagtcaatacttttcttatgtttttgaagatggtaacaacaaatttgaagttatctaatgtaggttctataaagcaattacagaataaagagcttggcttgagatagttaatctagtatcctggtccagtctttcaaagtacctgccactgatcagagcatatctggaagactatggtcagtttggaggtttatattttaagagggaagttgacatattaaagcaaggtccaggccgggtgcagtggctcacacttgtaatctcagcactttgggaggccgaggtgggtggatcacttgaggccaggagtttgaaaccaacctggccaacatggtgaaaccccgtctctacccaaaa

SEQ ID NO: 269069 - DNA, 221 bp, Homo sapiens
cagtgagccaagatcacaccactgcactccaacctgggcaacaagagcaaaactctatctcaaaaaaaataaaaaatagccaagcatggcgacacgcttctatagtcccagttactcaggagtctgaggcaggaggatcgcgtgagcctaggaggtcaaggctacagtgagtcaagatcaaagcactccagcctaggcaacaaagcaagaccctgtctcaa

SEQ ID NO: 269070 - DNA, 546 bp, Homo sapiens
cacgagggtagcttccaacttaaagtatacctgccacaagaacgaaagtaataatctcacctccctttttgtgtagagactgaattctaattagttgtgttaatagtatttgctgaatacctttcaattcctaaaactggggtcaaagtagtcaacattgcagttaattatttttgaagaggatatgaactattctgttatttaagatattttaacctaaataccattatgagttaaaatgcataccatgatataacaatttacctattaactgttgacaatcttgcagccaattaagttttttaaagaaccagtgttcttaggtatgtttgttgagccttctactttttttccctttgatgtggggaatagcatcaagcagcaagaaaagagtgttgatcgatttctctctctttctctctctctctctgtatccttgccgtttaaaatatgcactttccaactagtatttggccgttagggagttagtatctttgtaaagattaagtcagcagaggaaggtgggcaaataatatttttgataaa

SEQ ID NO: 269071 - DNA, 406 bp, Homo sapiens
ctactgcacgtggcctcatctgggcattcttaattttgttacttatcatttctgggttagtttttgaaggaggtaataggtttttcacaaaatttgataataaataacgtgtacctgaggcataatagacttacctttaattttattttgccatttgataattggcaaagtttacaaagaaatatactgacaaggtttttagttcaccacatctagatttgattgtgtctatgagctccaaataaatatataggaagcataatttcctgtcaatgcattcagtttttttaaagttttatagtcatgttgaatgtgaagtgatccgggacaattgaggtcatcattgttgaagaattttgaacatttgattcatgctctcatttagttctttaactgattatgtgca

SEQ ID NO: 269072 - DNA, 848 bp, Homo sapiens
taatgatatgcatacatatagttgcctacaatgactgtttttctagttatttctataatattaaaatgatttttttgctgaaattccagaaatctaaaaacattgaaaaataatgataatgagaaaaacaattcttacttgttagggtatatgttatttagtaatgaagcatttagattttggattctctcatttcagttggaaatagtattggtgtaagtgagtgttgccatgggaacctccacatagatataaaaggcaatactgtctaagtggaggaggaggggcgatgtactgaaataccactggcctaaatgatctattttatgtatgtgtgttggtgtgggggtgagagctaggatgaaaaggggagagaaagtactacagaaagtaaatgttagcagtcaaagcaatttactcacacttttggattcttttagatagaagtgttttaaagctcgaaatgtgattcttaattattggtatcatcatgcacacactggggagtctttgcatatcttatttttaatgtacagtggaatatgtttaacttacttggttttagataaaatttaatttagtgaaatttgagagttaggatttcagtctttgaaatggctttatacatgttattaaagatgttatatttaattctttttaaatatctgaaatttagaaaaactgattaggacacagttaatgtggctttcaaagaaaagctggcattttggctttatagtatttttaatactagatttttagtaattttctataaatatataggcaaggaaacaatgacttactgtatctgcatgtgtaatattttatggttaaaaaaataaagaatg

SEQ ID NO: 269073 - DNA, 469 bp, Homo sapiens
caaactttgtctgtgtcaaaagaatacaactgaagatgccattatgaaacaaaccatggtgagaattttgactagtttacagaaaagatgcatgatgaaaaactcaatgaacttagaaaaggactaaactttctacagcattaatcatcgaatacaaataaaataagtgatgctgctgtgaaatgcagttacataataagtgaaaaaattgtccgtgcttcaaaatcttttacagatggtgagtttataaaagactgtctattgagtgcagcggaaatcatgtgtcctgaacagaaagaagcatttgcagacataagcctaaccagaaaaactgttgctcagagagtaaaagatatggctgagaatttacaggataagttgtgagaaaaagtgagatcatttgtgacattttctattgcagttgatgagtgcacatatgtaaataatacaagtcagttaattatgttta

SEQ ID NO: 269074 - DNA, 1371 bp, Homo sapiens
gtatgacaaggcggtacagtcttataaggatgtcttctcctacttgccaactgacaataaggtgatgctggagctggcgcagctctacctgctccaggggcacctggacctgtgtgagcagcactgtgccatcctcctgcagactgagcagaaccatgagaccgcttctgtgttgatggctgacctgatgtttagaaaacagaaacatgaagcggccatcaatctttaccaccaagtcttggagaaagcgccagacaattttttggtattgcataaattaatcgatctgctaagaagaagtggaaaacttgaagacattcctgccttctttgaattggccaagaaggtgtctagccgggtgcctttggaaccagggttcaattactgcagaggtatctactgctggcacatagggcagcccaacgaagccttaaagttcctgaacaaggcacgcaaggacagcacttggggccagagcgccatctaccacatggtgcagatctgtctgaatccagacaacgaggttgtgggcggagaggcttttgagaaccagggagctgagagcaactacatggagaagaaggagttggagcagcagggtgtgagcaccgccgagaaactgctgcgtgagttttacccacattcagactccagccagacccagctgcggctgctgcagggcctctgccggctggccaccagggagaaggctaacatggaggctgcgctgggcagcttcatccagatagcgcaggctgagaaggacagcgtccctgccctgctggccttggcacaagcctacgtgttcctgaagcagatccccaaggcgcgtatgcagttgaagcgcctggccaagaccccctgggtgctgagtgaggctgaggacctggagaagagctggctcctgctggctgacatttactgccagggcagcaagttcgacctcgccttagaactgctgcggcgctgtgtgcaatacaacaagtcctgctacaaggcctatgagtacatgggcttcatcatggagaaggagcagtcctacaaggatgcagtcaccaactacaaactggcctggaagtacagtcatcacgccaaccctgccattggcttcaaacttgctttcaactacctgaaggacaagaaatttgtggaggccatcgaaatctgcaacgatgtcctcagggagcaccccgactaccccaagatcagggaggaaattttggaaaaggcccgaaagtccctgaggccctagctggggtcaaggggcctggaccagtagaagccatcaacctactgaagttgtgtggagggatggaaagtgggtcagtggagaagggattcagaaaatgacacattcttccccaaactata

SEQ ID NO: 269075 - DNA, 1237 bp, Homo sapiens
gtatgacaaggcggtacagtcttataaggatgtcttctcctacttgccaactgacaataaggtgatgctggagctggcgcagctctacctgctccaggggcacctggacctgtgtgagcagcactgtgccatcctcctgcagactgagcagaaccatgagaccgcttctgtgttgatggctgacctgatgtttagaaaacagaaacatgaagcggccatcaatctttaccaccaagtcttggagaaagcgccagacaattttttggtattgcataaattaatcgatctgctaagaagaagtggaaaacttgaagacattcctgccttctttgaattggccaagaaggtgtctagccgggtgcctttggaaccagggttcaattactgcagaggtatctactgctggcacatagggcagcccaacgaagccttaaagttcctgaacaaggcacgcaaggacagcacttggggccagagcgccatctaccacatggtgcagatctgtctgaatccagacaacgaggttgtgggcggagaggcttttgagaaccagggagctgagagcaactacatggagaagaaggagttggagcagcagggtgtgagcaccgccgagaaactgctgcaaggacagcgtccctgccctgctggccttggcacaagcctacgtgttcctgaagcagatccccaaggcgcgtatgcagttgaagcgcctggccaagaccccctgggtgctgagtgaggctgaggacctggagaagagctggctcctgctggctgacatttactgccagggcagcaagttcgacctcgccttagaactgctgcggcgctgtgtgcaatacaacaagtcctgctacaaggcctatgagtacatgggcttcatcatggagaaggagcagtcctacaaggatgcagtcaccaactacaaactggcctggaagtacagtcatcacgccaaccctgccattggcttcaaacttgctttcaactacctgaaggacaagaaatttgtggaggccatcgaaatctgcaacgatgtcctcagggagcaccccgactaccccaagatcagggaggaaattttggaaaaggcccgaaagtccctgaggccctagctggggtcaaggggcctggaccagtagaagccatcaacctactgaagttgtgtggagggatggaaagtgggtcagtggagaagggattcagaaaatgacacattcttccccaaactata

SEQ ID NO: 269076 - DNA, 1458 bp, Homo sapiens
gtatgacaaggcggtacagtcttataaggatgtcttctcctacttgccaactgacaataaggtgatgctggagctggcgcagctctacctgctccaggggcacctggacctgtgtgagcagcactgtgccatcctcctgcagactgagcagaaccatgagaccgcttctgtgttgatggctgacctgatgtttagaaaacagaaacatgaagcggccatcaatctttaccaccaagtcttggagaaagcgccagacaattttttggtattgcataaattaatcgatctgctaagaagaagtggaaaacttgaagacattcctgccttctttgaattggccaagaaggtgtctagccgggtgcctttggaaccagggttcaattactgcagaggtatctactgctggcacatagggcagcccaacgaagccttaaagttcctgaacaaggcacgcaaggacagcacttggggccagagcgccatctaccacatggtgcagatctgtctgaatccagacaacgaggttgtgggcggagaggcttttgagaaccagggagctgagagcaactacatggagaagaaggagttggagcagcagggtgtgagcaccgccgagaaactgctgcgtgagttttacccacattcagactccagccagacccagctgcggctgctgcagggcctctgccggctggccaccagggagaaggctaacatggaggctgcgctgggcagcttcatccagatagcgcaggctgagaaggacagcgtccctgccctgctggccttggcacaagcctacgtgttcctgaagcagatccccaaggcgcgtatgcagttgaagcgcctggccaagaccccctgggtgctgagtgaggctgaggacctggagaagagctggctcctgctggctgacatttactgccagggcagcaagttcgacctcgccttagaactgctgcggcgctgtgtgcaatacaacaagtcctgctacaaggcctatgagtacatgggcttcatcatggagaaggagcagtcctacaaggatgcagtcaccaactacaaactggcctggaagtacagtcatcacgccaaccctgccattggcttcaaacttgctttcaactacctgaaggacaagaaatttgtggaggccatcgaaatctgcaacgatgtaagccagcagccttggtggggagggcctggtgtagtggtggggaaacctgcatgatactgcacacccattctctctctgttccaggtcctcagggagcaccccgactaccccaagatcagggaggaaattttggaaaaggcccgaaagtccctgaggccctagctggggtcaaggggcctggaccagtagaagccatcaacctactgaagttgtgtggagggatggaaagtgggtcagtggagaagggattcagaaaatgacacattcttccccaaactata

SEQ ID NO: 269077 - DNA, 724 bp, Homo sapiens
  misc_feature (723)..(724): n is a, c, g, or t
caatggattcccatgagggcagattttcatgaactgggaaatgtttagtgtggaattcattgagccaaactcaggaaaccctagaccgatgagaaaaatggaagtcagaaacaaagaggaaagtgtggaggccacatcccacacagcgtcattccgttgcactcccgtttgactctgggtatgaaagccatcaaatcaggagttagccaggatggacccaatttgcacaccaaatgtttttggcgtgttggagtactcccacctcaacatcgggccattgtatggactgcttgtgcaattaaaggaatgtgcgaatggtgttggaagcaccttctgtgtcatctgtctttctcagtgttgcaggtgaagttgtaggacccaatccatctctcaccagattgtatcctcaccccatctgactgtattgcttcttacactgtatgtcccaggatgaaatcctaagatgatggaggagggtcccctcatgatgtaaagtacctgctcagataggaatctaatttgaggtaaattccaggggtccagtggacaggattgctagtgtctctctctgagatggctgcaggacaataaaatacaggaagatgtctgttttttggtggggtgtgttcctcttctttctagaagagtggcttttcttttgcagggggagttgatttggatgccggcaggtcttggcatgcctcccaattcacagtggattcnn

SEQ ID NO: 269078 - DNA, 660 bp, Homo sapiens
catgtctactaaaaatacaaaaattagctgggcatggtggcacatgcctgtaatcccagctactcaggaggctgaggcatgaggatcactggatcctggggggcagaggttgcagtaacccaacattgtgccattgcactccagcctgggcaacagtgcaaaaccctgtctcataaataagtaaataaataaataaataaataaagactgttgtctatgagccaagacggggaccctcaccagacatcaaatctactagtgctttgctcttggactcacagcctccagaacagaattgaatttctgtttttgataactacccagttcataatattttgctatagtaaccctaacaaactaagattagatagatagatagatagatagatagatagatagattaaggtcattcatattaaagcttcgcaagtgacacaaaggatggcatcttaagcaatcacttaaagctggtccattgagtatgtaaacctatacactgatgttatctttcatctctcctcattgatcttagtcctcggtatcatctctaatttcctcgcctacgtacctccttctgccctatactcccctcttctacatctctttttcattcctacatatcctccttcatccgctttagcttttacatcctcctttcct

SEQ ID NO: 269079 - DNA, 612 bp, Homo sapiens
taatagtatatcaagggctagcttttaaaatttttagtgttttcctgactattcttgcatgtctgtttttctgttgaactttagtatcagcttttctgtctcaatgaaaaagcttgcaggtgtttttattggggttatgttaaatttataaattaacatggaagactgactttttaatgctgttgttttgtgctgagatttctgtccaagaacaaagaatatctttccatttgttcagatctacttttgtgtctttcaggaatgttttaaagttttcttcgtatttaactcctcgataaattctccttttttttttcagctcaataatatgccttgtagatctttcttttgtatgtctgcatgattttctacagtgtggatgtaccataatttatttaacctggctgatattggtggacattaaagttatttaaaatttttcactattgtaaacagttctggaataagtaaatatccttgtagaagtctagttacttccttatgataaatttatcaaaggagaattgcctcatcaaaggtcttttgacacataaaagtttctgaaacatattgttaacagctttccatattaataaaatgtatacctccact

SEQ ID NO: 269080 - DNA, 702 bp, Homo sapiens
  misc_feature (51)..(51): n is a, c, g, or t
  misc_feature (174)..(174): n is a, c, g, or t
ttttggagatgagctttccgctcttgttgcacaggcttgagggcaatggcngatctcggctcacaacaatctcggcatcctgggtcaagcgaatctcctgcatcagctactcagaagactgagtcaggagtatcactgagccccaggagttcaaagctgcagtaggctatgatnttgaacgcactgcagcctgggcgacaggaagaccttgccttaaaaataaaaacaggccgagtgcgatggctgttacatgcctgtaatcccaacactttgggaggctgaggtgggaggattgcttgagtccaggagaatcacttgaacccaggaggcggaggttgcagtgagccgagatcgcgtcattgcacttcactcagtctgggcaacaagagtgaaactgcatctcaaaaaaaaaaaaagatgttagtataagcaccctggagagttgagacccctagactaatacttgaatcttatttagaatcttagaatgggggagccagaaagagccttctaagtctaatctggtatttctcatgttctgaagattattgtttcaggggatattattagggtattctcagaaaagggttccttagccaaatgtgtctggaaactgtagcatgtgctatatcgtctcttggaaattcactgtgcttgttagaacattaaaggctctgagaagtccagaatttaaaaaaaaaa

SEQ ID NO: 269081 - DNA, 595 bp, Homo sapiens
gatctgtttatagctataggtcaggagatacttgtgggtaattgggatgagacatgaagagaattgactcatcaaaggagttatagggctttcaggcaaagcttaacagacttatcaagtaaggaagaaggagagtctgcctctgctgacggtaacaggaatggctccaaatgttgttagcgctcctatacagcctcatccaattctcagcttcccagccactcctaaccatgccctcactctcacatacgacacctcacgaggttgtgaattcaactgttgtaaattggcagcccataggatcaaactgtgaaattgtttttatcggagccctgtgcctgcaagacatgagagattctcttaacaaggtcacagaaagtgcttgagcttccttatgtgccttgagcaaagaatgtaggaattggatctgaccatcatctttccttatgctacccagaagcagccacgcccctgtatcttccttgatttcctcccgtcatttatgctttcacaaaacagtgtccactcagtttcccaaaaccttgctgcaatgagcaccgcattctaagtaaccacaggcagtatttcaattcat

SEQ ID NO: 269082 - DNA, 726 bp, Homo sapiens
ctgcaatcccagcttcttgggaagctgaggcagcagaattgcttgagccacggaggcggaggttgcagtgagtcaagatcgcgccactgcactccagcctgggtggcagggcaagactgtctcaaaaaataaaaattaaaattaaaaaaatctgttaccattaatactcaatagtcctatttttcctattgtaaaatccaccatgctaattgcagaaggtatattagaagtcaactggagccattcattattaacaatcacttaagaggcagtttcattcaagcaagcttttataaatcccaactgtattctcccccagaaaggcagcagtcaacatccttaaacatactaacttaataatcaagtgatctaagtcttcacacaagtcaatgaagaaaacatttaacaaaatagaatcaaagaaagcattttacctcaccactaaagagcacctttgaaactagtggctatgctttcagagaagggctgttaaaatagctaggcttacaattatataaaacacatttctctagctctttaacaaggtgtcacaagcgattattacatgcctttgtgaaattaagagctggtatgtatggctaaggaaccctgttgatccctctgtaaatgtcatgcagtccacataaaggaaccaagagacagaaatgtcaagacaagttcacgtgccatcctaatgaggaactaagactagaaaccaagtcttca

SEQ ID NO: 269083 - DNA, 407 bp, Homo sapiens
gatgggcgggtggaacgggcatggtgtcctcagcagaggagcagagctgcgtgcccaagagctcaggcggggactccagcaatgcggggccagggcttggcctactgcctccttgctgcatgacctgccgtgagtcacgtcttctctgcctcagtttccccttccgtcaaacaggggccagaaaaggtttgccctctcaggtctgccctctcaggtctgcagtgcggtggcagtgacctcctctcagggccatcccatgtgtgatgtggaaggagcctatggctgaagggactctgtgtgcactataggcaccccagatttcacattggttatgagcgagtttccaaagtgacttcatctaacaaaatccatacactatgacacgtgtccaacaagtagatgttgtg

SEQ ID NO: 269084 - DNA, 265 bp, Homo sapiens
cttaggccgtaacagtaaaattgaaaccagaagaaaaaagttacaagagctgacaaaaaggctgagttaccatctcaggccttctcaacagagaaaaggcagaaacagattatagaattattatgaaaagcagaagttcaattaattttattgagagcaaatcaatactttaaagaagctttgttttaacatacaggactattataaatgatttccttttttaaaaagtccattaaaacatttttttttaaatttttttctaaga

SEQ ID NO: 269085 - DNA, 437 bp, Homo sapiens
caacaaacatgccagttaataagaccctggtccctgtcctgtggcacttaggagggtcagatgaaatgctactttttgcatgaagcccttcctgacctcattaactggaagtaatacctttctgtcctgatgcccacagatgtactgttacatttaaaagtttttccatgttttttttttctattcaagatagattataaactccttgaggcagggacagctaattgcatggaagtaatcaattatagtagaatatcagatgtgttaggcattaaattgcttgttttagtcagatcactaaaattttgatttcactaataatcagttggggtgtaagtgcaaagctaagatttgaattctaattgtgacactaaagccttaactattatatgcattaactattatatgcttaactattatatgcattgttccatagt

SEQ ID NO: 269086 - DNA, 482 bp, Homo sapiens
ctacaacccactgaatcagaacattctagattggtactggaatctaaacattgctccaaattaataacttataaccaaatacataatttgtcaattgcaaaaagttatcccattgcttgttttcgggattgggaatatagttgaagggttctacaagtaaaaagattcatgaggtaatcagactatatacagctagaaataaaacaatttaaagggaaataaagtcttgaaactcaagttttatgtgttaattacatgaatatagatttctcccccctccccatagaaatcaagttccattggctgtattaggcaaaatactataacattattttgaaatattgaacacgttgaaggcttttaaaacaaaaggtgactttggtgataaagatgtcaacagaaatagtaatgaatcaaactttgcgttaaattgggccagaagtgctccataaaaagaaaatctctataacattaaaaaaaaa

SEQ ID NO: 269087 - DNA, 343 bp, Homo sapiens
ctgaggccagcttcactggacagatgcacagtattgtcatttatcatactgttaaaaagttcccaggattattttctagtagatttctaaatggatccaaattatcaaatgttctgtgcccttgtggaatttttagaggaagccaagtagaaattttaataataggaaattgataatatggggtaggcctgtttcccttgttttgcctttttctagaaactgggcctggggacagtctgcctgaaggaataatgtcttaaacttgtcttctttggaacgtttgtaaattctccctgcagcgcaggatcattaggaggcatacaatactgctttacgtgtcctg

SEQ ID NO: 269088 - DNA, 126 bp, Homo sapiens
tcactggtgtttagttgggggaaggaggttaaaaaaagcaaggaacagatttgtgcaaacaaactttacaattttgaagtaattagtgagctgtgcaggtgtctattaaaacaaactgacaataaa

SEQ ID NO: 269089 - DNA, 380 bp, Homo sapiens
acgtataatatatcttatacagtagttggtataaaattttaaattttaccatgaattattttcttactatggttttatctcacttaaacctcacaaccctatgaagtaagagctacgtttacaaatgagaaaactaaggctaagaacgttaggaaatgaggccaggcgcggcggctcacccctgtaatcccaacaccttgggaggccaaatcacctgaggtcaggagttcaagaccagcctggctaacatggcaaaaccctgtctatactaaaaatacaaaaattaaccaggtttgctggcatgcgtctgtaatccaggctactcgggagcgggaggcacgagagtggcttgaacccggcaggcagacgttgcagtgagc

SEQ ID NO: 269090 - DNA, 561 bp, Homo sapiens
aaagtagcatttttattctagagatgcctccattgaccacaatgtttttatgtcatcaatttttctgtttgtattgtttcgttagattatgtcttttatgtttcttcggtgtcaggaaattgtttacttttaaatgcaattctgaattttgcgagctaaaaaaccagctggaaacaaatagagtgaacaatatggattatgtatttttttagtttttagtttttggtcatgtggcttggttctgatttcaaggagtggctgaaaaattaagcaggaaagcaattttcaaggaagtttaaaaaaacattttgtggtagaatagttggaatatgtctttaatatcaaaatgtaacaaactggaagatacataataaataccccttgttttgtttttaaaataataatttcattaatttatatagaaacaaacatccttttattcctttttattgaatatatacaatttaagtaacattactcatggcaaaacgctaatggccaaaccagaaccctaaatccagcagcaaaaaaaattccacctatgcacgtgctttttccttt

SEQ ID NO: 269091 - DNA, 367 bp, Homo sapiens
ggccgcaagaggggccatagctctctcaggctccttataaacagccattcctgccaccaggaacgtggcacagggtagggaagcccaagaggagatgctggaacacaggcagggctgtctggggtgccacatcccagggacaagaatagctggcattaactgctctaactagaactcctcccagtgtgagcactgctgcggctgcaagaagccctttgaggggctgcgaccccaaggcgcaggctcaaggatgcaaggctgattgcaacaccccggtaaggaagcagggcctggctgactttcttttagctgagtgaatgcagctctgaagcctgacctgggctgggacagcgaggcggccaccaga

SEQ ID NO: 269092 - DNA, 292 bp, Homo sapiens
ccaagggcccaaggacctgcccatctggcttgctgctgacaccactggcacctatgcacacctcctggaggcctaaggactggcccacccagaactaccactggtgcccacttatgccatctgggagcctgtggaccagcatgcctggcctcctgctgccaccactggttcctgaggactagcccacctggcattcctgtccccagcaaaacctcaccaaagtctttactaacaaccacaacccaagccactgaggaactcacagatatcattgatgctgataacagccaaa

SEQ ID NO: 269093 - DNA, 698 bp, Homo sapiens
accccggggggggcggggcctcgcggccctgcagcctcgtcaggctcagtcccctcccgataaacccctaaatagggactttcccggggggtgaccctggcttttttggcgaaaacccccagtttaaggaggccttccccctggcttcacgttgtggagtcgaaaggaaccttgaagcggagaatgagctcgtgacgtggacccgaggaaaaaacctgccaaccaggatttaatagaattcagctctttcaggctttggagggaaggcgatttgaacgggatttcaatgaaaaaccctgtcccttcggctttttttttttcctctctcgggtctcgtcacgtgatggtcctactttatttttaaaaattaaatggcgcatattccccagcatcctaaatctagtgcaacctagtggcaagtggagaaaaaaataactgccaacctggcttcctacgaggtcccccggagttctcgcaaagttgcgacccagttggcaaaaatacagtgtgtgcaaagactcaactggacattgccaccaagaatcaagagatttttggggactttagcaagaaaacgttatttttaaaagccctgctccaaagctggttacaaatgaatactgcgtttccagtgacaggttgggcgagcagaaaggaaatcttacggttagtttcaaacactttgtgttttaggtggc

SEQ ID NO: 269094 - DNA, 346 bp, Homo sapiens
  misc_feature (15)..(15): n is a, c, g, or t
ctaagaagaacaccnggcttccgccaactagctctagtgaaggagaaataaaatcctttacagacaagcaaatgctgagagattttgtcaccaccaggcctgccttataagagctcctgaaggaggcactaaacatggaaaggaacaaccagtaccagccactgcaaaaacatgccaaattgtaaagaccgtcgatgctaggaagaaactgcatcaactaacgatgatgtacttttaaagaatgattaattaactaattcttagtcttataataattacttttctgatattttttacaacatagagaagtcaaaataaatagtaccttattggtcttatattccaa

SEQ ID NO: 269095 - DNA, 241 bp, Homo sapiens
tagaggtctgtgtagctggaggatgctgggaaatgtgaggagaagatgtttcctccttaaaattggaatctttctgatcacctgaattctcctgctagccacaaatcccactcactcttatcttatccttgtccttctgtcatcgtttacctgcctaatccctgaaggtagtgagccgagatcgcgccattacacttcagcctgggcaacaagagcaaaaaaatccgtcaaaaaaaaaaaa

SEQ ID NO: 269096 - DNA, 446 bp, Homo sapiens
catgctgcccaggggccaacgaagaagtacccggaggcacagactgaaaaccaggaaattgggtgggactcagaagccttggtcgacccagaacgccgtgaccacaggatgaaccacttcagggtctacagtgacatcactctgtacaaagctaaaatgtggagcttgggagaagatgatcgccacaagtagcatctcagctgtggagtcaggccctggatttaatgccctaaatatccactgcctagaagactaaacattattttaaccccccgtcccccatccataattcatggataatggcaaaaattaggaagcataaaaaatatgcggaagaaggaaataaaaattgcccattatctcaccatatggaagtgactaatgttagcattttaaaccatttgtttttaaaattaataataaattgcatatatttattgtgtaca

SEQ ID NO: 269097 - DNA, 654 bp, Homo sapiens
aaagaaaccaatacacagcgcccacattgggtcagacactcatgttgctttcaaatatatggaaaaattctagttacaattgagtacctactgtgtaccaggtttttaaaaaattaacctcctttaaaatatgcaaaatataatgatcctgcctctaaagagataaaaactgagactcataaaaggtcaagtgacttgcccaagcccacacagatagtaaatctgtggatccaaaatccatatttgaaaccaaatctgacttcatagtctaagtttatcttctacactcagtaacctcttttaccataaacatttggagcagcattttagggtctcatgtcctggactggtactttagttaaaacgttataaagccgggtgtgatggctcacgcctgtaatcccagcactttgggaggccgaggtggacggatcacctgaggttgggagttcgagaccagcctgaccaacatggagaaaccccatctctactaaaaatacaaaattagctgcgcatggtgctgcatgcctataatcccagctactcgggaggctgaggcaggagaattggttgaacctgggaggtggaggttgcagtgaaccgagatcgtgccattgcactccagcctgggcaacaagagcaaaactccgtcaa

SEQ ID NO: 269098 - DNA, 412 bp, Homo sapiens
gcttgtgaatttatcagtcattagcatatagcagaaatgatggctgtgtgaccttttaggctaagtcatataaaatgatgcagcttttgcctgattaattggaacacttatacttgtagccctgagctgccatgtaagaagtccaactgagacagtcatgctgtagagaccaaatgtagaaactctggtcaacagctcagttgagctcttagctgacaagcagtatcgactataagccatttgagtgagccttcttggacatccagtaaagttttcagatgactgcagcccaagctgacatctaactacaactgcaagaaagacccaaagagaacattttccagctgagcccttcccaaattcctgactcaaaaattgtgagaaaaataaaatgattgttttaagccactaa

SEQ ID NO: 269099 - DNA, 471 bp, Homo sapiens
cattttaaaacacttgtctccaataatcttccaccaaaagctctaagtaatatgtacaatgtaagatgtgaaaagtacgtaaagaattccttttgtttagagactaggtctgagcccagtgcaacataaggtagtatgtgctgtgttaaaaataagattaaaagaaagtaaaactggccaggcgcagtggctcacgcctgtaatcccagcactttgggaggccaaggtgggtggatcacctgaggtcaggagtttgagaccagcctagccaacatgatgaaaccccgtctctactaaaaatacaaaaaaaaattagccgtgcgtggtggcgggcacctgtaatctcagctaactgggagggtgaggcagaagaatcgcttgaacctgggaggcggaggttgcagtgagctgagattgcaccacttccctccagcctgggcaacagaccgagattctgtctcaaaaaaaaaa

SEQ ID NO: 269100 - DNA, 369 bp, Homo sapiens
gctatagacaagatgcaaatgaataggctctgtttcaataaaactttgtttagaaaagcagacaacagggcagatctggctcagaaactgtaatatgctgatactcactctagaggaatcatttggcaggtgacctgaatggtaaaacacaagacagtggctttcacactggcaaaggctctgctgtggaaccctacccctgtgcattcttatccatgaatattcatgaatggagcatttggttaggaaattggttttatgaaactataggcttgcttatcaattacaagaatactctcattattgggttgtttttttttttttgtcttgctcccattctggcactagaagttttaaactactattgtc

SEQ ID NO: 269101 - DNA, 470 bp, Homo sapiens
agaaaagtaacttgtatttcctaaaaggaggcatattttaggagctatatgaactgggcatttttaattttttttcattactttggggaatatttcaggatctcatcagcattcattacatgggaggacaggggattaaaaaaacaaaattgattgttaatgaatttttttttttttgtatttaggaagaagaaagactgtaacttaaaaagaattgtggcaaattatatatgttaaatattctggtctagaaatgtggtatagaggttccctagaagcttctgttccactgtggttaaaatgttttctcaccttcttgaactgtctttgtaggtgatgtcatgaaatgtcccaagagaacgttgtataaaacttcctttgacctttctggactcagggctgagctccttagacctacagtttcttgttaaaatcgagtaggttgtgtttgaaaaataaagtttatttgt

SEQ ID NO: 269102 - DNA, 448 bp, Homo sapiens
acaagcataatgagtcttaaactcagtattttacctccaaaaatactactgggaagaaatagaaatgaatttggacaaattcatgaataacatggttagaaaaagcttttcagaaggaacagccagaattcctaccgtgtaagtcgtttcctggaaaccatgctctggatcctcccattggtgttggaagatcaactacagcttcaaggcaccaagcagatcatgaaataatcaggagccagaggggtaaattatgtaccctgagattctgatttactaaaaacaaagtatcaaatttttgactaattctaatttctaaggaaaactatctcaacaactataatttcccagttacttgaatcttcaacttgctactatgattagatgtctggttcagacatccttggtaataaatgaaattctttatgtttcaaaaaaaaaagcatta

SEQ ID NO: 269103 - DNA, 505 bp, Homo sapiens
tctgaggggtaggatgggcttcgtcttctaactaaaacaaccagatcgtcgaggtctcactctgtcacctaggctggagtgcagtggtgcaaccctagctcactgcagccttgaattcctggattcaagcaattctcccatctaagcctcccaaagtgctgggattttatagggaacagccagaattcctaccgtgtaagtcgtttcctggaaaccatgctctggatcctcccattggtgttggaagatcaactacagcttcaaggcaccaagcagatcatgaaataatcaggagccagaggggtaaattatgtaccctgagattctgatttactaaaaacaaagtatcaaatttttgactaattctaatttctaaggaaaactatctcaacaactataatttcccagttacttgaatcttcaacttgctactatgattagatgtctggttcagacatccttggtaataaatgaaattctttatgtttcaaaaaaaaaagcatta

SEQ ID NO: 269104 - DNA, 492 bp, Homo sapiens
aactcttaccggttcacagaactgtcatgggcccttctaaaattagaagatacatatcccatgtaaatactaaaataataaattaggaaccctaatactggtattaaaataaataatactaatcattaataactgaaaaatgcccatgacctcatctggctccaggtgggtaaggtctagttgaaaagccgagagaagttctagtttatggacaatatgaatgctctgtattttaataaactctgcaattatcctacattatttattcagcttacattgaatcaaatggctaaagaaaactgattaatatttagggtaaatggccgtaagaaatgaactctacaataatttataaaagaccatcaacatcttggttaaaaaaaaaaaagcccaaacattttcaaaacttttcaaaaaacattttcaaaaaatttttaaaaaccatgtaaaacaccacacaatggcctactagttaccttgtacaaaaaaaaa

SEQ ID NO: 269105 - DNA, 481 bp, Homo sapiens
taccaactttatattgctctcttcgaggtctgtgccaccacgtaagaagtataactatgctgcttctagtgaagttgagcctcacccagatgtctcagctaccataattaaggcactagacatgtgggtgagccatttggattttccatcctcatgcccagctgaactcccagggcaatggagctgcataaattggaccatttggaatagaaggacatcccagatgattccagtcagcccagaatcataagaatcctgagaaataatatgtcatgattgtcttaagcaactaaatgaaaacatagttggatacaaagcagtatataactacaaaagccttttagttcaagagctagtttaactttacagtaaatattcagtagaaaatctctggtctgtggtttctgtctcctgactggatcttgacagatccaaacataaatgctgaaaccaataaaataatctggtctaatgttaaatg

SEQ ID NO: 269106 - DNA, 493 bp, Homo sapiens
aaaacaatcagttgccatctgaagaaaagacagtgagaatcagaatattaaagctcgaaggaactttaaggaagatcggaatggaaaggatctgtaatttaaaaaaacactggaaacacaggaagagacagagccttgagcagaagctccagtaccgtggcaaattcagggggagctgctgtgggcaggggacccctccattcctcttgtagcacccacatgtaccaagtatcctttaccaggtgttccttgcttgtaaatacgatggttgagttggacccattgttttaatagcctctctgaccttatttttttatctaagggacttagtgagtttgtgaccaaggtcacagcttattaataataactgttaagtagaacctcaatctttttcctactccattgcctgattctgtaaataggtcacacatcagccaacttctagtcctccaacctagggccaagattagaatgcttcctaggcaaagtgctg

SEQ ID NO: 269107 - DNA, 845 bp, Homo sapiens
gcttatccatgtaatgtttcattaattctttgatgctgaagtttcacctcctgcagggagcatttgcagcaccccaggcgagttgtcagcagttgctgcctggcagtagcacacattaactctagtgagcagaagtggagctcgaaggctccccacactgctgcaccttgagctgctcttcctggcccagcccgttctgcttcctgggaccccagatctggtctccaagtactgtttctcttctaagtgtagtcattaacttcccagagtgagaagaagagactaaaaaaaaagagagacagactgtctcttagttttaattaattgttgaaagaatagagaggggccatatttctactgaaagaaaggagaagttggggaatgggaatattctgaaccggaatgaaaaagtgaatgaaaggtaatctttagattcagtctctttgccctagtctttaaaagtttctgttgggggttatttgccctagtctttaaaagtttctgttgggggttacaaagtttgaaatctgtcttaaggagggatgtattactcaaaataaattgcctctatcattcagtgtgatatgatggacttggaaggggcaggattagaggaggtgagggataaaaatctacatattgtgtacagtgtatactactccagtgatagatgcactaaaatctcagccttcaccacagttcatgcatgtaaccaaaaccactgctaccccaaaagctgctgaaataaaaagcaacaacaacaaaaacaaatggactctagcttgttttcctttcagatcttctcttttaaatgtcattctggctaaaacaattttttaaaaatg

SEQ ID NO: 269108 - DNA, 476 bp, Homo sapiens
acctatagtactaagtaaaaatctttttatacagtatttgtcttgtgtgggtcatgagcattagcatccaatggtaggtgtgtgattaaaatgcagattccttggccccgtcccaaatttactaaataggcctttgtgggttatagccttgggatctacaaatttaacaagattgagaaaacctaaggcctaattatctttcagcctcatctaatccttccctcccaaagacgtgagcgccacatacattcttttgcagcctctcaacacaccattccttttcgcatctccatacctctgtaaatgtttctttccctgcctggaatgtgttcttacccttcaagagtcagctcaaattcacatctgtgaaatctaccttagtttgtacatatcaaataacagatgtgtgtttttgtgattcttcacattatgaacagcataaggtatttgccattgttagtattatcccatatgag

SEQ ID NO: 269109 - DNA, 563 bp, Homo sapiens
aggggcagaggggagcagccagcagtcttatgctaccactgtggctcatcctgcgacctgagagaaacctgggcaactgtgagcaccagaggccaagtcctggacagtctttaggccatgttggaactacatttggaaaggtggttgttaaacatttcccagcacacacctggatctgcatctgctgtgtcaattgaaccactcactggttctgtgacctcagttcttcgtagactctggaatggagctggaagctgtcatcctcagcacactaacgcaggaacagaaaaccaagcactgcatgttcccacttataagtgagagctgaacgagcagaacacatggacatatgaaggggaacaacacactctggggcctgtgaggtgcagggagagcatcaagaagaacagctaatgggtgctgggcttaatacctgggtgatgggttgatctgtgcggcaaaccaccatggcacacatttacctatgtaacaaaccttgacatcctgcacatgtaccccggaacttaaaaataaaagttgacaaaaagaaaacataacttact

SEQ ID NO: 269110 - DNA, 785 bp, Homo sapiens
aggggcagaggggagcagccagcagtcttatgctaccactgtggctcatcctgcgacctgagagaaacctgggcaactgtgagcaccagaggccaagtcctggacagtctttaggccatgttggaactacatttggaaaggtggttgttaaacatttcccagcacacacctggatctgcatctgctgtgtcaattgaaccactcactggttctgtgacctcaggcaagtcatttaaattataagccttggttttatcctccacagaatacttcctcctaaaatgtgttgtgaaaattagaatagatgaaggcacccttgaaaagatgactgatgcggttggttgccccaccacttcctactacttggcagagcctcctcgttggcagatccttctctcactagagcatgtatatggatgcatgctctctcaccctcccttgtagcttagagcagagcataccaatctatgtgccagcataccctggtatgtctcagatgggtcatagatgtgataaggtatggatcccttaagcccttgggacattcaagtgaggctgagctgctgaagccctgggatggtatgactggccacaagcaacattacccaggtacccctctgtgtcacaaaaacgttatctttgtatttgtgtcatggtgtgaaaaaattgagaagcactgcctggggacatagtgaggtagcccaattctggataaaggaaattgagaagtcttgagggggtagagaggttttcttccctaataagaagaatcacaggagagaaaa

SEQ ID NO: 269111 - DNA, 428 bp, Homo sapiens
aggggcagaggggagcagccagcagtcttatgctaccactgtggctcatcctgcgacctgagagaaacctgggcaactgtgagcaccagaggccaagtcctggacagtctttaggccatgttggaactacatttggaaaggtggttgttaaacatttcccagcacacacctggatctgcatctgctgtgtcaattgaaccactcactggttctgtgacctcagttcttcgtagactctggaatggagctggaagctgtcatcctcagcacactaacgcaggaacagaaaaccaagcactgcatgttcccacttataagtgagagctgaacgagcagaacacatttacctatgtaacaaaccttgacatcctgcacatgtaccccggaacttaaaaataaaagttgacaaaaagaaaacataacttact

SEQ ID NO: 269112 - DNA, 474 bp, Homo sapiens
aggagagagagaagtggaggtgggaataatttggttttatgtacaatcggcatgagataataaatgtaataagtcatcaatgtacccaacccactgtcatttgtgggtgacagtaaccattagattgtgtagtggttaggacccttctgggtgcaggaaacttaaaacccaatctaagctggtaaagatagaaggataagctgggtgtgatggctcatgcccgtaatcccagcactttgggaggccaaggtgggtggattgcctgagctcaggagttcgagaccagcctgtgcaacatggcgaaacctcgtctctactaaaatacaaaaaattagctgggcatgttggcacgtgcctgtagtcccagctactcagggaggctgaggcataagaattgcttgagcccaggaggtggaggttgcagtgagctgagatcccaccactgcactcagcagagtaagactctgtcttggg

SEQ ID NO: 269113 - DNA, 1288 bp, Homo sapiens
accctgctccctctgccacaatccaatttccctcatgatgccctgcccagtggccaccttctccaggagctccttccccatctttcgattcgaaatcacttacgccatccttagagtcctcaaaccagttcatccaccccctctggccctaatttcgtctgcacatctaggggtagattatctctgggatctttaagaaaagaccttctaacttgatcatatctctctctgtcttgtagatgattttttaaggtcccacttatgtccctcactcatctacaggctccatgaagtcagatatcaaacatttccattgctacattctccaggcctaatctggatcctcccagagtggctcttcagtgaacatctactgaattgaacagacatgcacagagcagatggacagcactagggacttgtcctctggccccagaggcccatgaaagagtatccaggcaggctggactatgctgggaagggggaaggcctgggccctcatcgaaagggaaggaccccaaaaggaagagaaacccatcaacatcctgttaactaaacggagagaaatgctgtttaggggaaaaaaaaaaaaacataataaataaaattcctgagagaagctgctaagtcagggagcaccacactcatccccttctgcaagagaatgagaagatggagctacagctcccgtcccacatcagcatctggtgtggccttcccgccacgggccatgggtcggacctggctccacagacaaaggggctgcttaggctgggcttgaaataggctgagtgaaaacctgcgagcccctggctgcttccctgtgcatggaaaggagctgttggtgagtatggagatctctgcccttgtcagaggaaggcttcctcatcacaaggcagggcaggtgtctgtgcccaagagctgagcagagaacaagcagccagtggaggctttcgcctgaactgtgcaatccttacctgattgggaagtgcaagtgacaattaataaattaatagcgagtcactttatgtaaatacctctctttttgtacactatatttagagaaacaaactgctttggcatttagagataaattttatgtaagagtttattgctgcttctgctgttgttactgttcatcatccagataataaaagcaaactagaaatactcaaatgccagtaccacctccaatatataaaatatatcctaggcccctttcagtcatcacattcttaacttttaggaagagcccttgtcataatctgatgcttgacaaaatgttttc

SEQ ID NO: 269114 - DNA, 1265 bp, Homo sapiens
aagccctgatggagtccaggaactcaagtcccagttctggttccttcgccattcagctgtgccatcatgggcacatcacttagcctcactggagttcagtttcctcagtagtaaaatgtggtaagcacatctcaattcagaccagccacactccagtgctcgacagccacctgtggctcacggcctgtactggacagtgcagctggaacccaatggatgattttttaaggtcccacttatgtccctcactcatctacaggctccatgaagtcagatatcaaacatttccattgctacattctccaggcctaatctggatcctcccagagtggctcttcagtgaacatctactgaattgaacagacatgcacagagcagatggacagcactagggacttgtcctctggccccagaggcccatgaaagagtatccaggcaggctggactatgctgggaagggggaaggcctgggccctcatcgaaagggaaggaccccaaaaggaagagaaacccatcaacatcctgttaactaaacggagagaaatgctgtttaggggaaaaaaaaaaaaacataataaataaaattcctgagagaagctgctaagtcagggagcaccacactcatccccttctgcaagagaatgagaagatggagctacagctcccgtcccacatcagcatctggtgtggccttcccgccacgggccatgggtcggacctggctccacagacaaaggggctgcttaggctgggcttgaaataggctgagtgaaaacctgcgagcccctggctgcttccctgtgcatggaaaggagctgttggtgagtatggagatctctgcccttgtcagaggaaggcttcctcatcacaaggcagggcaggtgtctgtgcccaagagctgagcagagaacaagcagccagtggaggctttcgcctgaactgtgcaatccttacctgattgggaagtgcaagtgacaattaataaattaatagcgagtcactttatgtaaatacctctctttttgtacactatatttagagaaacaaactgctttggcatttagagataaattttatgtaagagtttattgctgcttctgctgttgttactgttcatcatccagataataaaagcaaactagaaatactcaaatgccagtaccacctccaatatataaaatatatcctaggcccctttcagtcatcacattcttaacttttaggaagagcccttgtcataatctgatgcttgacaaaatgttttc

SEQ ID NO: 269115 - DNA, 243 bp, Homo sapiens
gcacatcacttagcctcactggagttcagtttcctcagtagtaaaatgtggtaaggtaaggggaaggactaataatttatcttcacttacaactctgagttattattctatgaaaaaaatatgttggctgggcatgttggctcatgtctctaatcccagcactttgggagtttgagacaggaggattgcttgagccaggagttcaagaccagcctgggcaacatagcgagatcctgtctctac

SEQ ID NO: 269116 - DNA, 444 bp, Homo sapiens
ctgattcaattgctgttggccaagcttgatttgggaattcttctaggtgaaagaaacacaaaccagttaaatattttcagtctccagccccaatctaacaaagtgcctttattgtgagactagatgacctctgaaatgtcagggcccacagcccaccagcaagaacctgaacaggcacagagatagaggaagccacccagattgtctacaacacaccccaaagcttcccactctctatttccttacccagctttattttacgttatggaatcttccaccaagctgaaagcatgttccatgtctgtaacggtgtgtgatgtttatttattctgcctctcacgtaggtgccatgacagggaactcatctcattcacactgtggccccaacatctaggacaatgccctgtaaatactggaacccaataaacatttattgaatcaaca

SEQ ID NO: 269117 - DNA, 628 bp, Homo sapiens
gggaagagagacccccaccgtgtgcaagatgcatctctccctagatgtgcatcatgagcatttcattaaatctcactgctgtaaagaggcaacagagctagtgatttggcaatatgggaaaaagatgcattttcaactgtgctttctataatcttgatgatgatgttacccaaagaccaacctcatttttgtgtcccgtatgagagctctgttaaagaataatttgtttatgtcacacagctacatacatgtatgatttactagtctatctatttcagcatgcaatactagctataaagcagaaaaaatcgtaagtagggggaaaaaaaaccctggcagtatatgtttattagccttagtctcagggaagtaatgtttgaattcttgatatgaaatctggacacaaaaatcaggaagagtcttgttccttaaagggcagcaatctcctctagcttactttttaaaatttaaagtgtagctaaacatacacaaaaaattaagcaccgacagcctcaaaagcgcaggtttgcaaaagttaacactgttcacccctaaacactgaaaaataatccagttgagatatgtatttttaaagatgggatgaggcaaatatcataaacatacattt

SEQ ID NO: 269118 - DNA, 555 bp, Homo sapiens
gcgcgtgcggccgtcagccacattatctgcttatactctcactccctcaaatcaggtttctactgtacaatttctcattgaaaactgcctcagcattttttaagaagacatcacttcccccttggggaagaaagaactcaatgacttgaagaaactgatgcttcaggtaccttgaaaaattcagctggttttgatgagaaacagtcaatggggctgttaggggtcctggcggatgcttaggcagtggctgtcctggattccagggaatgccccaaacccagtgatgcaggacccaggactccatctgctcattcttcataaggttggctcacaggtcatctgctgagaaggtcatcttctccgtcttcactgggctcactgaatgaggacattccaagatcccagctcatctcatttgagctttccttttcctaatcccatgcatctgtgtttgagaaaatcttcccaagtgatagatcttctattttccgatttcttccatgttgtattactttttttattaataataataaatacacatatttttggtgtgta

SEQ ID NO: 269119 - DNA, 617 bp, Homo sapiens
gcgcgtgcggccgtcagccacattatctgcttatactctcactccctcaaatcaggtttctactgtacaatttctcattgaaaactgcctcagcattttttaagaagacatcacttcccccttggggaagaaagaactcaatgacttgaagaaactgatgcttcaggtaccttgaaaaattcagctggttttgatgagaaacagtcaatggggctgttaggggtcctggcggatgcttaggcagtggctgtcctggattccagggaatgccccaaacccagtgatgcaggacccaggactccatctgctcattcttcataaggttggctcacaggtcatctgctgagaaggtcatcttctccgtcttcactgggctcactgaatgaggacattccaagatcccagctcatctcatttgagctttccttttcctaatcccatgcatctgtgtttgagaaaatcttcccaagtgatagatcttctattttccgatttcttccatgttgtattactttttttattaataataataaatacacatatttttggtgtgtaaaaaaaacaaccatatatcaataacacgaaccgaaaaaacaaaatggcctttttggccttaa

SEQ ID NO: 269120 - DNA, 347 bp, Homo sapiens
gactccatctcataaataaataaataaataaataaataaataaatacacaaataaatataaactttttaaaacttaaaaagtactattttaaccttttaaaaatgtacagctcaggccaggtgcagtggctcatacctgtaatcccagcactttgggaggctgaggcggatgcatcacttgaaatcaggagttcaaaaccagcctggccaacattgtaaaaccctgtctctatcaaaaatacaaaaattagacaggtgtggtggtgggcgcccataatcccagctactcgggaggcggaggcacaaaaattgcttgaacccgggaggcggaggttgcagtgagccaa

SEQ ID NO: 269121 - DNA, 174 bp, Homo sapiens
gaaatgtgggggctgtttcccccatggtgttctcatgatagtgagtgagttctcacgagatctgatggttttatgaggggctcttccccctttgctctgcacttctccttcctgctgccttgtgaaggaggtgccttgcttcccctttgccttccgctgtgattgtaaatttcc

SEQ ID NO: 269122 - DNA, 304 bp, Homo sapiens
atgtctgcctctaacctgtggaatattccaccttcttcttttcatctgccccaaacagaagtaactgaccaacccactttagaagactcctccctagggtctccttgcctccaaaccggatctcttttaatctgcccttcacattgattcctgggtaacttctcctaaaacacagatgcctgctcctgtgccttccaccacaaatgtaagcctccagaggctccccagagcaaatgccagtgttatgcttccagtacctcctgcagaaccataacccaattaaacttcttttcttaataaatta

SEQ ID NO: 269123 - DNA, 555 bp, Homo sapiens
atgtctgcctctaacctgtggaatattccaccttcttcttttcatctgccccaaacagaagtaactgaccaacccactttagaagactcctccctagggtctccttgcctccaaaccggatctcttttaatctgcccttcacattgattcctgggtaacttctcctaaaacacaggtcagataatatcttttacttcctcattttttcttcaatagctttctaatgaaaaaaaaaaaaaaattccccagtgttggaggtgggacctggtgggaggtaattggatcatcggagtgggtttctcatgaatggttttgcaccatcctcttggtgttgttctcataatactgagttcttgctagatctgattgtttaaaagtgtgtggcacctctctctctcttccttgctgctgctctcaacatgtgagatgcctgctcctgtgccttccaccacaaatgtaagcctccagaggctccccagagcaaatgccagtgttatgcttccagtacctcctgcagaaccataacccaattaaacttcttttcttaataaatta

SEQ ID NO: 269124 - DNA, 409 bp, Homo sapiens
tcaccgtgttaggccaggatggtcttgatctcctgacctcgtgatccacctgcctcggcctcccaaagtgccgggattacaggtgtgagccaccgtgccgggccctcacctgtatctttgtaatagcgacttcctagtttccctgtcccaagttagttcctctctcctccactcaccttccatgttgccatcaggaatagcacagatcagattatgtctctcctttcttctaaaacttttagtattgttccatggcttgcagaataaagttcagactcttctgtttagcattcaaagcatttgagaggtgggagaatcacttgaacctgggaggcggaggttgcaatgagccaagattgcaccactgcactccagcttgggagacagagcaagaccctgtctcaaaaaa

SEQ ID NO: 269125 - DNA, 182 bp, Homo sapiens
gttcttctctcaggtcccgctccgggccctcctcccagaagcctcccctgactagtccagctcaccgtgactcttctgaactcacggcgtttactgccaaggctattacattggcgctcgctcatgtcattattaggaaatatgcatttttactgtctttgatgttatttaaacttgcctgt

SEQ ID NO: 269126 - DNA, 459 bp, Homo sapiens
tagaactaatgtatattttggtagtcctgttacctttgatgtacctgaattcctaagaatttgtgtgtgttatatttaatttttgtaagaatacacaagcatgtcttcctgagatagtactagcttttaagcttcttatcaagtagtactagttcatcctggaaaaataagagcccagacaatttaaaatttcttagcaggttttaaaatctatattctgtatataatatcccattccaattttaaaatactttaagtgtcaggaatttatatctacttcatgttttttcctcctgcttctggtaaaatgcaaatcttccttttctgtttttagaaatgaaattagtcatagtctcttatataataaccgaggtggtaaagtcagcaagttaaaaatacttcttactttgattttgtaccaagtcgagaaacagaaccaatcgtatttattattttaaa

SEQ ID NO: 269127 - DNA, 233 bp, Homo sapiens
acctgattacctaaattctgcaacacataccacaataataaacttacaaaccagtttgtttcccttgctgtaaattcagttcaagccagatgcagtggctcgtgcctgtaatcccaacattttgggaaatgaagttgggaaaatcacttgaagccaaaaggcggaggttgtggtgagccgagatcgtgccattgcactccagcctgggcaacaagagtgaaactccgtctcca

SEQ ID NO: 269128 - DNA, 280 bp, Homo sapiens
tgggggaccagaaggcagcttgtcttggaactgcctcattcacagaagaccccattgagtacagaaactgcacatcaaagggaggagtaaggaaaacaagatggtgaatcctcaaaaattaaacaaaattacctttttaattttttttttttgtagaaacggggtctcactttgtcacccagactggtcttgaagtcctaggctcaagcaattctcccatctcagcctcccaaagtgctggatttacaggtgtgagccactcacctcagccagaattacc

SEQ ID NO: 269129 - DNA, 125 bp, Homo sapiens
caccgtattaccatcacttgggactgacagcttactagtgcttacttatctataatgacatttaacatttcagtcctcacaaccactctgtgactttggccacgattatacctcctatttttatg

SEQ ID NO: 269130 - DNA, 833 bp, Homo sapiens
agagatttccacctctaccatacccaaataactggtattggctgtacctttctaatgtgagcaactttaaaattgaacagaatatatgaaacctctcttttcagacattgaacagcatgtagcacagcaccgtgattcctgaaagtagggaacaaatggggcaaaccctatcactctaactttctgctgaaaaatgctgtctaaattgcagcacaatgagggggaacccaagcagagcatagtggtcttgctgagttgaggagatagttgagcagacttttcaaggcagagtatcagaaaggagagaatataacagcaaaacaggctcctggaatccctgtgaatctgttgctgaatactaagctgcacatgcataaggtgaaacttcacagtgcgatgcaaagaactactgcggagctgtgagctgattggttcccagggctcactgggcaatgtttgagtttcaactcgccaatgtgaagaaaccttgctgactgtccagggaattcagtagaaatcccaaaagggtaaggcattaggagaagggctaactaagccgaaaagtgaggtaactctagacttcctccaacaaggtttagaaagcagcctcaaaaagaggaagttcatccgctactaccgtaactgccagccaaaacaaattttaccatttttaaaacaacaaaatacagacatttaacaacattaaattcagaatgttaaaaatactagatatgcaaataagtaggcaaatagaacccaaaatcaggagaaaaatcatttaatagaaacaaaccccaaaatgacagagataataacgttagcagacaaggact

SEQ ID NO: 269131 - DNA, 410 bp, Homo sapiens
gatgaattcagcctcttttaacaaaacttctgagatcaactctacttttagtgtttgtaaaaatagacgatttctatttggattattcagaataaacttgcttcattcaatttaaaggatttcagcattcagcctgctaaaaccatagggtggtaacctaatgatttcagtcagcatgatcaaactgggttcaattgctgtatcttctctataagttaccttagccatatgtttgtcagagatcaattaactggacactaacagtagcttcttggtagagttttcacatttgtcctaagtttacatttaaaatggtagtttattgtaagatatttttatttagaggaatgatcatttagccctgtgtgtgtgtgtgtgtgtgtgtgtgtgcatgtgtgtgtgagagagag

SEQ ID NO: 269132 - DNA, 503 bp, Homo sapiens
agagagagagagagttaagtctcagctgtctcccgggctggagtgcagtggcaaggtcacagctcactgcagccttgaactcttgggctcagacgatcctcccacctcagcctcctgagtagctgggactgaggtgcatccaccacgcccgctattgtagagacgtacctgttgcccggctgatctcgaactcctgggctcagcattcgcctgcttcagccttccaaaatactgggattacggtgtaatgggtttttttttaaggctttaaaatttccagaacattttttctcatttcctcctgatcattacaaaaatctttactgaaaggtagggcattgtaagagagttaacttcattttgcagatacactcagaggggttaaaaatttgcaggtacatatgcacatgactattaagtgataaaacaagtctcaaagctgtttttaccctttctttctttttttttgagacagcctgggtgacagaatgagaccccgttgc

SEQ ID NO: 269133 - DNA, 342 bp, Homo sapiens
ttgtgtctccaactcttggtaccgggcgtgggaggttactcaaaagttagttgagcctctggctgtagcctggatcgtaggttgttgtattttttaccacatgaagactgaagaacgaagctggtgagtaggaagtgtaacttaacatttgcacgagatacactacacagatgctcttcttagggcctctacatctcacacttaccaaaccaactggtgggccccagactcttaaaacctctaaaacacaacacactcacagctggcagatgactttccaggacgccctggcacttgtgatgcggtctgttgggctgtttaccaagtcatttaggtttgttt

SEQ ID NO: 269134 - DNA, 586 bp, Homo sapiens
catagagtatacttacacaaacctagatgatatacctcgatatggtttagctctgtgtccccacctaaatctcaccttgaattgtagttcccatatccccatgtgtcatgggatggacccggtggaaggtaatttaatcatgggagcagttaccctcatgctattctcgtgatattgagtgagttctcacgagatctgatggttttataaggggctttccccctacggctcggcacttttcccttttgctgccatgtgaaggacatgtttgcctccttttccaccatgattgtaagtttcctgaggtctcccaagccctgcgaaactgtgagtcaaacctctttcttagtctcgggcagttctttatagcagcattagaatggactaatacaagtctattacacaactagactatatggtatagcctcgtgctcctaggctgcaaacttctccagctgttactatagtaaatactgcaggcagttgtaacccaaagacaagtgtttgtgtctctaaacatagaaaatggacagtaaaaatatggtataaaagattaaaaatggtacacctgtatttgacacttatg

SEQ ID NO: 269135 - DNA, 376 bp, Homo sapiens
ggtttgggaacatgggaagatgtgggatccgagtgtgccaagcagaggggcaggcagttagtccacttagaaagcagacagagtgggccgggcgcggtggctcatgcctgtaatcccaacactttgggaggccaagacgggtggatcacctgaggtcaggagttcaagaccagcctgaccaacatggcaaaacccccgtctctgctaaaaatacaaaattagccgggtttggtggcgtatgcctgtaatcccagctacttgggaggctgaggcaagaggattgcttgaacctgggaggtggaggttgcagtgagccaagatcatgccactgcactccagcctgggtgacagagcaagactccgtcaaaaaaaaaaa

SEQ ID NO: 269136 - DNA, 426 bp, Homo sapiens
aatgactctgctgtggataaccattcaaaatgttcacatattacgactatcacaagttcacaaaagtttatgcaagtcaggtaactttttaaaataagaaaatgctttaatctctgaaataatttatagatatcaactcagaaaaaatacaaaaattatatttattccattttagattgttaaccccacagaaacaatcaaattccaatcagtggtcggaaaaaggggataaaggtatttgccgtttatatttttcttctaagaagtcggggtaacaaattatatcaggtttttacattagtcaaataaattgtttcgattatttgcatctctggttaactgaccatgcacgcctggctttaaaatacatcttccctaaatatagaacaaatacattttattgtagaatatttggaaaacaaagat

SEQ ID NO: 269137 - DNA, 331 bp, Homo sapiens
gggtggtctctacggggagattgcaaactcctgctgacagccagcaaggaaacagtcctacaactacaaggaaactaattctgacaacaacttaaatgaactcagaagtggcaccttcccagagcttccagataagagtctttcccagtcaacacatcgattttaaccttgtaagacctggaacagattacccagttgaccctacccagacttctgcctcaaagaaacggagtgatgataaatgtgatgctttaaattgccaaatctgtggaataggttacacaacagtaggaaactaataaacatactatgtttattttcttaatagata

SEQ ID NO: 269138 - DNA, 332 bp, Homo sapiens
gcccatacttgatcccagctaaatcaatcttcctagcattccacccagaaaggattttgacaactttattaaatgaaactgggaagtgaagattaggctcagtggagccagattggaatccagacaacatggcttaaggaaaaagaggaaacacgaaaggtgacataaagggcaaaagaatgaaatggagcctgaagacatttacaggcaagattaacaaaaattgagcctgagttctgcaattcacagtcctaaaactattttttatttatcctgctcagtactcaaagtatacttttgatatggaataaatcttttctcaattctggaaa

SEQ ID NO: 269139 - DNA, 577 bp, Homo sapiens
caagagagttaatgaatcttcagtgattgtgttggataagtaataacattctgttctctgcttatgaacgtcaaaacaactgttataacagtgatactttggtactggtatgcttcgtaagtagtggtcccgcatcagcattgacagaaagaattcttcagcctaaagaaactaaatgagactaagcttcttttcaactgaaaatttggttcttgttcttcaaagttaacagagtaaatatatagattgatataactaaatatatgggttaggtactcttgtttgcccataaggaatattcattagttctttatatgagatctttgtttaggtttgattgttccatatgctacttgttggtgcttttgacacagtgtaacttatggatttgtctgttatttatagtcactttttttctctaattctaaaagccatggctagctgctctttgaaaatcacccaaagtttccaccatttggagacaaccaacattttgggaaatttctgccatttgtaaacatagttatatgcatgtttggatattttacaatttttaaactatacctaccatcttgta

SEQ ID NO: 269140 - DNA, 419 bp, Homo sapiens
taatcaccactctgacatttctttaaccattctcgttttttctctgcagttttaccacataggcatgtatccctaaacaatatagttcagctttgtttattttgaaacattttaaaaacagtatcacactggatgtattcttttgcaccttgcttttttcacttggcattaaaactttttttattcagtgtttaggagtgacagtaaataggcttctaaaatcaaatctaagaatgtgtattggcctgcttactaatggccagatgcccattctgaaagtcaattagtgaaaaaaattgtggacatcttatgaagcaggacttagcctatgatttgcaatgtagaagatggagagggggatacctggtagtgtcaactttagctaaaataaaattattaattttgtgcattttctgaaa

SEQ ID NO: 269141 - DNA, 355 bp, Homo sapiens
acactgctaaaggcagtgtccatacacacaacacaaatctggagcacttcagagggcaggatgaagaactagatcacccggcaagggtgagaaatgagctcccatctgtgcctcacctaaataggtcacagtgaatgactccttgtagtgacaaaatcttaatgatttatgctcagtttcaaaactggactatatttttgatgttctcttttttaaagtagggtttattgaggtataatttacatagagtaaatttaatcctttcattgcacaagtctctgggttggaaaaactcacacaatcctgtaactactagcaccatcaagatataaaagtttcattgtcccccaaattc

SEQ ID NO: 269142 - DNA, 373 bp, Homo sapiens
  misc_feature (23)..(23): n is a, c, g, or t
  misc_feature (53)..(53): n is a, c, g, or t
  misc_feature (74)..(74): n is a, c, g, or t
  misc_feature (86)..(88): n is a, c, g, or t
acggccgtcaccgcaagggacantgtggggcttgccgatctcccctgtctctntctgcgccgtaacggctgcgngaagacgacagnnntccgaaggagggaatccattgttttttatctgcacttcaatcttaagggggctagttggttaagtcctatgtaaccactaagcaatcatgaaagttatgtggtatgtactatgagtccaggcactattctaagcactgtgcaaataagtaaatgaagaatagaaatgttaagtaatttgcccaaagtcttataactagtaaatggcataggcgggatttgaactcaggcagtctggttcttaattaaattgcctttcatggggacaaaagaaaggtccaacagtc

SEQ ID NO: 269143 - DNA, 497 bp, Homo sapiens
ttctcttatccacaggttgcagactggtggcctgcatacctgttttgcttcctacagtagtttaaaaacagcattttacgtaaaatttcagatttcttagaaaaaatcagtagctgtgacaacactgggctggcatttccgcacagaaccagtcagcaggaactgagcagcagggcccttctgggtgggacaggcactcaccagtgtccccacactggcccagggactcatttattcgcactggcacctgcaggcatatgaggctgattcctgccaattcagcctaccccaaactcttgtttcgccgtgtcttttcctttctgccttgctgcgtcttaagtgtgcctctgacccaccctcatcactgcactgaggtttatcttcccccatacagctgtctcctccagttgactgcaagcccgagggcagaaacaatgcttccataaggttctcagtgaatgtacattgaataaacacacgtcttgcctttgaaaaaa

SEQ ID NO: 269144 - DNA, 408 bp, Homo sapiens
  misc_feature (408)..(408): n is a, c, g, or t
ctacgtctcaaaacaaataaataaataaaatcaaataaaatggaatgccagaccatataattcaaatgctaagcatatgccagtttaaactttttcttcttttttaacttaagaggagaatcactatgattatttttaatataaagactatatagtgatttattggattttactcattagggtttcaaaaattgcagatactttttattctgcacatttttatctccagaagcctatattcatcaaaaggatagcagctgcatactttccccatgaaatgttaacaaataaatggcattcctgtttatttatctatttttgaattttaatgattagtccttgtgctaattaacaaattctcgtattcatctttctatatatagttatcagtggatgtgttcatggctn

SEQ ID NO: 269145 - DNA, 471 bp, Homo sapiens
cacatgtttatgcaggtaaacttttaccttgctgtgtttgctaatggagagcctcaagaacactcaaaggcaaaaactgttttctaattacctctatacccagtgaatgcctgggattatactctacttcgtaaatatgtaagcgaagattcccatgaatggcaaaatccaccagtaggtgatgatacctatgttatgattgggtaaattttggggtgaaaggggtgttccttataaaatattgcagttgaagacagcagggagaggagtgcctgtattagttaacacatagtttgactatatttttagacgatttccttgattggagaggatggcacttaatattaaagatggtgtcctggctaggtgccatggctcacacctgtaatctcagtattttgggaggctgagctgggaagataattcttgagaccagcctgggtaatgtagtgagaccctgtctctaccaaa

SEQ ID NO: 269146 - DNA, 443 bp, Homo sapiens
ctgaaagtcagggacatggtttatctgagcaaaacgcttgacccatagtggatattcagtaaatactgttgaatgaatgaaaaacaatctcccagtggttctaaattgcctttgaatcatggatttctttgaaatctgatggaagccagggtgatatgattttgctctgtgtccccacccaaatctcatctcgaattgtaatccccatggggaggggcctggtgggaggtgattggatcaagggggtggtttcccctaggctgttctcctgatagtaagtgagttctcacgagatctgatggtttaaaagtgtggcacttcccctgcatcttgccgtctgcctcacttccccttctccttttgccaaaaatgtaagtttcctgaggctaccccagccatgcggaaccgtgagtcaattaaacctcttttcttcataaactaaa

SEQ ID NO: 269147 - DNA, 559 bp, Homo sapiens
tattttgaagatgagggaaggcatctaggtatagcaaatgacaccaaatacacacacattcttatttccctgtgctgctacctactcagcatagtttactaaaggtaaaattctttacataagaattcttactattcttttaccaagaagaatgaatagaggaagattccagaggaatccctgccgaaatttaaccatctctaatttataatctaatgtagtatctgttgaagaacttcaaggacctctactacactaaaaaaataaaaaaaaaaaacctctgtcatgtagatctaaacatattcagacaatattttaaagtctatcacattaaagtaaaatattttataggggtaagattaaaccaagtcattctagtgctttcacaaacatgtgcattcacacaagttaacaatccaacagacaaccctttcttcatgtgaatacactctggtttgtgtaccacagttgacatccattttgtgtagaaaaaaaaagaaatagctggtgtcaattagaatgaacagaggatctcagaaaaataatgtagtcagttagt

SEQ ID NO: 269148 - DNA, 505 bp, Homo sapiens
tattttgaagatgagggaaggcatctaggtatagcaaatgacaccaaatacacacacattcttatttccctgtgctgctacctactcagcatagtttactaaaggtaaaattctttacataagaattcttactattcttttaccaagaagaatgaatagaggaagattccagaggaatccctgccgaaatttaaccatctctaatttataatctaatgtagtatctgttgaagaacttcaaggacctctactacactaaaaaaaaagtctatcacattaaagtaaaatattttataggggtaagattaaaccaagtcattctagtgctttcacaaacatgtgcattcacacaagttaacaatccaacagacaaccctttcttcatgtgaatacactctggtttgtgtaccacagttgacatccattttgtgtagaaaaaaaaagaaatagctggtgtcaattagaatgaacagaggatctcagaaaaataatgtagtcagttagt

SEQ ID NO: 269149 - DNA, 570 bp, Homo sapiens
atgaaaattgggtgtaataacagtaaataaataaatcattagtaagtaaataaaatagcttaccagcaactattaatatactcatgatacactttttatatttctttgctacatacctagatcctatatgctgtcattatatttcagtattttgcatttatatttgcattgtgagatgaatctatggttttctttttagaatgcttttaccaattagtattgcactcatggatttgaaagtttaacattatacaataccaatttattatttccaaatgttgacattttattatagtgattttctattccaaaatgtctacaatttagctaaaaattatctagtcctgctaatttattggttgaagatcattatttgcatttcttatccttgccataaaaaatgtattctctactttgttaaatttcttgctgtagtaatcaaaaagggcaaatgttaatatctttatctgtatagtgttgagtttacggtggctagtaagttgtcagctgcatttttcatttttttaaatttcagaattaaaaaataaaacataagagttttcattacta

SEQ ID NO: 269150 - DNA, 368 bp, Homo sapiens
acaatgggaatcacatttcaacatgagacttggagaggatgaacatccaaatcatatcaaatgcataatatatctttctcaaagtgagtaaaactgaagaaagttatttgagccgattctatggtccataggtttctaaactgatgagtttcccaaataaattcagggattaactatctatatcaagaatatgaactttagagtcagacttccttgaattcaagtcttggttctaccacaaaccagttgtgtgaatattggcaattacttggtttctcttagcttcagttttcattcctataacataagcattttatacaatgctggtacatggcaggtatataataaatgtctaacacaattattca

SEQ ID NO: 269151 - DNA, 355 bp, Homo sapiens
ggtgccctgtgtcatgggcattgctgtgcgttagtaaagaaaagtgacacaggtctctcaggtctagtttgctttcttttttttaattggcaagttgagaattattttgtcaacaacttaattgagagcaaaggttgctcttgtggagggtttatggtgtgatacctaatttttggactgtttcccacacttcagcccagtcagaagaggtggtgtctgcttgtagcagttaggtttaaggagaggacagtgtggtcttgattcaggacaaattatccttatataaaactctgggtgtctgaaccctaggtcccctgacactaacctatgcttagttatttttaccttattttat

SEQ ID NO: 269152 - DNA, 617 bp, Homo sapiens
cgcggtggctcacgtctgtaatcccagcactttgggaggccgaggcaggtggatcacgaggtcaggagattgagaccatctggctaacatggtgaaaccccatctctactaaaaaatacaaaaaaaaattatccgggcgtggtggcgggcgcctgtagtcccagctactcgggaggctgaggcagaagaatggcgtgaacccaggaggcagagcttgcagtgagccgagatcgcgccactgcactccagcctgggtgacagagtgagactccgtctcaaaaaaaaaaaaaaaaaattagccaagagtggtggcttgtacctgtagtcccagctactcaggaggctgggctgaggcatgggaaaatcacttaagcccaggagttccgggctgcagagagtcatcattgcaccattgcactctatcctgggtaagcgtgtgagtgagacctgtctcttaaaaatagaacttctgggccaagcacggtggcttacgcctgtaatcccagcacttagggaggccaaggtgggcacatcacgaggtcaggagatcgagaccatcctggccaacatggtaaaacccgtctctacttaatttgaaggcttaggccaggagtcct

SEQ ID NO: 269153 - DNA, 321 bp, Homo sapiens
tcactatgtcacctaggctgatctcaaactcctgccctcaagcaatcctcccgccttggcctcccaaagtgctgagattacaggtgtgagccactgtgaccagcttggtctcttaagcttcctgtttcatgcattctatttaattgtggtcattgcttattagcattttttggagacttagctatgtatcattttctgaaagctcttacatacagacttggattattttcatagaatactgccaaaagggtgtagtgaacagcaatcatgttggcttttcaattatgtatttattttttcatgaaaactttttttaattcc

SEQ ID NO: 269154 - DNA, 513 bp, Homo sapiens
gtctggcattttccttcatttcctgggaggtaatctctaagcacatggaatatgcttagataggagtgccttataagaatgcctttgtttaccttcaagacttggggaatcctaaatactctatgctaaccatgtgacttacagtgcaggctttggactatctggtaatatcttgacctctggaggggatggggacaaaggctggtcatgcgggaagtctaccaaaatttgtgactgatcatcaatagaagctctggacaccaaggcctggatgatcttcattagttggtagtattccatgggtgtcatcacacatcaatgagaaaagaaaaatcattgttttgcataacttcactgggagaaactagaagttgtcctccaccgagaagaccaccagaagctcatgctcgaaaacctcttgggtcccaccctgtgcactctctccttgaatgattttaattggtatcctttcactataataaactgtcaccatgagtctgacaggtttggaga

SEQ ID NO: 269155 - DNA, 670 bp, Homo sapiens
ttaaacccaaaaggaagtgacttccggactcctaggggaatgtctccatttgctcttgttgaaggaagaagggcgagaatttccaggtctgtggagaccccacatcccaggtacagaattgccggggacctggaggcacagcctcaatacaacacagagcaaaactcaccgccgcagtgtgacttccagtccacgcgatccgcttcctggtccgggcgaatctacaagcacaggacagaagccaggcctccgtggagccaacgagtacctgttttaagaaaaaaaacaacaaggaagtaaaaccgaagacaggcagccctgcgccacgcccaaaaccaggcctgggcctgcctggcctaaacccaatagttaaaaatcaactcataacttagaaaccaatgtttttcatagattccagacattgtatagaagaacattatgaaactccctgccctgttctgtttctctctaccagtgcacgaaacccctgtgtatatatctgggactgtagtccctgttacgtatcccctagattgctcaatcacgactcttttatgtgaaatctttagtgttgtgagcccttaaaagggacagaaattgtgcacccggggagctcggattttaaggcagcttgccgctgctcccagctgaataaagcccttccttctac

SEQ ID NO: 269156 - DNA, 354 bp, Homo sapiens
tctcttcattactacattctctagcctaacattccgtccctgctgaattaactaatattcagatacattcaagatagaactaacactcaattctatctttccaaaatttaaggggatgataggtcttcactcacatggtaacaaacacagcagcaaaccccataaaactgaacatcaactgccttctggaagttctcatctggcaagctagtgcaggtatcttgtgcatgggtcaagagagtgaagctcagagcacattgcttggcacccagcaggtgttcaggacatgttttagctcagccctcctagaaaactatgaaataaaatccaaacaaaagtattaagattgaagta

SEQ ID NO: 269157 - DNA, 418 bp, Homo sapiens
tttaaggtttcaattcattgtagttgctggagtaatgtttttgaataccactagaaagaggaccaaaaatacagatgatgtgttcttgtacacaaaatctttgagtgaggaagaatgtgctttaacttctatgatgtattttaatagaaagctagaaatatgccacttcctgaagggctacagttttgaagtttgctttttttatgagaagatatttgacaaatcacactaagccatttccttgagaaacaggacaaaacacctgatcaagctatgtcttaatattaggccttgggcagtgggcaaataattggtatttgtatttaaatcagaatgggaacaactatttttcttatattaaacctaacatatatatatatatttgtttttttattttaaagcatccagactttaccaa

SEQ ID NO: 269158 - DNA, 373 bp, Homo sapiens
cagtagtcaattttgagaaagaatgtaaagttgaagaggcattgcctggaaataaataagtaagactaggccgggcgcagtggctcacacctataatcccaacactttgggaggccgagacgggtggatcaggaggttggtcaggagatcgagaccatcctggctaacacagtgaaaccctgtctctactaaaaatacaaacaacaacaacaacaacaacaaaaaacccgggtgtggtggcacacgtctatagtcccagctgctcagaaggctgaggcaggagaattgcttgaacctgtgaggcagaggttgcagtgagctgagatcatgccacagcacttcagcctgagcgacagagcgagactccacctca

SEQ ID NO: 269159 - DNA, 387 bp, Homo sapiens
caaacctagcagaagaaaagaaataacaaagatgagagcagaactaaatgaaactgaaacaaaagagacaataaaaaagataaatgaaacgaaaagctggctctttgaaaagataaaccaaattgatagaatgtgagattaaccaagaaaagatgagagaagatccaaataagctcaattagaaatgaaatgggagatattacaactgataccacagaaacagaaaagatcattcagggctaccatgaacacctttatgcacacaaactggaaaacctagaggagatggataaattcctggaaatatacaaccctcctagattaaaccaggaagaaataggaactctgaacagaccagtaacaagcagtgagattgaaatggtaatt

SEQ ID NO: 269160 - DNA, 1170 bp, Homo sapiens
acgatacatgtgcagcaggtctcattttggactggccccgtttcaagggctcaccaactgaatgcagcttccagactggagagtgcatgtctggagcaagtggggacaaggacagatggagcttcaggaaggcctctctgaagaggtagatagtgagctttgacatggaggccagggaggcactcagcacacagccacatgaggaatgctgcctggagcggccactgcaaaggccctgtggcagggacaggcaaggcacattggacggtcaggtagggccagggtggctggaggggagtgagggcagggacagaggtaggaggtggtgtctgagagtggacagggcgggccacccagggcctcgtggtgcacagtgagcagtttggaactgattctgggagtgacagaggcattggaggcttttaaagaggggaatcactaggtcagctgctggctggggaatgggccccgggctgggaggggtggaagcctgggcccagcggggaggccccagtgcgtgaggaagtcgatggcttgaacaggatggggcagctgctatcaggagggaacggaagtggggaagagctccagccctgggcttcagacctccagaagcagcaggaagaggggtgataacagtgtccctccttgcttcggggtcatttatttattcattcatgcattcactgcaaggccctttgcacaggtcaggggatgcagatgaccagaacataagatctgcagcaaagatgggcaaggcaggcctttaggcaagttactacagtcacacgaaggacaggagagctgtgatcacagagctcaaggggcagtggagatgggcgagtggctgccatggcaggggaagggatgctgcccactggcaggtcatcaggaaaggctgtttttggatgcatggaccagaaagccactctctgaggtggcccccacctgcatcatcctagggccacaggccgaggccttctgaggggccttggggctgccccgctgctctgctggtcttggctcctctgcagcacctgcttcctttagcactggtgaatgattcttcctcttcccctgtctcagggaaggcttgcctgcttccatgcttgcatgctgggtgacaataaagcattcctggttcttcaccttggctttcagacctgaaac

SEQ ID NO: 269161 - DNA, 375 bp, Homo sapiens
cagagcaagactctgtctcaaaaaaaacaaaaacaaaaacaaaaacaaaaaaacactttcctgatactttcagaatagttttttttccattcatttgtgtttttaagttactttttaaaaagtagaccgagcacggtggcaaacacctgaggtcaggagtttgagaccagcctggccaacgtggtgaagcccatctctactaaaaatacaaaaaattagccaggcgtggtggcgggcacctgtaatcccagctactcaggaggctgaggcaggagaatcacttgttgaacccgggggggtggaggttgcagtgagctgagatcacaccattgcactccagcctgggccaaaagagcaaaactgtgtctccaaaaa

SEQ ID NO: 269162 - DNA, 254 bp, Homo sapiens
acctcaatactgttggcaaccttcctacgagcctcatgcaattactgctaccactttgcagatgagaaaaagaaaactgatgctaagcaaagtttagtaacttgcccaatatcacaagaagtagtgagtgacagaggaagacttagctcacatctgagtgtctccaaatcccaaatcccaaagcctcatgctctacctttttactggaagttaaaataaatattatgacagatacctttttaaaaccttaaaga

SEQ ID NO: 269163 - DNA, 406 bp, Homo sapiens
ggccacggagccgcgcagatccggttcccgggtgaccactctgtcgccattgggcgagaccgacctagtcctgacgacaacggacaaaggccttcaggggcctggaaggtgatcaaaatggaacacaattgctaccagaagagaactgctcccctgcagtggagcagtgaagaggccttttacatctaagaccaaaggagagtctgtggcagtctgaggaagtgctggcctgtggtaggatccacagcaccacttctaaaagccctgtcaggtggctgcccttggactgccatgagaaagcgatggaggatggagagagcactatgttctggggctctgggtcttgtcattttaaaaaatgtgtggtttctgcattcaactgcttgttcctgaaagctgtgttctc

SEQ ID NO: 269164 - DNA, 348 bp, Homo sapiens
gtaccagacagagtaaaaatgaccagtgtctagtcctggctttcacctcacaaaaggaaaaatagatccaatgtcaggccggttcaagacaaaattagcaactgatgaagctgaaaaactgtggagagtcttcaagcatcaaaaagttgggctagatgaccatgaaggcctgttattaccactgtatgctatgattttacctccttatctccagcaggggccaggctgtcctgcattccccgcttctctgtctataagttctccattcccccctctccattctctacaagaaaaataaagacacaatatatcagctatgcgggccttcacagagcctttatactcgtt

SEQ ID NO: 269165 - DNA, 180 bp, Homo sapiens
agcttttaaaaatataataatctacctccttacctgacacgtcggaagggctgattttccaggtcacacatgtcttattactttcgaaaataatcatgtggaaaggcttttcattgtgtttgctgttacatttctgcacagtggtgactgcgaagccaaaatcaaactaatagcagggga

SEQ ID NO: 269166 - DNA, 412 bp, Homo sapiens
tctcacagctccgacacttattgcgagccatacacaagctggtgtcaggacacgtactcccaaagtcccaccaatcccgtactagctgtggcttccaaaaacaagcacttgagggctttctctggcattctgggctggtgatagacacaaggattgcagggcttgatattcccaagaaatagctctctgtcaatgacagggtttggaactcgcgtggagccgtaataaacacctggcaggatatctccaaggctgggaaatcattccccacttaaggaggtttgaatagagacaataggcactcgcaggcaataaaatgacaacaaaagcaagaaagcctgtctgctgaataactgaagaagcctaagactgagatatgattgagttaagaaaaaaaatgtgtatatatatt

SEQ ID NO: 269167 - DNA, 603 bp, Homo sapiens
tctcacagctccgacacttattgcgagccatacacaagctggtgtcaggacacgtactcccaaagtcccaccaatcccgtactagctgtggcttccaaaaacaagcacttgagggctttctctggcattctgggctggtgatagacacaaggattgcagggcttgatattcccaagaaatagctctctgtcaatgacagccttaggcacaactggactttcaatcacacatattttcccagagaggtgcatgacaaaggtgcccagcacatcctcaactggaaatagagttggcctgttgcccaggctggagtgcaatggcgcgatctcagctcactgcaacctcctcctctcggatgaagagactaaaatttatagagatggaaagactgaatgcactatatcatagttataacagcatggatctacataacacatgagcaaagacaaattcgcattccttttttgaagcaactttaatgacaacatttgtgaataattgtaaaattccaagtgcagtccttggtacatgttaggtgctcaatacattttagttctctaattctttatcaaataaacttagtagtaaaacaaataatggcta

SEQ ID NO: 269168 - DNA, 531 bp, Homo sapiens
tctcacagctccgacacttattgcgagccatacacaagctggtgtcaggacacgtactcccaaagtcccaccaatcccgtactagctgtggcttccaaaaacaagcacttgagggctttctctggcattctgggctggtgatagacacaaggattgcagggcttgatattcccaagaaatagctctctgtcaatgacagccttaggcacaactggactttcaatcacacatattttcccagagaggtgcatgacaaaggtgcccagcacatcctcaactggaaatgaagagactaaaatttatagagatggaaagactgaatgcactatatcatagttataacagcatggatctacataacacatgagcaaagacaaattcgcattccttttttgaagcaactttaatgacaacatttgtgaataattgtaaaattccaagtgcagtccttggtacatgttaggtgctcaatacattttagttctctaattctttatcaaataaacttagtagtaaaacaaataatggcta

SEQ ID NO: 269169 - DNA, 563 bp, Homo sapiens
tctcacagctccgacacttattgcgagccatacacaagctggtgtcaggacacgtactcccaaagtaagcccaagatgcaaagtttggttcagtgggggttagacagctatgactatctccaaaatgcacctcctggattttttccgagacttggtgttattggttttgctggccttattggactccttttgactagaggttcaaaaatgaagaagctagtgtatctgcctggtttcatgagattagctgcctccctgtattatccacaacaaaccatcgtgtttgcccaggtcagtggggagagattatatgactggagtttaagatttgtggaaggagaactttcaaaagccaggaaatgtgaagaattcacctggaactaagtagaaaactccatgatctgcccatcttaacttatttaagttacctatattaagttacctacaacttaatcagttataggtacacattggaaactccacagagtaaatcagtatttctacagaaaaatgtcagagaagtcagtattgaatgtattaaattggctttcttcttcaggaaa

SEQ ID NO: 269170 - DNA, 537 bp, Homo sapiens
atttacaaattgaactgtcataattttctttaaaatatatctatatctatatctatatctatatctatatctatatatatctaccccaaagtcttgaaaaagggaagtgaagtaaaatttaaaaacaagagggtagaggggaactaacatataggaaaagtaagattgcaaaacataaggtgaaggtaacataatgtttccttacaatctacttttaatgaagttgatgttaagcatggtagcaagcaatataaagcggaagaaaagatgaaagatttactgggccagtatggtggttcatgcctctaatcccagcactttgggaggccaaagtgggaggattgcttgagttcaggagttcgagatcagtctgggcaacatggtgaaaccctgtctctagaaaacctacaaaaattagctgggtgtggtgatgcacacctggtgggaggatcacctgagcccaggaggttgaggctgcagtgagctgagatcatgccactgcactccagcctgggtgacagtggaagaccctttctc

SEQ ID NO: 269171 - DNA, 746 bp, Homo sapiens
atctttgattttctttgttagttagctataggaaggttaagaatttatttactaaggtcgtaagaacagaagaaagtttctttgaaagagaaactgtttttttatttcaaagagcttcatgtatacttccctctcttattccatgtaattagtaagggaaaataaactatgtcttagaatgttgaggaaagtattttgatagcttttaataattcttgaaatactctttactctgtctgtagttttgagaaattacagaaattcatagtataaggatgagaaggggcccatttgcccatatttgataacacagacttggattgagtgtctgtcatgcctgctggcagttaagtctcagtggtattgactgctaggcattttctatattttttgcaagttagctggtaaaacttggtaaagttttgtgtttttcagaaggaaccctattattatttccattttaaacatatttcaatattgtctcattgtaatagttccatttatgtgacatctgaggaattaaatcatacttccagatggtttggtctaatgtatacagtttaggaaagtttattcttttttattttattttatttttttaaatttcttttagaaactgggttttgctctgttgcccaggctgatcttaaactcctggcctcagatgtggagacccagctgggactacaggcatgagccaccacgctcagtagaaagtttgttctttttcagttctgtcattgaaa

SEQ ID NO: 269172 - DNA, 533 bp, Homo sapiens
gagcaactcagtccaggctgcacaaattgagtagcactgctctgcagctcgctgcactaaaagtggaagatattttccattacagcaagtgctcccacagaaggatcacgagccacacacggagccttactctccaaataggcgcccatggcccagtcgtcccttagcctaagaactcagagagccaggctgtaataatggggctgccgtgtgagcacagcagccatcgagctgctccggttcatttcccagaggttgagctgcagtgtgtccagtatttaaaagtatggaacttgtttcagggctgacccattcttgcccaattcatcttccccgtgtgaagttatttagcaaacagccaagttcagctggaaatcgtttttcatcccctccaacttctagtcacatgggcagctggccagctacatgttaacaagcgcctcagaactcctaagacaccaccggcctctgttcccttcagtgcattcttgtaaataaataaataataaaacctgcctttaccaccccccaaa

SEQ ID NO: 269173 - DNA, 415 bp, Homo sapiens
cagagagtaaatattttaggttttgtgagccagtttctgtcttaactactaaactatgccactgttgtgtgaaagtggtcagagacaattggtagatgaatgaccatggctatgtcatgaaacattattaaaccacttaaaaatgtaaaaaccattcttagcacatggccctataaagacaggtggcagacagatttcactcatagttagctgactcagcagagttcaaaaccagaggccttggagacaaaagaaggaagattatttgtcaagaacttcattctttccctaacctcccacctccaccccactttcgtaaaaaatgctatttagaggacaaaatgaaatgatcaggaggaaagtctctatccactctccttattttccagtttctttccctgctttttctcatctc

SEQ ID NO: 269174 - DNA, 397 bp, Homo sapiens
tagttttttatatcacagaccatgctgaaccaagagacacagcaaatgttcctgggagacacagcccttgtcacaagaagaagagaatgtaaagccaagcataggctggaggatgaaacttgggtggctctgcagctggctgaacaactacattcgaagacctgtggtcaaccgacagaaaggtttgaaacagcgtgccacgtggttctgccttctcataaaacatgttaagacttggacaaagacacagaaggcttagttatcaaatgtgcaagctgtatgaggttggaaagccttattaacatcgtagatgacagaatcaagatttaaaacaaggctatgaaaccaaccagataacatttaatagggtggatgtaaagttttacatgaggttatt

SEQ ID NO: 269175 - DNA, 548 bp, Homo sapiens
cagaaactgaggcttgaaactttcagcaatttgtctacacttattagcagagcttctattcaacaaagagcccccggtggccccaggccgagtctctgggtcttgtctccttgagcctcctgaaggtgtcttaaggcagaaaaacaagtcaggccagcttgtcacccagagattgtcacccagagacgccattgcccagaatacattttgagctgtgactttagatcaatagttaattcaccatttactgtgagtgccagcccagtaccctaacctggggagggggccagaaggtcagcccagacccccttgtccccatcacaggcccaatgcagccccctagctgtgcacaggatcccgcagcccctggagttagtgctggaggattccgcaggcagcctgtggcctgaacgcagcttttcagctgtgcccatcaatactgccctctcgtggtcgcatgtccccagacgatggctgcagctacttagaatctttttttgctttctctgattctaaaggtaatgtttactcatcaaaaatttggagga

SEQ ID NO: 269176 - DNA, 418 bp, Homo sapiens
aaagtgctgtgattacatgtgtgagtcaccgcaccgggccaaaacttgctttcaatatattcgtattagttaatacgcctaaatggcattctttgttatggttacaatcctgtcattcgttagttctaacagatcctgctttttcctgcctcctacccccactttttttttcctgttttttttcctctgcttctggtccctgctcaggcatcctgtgcagtggtaattggctgcagcacagaccagtgccctgtttctggccttaaattagaggaaatgcatcccacgtttactgttgattatgatgttttatgagatgttcttgtttaatatcatgttttttttgtttgtttgttttccaatttcattcttggcctgagtattaattatctagtaatttcttaaggtatgtcctgct

SEQ ID NO: 269177 - DNA, 340 bp, Homo sapiens
aagtaaatgctgtatttacaaagaagatttaacagagtgatacatgtatgtttagaaaaaaataatttgacaagttttttttaaacaaaaggctatttgcaatcagattacataataattagaattatttagtgtataatttaccatctgtatcccaatctataatatttataagttgtacaagtttaacatttgttaatcatgcctatgtgtgattcactcctgcatgttactaaaaaagaaagatctccaatttatgttttattaattttaaaatactgcaaggaagccacagtgcaaaatttgaaaattctttatgtttggatagtccatctccttc

SEQ ID NO: 269178 - DNA, 309 bp, Homo sapiens
ggtttaaacaggccatttcattttcctagggctcaatttcctcatccataaaacaagaagttctcttgccagccataatatttctaagaattactttcacgccctagtcactgctgtgtaatcttcatgttaagagaaaagtaatatgcatggagaaatctaaaatagagtaaataaaaaattaaagcaagctatgccaggtgtggtagctcacacctgtatcccagctgaggacgcttatgtgtaaggattgatgagcccaggagttctagtccagttggacaacgttgcaagatcctgtctcaaaaa

SEQ ID NO: 269179 - DNA, 360 bp, Homo sapiens
caggggaaggtgtgcctggcctggcagatagtgcacttatgtagttggagtcaagaatgcagacttgagtcagaaaacctgtaatctctgtctcctactggctttgcagtgttgagtgtaaccacccctttgagtctgggtgtccttgtctgccagaggatggttggactagataccctctcatggcaatcgtttttgattctgcagtttagtgtagtacagtgtcaagacttctgtcactggccaggcatagtgactcatgtctgtaatcccagcacttttgggaggctgaggtgggaggatcagttgagcccaggagttcaaggccagcctgggcaacatgtgaggccttgtctctac

SEQ ID NO: 269180 - DNA, 275 bp, Homo sapiens
cttttaaaataaaatctcatttggaagtactgaagctggctgaaaagaagaaatttagaaaacgcgttggagaatcggacctgacattttccgccttggcactcactcatcatcttgacaactctgactctctgtacccagtgttcttcatacccccccttccctgtccctctcaacaggacctcagataaaaattgggagtctccatgacttcctaagggttagaaaaatggtagtctgtctttctgcctataaaaaagatcgatggaaacact

SEQ ID NO: 269181 - DNA, 358 bp, Homo sapiens
tgaccccaggccagaaaagaaaacaggactcctcctatgtcccactaaaaacaggataaggaggctgagaggagcacctgaaagatgccatttcacatctaatcacttcttgtcacgttgcaaccattttcctcatatggagcctcacgctgatagatcagaaataacattttgaaagttatgtctgcaaggaaatggctattaatgttcttcctctccttttagagcatcaaggaatacatattaattttctctctacttacattgcctatttgcaaattgtattcactactcagtgctccaatttgtcccacccctgaagagattatgatgaataaatgtgttcctggaaataaaa

SEQ ID NO: 269182 - DNA, 332 bp, Homo sapiens
gagccctaaatgtttttttgtttgacattcatgcttaacagaaaatgatgaatccattagcaactccttccgttgccaaaagaaacagacttgcacttgtagattgctttcattctgcgctatcaagccactgcatgtgctgctttcacaaagctgacagtcatctatcatttttaaatgggtttagaggtggaagagatgtacccaggacctctgtagaagcaggtacaagctaccaaaagttcctactttatttattttgagtttggaatgagcaactacaaggaaaggaagaaaattgtcaaataaaagaaaattttataaattaaaaa

SEQ ID NO: 269183 - DNA, 484 bp, Homo sapiens
aatacacttagttcagttcctgtttctttagtaggagctggtggtatttttaatggtggtgatgtcattaaattataatatcatggggccaaatccaatacagaaaaccagaaagcaccaaatgaagtttttagtgcttaaagcaacaaaattatgtatagattatttaatacaatgaatgagtcacaaataaaatgccattaggggccaggcacggtggctcacgcctgtaatcccagcacttttggaggccgaggcaggtggaccacctgaggtcagaattcgagaccagcctggccaacatggtgaaaccccatctctactaaaaattcaaaaaaaatagctggatgtggtggtgggcacctgcagtcccagctactcaggaggctgaggcaggagaatcgcttgaacctgggaggcagaggttgcagtgagtcaagatcagttcactgtattccagcctgggtgacagaacgagactatc

SEQ ID NO: 269184 - DNA, 214 bp, Homo sapiens
ccatgatgcagactggctaacttcaatttgtcttcaatttgtttggttattcagggccacatcaggactgggtgttttctgtgggtgttaacatggaattgaggctcaaccgacatggaccgttttcgtctcatgatagatgccgctgggcctgtccagtgaatgactctatgggtcacatagaagccaatacacacgggcacttggaatcaca

SEQ ID NO: 269185 - DNA, 452 bp, Homo sapiens
atcacataaattaaagtaaaattgccactctacagagtcccagcagaaaacagaatccaaatgaagagagatgagtgaaaagacaacttcgaaaaatagaggcatggttatttgaactggtgtaaggcaaaccagaggcaggactctcaggagtccgtgagagctggagccagggaagaggaacttgagcctggagagaagcagctacttgtaaaaacatagacaatagcagaaagggagtggggagtacatgccctgacttctctcttctcccaccctcccagcttctgccactgcctcccatccctggaacccaatagaagccagctaaggaactgggcatggtggtgtatgcctgtagtcccagctgctggggaggctgaggctggaggatggtttgagcctaggcattcaaatccggactgggcaacatggtgagaccttatcgctag

SEQ ID NO: 269186 - DNA, 352 bp, Homo sapiens
aaagctcgcactcttccccatcctaacattttttaaaatccctcacctcaaagacactacccaagctcagaaggtaagtgctgggtcgggaggggaatggaacaaggtttttggattttttttttttttttgtagaaaatgagctgctagaaggaaaaggcccaagtgaaagcctcagaggcggagtcgtgagcgaacctggcaggagacgaggttcctgtggcagagaaactcgtgaccggggagctgggttcccgctgggtaccccacccggcctcaggcaccgcctctacccgaaatgaatccccccgccgcccccccaggcctcctgcctctaggagcgccgcggccg

SEQ ID NO: 269187 - DNA, 410 bp, Homo sapiens
cacatgactgtactgaagctttaggtttactcatctaagtttatttctaaaacaactttaaaaagatagtgttctgtggtaataactcctaaaactatggacacgaaagtgatattaataattttcttggccgggcacggtggctcacgcctgtaatcccagcactttgggaggccgagacgggtggatcacaaggtcaggagatcgagaccatcctggctaacatgctgaaaccctgtctctactaaaaatacaaaaagttagccgggtgtggtggcgggcacctgtagtcccagctactagggaggctgaggcaggagaatcacttgaacctgggaggcagagcttgcagtgagcctagatcgcgccaccgcactccagcctgggtgaaagagtgagactctgtctcc

SEQ ID NO: 269188 - DNA, 463 bp, Homo sapiens
cctaaaaagcacatagaatagtgtctgctgcatagtaaatggtcagtaaatattagctatatttagctattattatgttttatttgagaaatctacttactagtagggggcatcctgaatcatcctgcttggatgatgaaaaggaaagggggcaccatgtcccgcatctctcaaagtatttattgttctatatctatttgtacagcttatttgactatacttaaatatcaacattagattgtgctattttaagcacagttaagtggggccactgtcatattcggtagacaaaaattaaaatgacctcatttctcattttatctaaatttgaaaccaacatggctgttttattttattaaataaacatataaataaagaaacaaatgagatttccagttgggaaatatagcagtgatgagaagaatggtacgtgtattttaagtgacatttttctatctggaaa

SEQ ID NO: 269189 - DNA, 457 bp, Homo sapiens
tgctaggattacatgcgtgagccaccccgcctggtgaaagctatgtaatatttcaagtgagagctaagaatggcttggtcaaaagtagaagagttgtggattaagagaagtggtctgattctggaaggtagagctacctgggaaagagaacaagataatctgggagtgagacctggaagatatagctgtggaatgtaagtctatagtagaggtagccagggcaactccgggggcacagatggttagttaaggaagactggagagttggggaaggtggcctagaggagaggatgcttgagcagagcctggacagatgaataggtggagatagggtgatgggcaccctagaccaagagaccccacttgtatatttattgagattgagaatatgtactaaaggagactggatagttggctgaaataaactagataagtttcccaagggccaaaaaaaaaa

SEQ ID NO: 269190 - DNA, 408 bp, Homo sapiens
aagaccatgtgaagacacagaaaaaagatggccatctgcaagccaaggaaggaggcctcagaagaaactaatcctgccatcactttggtctcagacctctaccctttagcgttgtgataaaataaatttctgtgtttaagctatccagtcttaaactggatactttgttatggcagccctagctaactaatacaaggaccaaaaggtgagaaaccacaagaccagaatattttatagaagagttatgttaaatttgatataaaaggaactggggcaagagctgagacagggccccacacaatggagatagattcctgggaagatctccattattggatctggggcaaggatcaaagcatgactaatagtaaaaccagatagatgctaagttgctgctctaaagattct

SEQ ID NO: 269191 - DNA, 168 bp, Homo sapiens
gcccgcgggagcgagatccttgggctctgtcacagggatcaaaggtccttgtggttggaaaggattaagccctgtcacccatttgagtgtttgtggttgcaagaagttttagctgaggagtttacaaggaaataaacgcagtaattgcatgagttgaattgcagatca

SEQ ID NO: 269192 - DNA, 367 bp, Homo sapiens
aacattttgaatatttcattccattttcttcttgcttgcatggtttctgagatgtgaaatgtaattcttatctttgttcctccataggtaaggtgtggtttttgtccttttaacttctttaagaatttttgctgtatcttggattttctgtagttagaaactgatatgcttatgtgtagttttttggcatttatcatgctcgatgttctttttttggacctgtagtttgatgtctgacaataattgaaggttcttggtcattattccttcaggtatctttttcttttcttttctttttctttctttcttcttttgttattcctattacacataatttataccttttgcataatagttgtcccacagt

SEQ ID NO: 269193 - DNA, 521 bp, Homo sapiens
gtgaatgttcacagcaactttgttcataataacctcaaactgcaaccaacccaaatatccgtcacctggtaagcagatgagcaaattgtgctatatctatacagtggaattctactcaatacagtggaacaactacttttacatgcaaaaacatggatgagtctcaaaagtgtttcacaaagtgaaagaagccagacaccagagactgtatactataatatgattccattaaatgaaattcttaaagagcaaaactgtaatgatacaaattagatcagtggttcctaggggtgaagtgaggaaattaactgcaaagagcaggagggaaattttgggtagtggaagtgtttctgtatcttcatcgtggtgatggtcacacaactctatgcatctatcaaaactcaaactttaccactgaaatgggtgcattttactgtactcaaattagtcctcagtataattgtttaaaaataggaccatagtggtatttgaggggaaaagaggtaggggtgatgggtgtt

SEQ ID NO: 269194 - DNA, 350 bp, Homo sapiens
cctgaattcattcccaccttagtgaatctcaatttactttgtaatttttgtgtttatttcctttcctttcaccccagatattaaactcacttcattagagaaatgtgcaaacacagaacagtttcttcatttgattttatgctgcctgaaatgttttcccaaatgttaaaaatactttaatcatttcttttaaattaatatacaaaatacttgatattttctatgagcctctacataaccagacactgcctacctcttccatgtcacctccttcaactctgtctttactcctgcatctcagccatactggccttcttacagtgtttccaagagttcaggctgctttctac

SEQ ID NO: 269195 - DNA, 406 bp, Homo sapiens
tcatctcctctagagctaatttattatctcaagagtgagaactcactcaccttcagggaggacattaatctgtttatgaggcatccatgcccatgacccagacaccaccctctgggccccagctcccaataccaccacactggggatcaaattccaacatgagatttgatggagacagacaaaccatatccaaactatagcatggactgaaaaaactccaattaaaaggaaaagattgtcagaccagctacaaaattaagactgcctgcggtctacatgatacgtactttatttatttgtttgtttgtttatttatttatttttgatacggagtctcgctctgtcacccaggtgagatcgtgccactgcagtccagcctggccaacagagtgagactccttctgaa

SEQ ID NO: 269196 - DNA, 224 bp, Homo sapiens
gcagaacagcatcaatcagaattagagaaacttggaaatgaagtgacaactcaggaaaaaagtagaactaaaaataattattctgtaaggtagactaattattatgaatccatggatttaaatacatttgatggatgtcaatacctgtgttcctggaaggaacacaaaagtaaacaaatacaagggtaatgcctcgagagacataaaaggtgaaataagacaaa

SEQ ID NO: 269197 - DNA, 324 bp, Homo sapiens
ctgcctggaagggggacaaaacacgatactagattacaacaatcaggtttaagtataaaaaaagaaaacaataacatttaaggaatataggtataactttgctatgagggagatctttaaaatctagttggaaaatccaggaataattttttaaaaagactgaaatcattggcttcataaacattcaaaaattgtgttcagtgggaagcatcataaaccaagtcataatgcaaacagactaagaagaaatatttgcaacacaaattgttgcaacacaaattggcttaagtccctgatatacaaagaatgcttacaaattgattt

SEQ ID NO: 269198 - DNA, 301 bp, Homo sapiens
gatggtctcagggaccctgacacagcaccaaagagagtgtttaaggcagagaaaacagcagactcaaaaaccccgtgacatccctgagcatctcgacatgagaagtgtaacaaaagctggttaggtgggaatggaagagaaagcaggtgtgtgacactaggtgtccacattctctcttcactggtgaatggacacctgtgattgttgttcactgttggcatcaccaccacataccattatgcttggcatgtcattgatgcccaagagtatccattaaataaatgaattataaataagcaaa

SEQ ID NO: 269199 - DNA, 314 bp, Homo sapiens
tccaggctcccaagccaagcaagcgtttgaaaatgccaccgtgtccagcccagtagagggtttcacaaatcacaaggtggctatcatcagacaggacccaggacagggggaggggcaaccagattgccccttcctctacccctgcctaggccctggcggcatcctgtctcgggagtcactgtgttttgttcccttctccctgtcttgtcttcctgcctccccacccctaccctcatgtcccagacaaaagggctgtcagaaaagacaaactcactccacagaggtttctgtgaccaaggaggctctgtgatgga

SEQ ID NO: 269200 - DNA, 703 bp, Homo sapiens
tttaaaaatcacatatttaatcagaaacttagaaaaggctgaaaatagattcaattatgagatcagcacatttgttcccaagcattacattttcatctgcgttcaacacatgcctcttctacttaagggtcccttccatcaccttcggtttagtctgcaatatgatcatcctatacttaagataaaggcatttatacagtatatgttgtaaataattattttttcactctccccttagcaggtatttgcatctaagttcaagtcaaactgaggaggaggactggggttagaagattcaagcaaggcacggcagtaaaaaaggaggcaaggccgaggcaggatataaagaaagattgttctacaagcaaaactcatagaaagccttatttcagtcatgcagtaagagtaaggttactccagtagtttggtgaagaggaaggaaaagttttaggtacatatactgaatcacctttggactaagtcatagattacaactaattaaatgcataataaattggtcctgacaattacataataaatgctatcaaatgacatttgaaaggttattcttttcaaaaataaaactgcccctattcagctattggtgcagtacctacaccacacatctgtatttgttcaaatggcatttaggctcagagagtttgttcccatttacaattggagctcgtgccgaatcctgcac

SEQ ID NO: 269201 - DNA, 648 bp, Homo sapiens
tttaaaaatcacatatttaatcagaaacttagaaaaggctgaaaatagattcaattatgagatcagcacatttgttcccaagcattacattttcatctgcgttcaacacatgcctcttctacttaagggtcccttccatcaccttcggtttagtctgcaatatgatcatcctatacttaagataaaggcatttatacagtatatgttgtaaataattattttttcactctccccttagcaggtatttgcatctaagttcaagtcaaactgaggaggaggactggggttagaagattcaagcaaggcacggcagtaaaaaaggaggcaaggccgaggcaggatataaagaaagattgttctacaagcaaaactcatagaaagccttatttcagtcatgtacatatactgaatcacctttggactaagtcatagattacaactaattaaatgcataataaattggtcctgacaattacataataaatgctatcaaatgacatttgaaaggttattcttttcaaaaataaaactgcccctattcagctattggtgcagtacctacaccacacatctgtatttgttcaaatggcatttaggctcagagagtttgttcccatttacaattggagctcgtgccgaatcctgcac

SEQ ID NO: 269202 - DNA, 2720 bp, Homo sapiens
agcggaggctatcagcgtgaatgaaaccattgtccttgtggaaaccagaatccgggcaatggataaggatgccaagaaaagaatccataatttctctgtcatcaatcctgttcctggacaagctataactcagatttttgcagttgacaatagagaagatcttcagaagtggatggaagccttctggcagcatttctttgatcttagccaatggaagcactgttgtgaagaacttatgaaaattgagattatgtcaccacggaaaccacctttgttcttgacaaaagaggcaacctcagtctaccatgatatgagcattgattcacctatgaaacttgaaagtttaacggatataatacaaaaaaaaattgaagagacaaatgggcagttccttattggtcagcgtgaagaatccttaccacctccttgggccacactctttgatggtaaccatcaaatggtcatccagaaaaaggtactgtatcctgcaagtgagccattacatgatgaaaaagggaaaaagagacaagctccccttcctccttctgataaacttccattcagcttaaaatcacagagtaacacagatcaattggttaaggacaactggggaaaaacaagtgtatctcagacatcgtctttggataccaaactatcaactctaatgcatcacttacagaaaccaatggctgctcctcgaaaacttctgcctgccaggagaaatagattaagtgatggtgagcacacagacactaaaaccaattttgaagccaagccagtgccagctccaaggcagaaatccatcaaagacattctggaccctagatcatggctgcaggcacaagtatagaaaactcttaatgataaaacatttaacaaaatctataactgtgaagcttaattcagaggcattatagaataatgtgtaattatataggtaaatatagtgatttataccaataattaataagctattaggtatagaaaaacattttataatgaagaagtggatttctcttttactcctgatttgcagaatgtaagtgatttctccagcagtgtgcaagaggcagtttctagacaatatcctaatgttggaagggttaatttattcctgaattagtaccaggcagtgaataagccctaggcagaataaagcattaaaatttctttggggagagactgtctagtaatttaaaatgtgttaaatatgaaccatattctcattgtgagaattttaatactaatggaatgtttcaaaggttttattcaaaccacaaattatagaatccacccaagaaaattttcttagcattctggaattctcatctaatggttcactggctctcatctattgtttaactcactagtttataggcctgaccttttaaattcctgggataaattttagaatattaaattcttcatctttaaagggaattgtaatgtgctattcaaacttgtttccttgatgagccctgaaatactgttgacattaactttcataaatgaagcataacacttactagtttagagaaatggtagatgaaatgctctttacattcaattttctgtgtgtggtgctaatttccattgtgactttggaatttagggaagtgagtagctgatcaacaccttaaaattcatttaatacttatttaaaaagaagatgagagattcaaaaatatcagaaaagttggccatggtaaataattttcagaattcttttttaaaattttaattagatttccttttcctagtaagagttgatgtctgctagtggtatttttcattaaatgtcatattcttacaacagtgacattggaatcatttccataggaggtaatttccatagcaactaatcatagtgacccaaacaggattataaagtcaagtgaggaataaatagcagaaaaataccttaaaggaacaaaaaatccattttttataataatgctttttgtaaacaagagcagaacagttttaaaaatctaattagaatttccaaataaaacagtttccataaggtgtcagcaacagcactaaaaatctcaaatcacactgaaccctaaatgtcattgcaagaaataaaaatttaagaattaaattgctgccctgtgtataatctcttgagatctttttaaagctagcaagaactctatttggatcagaactacattattacaaaacaaaatgaacacttgaccaaaaaaccacattaatttaaatggagcctttcattattttcagatagcggggtctttaccatttatagagaatgatgtaactgccaggacacttttgtgtttgcccaggactcctagtaagaattgaatcttgagggagtaatgataaccaaaggtttcttgtgactggtaacatcaagacagacagagatttggtgaaagaaatactatatgcctgctgatagcatgtcgagatcatcacatgtatgtgaaaccttaaaaagtaactaatttctaactaaacgccccaacaagtccggagatgcctcacaaagcatgaggctaagacatacgagaaaaggcaaaaaaaaagaagcggatgaagaagcgaaacatcacaactggcagaacgccagaacgtggagaacaaaacagacaaaagaacaaggaaagaacgaaagaggcgcgcaaacacgaagaaaaccacacaagcaaaaagacacaaacacacaagacaacaacacacacaacaaa

SEQ ID NO: 269203 - DNA, 830 bp, Homo sapiens
tggttttatgcattttaacctagattgttaatgtagctattatcttaggttcaacaatgatttgtttttagccaggtttagcattcagaggcctttttccacatcagtagacatatcccacagcatcattgtttatgacttcatagtattctgttatatgattgcaccatattttttattacttaattttttgatagataatacatgtacgtagtgtaaaatacaaacgatctgaaagagtatacagtgtttctttttttttttttttttgagacggagtttcgctttcgttgaccaggctggagtgcaatggcacgatttcatttcaccgcaatctccacctccctggttcaagtgattctcctgcttcagcctcccgagtagctgggactacaggcacatgctaccacacccagttaatttttgtatttttagtggagatggggcttcaccatgttggccaggatggtctcaatctcctgaccttgtgatctgcctgcctcggcctcccaaagtgctgggattagaggcgtgagccactgtgtctggcctacacatttcttttgttcctccagagatattctacataaatacaaaccaatacataatcatgtatgatatatatgcacacacaaaaatggcaacgtattgtaccttctgttgtgtataatgcgtgttcttccccctcaattaaaagatgttccatagaggttcataaaattttgcttcattgttttccggttgcttaatattctggtttatgagtctgccataatttatttaactagtttattttgactattcaattttcagattgtttgttctgtcag

SEQ ID NO: 269204 - DNA, 425 bp, Homo sapiens
aattaaaattagcgtatcttccatctgccaagactgaatttaaattatcttttacagactctagctatggttactagattaagcaaaacacaaaattccattggtaattccatttgtagttttctcaaaagaaaaataaatcaagatttgcttgagttgcagcaaattatgataatgtgaatattctgaattaaaccttctctgacttggtaattactgggagctctttcactgtatatcctggattatagaattattcatatgtaacaatacatatcatagtcagattcagggagagatttattacatcacttataatttagaacaaaatgtagggatttagtgtatgtgttatttgttgtaatactgagaagatcagaaaatttatgagaaagatttgcctaatttaggctaagaagattttg

SEQ ID NO: 269205 - DNA, 342 bp, Homo sapiens
ctcccaaagtgctgggattacaggtgtgagccactgcacccggctgcatgtgtatttttaaattgtagtaaatctgttttgctagattgccttccaaaaggctgagacagctgacagctgcacgtgggatcacaccagagcccaaagacctgactggttttaccattttgcctgtctggtgggcgttggcactgcctctgtggctctcatgcacactccagggcagcgcacctgctgagaactggcatctttccacaagctgttccggccctctaaaacaccgcattcatctgtaatattggcgtcataaaaattaaacatttgtcatttctattgtaaata

SEQ ID NO: 269206 - DNA, 583 bp, Homo sapiens
aacccaaagtatccatcagcttatagataagcaaaatgtggtgtatccatgcaatggagtgctgtttagccctaaacagaaggaaatactgttgtatgttacaacattaataaaccttacaaactttatgcttaatgaaggaaatcagacaccaaagattacatattacaggataattatatgaaatgaccacaaaaggaaatttacagagactgaaagcagaagtgaacaaaggacttgtcagaattgccagtactttctattctagctgcaaatcccgataaaaggttctctcactactgttaggctacttttccagtataatcttccatattcttcacttaccagttgaactttgtgcttattgaagttctgttgtatttttcaaacctgtgtattcgaattgtacttattattaatatataattaatattgtgtaaattgataaaatcttgtgaaaaaaataaaattttttatttggcaagctagattggatgctttggaaagacttcataaaagcaaatggctacatactggtttgaattaagtgtaggtaatttaagacattagagtgaaaatagta

SEQ ID NO: 269207 - DNA, 451 bp, Homo sapiens
aaggatgtgttagaagataaattttaatctgtgcattttttatttaaaagcaaagagagccaaaaagcctataaataatttaaaattgaatgatgaaaaacatttaattatcccaaagaagaaagaaaagaaggaataaaaaataattataaaatggtgaacatttcccaaacattaatcacattttttttttgtagctgggattacaggattgtgccaccatgcctgctaatttgtaaatttttgtagaggtgaagtctcactataatgcccagtcttgtcctgaactcccggcatcaaaagatcatcctgcctgggccttccaaagtgctagtattacaagtgtgagccaccatatctggactactttaaatttaaatggactacacatacctaataaaacatgaaaactgtaagaatgaattaaaaaaatgcaagactcaactatata

SEQ ID NO: 269208 - DNA, 363 bp, Homo sapiens
ccaacgaggggacctgaggaccctacgccctgacccacaccaacgagggaacatggaggatgccacgctccacagaagctgccaggcaccacagccggcaggatggggttccccagcaggccagcagggagcagccagaccaggcgaggccacggcgagggggcattggggttgtcggagccggggtgggggaagggagagcaggggtggccactcatgggcaagggtttctttctggggacaagaaaatgttctgaaattggtggtggccgcataattatgtgaagccaccaaaacccaccgaattatacactttgagtgaattaaatggtgtatagatcatatttcgataaagctgatata

SEQ ID NO: 269209 - DNA, 375 bp, Homo sapiens
agtttacagaagaactaggtagcctgttcccactcagaaactcattccacatggtttgggtggtcctaccactgccctcacccgcgtcaacaaaggagtgggaaccgaactcaggccctgcccatcagatcatcgaattcctctggccacagtgattgggttgtgatcagttaggattctgcacttgtgactgaaaaatccttgtacaggaaccaaccttctggaaacttctcccatgtgtcaggcccacagcacctagcactggatgagacacatcacaaatcctggacaaactcttgctgaaaccatgacatgtcgatggcccttcacagaagacttcacaaaaggcttcccataaccctattaatggaaaaa

SEQ ID NO: 269210 - DNA, 466 bp, Homo sapiens
agatctacttattttccaagaatggcgctatatttggggaatactacgatgggactatctatttttttctagtctaagtctttgtgccttttcacatatattttagaatttgttgccaacatctgaaaactgatattttgattgggattgtgctgaatttctaatacagcaagttgtctatccatttgtatctcatttgtgatttcctcccactgaatgcaatatggaaaggcgtgggaagtgacagtaactttataggggagacacttgacaaacactacctcagccaggtgacaaagatcatgcctggaggtagcaatcactccacccaccaggagctgtggatccaacagcaaaaaaggcagagtccctaccatcaaggagatgcagccagggaagtggtgaatgtggtggagaaagtaaagaagacacagtaaagtaaacatgtaatcatctagtattgtga

SEQ ID NO: 269211 - DNA, 419 bp, Homo sapiens
attagtaaaaggttgtctactcacacctttttttctctagatcactctgtccaatgttagcatctttcatcctctagagagaccgagaattttcaaaatcatcaagtcctggttactttttgttgaacagttttcccctcaatttatctctctcatcttacattttattataagcagcaagaaaaaacttaggcctcactttcaacacatggattgggtcatcacttacaagttgtgctttctacgagactacaggagaccatttcactaagctttttgccactaaataacaagtgtctccctccagtggccaataacatgttccaggtctagatttctgctctcagtctgttcagggcaatttatgcattttttatcatgcttctcaaaattcttccaacctgtatcaatgaatagtc

SEQ ID NO: 269212 - DNA, 322 bp, Homo sapiens
gacagttttctctttgaaaagtcatgttcctttgaatttaactaaaacgtaacaggatgttaaaacgaaaccctggcatttttctttccttcagaaatatgcccacattttatagagaaagctatatattgaggttctgcaaacaacaaaatgcaattttcacattaaacatggattctaacatctggcatttctcctagtgcttgcacataattatccaaaattgcagtttttccaacaggggacccacagtggtagctctgattcattccacattatatatatgaccctttctcatagtgagggtggtcttcaacaccaa

SEQ ID NO: 269213 - DNA, 242 bp, Homo sapiens
taagaagggaggagccaatggatacagaatgagaagaatattttgagaatgaggcaggaagaggaatataagacctggagaagttcattcagctcaactgagaggagacggaagtcagaacacggtgcaaagggaagaggagtatgacctatgctgcagtagaaatgttatctggagtttggggaattatttatagggattgagtcctgtatgttggggagatagggctacattatattcag

SEQ ID NO: 269214 - DNA, 499 bp, Homo sapiens
ctacttcagttcagatggcctacttgagttgctgaagtatcattgcggaggtgactggactaaaatagctagtccgtacatatagttctaaaaagtcttcttggattagaaagtagtgtttctaatttttgttgttccaaaagacagagctttgggaaagtccatctggttatgcaattcccaagtaaaatttgacacatatatttggacaatgtgaaaaaagttcttcaggaaacactaatgtttaatgagctataactggccctggtaaacaaacatactattcttttttcatcttatagggaataattatgaaggcatatgaggatggtagcatctactactcacatctgccttacttgccactgttttctattgcctgaatttacccaaccctcatagttgctgatatatttttacactttctacgtatttgcagccaagaaagtcactaaaagggacaccccaaaaatagttccacactacagcatgagaaaat

SEQ ID NO: 269215 - DNA, 679 bp, Homo sapiens
tcccccgggctgcaggaatcggcacgaggcagactttattattaaattttcaagatgttattctatattacaggaacatcattacaatgtgatggggagtacaataaccccaatgagggccaggagtggtggctcacgcctgtgatcccagcactttgggaggccgaggtgggcagatcgtgaggtcaggagattgagaccatcctgaccaacatggtgaaaccccttctctactaaaaatacaaaaattatctgggcatggtggcacgtgcctgtaatcccaattactcgggaggctggggcaggagaattgcttgaaccagggaggcgtagattgcagtgagccgagattgggccactgcactccagcctggcaacagagggagactctgtctcaattatttatcatacagatagaaacatttttaaagattctgagaaaaaaatgaagacaataaatatataacacaattttgtctaatccagaaatgtctcagacaacctgaatttaaagttatccaccagtaatgccatggatttcaaaccatgatattaaatatgtggttgtaaaatgaattatttgcatgaaagcattgccattatagttcctcgtgatattgtgtaaggcatcgaacaagcccaagcacgctggaattgacagtaagtagaaagaaaccca

SEQ ID NO: 269216 - DNA, 666 bp, Homo sapiens
aattagggcccgaaaattttaaagtaccctcatgaatatatggatattttatgaccacattaattaccatgacaggaaaaggcatatgaaaaaaacttctctgctctagcagtcatttttagtatcctttttagaaaaccaaatagttcatgaaaagactgcctatatgttctggtttcaaggcagacttactttgtttgtttgttttaatttataatatggtactttgaagggcaaagtagcatcacatgtttacctatacactttcaattaaaaatttagatattttcagtatcttcacctcaacattggcaccatgttgattccaaggctatctaacctatgaataatattgagaatttacttctaaaacttactaatagatagttgtatacttagaaacagagccagcttcattttcctcaatcccttctaatagacactaacacattctaaagtgatatataagaaaactgctttcttatctattagctttttacctaaataaatggtaaaagtatttcttcaattagaattgtcatttagaactacagtttagttataccattattattatcaatcattgttgaatttttcacaaattatcatcaacatcatcagcaaacaaaactaacaaagagaccaaaataaataaatggacttttg

SEQ ID NO: 269217 - DNA, 420 bp, Homo sapiens
tcagagacttaataggatctagtgggcttctgcagaacttcgctgattatcttaaagaaataggggttgaatgaaactttgagggcactcagaacactgagaagttgaggggaagctgagtaaaaaacaagaaattacattacaggatggtatgccagcagaaattgacaattaaaactcagtatctgatctcaccaatgtgtaaagttatacacagacgaccagatcatggcatgttttgaaaattttctgataagaatctgcaactatgactagcaacggaaagcaagcaggaagtctagtgttgggctgagtatctgatgatttaatgtgtttccctggattttcctttgcttggcaagcaggtaacttgctgaatcttctgctggctatctttaaaaatatatttaagcttgaaat

SEQ ID NO: 269218 - DNA, 466 bp, Homo sapiens
caggaaatcaggcattactattataaaatctattaactgtacttaaattttaccagttgtcccactgatgtctttcttctggtctaaaacccaattcaggatcacatgttgcatttagttacttttaatctggaacttatgaacactttgacaaatacttgtcagtattttgtatatcctctctcattttggttttgtattgcatttttcatggttaaattcaggttaggcatttttagcaaaacatcaaagtcatgtgtcctcagtgaatttccatgatttggccccttaactggtgattttaaccttgatcacttggttaaggtggtatctgccacatttttcccctataaaattactattttttccctttgtaatatataattatctgtggttgcccatatgatatttcaagtctgtgtaaatattctcatattttgcctttatataatcttccattaatttt

SEQ ID NO: 269219 - DNA, 509 bp, Homo sapiens
tacttcaatactgttcactatgttagacatcttacatccattatctgctattaactcctataatatgtagtattatccctaaaatataggaaaataaatagacacagatgtagcaatacatagtaacaaactgatctttttgcaagatacagattacaaaattatttaacctctgagtgtcttactttccattttacaaaatggggttttaaacataagacccaaaaccataaaaaccctagaagaaaacctaggcagtaacattcaggacataggcatgggcttagacttcatgactaaaacacgaaaagcaatggcaacaatgccaaaattgacaaatgggatctaattaaactaaatagcttctgcacagcaaaagaaactatcaccggagttaaaaaggcaacctacagaatgggagaaaatttttgcaacctatccatctgacaaagggataatatccagaatctacaaagaacttaaacaagtttacaaaaaaaaaaaaaaaa

SEQ ID NO: 269220 - DNA, 551 bp, Homo sapiens
ttctttttaagatattacttctccaataaactgtttgcattgttaactcatgttgacatttgctttctagagaatctaacaatgaagaagactgaaaaaacatgtaatggaatgtgaaaacaaaagtctttcagtagagctcagtgataccaggcacctaccaggcagtcctctccccacttctgggtgggtgggagacttcggagcagtcacacacagagtggaacaagcacaaaggatggctctgtcgcccaggctggagtgcagtggcacgatctcaggtcgctgcaacctctgtctcctgggttcaggcaattctcttgcctcagtctcctgagtagctgggattataggcacccaccaccacgccctgctaatttttgtatttttagtagagatgtggtttcactatgttggccaggctggtcttgaacttctgacctcaagtcatccaccagcttcagcctcccagagtgctgggattacaggaatgagccactgttccctgccaactctctgtcttttggggtattgattctgcactctacaac

SEQ ID NO: 269221 - DNA, 422 bp, Homo sapiens
gcccagaagctcaatgttgaacacagaattcagtgttatgaaattagttgaaactctgtctggtgtttcaaccagctgccacttttgcccatcattttgcttttcaagtacactagaatattggtaaaaggtaaaaaaaaaaccaaggtttccaagtttgtaatctttcctcaacattgaattctcaagttctggcttctacagtatttctttaatgacaagacaaattccttttaatatgctttgtcaaatttcctagactgccaaaccaacctcaaagacagtaagtatgccttggcttagtctgctatgacctgaggttggttgactattaccaatatattggtatttttaataaacttgaaaacaataatataacatgagaatagactattcagaaagtatatcaagttagtcacaaa

SEQ ID NO: 269222 - DNA, 339 bp, Homo sapiens
cctgatttgccctctctcattctcaggatggaagacctctctagccaatgggaagatggcaagatgtgtgaatgtacccctgggagcaaaatcacagagcctgtgtaatcctctatacatgtagggactgagtgtgggtatctctggccagtgtggatgttgaccacgttgtttcgtaaccctgcctcacttgctcctctctccccaacctccagaactgcctatctaactcatctgtggtgatggaatgctatttctttcacattaccctgattaagtatcattagaaaggtaactgctgtgcttaaaacaaataaatcacctaacacattccagaga

SEQ ID NO: 269223 - DNA, 81 bp, Homo sapiens
ccatgtagagattcaggcgctgcagaagagtctgtttgtatctgtcttttaaacggcaaataaaatgtcattgatatcctc

SEQ ID NO: 269224 - DNA, 316 bp, Homo sapiens
ttataactatatctgcaatcttttacaaaagtggatgcagatgtggaattattaaaagacaacatagcataaatattctgataaaaagtaagattacaaccagagataaaactgacatatcttcttttaccttctcctattcatcattcaacaattagggtatttctcttcatctcatttttgttttactatttttaattttttaaaataacatttgcatttgattatccattatacatctaatttttaaaaacagaaaatgcaggaatttttaaaactccagaataatgaatgtgtttatgctttaaattaaaaa

SEQ ID NO: 269225 - DNA, 493 bp, Homo sapiens
gagccgaagtacagaaaccatatttacaggtacatgtgacagcgttgcagctatgagtggaattttaaaggggaagtttgaagaagtcaacggctcctcaccctgctcttcagtgcaggaatcagatgatgaagttttcagctgtgacagtactgagagtgttgatagtgtcaatcgttcagttttaatgattttaccagaaaaaatgaggaaatatcaacagactgaaaatatgttttcagaggcatagaatcttcaggaaaatactggagttcctgagatctcaagatggagagccacttagcttgcagactgccatctccctaacgtatcagaacaatgaacttggttccaagagtatagaactcagtgaatgtaaaatggatgaatgtatgaattaatgcataaatcaataaatgaacccagatgaataatatgccaaagttgtttctgtatatctctgtgatacaaataaacatatgctcattctatt

SEQ ID NO: 269226 - DNA, 626 bp, Homo sapiens
ataaacatcagtttctctgtttttaaaacaagaattgagtaagaacagagattaaagtaacaaatccgtagtatgatttctgagctcccttgttctccttcttcaagggagcagagctcttcatctgcagggagcatttcccccaaaaaaggcagctttggagggcacgggatttatttgaaagggctttgacattatttggtggaaatagaaaataacgtgttctgtagtagctttatatttttggttattgacaggatgtttacgaagatctgattgctcttgattttcttgacaaaaataaaatgagacacacacatagcaaaattctttaaacacgaatggttgtcttctccctataatcaaccatttaatttggtttcaagaaaacaaatacatatgttcctaatatatttagatgtattcaataaacattgttaattaaaaaatttgtgttcattctaaccaaactggaatacatccatagtgatatgactttcacagaagtttatatgtagatttccagattttatccagcttagccttacaggtaggaaggcatcctcgtgttctaaagagatgtctgctgccctcgttttaaaggcctgaagcttcttggttttgtt

SEQ ID NO: 269227 - DNA, 372 bp, Homo sapiens
aggtgagtgtaagcccctagtgagccaagaacactaacattcccactttctaacccaccaggccagtctaacccttgtgcctttcctacctggtacttgaaggctcttgagtttgcacgccgtgagcctccccatattcagggaaaggctgttttctgtgagctgacatatttgggcacagacgtaggttaggaacttaggaaggttgattttaaaggctggagatcctggccagtccttggagttccacacattaggggatgcagaaggaaacagggaaggcattctttagccaaaacggagaattcagatttgctgtgaagaacaagaacaaaataaagctcagagcttttcaatgcatatatatttaaa

SEQ ID NO: 269228 - DNA, 444 bp, Homo sapiens
gcagagcagggacaggaggctgatgtcccctccctctgccagggcacgggcagccaggcagtgaggccacattaggactcaattcaggctggcctgagcatctgagaaagggaagtaggatagaggggcaggctggggacagatccatgggcaacatggatcacccaagactagtacaaagaaaggggctggggcactaaggtacagattgggcaatcagcacacagtatgtgccaggtgcagggctgggtgctgggattccagggtgagcaaaaagacacctaccctcatgagactcctgcccagtgcaggaaattcagggcacataccttttctcctaccgctcacacctgctcctcctgcctcctcatttttccttccagctagaatgggtggagtttccctcttcccattcattcactctattattcacccaagtattta

SEQ ID NO: 269229 - DNA, 199 bp, Homo sapiens
ctcccgcctcaggccgagatgaggagcccttcagaatagctgctgtctctgggaggacccgggcgtccttggcagcccagctgctctggacaaagccctgccagtcaggcctccgctggcaggaaccatggcagaggctggggatgctgcgctatcggtggccgagtggctgcgggcattgcacctggagcagtacacg

SEQ ID NO: 269230 - DNA, 395 bp, Homo sapiens
tgccaatcaagatatagaaactatctacaaagtccccttgtgcccctttctagtcaatacccttccaagctcaaaggaaacaactactttgatttctattgccacagattagttttgaccttcatattgatggaattgtacagtacctaactcttttgtgtctgccttcttttactcaacatgtttttaagattcacccaggctgtagtgtatatcaacagtgtgtattactctgagtagtatatcacaatttatatttttctgttgatgaatatttgtgttgtttttgactttttggtatttttaataaattagccgttaattctaattgagcaaaatatttccccctaataggacatgaaatttgaaatatcttaagaaatttcttattcata

SEQ ID NO: 269231 - DNA, 241 bp, Homo sapiens
ttaaccgacatgtagtcagacttccagcaatggatgcagcaaacacacagggttataaaacttttgtcttgttactcatacatttgttgacatcagtagtttactctccctacatgcacatggctcataaatcagcattgttaacatgtctaaaaacattagcataagatcattatgattcacttaggcactggctccatcagttacacatgaagagaggtgttgaatctgacaaaaagaa

SEQ ID NO: 269232 - DNA, 216 bp, Homo sapiens
caggtttagatcctcaccttccctagaggagagaatggctggccagtgagctatatttaaactttttttttttccccctgagagacagggtcattacctcctgggctcgggtgatcatcccacctcagcctcccaaatagctgggattacaggcgcataccactatgcctggctaattttttttatttttagtagagatgaggtttcgccatctct

SEQ ID NO: 269233 - DNA, 436 bp, Homo sapiens
aaaccacagcaactgccaagcttctttcactgcctggacactgcacctctggaatgaagctcctggaagactcctttctaaaaatggggctgcgaaccttagttaaggtgacataatgaaactcagaggcaggtcctatcaaaaaggtgatcttttaaaagctgaccctcttgtctttcagaaatcttgattttgttttcatttcaccccactgcaactaaaaccatttcatttccaacatataacagaagaatgcctgagaaattaaatgtttgaataaaatatgtgcagtattttaacaccagcaatgtatcccgaattaaccaatcttattaatatttctacacaatcaggaaaccaaattctttagttttctttgcaactcagtgaatatacatttctgtaaagagaatcattaaagaaatgtggctactat

SEQ ID NO: 269234 - DNA, 1910 bp, Homo sapiens
tcctcctcatcatcttaccatttaatcaataattgcaatcagcctgtcagaatacgtaaagggaatccatgtaattcacaggcgggagttgttatttctgtagtaaagacctgactgcagcatttacacatgataaataggaaatggcaaacctggggaagcaagtttgaactcaatctggaagtaatagcctaagcagcttgctcttcacactgtgtttcccatgtcacccttttcctcttaggtatcttgcttctccctctcatttcaatctcctccttccttctgttcctccatccttccatccctccctcctgtctttctctgacacaatgactcagctagtttaagagaatggtattattttgaagtctgaaaatgtttctgtgatattttgctttttactgatctttaaagcaactcacagaagtgtattagccttagatacgtaatcaccccttgagatatatagtcaacagtacacactgacatgttcatagtaaaaactgcctttatgtttcactgcattcaagcaagtagatatttgtttgtttcacgtattgcaaagcctatgttcttaagcatgtaccaaaatcacatttatttcattaatccatttactcattcaccagaatgtaacaaaatttagtgaatatctgctatgtgtcaggcacttttcttggctcttgatatacaatgatattcaaataaaactcatagtctggtaggggaggtaggagacaaatatgtactgatgttaatagatattcctgaaataaataaaggaattaggatggttaggaacgtccttccagaagaaatgcaaggctggccatgaaaggtgactatatcgtaataggcagaaggtggcagcgcaggtatgggtcgtaagaagaaccttataggaaaggaggtcaacttgccccagtgccatgagctcagcactacaacctggtgcaggacttcgaagtaatagaaagcgaggctgcaaaggtggacagggacctgaagacagagggccaggttagtgagagcagacttaccacgggcatagcttagcagttttaagaataggatcagattttcatttgataaaatcaccctgatgacaaggtggagagtggattagatgtgggtaacatcgaagataaagaagcaggtacagagactcataaaatatgcagatgagaggtagtggagaccagaatcaaaactgtgaggaataggaatgtttaaatatgtcccaagttacaattcagttacatatttcatcagccagcatgtcctgtgcacacacgacctgctcttactgctttccatgttctgtatgtggaaggagatcagtcaatcttgaactcatggcctcagtattttgtactttataatttatattttttcctatagaggcttttctatttatgtgtattccacttccccatatcactaaactgtctttttccacaggattcaattcttgaactagtaggagtgaagggcagtctgttgaaacctgtaatctcttaggcttgtattttctttgaacatagtttccacagaattcttccctgtaggggaaggcctgggcacttcttgatgtcagaacatgttgtctttagtttggaatctgccaaaacaaaagttaaatcaaaaatgttaattcctgtcaccccagcacttcgggaggccaaagcaggaggattgcttgagcccaggagtccgagactggcctgggtaacatagcgagacctcgtctctacattaaaatttaaaaattagctggatgtgctggcatgcactcatagtcccagctgctcaggaggctaaggcgggaggattgcttgagtctgggaggtcgaggctgcagtgagccactgcactccagcgagtgatggagtgagaccctgtctcag

SEQ ID NO: 269235 - DNA, 1856 bp, Homo sapiens
tcctcctcatcatcttaccatttaatcaataattgcaatcagcctgtcagaatacgtaaagggaatccatgtaattcacaggcgggagttgttatttctgtagtaaagacctgactgcagcatttacacatgataaataggaaatggcaaacctggggaagcaagtttgaactcaatctggaagtaatagcctaagcagcttgctcttcacactgtgtttcccatgtcacccttttcctcttaggtatcttgcttctccctctcatttcaatctcctccttccttctgttcctccatccttccatccctccctcctgtctttctctgacacaatgactcagctagtttaagagaatggtattattttgaagtctgaaaatgtttctgtgatattttgctttttactgatctttaaagcaactcacagaagtgtattagccttagatacgtaatcaccccttgagatatatagtcaacagtacacactgacatgttcatagtaaaaactgcctttatgtttcactgcattcaagcaagtagatatttgtttgtttcacgtattgcaaagcctatgttcttaagcatgtaccaaaatcacatttatttcattaatccatttactcattcaccagaatgtaacaaaatttagtgaatatctgctatgtgtcaggcacttttcttggctcttgatatacaatgatattcaaataaaactcatagtctggtaggggaggtaggagacaaatatgtactgatgttaatagatattcctgaaataaataaaggaattaggatggttaggaacgtccttccagaagaaatgcaaggctggccatgaaaggtgactatatcgtaataggcagaaggtggcagcgcaggtatgggtcgtaagaagaaccttataggaaaggaggtcaacttgccccagtgccatgagctcagcactacaacctggtgcaggacttcgaagtaatagaaagcgaggctgcaaaggtggacagggacctgaagacagagggccaggttagtgagagcagacttaccacgggcatagcttagcagttttaagaataggatcagattttcatttgataaaatcaccctgatgacaaggtggagagtggattagatgtgggtaacatcgaagataaagaagcaggtacagagactcataaaatatgcagatgagaggtagtggagaccagaatcatatttcatcagccagcatgtcctgtgcacacacgacctgctcttactgctttccatgttctgtatgtggaaggagatcagtcaatcttgaactcatggcctcagtattttgtactttataatttatattttttcctatagaggcttttctatttatgtgtattccacttccccatatcactaaactgtctttttccacaggattcaattcttgaactagtaggagtgaagggcagtctgttgaaacctgtaatctcttaggcttgtattttctttgaacatagtttccacagaattcttccctgtaggggaaggcctgggcacttcttgatgtcagaacatgttgtctttagtttggaatctgccaaaacaaaagttaaatcaaaaatgttaattcctgtcaccccagcacttcgggaggccaaagcaggaggattgcttgagcccaggagtccgagactggcctgggtaacatagcgagacctcgtctctacattaaaatttaaaaattagctggatgtgctggcatgcactcatagtcccagctgctcaggaggctaaggcgggaggattgcttgagtctgggaggtcgaggctgcagtgagccactgcactccagcgagtgatggagtgagaccctgtctcag

SEQ ID NO: 269236 - DNA, 416 bp, Homo sapiens
tacaaataagagtgatctttacatttaaaaagagttttacaaagaagaggaatagtgtgcaacagagactgtatgttgctcccaaagcctaaaatatttaccatctagtcctttagaaaaaaaaaaaaatcaaacaaacttgccaacccctaacatagaacgggtgagagagtagtaaatctttgtcatcttcatctactgagattttgttacctcagcataacctagtgttaacctgactgatacaccaggggaagagggaaggaaaaccatggtgagcagagggcacaaaggcaaaacagcagtatctattcaaggcaatggaagggattcagggtgattcaagggtggggttcaaatggactaacaatgtgaagtaagacaaaaaaaaaaaggcaaggactggattagctgga

SEQ ID NO: 269237 - DNA, 359 bp, Homo sapiens
tacaaataagagtgatctttacatttaaaaagagttttacaaagaagaggaatagtgtgcaacagagactgtatgttgctcccaaagcctaaaatatttaccatctagtcctttagaataaatctttgtcatcttcatctactgagattttgttacctcagcataacctagtgttaacctgactgatacaccaggggaagagggaaggaaaaccatggtgagcagagggcacaaaggcaaaacagcagtatctattcaaggcaatggaagggattcagggtgattcaagggtggggttcaaatggactaacaatgtgaagtaagacaaaaaaaaaaaggcaaggactggattagctgga

SEQ ID NO: 269238 - DNA, 426 bp, Homo sapiens
ttgagccattctttggacttttctactcgtttaggtcatgataatacagttgcattggaatggggtgaaattatgggattatagagcatttcaaacctggctgtgaataatgtctgtacatataggagagtgataagtcactgtaacttcactgagccacagtttcctcatctattaaaatgaaataattaaatattaattattaaaacagcataattcttggcaagtaattaataagtactcaattgatagtagctatggtttttactatttttttcatagacaaataatatcaaagctgctttacctttcaaagttagaaaccaaactatataaaaataattttatacccacaataggttttctgatataacaaattgtatgccacttttaaattttgaaataaatcattttgttttccattga

SEQ ID NO: 269239 - DNA, 569 bp, Homo sapiens
tctccgtccgtgttagttattaagaagaaagcactagtggttgctagcaacaggtctctatagaggacaaggtaccagaggaaaaagcctcctttgactgaatatagaggtgggagggtaggaaaggtgggggtcaaagacctctgaatagcaggccagctatagggaatggttggtttgtcctccaagaccagccctttccccaggccttagcaaactccgcctttacaaccctcaggattggtggtaggaggaaggccttaggcactcctccattcctgccaggaggagggaacctggtttccatagcaacccagaaacaatcctggccttgttttgcttatggcttctctgtaaccccctcttgggacacacactatcatagactcccttctctgaccctcaacttctgatttgagggagagagcccatagaaaggttggggggtagtgccacaaaagctggtctcacttggtcctaaagtgacctattaagactacaaaggaggggtgacttaggggtaaggtcctccaggtatcctctgacctctgcatcttataaggggctgt

SEQ ID NO: 269240 - DNA, 375 bp, Homo sapiens
gaaatattttaaaaaataattcaataaatacatttgattacatacaaagtaggactggggtggttttattttttgctttactttttaacagctttgttaaggtatatgataaactgcacatattatatgacatatgataaactgcacatatttaaatatgtatgatttgataagttttaacatatgtatacacctgtgaaaccatctccatgatccaaatggtgaatatagtcaccacctctgaaagtttttatgtactccttggtaatccatgcctcttgctcctccccccaccatcctaggaaccacaatttttttgtcactatagatgagtttgcatttattttctagaattgtatttaagtggaatcatgc

SEQ ID NO: 269241 - DNA, 455 bp, Homo sapiens
atccctgaggctgcggagtactcctcacgacaagaacgaccctcgggtgagagagcagcccagggtcacgcaggccgacctgtcctcgagatctcggatggcggcacgacttttggggagacccacccaaccaacaccatccgggcaggcctgaggctgggatcctgtgctgcttccgccgtacccccctggggcttcctcatcctggtcggccctttgtgactcctggaatccggagacgttcacgtcgaccccgtggagaggtcaggccggagcctcacagccccgacacccaagcactgccacggagggctcctgctttgccaagcctcggggactggtttctaagacaaccgaaggaaccactgtgaagggagaagccactagagcctcgcgcatgcgcattggctgggacgactcgcgctcagctcctggcagtcaggctacgtcccctt

SEQ ID NO: 269242 - DNA, 397 bp, Homo sapiens
tttaaaaactgcattacacaaggtattgtaagcaaagttcaacagcaaggggtaaattagaagaatttataattcagagatagacacaaccaaatgtcctatgtatataaggatctcttaaaaatctccaaaaacaggccggatgcagtggctcacaactgtaatcctagcactttgggaggctgaggcaggcagatcacttgagaccaggagttcgagaccagcctgacaatcatggtgaaaccttatctctagtaaaaatacaaaaaaaaattagccaggcattgtggtacatgcctgtaatcttagttacttcagaggctgaggtgggacaactgcttgaacctgggaggtggaggtggcagtgagctgagatcaccaactgcacactccagcc

SEQ ID NO: 269243 - DNA, 186 bp, Homo sapiens
taaattttttttggctccactcttccaatttcaataaacttggtgaagaagaatatagaataaaagttgaaagccaggtgcagtaactcatgcctgtaatcccagcactttgggaggctgaggccggcagatcacttgaggtcaggagttcaagaccagcctggcaaatatggtgaaaccctatcc

SEQ ID NO: 269244 - DNA, 419 bp, Homo sapiens
ctgaagtacctaaagttaactcaggaattctgttctctgccactctatcaaataaaataaaaatttatcttgattagacaaaatcaaacctaacctaaaacagaattaccttccccaggaagggggaatactacttatactacaaattaattggagaaagcaggatgcaaaattgtttattcagtgtgatctcaaatgtgtaaaataatatttgctggaagaatgaagtacggcaagatgttaacagtttttacttctgggtgatgcaatcatgtatgatttgtattttcttatctattctgtgtttgccaaattttctaaactatcttttatgattcttaaatcttttatgatttaagaattatatgtatccactatttaattttttaattgctacataatatagatattttcgtggt

SEQ ID NO: 269245 - DNA, 786 bp, Homo sapiens
ctaaggaaattgatctgttaatgaaagttggcttgcttgacttcagaatatctgtattattcaatgatgtgtttttctggttgctttgtttgagcatagtgtaaatatcacccattgcatagctatggcagtgacataaatctagcagcgtaagatcgagaaaagctagaagtcccaccacagattgtatttcagtgaaagggattcattttaactgcttataaaactaaagaaaacttataaacatggaaaacaattattaaacccaccatatgctcatactgatattaaatggtgtgccagattctagaaagagttaccttttggtaagagcactgcttgttaactatggttggttgctttagatgtctagtgtgtacacaaaagcatgaattttattccttataaccaaagtagaaacctactctgagcaatttgacaaaaggtttacattatttattttagtgtagtttaagattacagtaagatgcaattcccaaagagtgaaatataaggctgggcatggtggatcacgcctgtaatcctaacactttgggaggctgaggcaggtgcatcacctgagatcaggagttcgagaccagcctggccaacatgacgaaaccccatctctactaaaaatacaacaattagccagatgtggtggtgcccacctgtaatcccagctactagggaggctgaggcaggagaatcccttgaacctgggggggtggaggctggagtgagctgagatcatgccattgcactccagcctgggcacactctcaa

SEQ ID NO: 269246 - DNA, 226 bp, Homo sapiens
cagctcatccttctccttaaaggaaatttctagttattcagatttaacctactcaaataaaaatgttattcttacaaatgtatgctttagtaattgtatcttttcaggatgaatagaagcaactcatacacaaatatctgtcagttaatgctgtcaaagactattctgggttggaaataccttgtcattaaaagtgaataggccaggaaaaagaaaagaaggtaga

SEQ ID NO: 269247 - DNA, 484 bp, Homo sapiens
  misc_feature (90)..(90): n is a, c, g, or t
gccaaacaggaaggatgttgtctcattagcacgaatttccaagatgtgaaagcatatctaccaacacttatcagcctaccagccaccccnaacttcccccaattttcatgcaaatgaagtgacagaaaaaaaaagttatgataccctgtgagtgttcacagccttttcccacccccaggggtgttcattctctcctagctcagttcctaggcttatgtatagggcagaaaaattaggggctgggcagcaggtagagggggtcttgaggtgccattgtcttgctctggaaaaggccaagatctggaaatggaggggttaggggtagagagagagaccaaagtctctgagcattggaggaggagattggaaaggggaaccttcatggtgtaggtaacaggagggttttgcttgcttgcttcccaacatcaccttttgtaacatcccagagttacaaaaggcaatgttgaaaactgggaaaagaata

SEQ ID NO: 269248 - DNA, 428 bp, Homo sapiens
caaaaagatttacacagaagagattttttaattatggtatattcattgaatggaacactactcagcaatagaaaaataaattgccactgttacatgcaacaacacagatgaatgttaaaaaatagtacgttgaacaaaataagacaaatattaaaacatacctactgtatgatcccacttacataaagttttagaataggcaacttaaacctattgtgaaaaagagaatatgaacagcagttacctgggtgcaggcaagaggggattattaacagagaaagcacacaaggaaactttctaggtgatggaaatgttctataacttgagagacgtgtggatgagacagatacaaccatttgtcaaaagtgcatagttaaggtttgtatctttcaatgtatgtaaattttaccttacaaaaagccataaaa

SEQ ID NO: 269249 - DNA, 394 bp, Homo sapiens
gagatgcggtttccctcatgtcacccagcctggaatgcagtggcgcgatctcggctcattgcaacctccgcctcctgggttcaagcgattctcctgcctcagcctcccgagtatctgggattacagccatgcgcctccacacccagctaatttttgtattttcagtagagacggagtttcaccatgttggccaggctggtctcgaactcctgacctcaagtgatctgcccaccttggcctcccaaggtgttgggattacaggagtgagccaccgcacccggccaattcatactattctttatcatgttgttatgaagatgaaatgggaagctgcatgtgaaattcttggcacagtgctcacttagcatgcaataataccttttatcattactct

SEQ ID NO: 269250 - DNA, 543 bp, Homo sapiens
tgagggttccccacctgtgagacaaggaaatacctcgagtgtaatagagcctatcaacacatggactaactttgagaaagcacctagttcagggcctggcacatgggaaggcatctgataaatatgtgttcttttattcactgatatattccaaaaaatgtgttattttaacaaggaattagttttttaattctttcactgaaaaaggaaaaagcagtaaatgattttgttaaatgtcattggcaacttaatcagaaactaatccaaacaactttaggccttctagattaaagcatttgtcccttactagttacatttacctattaaaattgacttaagaattttggttatgagcagcaggagtctcacataaactgacagcacaacttggagacaatgtttaatattttatatctcatgttttacaaacttttagagcagaagtctgtgttaaatcactttagagatgacttgcacaattctgcttgtgtgtgtgtgtgtgtgtgtatatatgcatgccagagagaaaggaggaaaaaaaaa

SEQ ID NO: 269251 - DNA, 245 bp, Homo sapiens
gatcggccaagttcacccccaatggcagcagcttcagcatttcctggcaatctcctccggtcactttcacaggcatcccagacctcacaaaagcttcttattgtcaaccactggcatctcccggaggtttccagcaaagtctaacgccttctgtggaactgataaaaatgaaagtggctgaatgaattgtgctgtgctctgttgatgaatatttattaaattccatagaggaatagccaagaata

SEQ ID NO: 269252 - DNA, 643 bp, Homo sapiens
cttgtctcccagccatctcatttccaacgggaagggtctgaccttatacaatactttagaagtatttcaggtgtcatgtagggaaactaaactctatagcctcatcattcagacagcagacaccatttaggaaatattaggaattgcaaagaagctaaatttttaaaagaaggcttcttgcattttgtttcatcaagaaccttagtgaaatttcaaaagcaatggggtttacaatcacaaggctctggataaccatttggtgataaattgcaggtattctaatttggaggaagctcttctttcccagacaactctgtctcatcttaacattagcactagtctgaaggtgtatagtttctgaaaggcatggactacggcctttttctttcaaactttgtattcaaatgcttagcacttgagactataaacctagtatttataaatcggtaacttgttgctttattaattggtgagaatgtccacaaaagtgtgaatttgtagcaggttcatgagcaaagtggtaataggctgcatgtttattttattttattattattattattatttttgagacagagtctcgctctgtcgcccagactggagtgcagtggtgcgatctcggctcactgcaagccgcctcaag

SEQ ID NO: 269253 - DNA, 438 bp, Homo sapiens
gcaatgaggatcgaggcttggaggcggatccacattttgtgggacacgaacgttattcaatctggggggccttaagaaaaataatacaaaatgacaaggacagagccttggaagggtccatgcaagtgaggggccctgagatgacagtttcattagtatcagattcgggccaaatctgcctctgcagaagcccattattcattcaactgcagataaagatgctgacgatactatatttcatcaattctaagaaatacattttaacatctctgaagtaggatcaatggcaccttatgacttctgtgggctaaggcagtcaggtgcaatcgtcaatgcgcacaccaacatcgtggcagcatcaagacttgcagaatgggcatccacggcttggaagaaactccctaagacaggaatggtgcacgtttttaactcatggaa

SEQ ID NO: 269254 - DNA, 470 bp, Homo sapiens
tgccagccaccagtccctgtcactgtgcatctttgccaagctaatgtgctccctggaggatgggaccagcacagagtcagtaatgacacttcacctccctgaaggcaggagccaggttaaaggggcatgttggagtgatcttaaatgacagctgtgactgtgacaggaaccccctgtgtttatgatttgagattttatgtaactgcacttgaaatattcatgtgtgtggattttgtatatgcatgggtagttgcatgttgtctccagtgcatgtacataatctgtgtcatgtattacatgtgttctatatgggggcaagaacaggttacacgttatatgtgatatactaatgtatgagttacatattgtacagtttgggtgttacagtttttgggtttatgggctacatgtcagtattatggctgctgtattgttataatttatctgttgtatattgtatttaacttgca

SEQ ID NO: 269255 - DNA, 409 bp, Homo sapiens
cccacttctctccctgtctggagattatttctatgataagaaattaattagcctgtctgtactacctgttccaggagactttgaacaactgcgtgggtaaacactagatgtggtcaccaaagagtcggaaaataagtttttactttttcattagcaaaagttaattgtcaaccaggagatgtaacaggcttgctccatttctgctgccgcttcttggatttctttcttgcatgtggagaatttcctgaggtttcaccagactgaagagattctgagttcttgaagtgatggagataaagatcttgttgtcataaaacagcaaagagcactgtgattgggtttgaaagatttttgattgtgttatggacagtgctcttactggtttttaaaaagttgatgttttcttctg

SEQ ID NO: 269256 - DNA, 470 bp, Homo sapiens
tatctgcgccagccagagaccacctgggcaagaagcgtgacccagacatcgaggagggtgaagcctcgctgggccgccccgcaaccccaggaagccccggaccagcgagaggctcccgggcggtctcttgccgacaccccggcacgggctcacccgcgcgctcacactccgcccgctccccgctaagggactgggttcgctccaaaggcagaggaaacctatgggctccccggctcgtgtctcccgactcgtgtctcttgcctccgcttcccagctttcccgaccctgcccggacggggtttcggggttccctgctcgggccccgcgcgctcccctcccacaggctggctgggctccgggcgcggcgggaggcagcggggacgtgagaccggggtcgccccacacgccctccgcgcccctcgggccgcggcccctgcgcaacggccccccgtgcccgaccacgcggccgc

SEQ ID NO: 269257 - DNA, 389 bp, Homo sapiens
ccaacatgaattttttttcctttttttttaaaaaaaaaaaaaaagaaatatctagttgttgtcttttgggacactaagaaacaacagctgtagatcacacgtgaagaacaataacaaaatcaaaaagtaaataaatttatatcctgtactcttgagatgatgtgaaggactaggaagaggggaaaatgaatcctgatgtaaaaaaacaagatctcgcagtaaattcctaaaggcttgcaagagaaagtggggaataaaaaagtcaagggtggccggtcgcggcggctcacgcctgtaatcccagcactttgggagatcaaggcgggtggatcaaccgaggtcagaagttcgagaccagcctcgccaacatgatgaaaccccgcctctac

SEQ ID NO: 269258 - DNA, 708 bp, Homo sapiens
ttcaagatggtgctgtgcagtagtagcttgggtcatgggatgggaggagccacagtatgggctcttactctagaataatgcagccatatgaactccaggcagcttccaaaactggacttaggtcctgtgagaactgcaggattctccagcaacaaagactgctggtgtccacagatataatgggggcttctggggacttctttaccttttgttttcagggaaaagcccctcctaggcttgaatcccagcctgcattccaagctgatcctgactgaggagacagagttgcagaggcaggttgcagggttccattcccttctttatgtagccatcctgagtttctgtgatccacaagatttctgccattcccctgctgtacttcagtgctctcctttagacactccagtcaaaatgtagttgtttccttattgtttcagtctttttttaggcggggaggaggatgagtaatagacacctctagtcagccatcttgccgacatcaccgacaatgtcttttctcttaaaataatagaaatatggcttccatttactacacaagttttctgtctccctttataaagttttcagtgcaccaggtgtggtggctcatgctataatctcagcactttgggaggttgaggcgggaggatcgcttgacatcaggtgtttcagaccagcctgggcaacatagcaaaatcttgtctctac

SEQ ID NO: 269259 - DNA, 634 bp, Homo sapiens
  misc_feature (552)..(552): n is a, c, g, or t
ggcctaaatgcctttttatttattgccctgcctagctccaagagctgtgctactggtcagtcttctggggaccacagttttccaaggaaagacagtgactctaagatattccatgcctcaggacaaagcaaatattctggtactatggatggaactgatgtttaaaagtttccaaaaacaaaaaaacacatttcagccgaaaagctgaattcctagtaattcaccctttagtaatccaaagcaattgtcattttcatctggtaaggaaagaataaagttttgtcttagggaaagtataatatttttcaaggggcagaggctctgagggttggataaacaaatgcccacacagcccatagctattaggggttgtgacatttttatgggctgctgcaagttggggagacgaggagagagcagagcacaattttatcatcttatcaccacacctggcctaaatgcctttttatttattgccctgcctagctccaagagctgtgctactggtcagtcttctggggaccacagttttccaaggaaagacagtgactntaagatattccatgcctcaggacaaagcaaatattctggtactatggatggaactgatgtttaaagagtttccaaaaaaaaa

SEQ ID NO: 269260 - DNA, 473 bp, Homo sapiens
ggcctaaatgcctttttatttattgccctgcctagctccaagagctgtgctactggtcagtcttctggggaccacagttttccaaggaaagacagtgactctaagatattccatgcctcaggacaaagcaaatattctggtactatggatggaactgatgtttaaaagtttccaaaaacaaaaaaacacatttcagccgaaaagctgaattcctagtaattcaccctttagtaatccaaagcaattgtcattttcatctggtaaggaaagaataaagttttgtcttagggaaagtataatatttttcaaggggcagaggctctgagggttggataaacaaatgcccacacagcccatagctattaggggttgtgacatttttatgggctgctgcaagttggggagacgaggagagagcagagcacaattttatcatcttatcaccagaaaagagccccaggccgggagtggtg

SEQ ID NO: 269261 - DNA, 488 bp, Homo sapiens
  misc_feature (16)..(16): n is a, c, g, or t
  misc_feature (53)..(53): n is a, c, g, or t
ccggatgactgctggntaagactgaagacacctgtcatacaaggtatggagantcgcttgactacactgtgtggagcagtcaagagcaaggactcagaattcatgattgagaatgcaggcgacctgttatcctaaactagggtttttaatgaccacaacaagcagctgcgcttatgcttgaaggctggagtgcagtggtgtaacctcggctcactgcaatctccacctcctgggttcaagtgattctcctgcctcagcctcctgagtagctgggactacaggtatgtgccaccacacccagctaatttttgtatttttagtagagatggggtttcaccatgttggccaggatggtctcagtctcttgaccttgtgatctgtctgcctcagcctcccaaagtgctgggattataggcgtgagccactgtacccggcctcattttataattattagtttattaaaacttttatgtgtatgattagaactt

SEQ ID NO: 269262 - DNA, 527 bp, Homo sapiens
aacatttcacagccccatgatagaattcctgccgatgtggagctcggccaaggcagcgaacggcatcaaaactccaaacacttttagtccctaggaagaccctcggttaagatttctccccagagtgcccgggccctttagtcctacaaaaccaaggaaagggaggcagcatagctgcatccgccaggggatgcccaccacccacctgtcccccggctctgctccagcatccgtctgtcctctttagtgccatatttcaccctcagccccagtgcaggtgcccgcagccaagcccacaccagctctggggcacgcctgttccagttgcatttggatacttttgcaggtgtgagagttgggtgctaaacgttgggaggtttgtttatattaaaatatagaggtaggtggggcacagtggctcacatctgtaatcccaacactttgagaggccaagacagaaggatcacttgaggccaggaatttaagagcaggttggacaacatagtgagattccccatctctacaaa

SEQ ID NO: 269263 - DNA, 455 bp, Homo sapiens
gctatcacatactttatgagattgaaatagaaatataattgtatcacttttatgcttccaattatccatttagcccttcccatataattttattagcagtcctcaagatcaaaaattgttcccaaatactagagcttactttgaccatatgatacggtttagctgtgtccccacacaaatctcaccttgaattgtagttcccataatctcaacatctgtttggagggatctgattggaggtaattgaatcatggaagcagttactcccatgatgttctcaagaatgtgaatgagttctcataaaatccaatggatttataaggtgatttccctcctgtgcttggcacttttctctcctgctaccatgtgaagaaggatgtgtctgcttccctttcagccatgactgtaagtttcctgaggcctccccagccatgctgaactataagtcacttaaa

SEQ ID NO: 269264 - DNA, 510 bp, Homo sapiens
gcttatttaaataaaaattgacttggagtttcaccttcaggtagcactataaatttgaactccttaagatgtttttcatgctctaaaattctaatccctaaggtaaatatctaagatgctaggaacaatttaaatataattttactgtacctgcgtttctgttaagcagatcatagatcgtagagctttaggataacttctttgttcctcttaaaaccctgaggggtggagtgggggatgtgtaagtgagcagtgtgcctaatcttccttcctctctctcaagtgatcactcaatttttgaattgctattggttgtaatagggccaagataacagctacttgcatttgtattcattttggttcacatttatgagcaggtttgctactatgtttgtggcacctttccctgtgaaacttttgttaataggatattcctcttcacttatctttaaaatgaataaatgagagaaatacaagtccttggagatagaatttatggtaaaaaaaaaa

SEQ ID NO: 269265 - DNA, 233 bp, Homo sapiens
gtcagcgccaaaacgccaggacttcagtgggaaaatgttcaaagttgtttgttcctccagagtttttctcgggaaaaaaaaaaaaaaaaactcttgagtgcttgagtgaggatctggcttagctctttgacctgtaagatgctttgaacatctcaatttttatttctaatgaagggaggtgtttgtagaggtaattgcctgcaaattaaaatgtcaccaattttagtcacaaa

SEQ ID NO: 269266 - DNA, 449 bp, Homo sapiens
ctctttcctcctgcagaatctctcttctggtccacactctgggaggtagacgggactaagcagaaggtcacttccccagtgcaagaaaatgtactactccactctcacattctacctttggtttgagcaaaggccacattttgcaagcccgtttgctgcccagttaatctgtcagggtgaactttctctcaccctctgctgacacctctgccacccagccccatctcctttgagagggggaacccccccaccatggagctttgtgttttcctccacttcctccttttagcagggtaagcctccacacttctgcccaggctgttgggcccaccatctcctcttttaacacagcttccgaagtgctggggatggagagggtgtcaatgtggcaaacgttcctttgcccactgatgagaagtttcagcccttcccaagacatgtctggaaat

SEQ ID NO: 269267 - DNA, 375 bp, Homo sapiens
agcaccacatgttctgcaaaacattagcaattatcattattacttttctgctccaagtcaaattaggccagagtttacactcactcgagaatgatgagtctgaagaggtatctagagtaggaattgaaatgtaaaaatcagagtagtagagagagagaatggaggcaaggctttaagagattaagtaaaagaggtttggaaaaacaaaatcttgattataaaaagtaaaatagaaaggatggatatgaaagactttatgaatgagtcatcatctattttatttatcttcttttaaaaaattcttacatggcaccacctgcttctgtcacacttcacacccccaggcccaaactaccttctctgagccctttcttt

SEQ ID NO: 269268 - DNA, 289 bp, Homo sapiens
cggggttcttccccgggggcccaaggaaggagaggcaggactgcgggattgagtccaggtggggcgcgagggttgagaggcgcaccagagcaagtggacaggcaggagaggtcctcaatattttggtggaaaatagaaaccaacctacccaccttccttccctccttccctccctccctccctcccttccttccttccaccgtttattaaacaactgtttgcctgacactgttctagatgttggggatgtagcatgcaataaaagacactgtctcttagagtccagcca

SEQ ID NO: 269269 - DNA, 730 bp, Homo sapiens
gtgatgaatgggccattacaaaatgagtctatttttgtttgttttcttttgtttttgagactgagtcttgctctgtcgccaggctgaagtgtagtggcgcgatcttggctcactgcaacctccacctcccgggttcaagtaatccccctgccttagcctcctacaggcgcgtgccgacatgcctggctaattttttgtattttagtagagacggggtttcattgtactggccaggatggtcttgatttcctgaccttgtgatccaccccaccttggcctcccaaggtgctgagattacaggagtgagccactgcgaccggcccatgagtctttattaatagagatttcttactggtgttatgtggcagattctgcatattcctcacccatcatatgtattccactttcctttattatggggaaaactactctttttggcatgatacaatgttgactccattttctttgctaataaggacttggtatcaatttatcagtatgtaaagtttaccatagagtattgtctcatgtgaatcattcccattttttgctctttactctttgtcgttatttctgagtattatttggatggttcattttgacttaaggatagccctgtgatatgacaatatttttatctaatctgatggagaaagcatttagtctcctgatcaagtatgatgttagctgcaggtttttaataaatgccttaattcagtttgaagaagtt

SEQ ID NO: 269270 - DNA, 357 bp, Homo sapiens
caaaaccacacagtgtgcaggcagcagaggcagaggtcaacttcaagttttcagaatctaagtagaatattcttcctaccatgttctgctctacatacacctcccctgtagccttttgttttgttttgttttgttttgtttattctcctggatcttcaatgaataccccccactttttttcatttctgggccaggtttccattattttcccttctgtgcattccactttcctcagaactttcaggtatggccacccctataaatattttcatttcttcataatacagaaccaagtgcataagggttgaaaatctatattaagttcataggaaaaacaatcccacgccaaaacatttt

SEQ ID NO: 269271 - DNA, 451 bp, Homo sapiens
tggtgatgtgaatcctccgtgattgcacatccattcataggctctttgcagggggaagcacatcacacgctgttggctcgttctggcagtccaacctggcattgtctttacacaatcctgcatgcaattttgtatttacaataatcaggagcatttcatcttttattccgtagcaatagtttcagggggtctccctacacatggggattattacaattcaaggtaagattttggcagggacacacctggccaacatggcgaaaccccatctctactaaaaatacaaaaattagccaggtgtggtggcacatgcctgtaatcgcagctacttgggaggctgaggcaggagaatcacttgaacctgggaggcggagattgcagtgagccaagatcgcaccattgcactccagcctgggcaacaagagcagaagagcagaactctgtctcaaaa

SEQ ID NO: 269272 - DNA, 424 bp, Homo sapiens
attattttaaaaaaatcttctccctcattgtatgttaaaccgccagagggaagggattgtgtgcttggttccccggtatttacacagtgcctcgcacataagtatgctcagtgaatattttaaaaatgaattagaggcggggagcggcgcctcatgcctgtaattccagcattttgggaggccgaggcggccagatcacctgaggtaaggagtttgagaccagcctggccaacatggggaaaccctgtctctactaaaaatataaaagaacattaactgggcatggttgcgcacacctgtaatcccagctactcgggaggctgaagcaggagaatggcgtgaacccgggaggcggaggttgcggtgagctgagatcgcgccactgcactccagcctgggtgacagagcgagactccgtctcaaa

SEQ ID NO: 269273 - DNA, 466 bp, Homo sapiens
taaacaaaacaacaaaacgttaagtttcattgagccattcctctgaattactgagcaagtgccctactcactgtgtagtggaaactttggccagctgagaaggcagctaacccttttcaggccagtaggataaaggttggataaggaaataatcaagtcaaagacttaatctacctccccaaggaacctatattatgagttaagacagttttcttatctggattggatccattgagtctaaatgagaataacatggttctaattatgacaagcatagtaattttctcacatccattacattttagatttgagactttgattggtgagtggccatttttaaatattctgttaggccaggtgtgatggtcacgcctttaatcccaggactttgggaagccaaggtgggaggatcgcttgagcccaggagtttgagaacagcctgggaaacatagcaagaccttgactc

SEQ ID NO: 269274 - DNA, 493 bp, Homo sapiens
actaaaatcatcaatatataattcttaatagaactcctagtttagtttactctttgtagttcactttaggaaacactagtaagtttctatctctatgtagtcaactgattatacaggttgtttctgttgagtgcctcccatatctcaggaactttttgtgagaactttacatgaattaactcatttaaacatctgcgtaagtaagtatagtttccttaagcaccaactgaaagccagtggtactgtccaccacattctggatgaggggctccatgaagcacatgggtctaaaaacagctcattgaccttcacctcataagttcttagaatatttcccagagcttaactatttttatcatcttcctcctcctcactgtcatctcataagtcaatagtaggatactttatcatctgtatttcaacagaaatgcaaacttttctggcattaatgtccattacaagaaaataaatgcttttcctatagattttcaga

SEQ ID NO: 269275 - DNA, 1295 bp, Homo sapiens
tggtctagatccatctgtaccaacaagttcatcactttacagaacgaatctttttatccgtacaggaggttcaaaccatgtctgcctcttcctttgtaatgaatgacctttctatgagctgtgacaaaatttccgaacaattagctaaggatttgggaagagggggtggcaaacggggctttctgttttcctgcctcagcatgaaaacatctgatttatgctttatggaagccttacctccaatccccaactgttaagtcccatgaaaccacagttgctctgggctgatggaaacaaaaggaaacagtatgaagagttccttaatcatttttgaaacaaaaatgttaagggattttaaacatatgattatttttaattttatgccttttcagtactaaacacccatttcattgctgattcctgtctaagaagccattcacgtcagcatggcgatagaaagaatgaaaaaaccctgctgaatcatacagtaattttctttaaagcacatagtagttacataaatatatatatataaatatatttttgtttataactaacacaaggcaggatcttgtgactctaagagtgcgttttgtcatcaagacaaaacagatgcaagatgcatcactgcattacttccatagagttgtaaaataatccttaatattagaatatttttctgtcacttagcaaaagtggttcagttcattgccgcgcccatcatgttcttgactatttgatccactttttcgtttatgtcaaccccttccctctctggctaaataaagtggatgcagaaagctccttaaatggagatatcgattgccttggaatcacaatcctgattttgaaaattcctcatgaatgaagaaaggaatggcatcccttgagaaggaaagtggttaatatacatactgagctcctaaagtttaaattcaggtactgagtgtacaatttcaccaacattctaacccatgaaacttttacactctgtgccaagaaactgttggcttttgtaaggtacagtgctcaacatttgcagattcaggtctcaagaagcagagatgtctcataagcagcattttcccaacagtttagcatctgtacacatctgccttggtcatcagtccactcacagagtaccatactttatcatcacaagtgtctgacgtgaacgaatgccattttctattccatatattttgctttacaattttaagtatttgatgaagatggtaactttttcctaacttagttaactattaaaaaaaattttgaaaagcaaaaaaattgaa

SEQ ID NO: 269276 - DNA, 620 bp, Homo sapiens
gagaccaaaagattcaaatctcctctttgtgaaatcccagctgcatttcattttttattattttatgttcccctcaatagattgttttaagtgtttacttttcatcttttatagatgtaatctgattttcaaaaatcgataacagtttttaattagtattgactaagactttttccccctggaatcgaggctctgtgtccgtcatcccagcccccagttggagactgctctttgaactctgctgccctcctcagcagcttctgtcctcttctgtgagtcagtcagcaagttcttgggatccgcatccagccgtgctgagcacacaacaggctgtgtatggaaatggccaccatcattctccttcccgaccccaccacaaaaagagaagctgtgtctttagacaaccctgagctgtctgtgttacaatcattctgtgtttgacatttgtgtaaagtaatgcatgcaatcttgtactgtggcctaagaacaaaactgtaactgcatttgaaaccatgaaaaaattagatattgttttgtgacttttagacagtgataaatgtagaaccatgaattctggacacattccatttctctccaacatgaaggatcaaaaaatgttt

SEQ ID NO: 269277 - DNA, 478 bp, Homo sapiens
caaaacaaaacaaaaaaaacccctctggctttggaagactttctcagtaatgtcctggaattaaggttacagcctgcatttcatgttaactgaacagaaaaccagcctccaacatccttctgccccgtggcttgctctcagctcctcttggttgggcctagggcagtcagactgtctggttccaatccttgctctgccacctgtgactttggacaagttacctaccttcagttgcctcatccgtaaaatgcagatattaataataccctcttttaaagttattaagaggattgaaagagctaataaaaagtaaaaaataaaaagacttggtaagcataggcacagagggaaacaaaaaaagtaaaaataagtaaataaaaagactagtgcctagcacataaaagttcatcaggaattaattttataacatgaactcaattttgcaaaacttcaaagtacatataacttttactatggt

SEQ ID NO: 269278 - DNA, 501 bp, Homo sapiens
ctcttttttagaaataggagggaaaggtagagtggaaattgatttcttgcagagactgaggcgctgaatgatagagggaataaacatttgccctggataaaaatgttcttggctgttgtccagctctaatgatgtcctagagcagaagtgtttcttctgatgtctcattttaacaagaggatgatgtctgtgtatgtctctgtgttttagagaggctggcaaatgctgctaagaggatctgaggttcacataaagaggatgaaaattctgaattactttcattgcaaataaaccttaacaattgtgagagttagagagcatacttttcacataagactttggtatgctgcctaaagctacttacataatttgctattcagagaaatgcatttgtttattgaggacccacccggacttaaattggaaaaatgtaacattcagatttttattttatatgtgaaataaatgtgtgattgctgttcttaaaaatttgaaaaaaaa

SEQ ID NO: 269279 - DNA, 514 bp, Homo sapiens
taaggatccaaaaggatctgcaggatgcctcaggcctgcctagtcatcgtaggggtgagaaattctacactgaataagactggttgggactcaaagaagctacaaggatgcacttttccagcacaaacatgttctaggttggatgatcaaatgcatatgcctagcaattgaaatctccaactaggaacaaaaaactaatcacaaaaagcaaaggattcactttggtgttcacagtaggagcaacagcagcatcttgtttgcagttctggtagcagcagcagctgcaatggcttcagccatatcaaatatcctgtggcacagagggcttcgaggttaagagatacaaatttgcttaccgcatgaactttgcagtttgatttttactttgatttggtcaccttgctttctttgctcttgattgttttctagccctacttctgtgactacattaaataattctttagctaataataatccttccaataaattcactcttctgcttgaatgattcaca

SEQ ID NO: 269280 - DNA, 773 bp, Homo sapiens
gcggaggaggccgagtcgctaggcgctttcgggggcgctgtgccggtgaggcttaggcaaggggacggggaaccgtggttagatgcagcagcggcgcagcagccctcccaggtcccacttctttggcgttcctgctgcctgtgactcaagacaattgacttccacctgaaccctcagctccgaacgccttgcattagaagctagagctttggaggttctgaggacggtccctggggagcaagtggtaggtttcgaggcgcccgcttcccctctgattcctgcagtaactgagagagagtgtgccagaaatggctttgctgccgaatgcattatcttgccattttcgtgtcccaatactgaacaaacgatcgcctgatcgatcggctgttgtccagctctaatgatgtcctagagcagaagtgtttcttctgatgtctcattttaacaagaggatgatgtctgtgtatgtctctgtgttttagagaggctggcaaatgctgctaagaggatctgaggttcacataaagaggatgaaaattctgaattactttcattgcaaataaaccttaacaattgtgagagttagagagcatacttttcacataagactttggtatgctgcctaaagctacttacataatttgctattcagagaaatgcatttgtttattgaggacccacccggacttaaattggaaaaatgtaacattcagatttttattttatatgtgaaataaatgtgtgattgctgttcttaaaaatttgaaaaaaaa

SEQ ID NO: 269281 - DNA, 654 bp, Homo sapiens
gcggaggaggccgagtcgctaggcgctttcgggggcgctgtgccggtgaggcttaggcaaggggacggggaaccgtggttagatgcagcagcggcgcagcagccctcccaggtcccacttctttggcgttcctgctgcctgtgactcaagacaattgacttccacctgaaccctcagctccgaacgccttgcattagaagctagagctttggaggttctgaggacggtccctggggagcaagtggtaggtttcgaggcgcccgcttcccctctgattcctgcagtaactgagagagagtgtgccagaaatggctttgctgccgaatgcattatcttgccattttcgtgtcccaatactgaacaaacgatcgcctgatcgatcggtaagattagctttattccttctccctattcctctccttggccccattccctctgcaagtccaaaccccagtctctctctctctctctctctccctccctctctctctctctctctctctctccaggaacttcttcctctttgaaaccggtttcccaagggaactgcctgtgtgactgagaggctagtaatctgtttgtagatgatttatattttggctgcagaatgaatccccctccctactcggagtactctccttagagatgatcccc

SEQ ID NO: 269282 - DNA, 477 bp, Homo sapiens
agtgtgtgaagaccagctttgtcaacttcttatgattaagtatatatccctggaatcaagatctcagagaatatgccctacatactgaaaattttcaccatggcactgcagacagttgagtgtacatgagagaaaggcattgacgtcgcacagagttgatgaccttcagaaagcaagaaaacaacagaaacatgggtgaggattggattcattcaagaaagagttcctacttgagggtgaagggtgggaggagggtgagaatcacaaaactacctattgggtactgtgatcactacctgggtgacaaaataatttgtgcaccaaaccccagtgacacacgatttacacctgcaacaaacctttcgtgtacctcctgatccaaaaacaaaagttggaaggggggaaaaaaaagaactaggtatgttttatatgtatgccacagttttaatttaaaaaaatatatgcctactctaaact

SEQ ID NO: 269283 - DNA, 2713 bp, Homo sapiens
atgagtgccatcacagtggcccttctcagcctcttgtttatcaccagtgggaccattgaaaaccacaaagatttaggaggccattttttttcaaccacccaaagccctccagccacccagggctccacagctgcccaacgctccacagccacccagcattccacagccacccagagctccacagccactcaaacttctccagtgcctttaaccccagagtctcctctatttcagaacttcagtggctaccatattggtgttggacgagctgactgcacaggacaagtagcagatatcaatttgatgggctatggcaaatccggccagaatgcacagggcatcctcaccaggctatacagtcgtgccttcatcatggcagaacctgatgggtccaatcgaacagtgtttgtcagcatcgacataggcatggtatcacaaaggctcaggctggaggtcctgaacagactgcagagtaaatatggctccctgtacagaagagataatgtcatcctgagtggcactcacactcattcaggtcctgcaggatatttccagtataccgtgtttgtaattgccagtgaaggatttagcaatcaaacttttcagcacatggtcactggtatcttgaagagcattgacatagcacacacaaatatgaaaccaggcaaaatcttcatcaataaaggaaatgtggatggtgtgcagatcaacagaagtccgtattcttaccttcaaaatccgcagtcagagagagcaaggtatccttcaaatacagacaaggaaatgatagttttgaaaatggtagatttgaatggagatgacttgggccttatcagctggtttgccatccacccggtcagcatgaacaacagtaaccatcttgtaaacagtgacaatgtgggctatgcatcttacctgcttgagcaagagaagaacaaaggatatctacctggacaggggccatttgtagcagcctttgcttcatcaaacctaggagatgtgtcccccaacattcttggaccacgttgcatcaacacaggagagtcctgtgataacgccaatagcacttgtcccattggtgggcctagcatgtgcattgctaagggacctggacaggatatgtttgacagcacacaaattataggacgggccatgtatcagagagcaaaggaactctatgcctctgcctcccaggaggtaacaggaccactggcttcagcacaccagtgggtggatatgacagatgtgactgtctggctcaattccacacatgcatcaaaaacatgtaaaccagcattgggctacagttttgcggctggcactattgatggagttggaggcctcaattttacacaggggaaaacagaaggggatccattttgggacaccattcgggaccagatcctgggaaagccatctgaagaaattaaagaatgtcataaaccaaagcccatccttcttcacaccggagaactatcaaaacctcacccctggcatccagacattgttgatgttcagattattacccttgggtccttggccataactgccatccccggggagtttacgaccatgtctggacgaagacttcgagaggcagttcaagcagaatttgcatctcatgggatgcagaacatgactgttgttatttcaggtctatgcaacgtctatacacattacattaccacttatgaagaataccaggctcagcgatatgaggcagcatcgacaatttatggaccgcacgcattatctgcttacattcagctcttcagaaaccttgctaaggctattgctacggacacggtagccaacctgagcagaggtccagaacctccctttttcaaacaattaatagttccattaattcctagtattgtggatagagcaccaaaaggcagaactttcggggatgtcctgcagccagcaaaacctgaatacagagtgggggaagttgctgaagttatatttgtaggtgctaacccgaagaattcagtacaaaaccagacccatcagaccttcctcactgtggagaaatatgaggctacttcaacatcgtggcagatagtgtgtaatgatgcctcctgggagactcgtttttattggcacaagggactcctgggtctgagtaatgcaacagtggaatggcatattccagacactgcccagcctggaatctacagaataagatattttggacacaatcggaagcaggacattctgaagcctgctgtcatactttcatttgaaggcacttccccggcttttgaagttgtaactatttagtgaaaagttgatagatcatttaaagaacagctttactctctacacattatataagtgatttcaaatgaatgtgaactagtgaactaccatgttgacttctataatcgtccctgtttggggacagatagtttactgctaatggggtggaggggtgtgtgtgtgtgtgtgtgtgtgtgtgtgtgtgtgtagagagagagagagagagagagagagaggtttgtcccatatatcttgctccagcagccatatatcttgtggtctacagcctaaagcatgatttcccttgaagtcttggggttgtttaaaggagagtcccttcaatataaaacctctgaaatattagtgagaatggctcactaatgtgaacaatgtttaaattatttatttatatatagaattactgaatattagtactgggaaaatttat

SEQ ID NO: 269284 - DNA, 1060 bp, Homo sapiens
gagcggtccgacggtgtggaagcggacctgaggagtcgcaattgtgaacaggctcagcgatatgaggcagcatcgacaatttatggaccgcacgcattatctgcttacattcagctcttcagaaaccttgctaaggctattgctacggacacggtagccaacctgagcagaggtccagaacctccctttttcaaacaattaatagttccattaattcctagtattgtggatagagcaccaaaaggcagaactttcggggatgtcctgcagccagcaaaacctgaatacagagtgggggaagttgctgaagttatatttgtaggtgctaacccgaagaattcagtacaaaaccagacccatcagaccttcctcactgtggagaaatatgaggctacttcaacatcgtggcagatagtgtgtaatgatgcctcctgggagactcgtttttattggcacaagggactcctgggtctgagtaatgcaacagtggaatggcatattccagacactgcccagcctggaatctacagaataagatattttggacacaatcggaagcaggacattctgaagcctgctgtcatactttcatttgaaggcacttccccggcttttgaagttgtaactatttagtgaaaagttgatagatcatttaaagaacagctttactctctacacattatataagtgatttcaaatgaatgtgaactagtgaactaccatgttgacttctataatcgtccctgtttggggacagatagtttactgctaatggggtggaggggtgtgtgtgtgtgtgtgtgtgtgtgtgtgtgtgtgtagagagagagagagagagagagagagaggtttgtcccatatatcttgctccagcagccatatatcttgtggtctacagcctaaagcatgatttcccttgaagtcttggggttgtttaaaggagagtcccttcaatataaaacctctgaaatattagtgagaatggctcactaatgtgaacaatgtttaaattatttatttatatatagaattactgaatattagtactgggaaaatttat

SEQ ID NO: 269285 - DNA, 953 bp, Homo sapiens
gcgtgtaatttcgtgaccaggggctggtgttacgtgtactacggtatcggacctggagcctgacagtccagaacctccctttttcaaacaattaatagttccattaattcctagtattgtggatagagcaccaaaaggcagaactttcggggatgtcctgcagccagcaaaacctgaatacagagtgggggaagttgctgaagttatatttgtaggtgctaacccgaagaattcagtacaaaaccagacccatcagaccttcctcactgtggagaaatatgaggctacttcaacatcgtggcagatagtgtgtaatgatgcctcctgggagactcgtttttattggcacaagggactcctgggtctgagtaatgcaacagtggaatggcatattccagacactgcccagcctggaatctacagaataagatattttggacacaatcggaagcaggacattctgaagcctgctgtcatactttcatttgaaggcacttccccggcttttgaagttgtaactatttagtgaaaagttgatagatcatttaaagaacagctttactctctacacattatataagtgatttcaaatgaatgtgaactagtgaactaccatgttgacttctataatcgtccctgtttggggacagatagtttactgctaatggggtggaggggtgtgtgtgtgtgtgtgtgtgtgtgtgtgtgtgtgtagagagagagagagagagagagagagaggtttgtcccatatatcttgctccagcagccatatatcttgtggtctacagcctaaagcatgatttcccttgaagtcttggggttgtttaaaggagagtcccttcaatataaaacctctgaaatattagtgagaatggctcactaatgtgaacaatgtttaaattatttatttatatatagaattactgaatattagtactgggaaaatttat

SEQ ID NO: 269286 - DNA, 876 bp, Homo sapiens
  misc_feature (1)..(2): n is a, c, g, or t
  misc_feature (7)..(8): n is a, c, g, or t
nncacanncctggctttcccacaggcaccatagcatgtgtcatggggcaggagcgcttcaggggagtggctcggagacaggtgttatggccacttctgccacccccacccctttaagacactgaaacatgccggacagcagattcacaagtgaagagcaggaaacagggtttgaggatagtggttaaccatggctgcattcttctgggagcctttaaaaaatacccacgtctcatgtctgggcccaaccctataccagcatctgtggggtggggggcttcaggctggtgatgtgggggtggggagggagtggaaggtgcaggggggccaagattctgcatttctaacaagctcccaggtgaggcctcgctaccatacttggaccacgctcccagtgccaaagcccaggtgtcttcaggggttgtcatgatggctattaacttatgtgttgcttgccgcatcccaaaacgatttaaggtgactcacatcgaggtataagtgtttcatgagaacttctcaaggagagggaatagaatagatgatgacaacaaagcagcccaatatcatctacctttatctgttcgcaaaatctacacccatgaggtcgctcatgcctgtaaccccagcactttgggaggccaaagtgggtggatcacctgaggccaagagttcgagaccagcctggccaacatggcaaaacctcatctgtactaaaaatataaaaattatccgggcacgatgacgcgtgcctgtaatgccagttgctcgggaggctgaggcacaagaactgcttgaacctgggaggtagaggttgtggcgaactgagatcgcaccactgcactccagcctgggcaagagagtgagactatttctcaaa

SEQ ID NO: 269287 - DNA, 549 bp, Homo sapiens
aaggaaaattaatgtagattgtttaaaattaacgtgcatttcagttactctaaatttctgtttatttgtatttttccacgtgtatgggttttacaacaagcttcccaaagctttcagaattgttgtaagcatccctgaccaggaaataagactattgtgggttgtttgaaatgtctcaccacattatggatgctctttatattgagagatagtaaagaaggttgatgcgtaatagattttaaaacattttattaaacgagataagtggaaggaattagaatatatcttgtagtaaggatttctataacttctaagaagtctgatttatcttttaatatttatccagttttcatatatttttgattttattttgcttttcgatctccttattacatgagtggtgttatagggagggtttagtagctttctttttctttaaatcatcttctggcctcttgctatagcttcatttggtggggacctttatttacatgtggaggatacaaggaaatataagtcatgactctttccctgagagtccaatctatt

SEQ ID NO: 269288 - DNA, 471 bp, Homo sapiens
cgtggtcatatctgacctgtgtgttaccttgtttctcaaaattgttgtaagcatccctgaccaggaaataagactattgtgggttgtttgaaatgtctcaccacattatggatgctctttatattgagagatagtaaagaaggttgatgcgtaatagattttaaaacattttattaaacgagataagtggaaggaattagaatatatcttgtagtaaggatttctataacttctaagaagtctgatttatcttttaatatttatccagttttcatatatttttgattttattttgcttttcgatctccttattacatgagtggtgttatagggagggtttagtagctttctttttctttaaatcatcttctggcctcttgctatagcttcatttggtggggacctttatttacatgtggaggatacaaggaaatataagtcatgactctttccctgagagtccaatctatt

SEQ ID NO: 269289 - DNA, 707 bp, Homo sapiens
ttcgttttttttttttgagacaagagtttcgctcttgttgcccaggctggagtgcagtggcgcgatcttggctcaccacaacctccacctcccaggttcaagcaattcttctgcctcagcctcccgagtagctgggattacaggcatgcgccaccacgcctggccagttctgttatttttaaaacccaagtttccctggtcatatcttggttggatgaagcgtattttcaatagattaccctggaaaggctagtgagtacggtattcttctacattttagacttttcttagtcttgctacttcaaggacagctaggctgcatataaaattcttggctcatactttttccccataaatttctatgagaaagtctaatgataactgattttctttattttgtaacttagtctttttgcttagaggctctctgaggatgggagggggttcttcctcccatccctaggaatttttcttttttttaaattcctaatcactagaccaccaggaagattgtttgttttgttttgtttttattcttcagggaccccatttatacatacgttaaataaatactgtttgccaatgtatcaaccattttgcttcttatttatttttgttcctttggttctttttcatggctttgctttggtgctccttagattttcagtcagatgtatttgtccttgggtaccttgtaatcagtatta

SEQ ID NO: 269290 - DNA, 201 bp, Homo sapiens
ctgtcactattcaccgatgatatgatagcatacctagaaaaccctaaagactcatccaaaaagatcctagatctgataaataaatccagcaaagtttcaggatacaaaatcaatgtgcgcaaaccagtagcattgctatacaccaacagcaaccaagctgagaatcaaatcaattactctaccccccttacaacacctgcc

SEQ ID NO: 269291 - DNA, 386 bp, Homo sapiens
ttgacaaagaacccaggaatggcgttaaagacttctttgggcagtgtccaatttatggagcaattttgttggccacatctacggagcttttgtgaaacttgcgtaggctcatggagtatccaaatgaggcaacatcaccatcagtcctccttccctggctcactgcctcaggaaaccaacctgaccctgaaggtatgtaagcctcaggccccacaaaagttggatccaaccttgagcagttgctttttcattgagtcctgtggagctcaggttcctgtggagggtagcagaagggaaacttcaattacagtataactggtctgatctgttctacatattaaagttcatgctattttctttgtgataaataaagactgttctgctgc

SEQ ID NO: 269292 - DNA, 455 bp, Homo sapiens
ggcagtggaaggcagcaggcttggctctcccatccccaaggggcctcactatgaagaagctaagtaatggacgataggaatgtattctgtattctgctgaaaagacaaatgtattctgctgaaaagacaatcttgcacacacgaagaacagtgtaaattaaaaccaaaccaaaggctgggtgtggcggctatgcctgtaatcccagcactttgggaggctgaggtgggcagattgcttgagattaggagtttgagcctgggcaacatagtgaaaccctgtctttataaaaaatacaaaaattagccagacatagtggtgcacatctgtagttccagctactcaggaggctgaggtaggaggattgcttgagccagggaggtggaggttgcagtgagctgaaattgcaccactgcactccatcctgggtgacagaacaagaccctgtctcaaagaa

SEQ ID NO: 269293 - DNA, 376 bp, Homo sapiens
gatggatgagtaccaagaggttcatgaatatgagcttgggttgttgatttgcaataaaaggacttcttttagctgaagttcagtgtggtagagtagaaagagatagggcttttgccctagatggacaagttcaaatcctggctcagtcacttaggaaatttggctgtttgtcttgggcaagttgctcaaattctctgaacttgattttctacatctatgaaatagggatcttatctcccagattaatgtaggaatgaaaacaaaatcgtatatggtgtcaggaacatagcaggtattctgcaagagagggcaccattgactagacaagtgtccacagtgctagacggaggcgcacctgggaacagtttcctgctgg

SEQ ID NO: 269294 - DNA, 438 bp, Homo sapiens
tcagccagaacgacgtagctaggttttatcttgaagtctgtttcagagctaatatgaagatagaacacccatgccactacaccagagctgggagcagggacagtggcccacttctgcagtgaaacttatgctctacaagaatgtgggactattatcttcccctgtgcttcttgaagttggtgtgactgtgatctgatttggtcgacataatgtgagaagtctgtcacttccaagcagcatcatttaattgctgctgcgtgcttctctatcttctcttctctgttgcaacaaatcctggagccttgtgacgatcataaaatgggaacatctttgttatcccaggtcctgcacggtaactgtgtgaagcacagccctcacccctctggctggacatgttgcgtgagcaagaaataaatcttagttgttctaggtcaaaaa

SEQ ID NO: 269295 - DNA, 359 bp, Homo sapiens
tcagccagaacgacgtagctaggttttatcttgaagtctgtttcagagctaatatgaaggaatgtgggactattatcttcccctgtgcttcttgaagttggtgtgactgtgatctgatttggtcgacataatgtgagaagtctgtcacttccaagcagcatcatttaattgctgctgcgtgcttctctatcttctcttctctgttgcaacaaatcctggagccttgtgacgatcataaaatgggaacatctttgttatcccaggtcctgcacggtaactgtgtgaagcacagccctcacccctctggctggacatgttgcgtgagcaagaaataaatcttagttgttctaggtcaaaaa

SEQ ID NO: 269296 - DNA, 441 bp, Homo sapiens
gcagtgttaagcttgagatgcctatttgacctccaagtaaggatatagagtaagtaatctttacattaaaaaaaatcaaactcaagggagatggtgaggctcacaatgttttttggaattattagcaagccattggactggatgagttcaccaaagaatatctttagccaggtgcggtggctcatgcctgtaatcccagcactttgggaggccgagacgaggttgggagtttgagaccagcctggccaacatggtgaaaccccgtctctactaaaaatacaaaaattagccgggtgtggtggcgggtgcctgtaattccagctactagggaggctgaggcaggagaattgcttgaacccaggaggtggaggttgcagtgagccgagatcatgccactgcactccagcttggaggacagagcaagactccatctcagaaaaa

SEQ ID NO: 269297 - DNA, 473 bp, Homo sapiens
acacactgatcatgacatcaaactccagaggaagccggctaaggatgtgcttgttttgatgtgacatgtgcctgcgatgattaactctcatgctcccacaatctctccagggccccagacttggtccttcctcgcctgtaaacaggatcaggatgcatcctggagttcagccaagggcatctggccttgggtaagacagactccacaaaacacatacattgttcctggcaagggaaccacgagggaaggaaaaggagagaaggaaggcagcatgggacactgacatccatccacctatgacaaatcacatcagatgcaactgagcacatgcaactcagagggaaaagacaggaataggcccatggaacacattcaccttctacatgatcaacagcttcgggaaagcaatacagccaagtgccaagtgagaaaaagggaaaagcatgtaaaatgaatgaaatgttgactgcaat

SEQ ID NO: 269298 - DNA, 132 bp, Homo sapiens
ttaacaatggctggttcgctagctgggaatttgcaagaactctccgcccgatatctgagctcctcggccttcgagccttactcccggaccaacaataaagaaggggccgagaaaaaagcgctggactgattt

SEQ ID NO: 269299 - DNA, 194 bp, Homo sapiens
agcctgggcaacaagagcgaaaactccgtctcaaaaataaataaataaaaaataaaacttttcatatggcaaaagatactgagcaaagccaaaaccaaaagatagattggggaaaaagcatttggaaaacatcgcaggcaaagggttcatagcatgactacactagaaaacccttcatattagtaaaggtacca

SEQ ID NO: 269300 - DNA, 854 bp, Homo sapiens
gaccacttactgttgtatctcagggtcaacgcacagggttggagctcctctgtaaagttgtgttaaaggaaatgaaatctttctgatgaaactgaacaggtgagggtgctgtaggcagggctggggagacctgtgagcagtacttgatagagttgctccaatcaaattctctctgacttcaacaaaacaacagtaaaagtaatgtattcagcgctcaccatgtgctgggtcccgtgctgcacaatttgtgccttatcacactcagtcctctgaacaactctgtaaggtaactatctctgttttacaaaggcaaaacagagaagtccagagaggttacttgtccaccacgaatgtcagggttagattcaagcccagccctgttggggtttgaaattgctatcaggtcatttagtctgaagtctccttggggccaaagccatgtcagctgaggcttgaaggggaagcagacagatgtgactagaactgcagctcatcagcaactgactgccagtgctcagggcacctgaaggagcacagcaaaaaggacagccttttgctccaggtttccactttttgagagatatgaacacattagtaaaatgcctgtgtctgggaacaggcagccagggtgagaaaataatcagatctacacaaaatggataaagaatgtgtggagggacctccaaagggtgagaaaccacttctggctgctaatgcaatctgggttcacatactcaattcttaaaaaataagtccatgaagcagaaacatcaaaaagcatgggatttggaatttgagacctgactttgaagcccacacagaacacagacaagtcaaccatgctatttggggta

SEQ ID NO: 269301 - DNA, 212 bp, Homo sapiens
gcaccctctattctgctagtgagagaataaatccatacaagccttctagggagcaatttgacaataacatatcaacattctttaaaatctgcatatcctttatcctagcaattccttttctggaaatttatcccaaggacataattaaggatgtgcacagagtttcagctacaaggatattcatttaagaagatgcttacgatactaaaaaa

SEQ ID NO: 269302 - DNA, 374 bp, Homo sapiens
atgcaaaatacagcagtaaaatttatactgcagtgtcgaacacattcagcacagcttcagactcctggctgtgcgtgaaaactccaagaggataccactggtttatgtcacttgagactccagacattgaacagtaattagggaacatgacagtaatttgatttaaagtctgcagccacagagttcaggctccatccctctctccatcattctccctgagtgcaaatccagagggagggcaagtaggtcgaagcagactctgatggtgtttacttacttgccagagattagagaaagtgtgcccactaggtctacagtagtgcaaaaccaagccaaaaagtgagcacttcagtgcactcaatgccaaaaaaaaa

SEQ ID NO: 269303 - DNA, 140 bp, Homo sapiens
aaggaatagaaatggaagagttagaggcagtgttatgctagagctgtcccttagcgagctgattttaaagcttgaaatcggccatggataaattcccagaagtggaagacattgccaagtttttcttcagaaagatggta

SEQ ID NO: 269304 - DNA, 187 bp, Homo sapiens
taaagacctgcccagaccccacagccaagggcagcccctcagagattcaggccaggagcggcctttgttccccacacctggagctcagagcttgcttagcctgcggtggaagctctggtttaattaaggatcttaggagagaattctctcttgttattttctgaataaattaaggaagtaactttga

SEQ ID NO: 269305 - DNA, 527 bp, Homo sapiens
catcattcccagcaacatggatgaccctggagcacataatgttgagtaaaataaaccaggcacagaaagataaattctgcatggtctcacttatatgtggaagctttaaaagttgatctcataggagtagagagtagaatagtggttactagaggctggaaaagtgaagggaaatagccaaaggttggttaatggatacaacagcacagctagataggaagaataaattatagtgttctataacactgtggggtgactataatttacagtaattgattgtatacttgtaaatagccaaaagagcagcttttcagtgttctcaacacaggaagtaagtgtttgaggtaatggatatgccagttactgatctgatcattacacattgcatacatatcttaaaatagcacactacctcataaataggtacaattatttgtcaattaaaaatactaaaaagcaagaataatcacttaattagaaaatatattttttcctctatactagagtgtaagctcctttgggtcaag

SEQ ID NO: 269306 - DNA, 463 bp, Homo sapiens
ctatttctcagaccttcatcttccaaaatgatgtttactgggaacatagagaacaaaagatagcccaaacatacatctctaatgataggtgtgcctttatcttctgtactcactctgacacttccctgtgcttattccacatcactctcctgaaccttggctgctggcatgatccctacacagacaagtgggagaattagacaggctcgcttggggtactagagagataagaaagatattttcttaacacattacatttcatgggattttttttttttctgcccagagaagcgttctagggctgttcgctcactattttccccaagtctctgaaaaagttattcaattgaaaacttcagaacccgaacaaggatgataatactgaggacccatcaacatattataggcactctgaggacaaggagatagcttttattaaagaaatacattttctatagtacta

SEQ ID NO: 269307 - DNA, 434 bp, Homo sapiens
aaggaactcatcgtccaccaccttcaggaaggaggctcctggggccctttaagagagcagtttcagtggaggctgcaggcaggttggcagaaacaagattatgagatggtctgtaccaggtatcaggcttgagggttagtgcctctagacttctctgagaagtctagctttgaagggaaggctggagagctagcacaatactcaataataacaagacctaaggcacttactgtgtgccaggcatgttctaagaactcagcacacttcagctcatttaatccttacaactatacaaagtttgtagtcttttcattataccttttgacaggtgagttacttgctggaattcacgtggctagtaaatactggagctgagatttgaaagcaggcaatctggctccagaatctgtgttttcaacccacatactatattg

SEQ ID NO: 269308 - DNA, 348 bp, Homo sapiens
cgacatgaatccttctccattgtgtccctgctcagccacgagaacagtgtgctgccagggtgctcagtctgtaactctgctcaggatgcaggctccagggagggagtgtccaactgggctaatagggcccaccctttggctctgggagagctgggctccttgatgataatcccagcacactgtcagctgtgggtaggatgaggcaagttcctcagggggtgaagtgtgttttgggatagtcaacagccagtgactgttcaccacaggactaaaccttccatttccagtgctccagtgccccaactggcctgtctggtgtgatttgccaagtgttctgagcaagcaggg

SEQ ID NO: 269309 - DNA, 486 bp, Homo sapiens
ttcgtgttaggtggcattgtaaccattacaatgcagtatttgaggccatgccctcaggaacttatagtaaggatccaatggagcaagattataggttaccccacctgaacatcctcctgggaggaagcagggcatgaatccgaaggaattagtgaagtccttccatagccatccttgatggtggagcgggggtgtgtctcagcaaaaagggctgaagtataaggtgctgggaccagttgtcagtaaaggcagtatgattcaatgaatcaattaaatcaggatggagaagggaagcaaaaagtccaagccagataagtggaactacccatgaaactggagggtgtggtgaacaaaagcaaaatgattagtcacaaggtcaggagcaagtggccccaggatgaagaaaggtagctagatggaggatggttctcctcattccgcagatgatgaacttgaaaccagtgacagtgagtgagtttcaggtca

SEQ ID NO: 269310 - DNA, 213 bp, Homo sapiens
acttctggggttgttttcttgggaccgaagctgagattgcagatggtaatggctatgtgtgctttagcttgttccattggcgaaacataccaattaaacttcaaatgaaccaattcttgtttctttacaatgtaccttggcttgaagttggagttttagccagaatttccattggcctgttacaacacatgcaaaaatgctgggtattctagg

SEQ ID NO: 269311 - DNA, 615 bp, Homo sapiens
tgtgtctctatgagccagcaaaagcttttgagctaatagaattagatcttattctactcctgtgaaaggatcttagataagaataatccaaaatccataagcctctatttctgatgaggaagatgaaaaaatcaggagcttgttctgtcctcagtaaaaggtatagagttcaagtggctgtaagataactacaaagggtctggtccatattcacagattgtaacttatgatattctactctagtttttttattttttattctacattaaataaatttattctacattaaaattctacatttattctacaataaaaaatgatgagaatttacagagtgcatccatggtccaggaagagcccttaatatttcagctactgttggctacatccattccaaggaacaaaagccagggaccatgggagaatagtttgttctgggtacaggggtaagagaaagggatgggcacttaatgagtgcttccctcctttgattacaatattctacctgtttcatgctcctttttctcttagatgtctggttataatcattcagaagtcattcagccactataaatagataatatattgtgtgtgtgtgtgtgttatgtgggaaca

SEQ ID NO: 269312 - DNA, 566 bp, Homo sapiens
ttgtctttgggcatggcagttaagaatcatttgtaagtttctgaaatttggaaaatttgcagtgtggctaatttgagactggaacattctgagttcataatatctaatcacatgttcgttccaataatttatcttcttatatgcaagatcttcttattttatttatagttgattttgtcatttgtattaagaaacctcttctttagttgctaaaactatgctattttattatagtctttaatcattctgctcctcatttcaataagtaggaacctggccgggcgcggtggctcacgcctgtaatctcagcacttcaggaggctgaggcaggcggatcatgaggtcaggagatcgagaccatcctggctaacacggtgaaaccccgtctctactaaaaattcaaaaaaaattatccgggcatggtggcaggtgcctgtaagtcccagctgctcgggaggccgaggcaggagaatggtgtgaacccaggaggcggagcttgcagtgagccaagatggcgccactgcactccagcctgggcgacagaaagagactctgtctcaaaaaaa

SEQ ID NO: 269313 - DNA, 756 bp, Homo sapiens
aaagatgggaatctcactatgtttcccaggctggtcttgaactcctgggctcaagtaatactgccttggcctcctgagtagctgggaccatagacatatgccactgtgtctggcttaaatatttccttctgtcggaatgccctttgttccttcatctgtgcccccctgctccatcctcttttaattcctagcccaaaagtctaacccacccattgggagggattctgcagaactcatagagtttacaacatcttgtccttcaattgcagtcagtctctgtcttgaactggatttgtgagctccttgaagttgtttgtatctcacagctctttgctgtaacatccctggggattcaagcacgcacacatagtagatgctcacacatctatgcaataaattactttagtgtctttctcaaatgatcagcacaggaagcaaatgataaaatgcaaaccagaaaacagacctcactgggctctgtgcttgtcagccttgggaatggatttctggcgaagatccggcccctctacaaatgacagagatgacttggctcttttcaggaattgaagagaatcctgacaagtggcatgttgggaaaggcctgaaggaagccagaccagcttgctctcagagctccttgggtcccctgcggcccccaggtgatcttcagcaagacctggtatgtaaatgagcctcatctgctggctcagcctgctgcccactgctagggatgctagaattccagggtaagcttct

SEQ ID NO: 269314 - DNA, 1670 bp, Homo sapiens
atattgttacctacttttccagctctaaaaacaaaaacttattattattgaagatgttcagtgatgctttctcaagattgccaaggaaaagtttacgaaaatcttaccttgaaacagtaggtttgagtgaccctttgaagagatagtccagactgtcctgtaaagttatatatgatataacaaatagctttactaattggattggactacacatcttttttctgtcctcttttcatttgtgccgttatctggaaatccatctaattgcctttttaaaataatgttatctttgatttccttgttttggtaaactgactgaactgcagtagataaaaacctggttctagtgaactaacattttagagaccttacctccttaagctattaggggtgtgtctagttttttgtttttgtaaagagcaagcccattgggaaggaatgatgtaaattttctgttaaacttaaatcatcagcactttttccaaaaaataaaattcattctcatttcttgaccactgggctaccatttagaaagttatttattgatgtaaaatcctttatgtattacttcagaagataggctatgcctccgtgttaagaggattctctatttcatttgttctttagtggattttttttctttaacgactttggtatataattcacataccgtaaacttcaccaattttaaatgtacagtttagtggattttagtacattcacagcgttgtgtgaccgtcactacaatttaattttagaacatttttgtcactccaaaaagatatccataccctttactggtcattcccattgctggcatcctccctcccctcaagcctcagacaatcatgaatagaaatggaatcatgcaatatgtagtcttttgtgactggcttgtttcacttggtgtaatgtttagaaaattatacttaaagtctcataaaacttgaccaaagctatcctcatattttaactgtggtatcttttattggtactagcacctagaattcttaaagcagagtagtgattagccatgacattgttgcaaagaaaggttgaggtggattatcctgaataattagtaaactgttttaagtagtttctgacagctttattagagcagattgcttcttcctgtgcccttagagtttttcttgtttttgttttgtaggtaggatttttagttttgaaggggttggtagagtgaggctgtttttattgtatgtgctttgcatacacagtcaccctataaaatagattaagtgttccgagttcggttgggttttccgcaattaaaaattgtgttaacagtttagtgtttcttacagataacactgataacactttttttgttttcattgggtcttatcattggtacagactgatccaaaaatccaattggcttgctagtaattttttcctgtgaattgctaagatttatgggtaaattaatttttctttttcttttctttttttttttttttaagcatttgctccttaaatgcaaatcgtaccactaagatcctctcacaacagattaaggtcgaatttgcagagttcttcaatttttcatgaagcagtgagggtagatctgtaccactttttccgttctgtgtaaatcaccgtttatgggaaacacttgttttttaggttggtgctatttaaaaaaa

SEQ ID NO: 269315 - DNA, 900 bp, Homo sapiens
gaagcaggaaaatgagtatgaagcaaggcaacctagaactgcaaaagtgcaaaaggaccacagttggagaagttgagatagagccaccccatctgttttaaacaaggttttaagaaataccagctagaagagccatcttccctgtagcttgtgagggcagtattatgttaggcataaagatgataaagaatgtggaaagttcttgcaagtacatgggataaactggaagtccaggtatatggggagaggaataatgagttaatggaggtgttgcattcttttaattaaggacagttaaaagattaaatatagttttatagtcagaatcagaagacaacagagaggttcttggcgtggtattcaggaaccacgggttcaaggcccacttcattggcagccactggctaaaactgtaggttatctcagtatcaatgataatgaaaagtggtagtctcctgtagcaaaaggagacaaaagaatttcattttaagattacttcattactcttaagttttccaacatgattgactaagtctatttgttggttctcctgagcattttattacaatttatcagaatttaggacttaattttcataatgatgtcctgaagttaccaagaagatatggactgggcacggtggcttacgcctgtaatcccagcactttgggaggccgaggcatgcagatcgcctgagtccaggagtttgagaccagcctgggcaacatagcaaaaccccatctctacaaaaaactacaaaaattagccaggcatggtggtacacacctagctactcaggagtctgagatgggaggagcacctgatcacagggaggtcaggctgcagtgagccgtgatcgtactacagcactccagcctgggtgacagtgatactctgtct

SEQ ID NO: 269316 - DNA, 404 bp, Homo sapiens
gccctgcacacacctgcccgcaccccaccaccccagcgtgcccctgcaggcaccttcagggcgctgcacacacctgcccacaccccaccaccccagcatgcccctgcaggcacctccagggccctgcacacacctgactgcaccccaccaccccagtgtgcccctgcaggcacctccagggccctgcacacacctgcccataccccaccaccgcaacatgcctggaccctgtacatacctgcctgcatcccaccaccacagtgtgccccggcaggcacctttggggtgttgcacacaccatctcccacccagcgtccaccacaggccccacctcccctctacatctgcatagtcaggtttggggcccacagatgctctgacataggtatatccagttcagcttc

SEQ ID NO: 269317 - DNA, 396 bp, Homo sapiens
gggagaacagccaattcacctcagtgcaaggggagggcaggcactgggtgaagttgtctctggaaggtgggagttagggaaaggtgctcaacaagggcttgagctttaatgataagtatgttcttttttaatgagattattagaagtaaatattaataaaatgttaactgtggtaggaattatggttatttttgtatttttctgaaactttcaattttctcagtttaaaataaacttgtaaaattcatgcatagtggagcagggtagatatagatgaaggcactgtgaagaggcagaaagcacagatgcagccagacctaactgtggtctgattatttattgatatctcaaaaaaaggtgacactcagaaaggaagatggctagttatagcaattt

SEQ ID NO: 269318 - DNA, 1041 bp, Homo sapiens
gccctttcctcagtcctgctgatgtcctccagctgattccaggctgttcccggccacccctgaggccgtcctttcgcttcttgtaaaagcctccccgcctcctgagctccctcggtcgcctcccgagaagccaacgggcctctctggtggagcgctaggttgacagcgttttagcaggaccgcgagaaaccggggagatcctcttacgaggaaaaactccaagattacatccctgttatctttcctccaagagctgactaaggctttggaacagaaaccagatgatgcacatatattatcgtcaaagagcttattgtcacattcttcttgggaattactgtgagacggggtttcactgtgttagccaggctggtctcgatttcttgacctcgtgatccacctgcctcggcctcccaaagtgctgggattacacgcgtgagccgccatgcccagccagaaacgcatctttttctacatagttgctgttgctgatgcaaagaagtctcgcgaattcaatccaaataattccactgctgtgctgagaaaagggatatgtgaataccatttaaaaaactatgctgctgctctagaaacttttataggaggacaaaaattagtgcagatgctaatttcagtgactggattaaaaggtgtcaagaagctcagaatggctcagaatctgaggtgagtttcgctcttgttgcccaggctggagtgcagcggcatgatctcagatcattacaacctccacctcctcggttcaagcaattctcctgcttcagcttcctgtgtagctggggttataggcacacgccaccatgcctggctaatttctgtatttttagtagaaacgggggtttcaccatgttgaccaggctggtctcgaactcctgatctcaggtgatccacccaccttggcctccgaaagtgctgagattacaggcgtgagctaccatgcccggcccttaccaggattttggtctgcctctggtcctgtccacattgtgtagaatttgtttaataaaataattttgagtaatc

SEQ ID NO: 269319 - DNA, 559 bp, Homo sapiens
gggtaacaaaatactccaaaacatagcatttaacaccacaaatattttttatctcacagtgctcgacggttagaaatctgaaagcagcttagctggatggttctggctcagagtctctcatgaggttgcaataaagcttccagctgaagcagacatctccaggcttgttcagtggctgatgtctggaagcctgaggttctttctccattgcccgatctagtctacctgagcattgtcacaacgtggcagatgccttcacccaaagcaaaggatctttgtgtgtgtgtgtgtgtgtgtgtgtgtgtgtgtgaatgagagcgagagagagagagagagagcaagtacccaagacggaagctgtagtcttttataactattcacagcagtgacttaccatcacttctgcagtatggtattagacacatagaccaatcctagtgtaatgcaggaaggactatgtatgagtgtgggggtggggatcactatggcccatcttggaggctggctacctcaccatttaatatctgattcatcttcaaatttctccaaatggcctaaa

SEQ ID NO: 269320 - DNA, 442 bp, Homo sapiens
tacaatgttaaatttgggggaaacttaaaaatatctatatatttgtaatacaaaatacagaaaataaactcttttggtaggtaataatagaaagtacagtaatttttaaaccagtgcactcctaaattatcagtggatcaaagaaagaaattacaagataaatttaatacttaagattaatgaaaacaaaaacttaacataccaaaactcatgaaatgcagctaaagctgtgcttggaggaaaatttatagcttataaacatctatattaaaaaaaatatatatcgaatcagtaatttaaccttctaccttaagaaattagaaaaagaagagtcaactcaacccaaagcaagtagaaaaaaggaactaatgtagattagagtgaaattaaaaaaataaagaacagaaaaacaattgaggagatccaggaaactaaatgtttg

SEQ ID NO: 269321 - DNA, 401 bp, Homo sapiens
tcataggacataacaaagttgctactggattgattattccttgtgtaatcattatgaattctgaattagtggtaaataataaaattttacattcttctcttatccatccaaccagtcatcccattcattcaaaaactattattgaccactagttatccatgaggcagtttgctatagcacgacaaataggaaaatgaactggtttcttgcttttaagaaatgtataatttagttacatggtaaattactccttattacaataacaggtcatcagaattagttagccaatgttatttctgtacttattcatagttttagtcattaactttggttagcgttctttcttgttagctctagtttcactaatgaaaataatggagctgtgtagtacagaaagttac

SEQ ID NO: 269322 - DNA, 559 bp, Homo sapiens
gcactccagcctgggcgacagagcgagactccatctgaaaaaaaattgagtctatgctgcctactcccttgttggaatcctacctaaggattaaaaagtaagagggaagaaatgtgcttgtatttagcataatttagcataaagcatataaaatagatgtccttaaagtaaaacctaacacagttcgaatgcacacgaggtacttagtaaaacatattgaataaatgtcttagtatgttctggctgctataacataataccataattggtggcttattaataatagaaatttgtgtctcacaatctgtaggctgaggattccaagatcaaggcatcagcaaatttggtgtctggtgaaggcaacttcttggttcatagatggtgctttcactatgtgtcctcaaatattgaaaggagccaagaaggtctctagtggcttcttttgtaaggagagtcatgagtcatcccattcatgacagctccaacctcatcaattagtcacctcccaaaggttgtacctctgaataccatcaaattgatggttaggattgagacacat

SEQ ID NO: 269323 - DNA, 529 bp, Homo sapiens
tgtgagggtggctgcagccccaggcccacggccagaaggaagcacactgttgctcagagacacattagaacatgtactgtcaacggcccctctgcctcccaggaccttatgctgtagttggggagagagggcatctgccaaactcaatgcaggaaataagctgcgttgctgctaaggactggcccaaggtagtgggaaaagcccattttagagacgggaatgcagagtcacaaggaagctgggtgatcaccatcagggacccagaagccagtgctatccagtaagaaatgcctgatggtgggtgggcagggacgtcagagccctgtgggtgtcagagcttcatggggcctgcccggccacctgacctgccaccagggaggctcagtcattcataaggctctcccctgcccattcccctctgcctctcagagatagtgatggcagagacaagtggcatgggaggcccacttgtagcagacacacccttttcagattttgttgaacagacatctctttctccactcttctt

SEQ ID NO: 269324 - DNA, 420 bp, Homo sapiens
gttcttacctttggccactttttccattttgaccctctcttctttcctccagggtcactgggttttactacagtggctttgcttctggctagtaaatcttctaatcttgttttgatctctgggcctttgtatttgcttttgctgctgggaatgttctgctcgaaagtcttctcacccttgacccctggaagttcagacagaagccaaatgttagctccttagaaaggctaatgtagcccactaagagagttctattggcccttttttattgtcttcattgtacttgtctgtagttattttaattgtctactgtctacctccaggatagtataaacttattgaatgttcttgttcacactgactcctcagcatgtagaacagtccctagaagtagtaaatattcagtaaatatgtattggg

SEQ ID NO: 269325 - DNA, 264 bp, Homo sapiens
tttgcttcaacaaaatcctatggtctattgtagccaaatattctgccattatgccctaaaatgtgtaatctatttcaacatttaaagttagtgcactgttagagtttaatacaaatatattaagctgttggttattttgcttattagaaaaaacttgccatgtttaagttttattaatacagaaatcactagggaaaataatctataacagatgaatagaaggattaaaattcaaagttcctattaagcctgttctgattcttt

SEQ ID NO: 269326 - DNA, 345 bp, Homo sapiens
tccccaagactcgtgtatcctatacttttttctctcagaattttgatttgttcattttcgtgtaaatgtacttaaatctcacaaacatctataatttgtagtatcactctggcatttgtggcagagaaccaaaaagaatggaaatgagttttgtcattcacaaatgtggctcacattgttttcccagtaataaaagcagaccaatgaaacagaacctttaatggatactattttaggaggttccaattcttattactatcacatagataagatgcaatagcagataaatatgatttcatgtatactggctgtttgacatacttagggtttaagataaaaatgttt

SEQ ID NO: 269327 - DNA, 511 bp, Homo sapiens
ttactgctttgcatgagaacacatttgtacatccaaccctccctggaggctttgagcatcttgagggactggaccgctggtgtattcttcttggaattcactgtgtctagtacaggtctgttgaatgatggaataacagcagcaacaaacccacatccacgacaacaacagttaaccttgactgggagcatttatgctgtgctgaatgctttgctaaatgctttacaagcctcagctcagtcctttaaggaaagtgacactactacccccattttttggtgaacgtaagtgctaatttggtcaggacctggagttcatctttgttttgcctagggaacaaaaacttatgaggcttacacatatcaccaatagaatgtttaaaaaaaaactttaaaatactggagtataactttttaaatccattctaacatgttagaggctcttgctttcatatgcaaagagctgatgtgccaatcataaattcaatctaactgctaaagcaatctccaaa

SEQ ID NO: 269328 - DNA, 356 bp, Homo sapiens
actagaaagaagctatctgtgaaactgctttgtgatgtgtggatttatctctttgattctgcagtttggaaacactttctttatagaatctgtgaagggacgtttgtaatccccctgaggcctaaggggaaaaactgaatatccccaaataaaaactagaaagaagttatctgtgaaactgcttagtgatgtgtggattcgtctcacaaagttaaacctttcttttgatttggcagcttggaaatactctttttgtagaatctgcaaagggacatttgcaatcccattaaggcctatggggaaaaaacaaatatctacagataaaaccttgaaataaagtgtctgtgagactgctt

SEQ ID NO: 269329 - DNA, 785 bp, Homo sapiens
gaaaaatgaccgagtgtgaaagctagaagggacagaagggtcataaagtccccatttctcttcaaacagttgcaggctcacaatttgctaactgctttgctggggtgagcagaaacaggcgtggtctcaaacttcatcaagcatctacacttgtaaagaaaatagatagtaataaatcatcctccaaaattgtataaaatggcagctcaggtaaatggtttgaaggagaggtccacggggtgttgagaagctataatggacatggacctagttagaggaggtttctctgaggacatgagatctgaagggaagaaggctttccgtggtatggcaacaagtgcaaaagccctgtggtaggaagggacatggagaccagtgagagtatagaagcccaaagaaatatggcaccaggtgaggcaggaaggggctggccatgcaggactgtgagcactactatgggatttttgtctgtattttaagagtactgggaagccagtcgggcatggtggctcacgcctgtaatcccagcactttgggaggtcaaggcaggcggatcacttgaggtctggagtttgagaccagactgaccaacagggtgaaaccccgtctctactaaaaatacaaaaatcagccgggtgttgtggcatgtgcctgtaatcccagctactggggaggctgaggtagaattgcttgcccctgggaggcggaggttgcagtgagccgagattgtgccactgcgttacagcctgggtaggagagtgagactccatctcaaaaaaaaaaaa

SEQ ID NO: 269330 - DNA, 435 bp, Homo sapiens
agggaaggtcagcagataaacaagtgaacaaaggtctctggttttcctaggcagaggaccctgcggccttccgcagtgtttgtgtccctgggtacttaagattagggagtggtgatgactcttaacaattctttcagtttttctacatagacaatcatgtcacctgtgaaccaaaacagttttctttcttctcaatctgtatattttttatttcctttccttgtcttattgcattagctagaacttagaggatgatgttgaaaaccagtgttgagagggaacattcttaccttgttcctgattttagtgggaaggtgtcaactttttcactaatacgtatgatgttagctgtaggttttttgcaggtgttctttatcacgttgaggaaattctcctctatttgccttttgtttgtacactcctttctcctaaaaa

SEQ ID NO: 269331 - DNA, 427 bp, Homo sapiens
actcaaagaagaacattgcttgctgagggctacaatgaagaaaagtgagcacaaaatgaggcttggcaagtaaattaggacagataacataatttttagtttactatttttaatgggaacatatgaagcaattgcaagggcttgttaagaaaaaagtttgatgggatttatgtgtttttgcaggactctgtggtcagctaggaggaccagagatgaaagctaaaggggtcagtttggtggggggataatgaaataggttcttaaattgatggtggtgatggaggcacaactctgaaaatacttagaaccattaaattgtgcacttgaatggtcaaattgtatagtatgtaaattatatcttgctaactgcttttttaaaataaaaaacccaaacaaaataaatcacttaaaagaaatataataaaaa

SEQ ID NO: 269332 - DNA, 562 bp, Homo sapiens
tctccagtcttcactatttgaggaaaaaaattaagttaaatacataagaagcatgagccaccacgcccagtctgtctttttgtaacctagcctcagaagtgacatgccatcacttttgccacatagaagtgcatcactaggtccagcccatattcaaggagaggggattacaaatatgtatgaataccagcaggtggtgatttattggggcctatcctagaagctgcctaccacaaggaataatgggaaataagattggaaatatgggctgggacagataaaagaaagccatagaagctaatctgcgaatgaaactatacagttggaaatggagggtagagaaaagcaaattttatgtgtaagcccacttttggcaaattgtagtgctggataaatagaattttgagggtcatcttaaaaaccagttgtttaacaacaagtagaaaatgtcaaccaatgacagcttccaggaaacagaaccactctattttatcaggaaataatggtcaaaaaattgtacagaacatagctacctaccttcaataaatagttctaacaatct

SEQ ID NO: 269333 - DNA, 388 bp, Homo sapiens
aaatttttaaactgtgtgcacttatgctaactgctggaaggtttaattgcttccttgatattttcagcatgtcagaaatctccacctcctagtccttagattttagattgtaacaaattgcagccaaacagctaaggtttgaattcttattctttatttatatatgttatagattttactgtcaataaaactaggataattatgagttattaagaagtttaagttagatagtctaagtaaagtgcttaatataaaacagtggctggcatctgtaatcctagctactcgggatccgggacaatcgcttgaacctgggaggccgaggttgcggtgagccgaaatcacgccactgcactccagcctgggtgacagagccagactctgtctc

SEQ ID NO: 269334 - DNA, 404 bp, Homo sapiens
cactcatgttacctacaatggccgttctcttacagacatcatgtttttagcacgttattcctagcaaaatccccaaggagtgtaatagtaggttgcctaattcattctgtttgagcattatgaactcagaatcaatatttgaatttttagagcttcctgttttcagagtcctgtgttccaggcatctgataagaatgactgcataattgtcctaacttctgtaatacttttgctcgagtatgatctcggtatacagacttaatgcttatgacaggtccacattatttgagtaaaccgattgaaaaccaagagctgattgagaacgtcccttaatctagcggctgcattatcaatttgtgagcatgtccacattctggtctttgagggagaaaatacagtaaaaa

SEQ ID NO: 269335 - DNA, 448 bp, Homo sapiens
gtaatgctggttgtaactcactaaattgatttcacaacctgcccatggatctcagcctgcagtgtgaaacacagtaacctagggaaaatgagtctagatggcttttaccaagggtagtggaagtggggcccacattgtgagaaatacaaccataagtaaaaagtgctaaatggcctctctttaaccagagaccacagtctgtaacttcccctgctttcagtggttacctctgggtttcccctgttgtgatttatagaaaatgactatcactttggaattgagctggtggatttctacaaagattcttggtatttcatggttattttctgatgtagagcaagacttcatgtgaatgaaagcagattcattttgcctttcttgcttgggtaccccaggctgatgtggaataaaaaattgttgggtgatttctcttacatttctgcataat

SEQ ID NO: 269336 - DNA, 395 bp, Homo sapiens
gcaacagagcgagactctgtctcaagaaaaaaaaaaaaaagaacgaaaattttaaaatatatttttacaaaacaggaaaatatgatctgtgtttacaaaaaaaggcaatgaacgggcccggcgcagtggctcacgccggtaatcccagcactttgggaggccaaggcaggcggatcacgaggtcagcagatcgagaccatcctggctaacatggtgaaaccccgtctctgctaaaaatacaaaaaattagctgggcgtggtggcgggtgcctgtagtcccagctacttgggaggctgaggcaggagaatggcgtgaacctgggaggcggagcttgcagtgagctgagatcgcaccactgcactccagcctgggtgacagagcaagactctgtctc

SEQ ID NO: 269337 - DNA, 296 bp, Homo sapiens
tggttctcaaatgttatatcaaaatcacttgaagcacttatttctagccctacccaagacctgaactcctcagaagatatcaaaagcatctcatttttaactggctaccattacgtttctgatacatacccatattttgaaaataaagctctaaagagccagaatttgaaagtaaaaaactatcttatgcaggtttcttatacaggtttagcatccctaattcaaaaatttcaaatccataatgctccaaaatctgaaactttttgagtgccgatatgatgccgtaagtggaaaat

SEQ ID NO: 269338 - DNA, 239 bp, Homo sapiens
atataaaaaaaaggtcactttattcaacaagttttattttatagctcaaaaatgcacccaggcgtacaagaaaactaattagacttgaagactaccaagtgatgccatcttgtgacagcttatagtgacaaagcttcttagcagttgtgaaaaagactttcataaaaaatatgttgttcctatataaaaatcatcgatcgggcaattttttaaatgactactttgaaatgggaagagtg

SEQ ID NO: 269339 - DNA, 232 bp, Homo sapiens
attgtttaaacttcttcatattcaccctgaagggaccataaattactcctgttccttttcccctactctatttttttttgactagcattttctcttactgcaattaccctaaggtattaaatggatatattatttccttacaagaaagctaaagaagaaagcaacataagaagagaaaagcagtgtgtgctttcatgaaataaaagaatgccaaaaatggagaaacatagac

SEQ ID NO: 269340 - DNA, 404 bp, Homo sapiens
agaggaaccaggagtatgggaggaacatgaaagtggacaaggaacgtgaccattgaagcaccacagggaggggtttagacctctggatgactgtgggcaggcctggatgatatccagccttccataagaagctggtggagcagagtgttccctgactcctccaagtaaaggagactccctttcccggtctgctcagtaatgggtgccttcccagacactggtgttaccacttgaccaaggggccctcaagcagcccttatgcgggtgtgacagagggctcacctcttgccttctattcacttctcacaatgtcccttcagcacctgaccctacacccactggttattactagattatgttagtaatgcaacaaaaagtaatattaaaagctaatgattaataat

SEQ ID NO: 269341 - DNA, 190 bp, Homo sapiens
gatattacctgtggcagtaaaaactaatagagttcttactggtgacactctcggctgtggtatctccctggtctccttgtgcaggtccctgggaggagaggtactgcatcagcccacacccatgcacactgtttacactgctggagagcatttccgtcttagaaacagtcttttctttcatgagatcttg

SEQ ID NO: 269342 - DNA, 183 bp, Homo sapiens
tctgtctagattttattctgtctcatttttttctgtctagctattcctatgttaataacatgctgttgtaaaaattctagcattaaatattttactacctcatagggaaatccctccttatttccttagctattctcaagcattactccttccaaaataaatttacaattattttatcaagca

SEQ ID NO: 269343 - DNA, 436 bp, Homo sapiens
tctctttattgagaccatgagcaggcaagtaactcagctatgttttatagaacctgtttctgtttgtgattccacttctttggctccctgcactccaaactcaaaatgagtgtcagcctcttagagcctcagaatttttagttgctcatatgctacacttgtcttctgtttggggtcatataatacatccctccatggcattcagaggaagtgatctacctttttcctttaagtctcctgaagtaactatgcaaccttccttgataactctgtaagagatacagtgtattgtagttccagaatatctcgtaccaggctgactctggctttctggctgagccttaaaggtaaatgggggtttgggagaaaccctttttcttagcccttgatatgttaaataaagaaattcagaaaatcctatattgcttataagcaa

SEQ ID NO: 269344 - DNA, 651 bp, Homo sapiens
ttcatcttggaaatgataccacatacccttatattgatgcactgcaagaggccaatctaatgtaggcataaaaagagtaatctggtaatctgctcttctcagcaccctctgctaataatgctgtttgaacaaattctagaaagactgttgatgccagagccaactcagaattaggcaggtgaatgttttcaacttctgctaataataacatcagttctgtactctcctctgggttctttttgctgtattaaagctgcagttcccttaggttagcttctatgcataacctgggaatgcatattttagctttttacttccctcccaaagaaaggagcagaagaggagaaccaaatagccaagatctagaagatgaaactgttgtatccattgtgtggattcagataagcctccacccaaaatatggttcaaatgttaagactaatgagcagccctacacttctctctctctcactttcacacacacacatacacaaacacacgcgcacgcacacacacacacacacacacacacacacacacacacatatacccctaccaagaaagtatgaaagtatgtattacttataaaattatgaggtttttctggggagagcagagcaggcctcccaagaaggtctgaagtagcttgag

SEQ ID NO: 269345 - DNA, 357 bp, Homo sapiens
ctgggcgacagagcgagactccctctcaaaaaaaaagcgggatgctagagcctgaatggaaggaagaagacaggcaggcatggggcagtgacagggacccagcagcctagatctggaagcctgagtgaaagaagcaagggtgtccatgcagggccgtgcctggccccgggtgtgggagaccaaacagggtggggatggcacatatgagaaggggaggcaggcacaggaagttgattacatacctacaggggccgggtggagtaactgaggatgctgagaatagagggagccaagtttctcaaggtcagagaagggcgtgacacagctgggcacagtggctcacacctgtaatcccag

SEQ ID NO: 269346 - DNA, 364 bp, Homo sapiens
ataacatggtgagaaaaacaaagttatttgttctcttcagactgccagtaaattgaagagcatattttaaagttctatgactttcctaaatcctgaatcttcgttggctacttactattattttatagtactgggatctggtcacattactgcgtgaagttgcaatcgtggtaccgttgtgttttctttgtcactagatgatgtaatttcagtgatggatactatggttcttgttttgcctttttgtagggctatttttatagtaaaatctattagtagaatttatgggttgataatctcattgttgtagattttgcttacattttcagagcatctttgtacaacaaggatttttcattacaaa

SEQ ID NO: 269347 - DNA, 445 bp, Homo sapiens
taatcaaagtcataatttcttacctatcaagtgtatcccttctcatttctattattattataaatgtatctatttttacaactgcatctcttgtgttctttttaatggcttggggcagatagcattttatgcctgaaataatatctgaaagatgtaatcataaaccagtgtaggggtgcctcccacagatatcctgattcttaccctgatccggcacagtgtccagtggttacttttgtcaaaaatgattatcaaattcattttgtaaccatttctctggcgagtagaagagtgttctagagagtgtgtattttacattactaggaagaaaatgttctcaagctacatgtcctgttttacatttatggaatttcttcaaaaaaaaaattttttttttttttgagacggagtccagcctgggcaacaagagtgaaactccatctca

SEQ ID NO: 269348 - DNA, 541 bp, Homo sapiens
tctagatggggtttcaccatgttggccagggttgtcttgaactcctgacctcaagtgagccacctgccctgacctcccaaagtgctgggattgcaggcgcgagccacgacaactggctgagactaacatttatactgcttatatctaggcccatgtctgtgaagatatccctgacatctaatcagttatctctcaatttttgccaaaatttccaccttgcatttccatgtcacgaattatatttattctatcttctattcacaatttttttttgagatggagtataaaaatgttcaccaaagttaatctggatgacaggattttgggtgtctgattttcttatgtttttccacatttttgaattttttcaataaatgtaatattgtaaaaaataagaaagcttttcaaaaatttcatcaaaattgcattcattttctttctcctatttaaaactcttgaacacctcatttcacagtggttctccaccggggcaatgcaaatgtttcagggacatttgacaatgtctagagacatttttgtt

SEQ ID NO: 269349 - DNA, 449 bp, Homo sapiens
aaatttgatattggctcttcaatacatttcaatagcagcagacttttcttaggagtatgaagtggtatcgcaagatgcgaaatgaagaggttgggaggaagggcgcgctgcatggcgccaatcaccaggtggtggctgaaaccctgccttccgttcccttgggacaaatgccactcaaagacagccagtagagcttccttcacacaccagtgggtctaggaagtagtacaggtaattcctgccacatcaatcccagaaaaagctctgaacgctaacaatctggttaactgctaaggctttgagcgtccggggcctggccaaggcgcagggaggatctgactgctgccaagtcaggagggttcccaacttacgctcagccttggcactctgccagagacttcgttttttaacatgtaatagatactcactgtaaataaaaataattgtca

SEQ ID NO: 269350 - DNA, 550 bp, Homo sapiens
ggggtgagggataaaaagctacaaattgggttcagcgtacactgcttgggtgatgggtgcaccaaaatctcacaaatccccactaaagaacttactcatgtaaccaaataccacctgttccccccaaatctatggaaattaaaaaaaattaaataaagtgtgcaagtgctggcgaggccccgaaggagccccacattggtgatggcaacgcaggtgacagcactttctctccccagtggggctggtggtgcccattcctggctgccccactctgagtctgaggaggaaccaaggctttcctggaaatgcaggggctgccatcggcctgtgggcttagggtcccaaacagggagagcccattgtttgtcatttctcctcagtaagcagaaagctctaagccctgaagcctccggtaaacgtcagaacatttggacatctgagtccattgtccccaggtctcataattttcctacattaaaaatccaataatgcattttgtggaaaatttagaaagtacagataaacaagagaataaaaaacatgaatttta

SEQ ID NO: 269351 - DNA, 642 bp, Homo sapiens
cataggccgaagtttttggactcctggtatagacaactgccaaatccaccaacaaacagtatgagctttattacactacaaagccaggactggctatttttggtggtctttgttttctagatgagatgtttttctctgagttcatttaaaatgattctgcataaagcacatactctactgtacaaaatacttttgccttcatggtgatgaaaactatggattgagggtcggggtgataccatctttaaagggatgcagctaaaaagtagggactacctgcatttcttatctaaagataaccacagttggcatttagtgatatactggctttgtatcatggccaaaagtatctgtaaagaagcttgtgggcatacttttgaaaccttctgaaaataaatgtaaagcatttacttcgtgtgtaaaattagaagtgtctatggttggtttgaataatatgagtcaaattataagagcattaaagtttgatactgctatctattaaagtcttaatctcttgcagtggctaattcagtgtgtagaattacacatcgcaatttttgttttgttaatttcaagtactagtgtatattaacaaatcacttaaatcatttaaatgtgactttaaaagctttgatgtatata

SEQ ID NO: 269352 - DNA, 618 bp, Homo sapiens
gtttctgagtgtgtcacagttctgtctgtatgggctgcagtggcttattactctcctgcctgcagtatctctgcttataatgaccaggccattgaactttcataaacattaggttttctgtcttcaattattttccccttaagtttcttttttaaataatatatgcattttagttcaggaaattgtacctaaagagcagaaaatgtgataaaactcattgttaacacatgcttgtattatttcaaaatgtaggattaaatcttatgttctgtgatatgaaccgggactttacaaagctgaaactttgtttataagaaaatagcacaggctgggcgtggtggctcatgcctgtaatcacagcactttggtaggctgaggtgggcagatcacttgaggccaggagttcaagactggccaagccaacatgatgaaatcccgtctctactaagagtacaaaaattagctgggtgtggtggtgcacacctgtagtcccagctactcgggaggctgaggcatgagaatcgcatgaacctgggaggcagaggttgcagtgagccgagatcgtgccattgcactccagcctgggcaacagagcaagactctgtctcaaaaaaaaca

SEQ ID NO: 269353 - DNA, 807 bp, Homo sapiens
gtgcttcagggaataggacaattttattccattgtttccagaggatgtcatatgatgcccagtgctgctgagaagcttttcatggggttctataaggaggcatgccctgatatcaaacattccataggccgatgtcacgcagaagacaacgcgagtcacatgtgaactgtaattggtacagaaatacctgggtatttctgtactgtgtgtactgtagcaaactagttggaatgtgcctcttataaaagtacatttacaaatcttcccgtgactgtggctttgagcagtcataggacctagaaatctgtgtatgtccaatagctgaggttattttcagcaaaaataattaaagggttttattttttaattcttgttggttttctaggttgttcacctcaagtgcattgctgtagaggcagaaaaaggaggataaagataacagaagtcctataggccagggatgtattgatagctcttgtgatttccaccagtgttgctgttgtctcaaattgccacagccttcattgcttgccaacatttcctgcatggagggactcatggttgcccttccccaggcctgaagagagagtgcagtcaacatgagattgctaggcattctggtttctgaaagttgggtgatcagatactttattgtgaaacatgttttacaaactttcttgatgtgtaagtgacatgccatagtttacatccatttatggtgtataatttgaagagtttgtcatacaagcctgtgaaaccataatcatgatcatgaacatattcatgattcacctcttgctgttttac

SEQ ID NO: 269354 - DNA, 126 bp, Homo sapiens
gcacgggtggccctggaggccgtgctgcgctgagctgtggccctgagactgcatcggagcggcgccccgttctaggccgtggcctttgccgagactgtagcagagaaaacgtatttattattccag

SEQ ID NO: 269355 - DNA, 400 bp, Homo sapiens
tttgaggtgggatttaagatctaaatttagtgcctcagtgaatcctaaaaatggtgaaattaaaacccaaagaagactaaactgaggcctgctttccagtgttcttctggacagatctgtcatcaaatgtaggtggagcaatcaatttggcttgcctggctagtcataaaagcactatttcaaaataagtagaccaaggtatatttctttgcattgagcctgctgttgttagtctagttctggggttggtatttttttttttttcagtgaaaggtcagataataaatatttaggctttgtaggtcacatattcttttttgaaaaaacaaacaaacaaaaaaaactccttaaaaatgttcttagcttgcaagccaaccccttgactctagtttaaaatgga

SEQ ID NO: 269356 - DNA, 824 bp, Homo sapiens
atgcattctccatttaaatggaatgaaagcttatctctttattgtgccttgatgtcaagtcggcaataaatatggatatcagactatgcaaaattattcctgaattcctgtcattatacccaatcaaaattctaaacactttaactcgatgttcaatgatcagttaggattgttcacatacgtggctagctgtttataattcttcatgtttttcgtcaatgaaaatatttggcttaatctcaaaatcatcaaaaagactagacgtaggttagtccaaaccactcattctttttgtagcaagtactttccaccaagaggatgcccacccagctggaaggaagctgaaagagtgaaagaatttttgccttgattgatgccaggaatgactctgagttattttttccccactggattgatcaaatcaagcctttctgcccttaaaaatataaacagtactatgtccctcagcatgatgagggcaatgacagatctactatggatgaggaacatcagacactctcaaataacatcaaatttaagaaccaagaaaaaaatatactctgtgatcatgagtgatagcgtcgattctggagaagaaagcctggataaggaaggtctctgatgaactacgggacgcagaagagaatgccatgctccagaaagcctgaatcgcacagaacgagacgagaaaacttcccttccactttcatccaaccataaaacttaaactgttttacttttaaattctcagtttcctggttttatctttttttcttcctccctttgtattatttaaaaagtctaataaatgtgttgctaattca

SEQ ID NO: 269357 - DNA, 490 bp, Homo sapiens
cactgagcaacagctcctcctgcgcccagggcgcggtgctctcggaggcatgacctcaatcgtcctcaataacccgaggggacctggaagccaagcacaaaaccccgggtcaccatggttagagaagtgacaatgatatgcccaaggtcgcggcaacgaagtgaactggaagctggaccatgagatcccaaagcctgaggtcttcagaggacacgatgtgttgtttccccaaacccagggaggcgcagaggtacagcccctcaagctccaactacaggcctggtccccgcggggtcagcgggctggaaggcctccaggccggccgccccggggcccgcggggtgggaagccccatctctccatctgccctccctgcagagcagctggccgctctgcgggagcagctgtcagggtgcaggagcctctgtccagccgggaacctggagtaggaggccccaccacgcctcctcgagcagagaaaggcggcttg

SEQ ID NO: 269358 - DNA, 524 bp, Homo sapiens
taatatgagacaagagtctcaggctggagtgcagtggcgtgatcttggctcactgcagcctctgcttcctgtgttcaagagattctcctgccttagcctcctgagtagcagggattacaagtgcccagtaccacgcctggctaatttttgtatttttagtagagatggggtttcaccatgttggccaggctggtcttgaactcctgacctcaagtgatcctcccgcctcggcctcccaaagtgctgggattacaagcatgagccactgtgcctggccaagggccaactgtaatagttattgaattctttcgggtaggtgcatgttttcagacctaggagctatgggcagacatagcactaaggaacaagttatgtactagcatataattatcaaggggaagacctttctcatcagtgatacttctggtctccaaagaaacttagaaaccagctagatttagaacatactaagaataaacattctatcctctttcttggattcaccattggattagtaaaaagac

SEQ ID NO: 269359 - DNA, 380 bp, Homo sapiens
cactctcaatagaattagcagacctcacagacttttcaatgactctcctggaggccttaatgtcataggaaggtgactctaaacatgattagctgtacaacctcattcattccaaattcagctgaattttcctttaagggcagtgaaggcttagatgaagatactccaaaggcgaagggcggaagtgataatcctttgtcaggattgtcagttgccaaagccatgccaagtttcttaggaacaatccaatagggccgggcacggtggctcatgcctgtaatcccagcactttgggaggctgaggcgggcggatcatttgaggtcaggagttcaagaccggcctggacaacacggcgaaaccctgtctctcctaaaaatac

SEQ ID NO: 269360 - DNA, 317 bp, Homo sapiens
ttgtcctgatccaaatccttctccactgggtgctgcttactaggcactgttaactacaaagcatgcctttcaatcctgttggccaccacagcttcaagtcaacactgcaaggcctactgggtattggagcatgcgctaaacacctttggtctttcttctatttgtgttttcactgggtaatgaggttctcacgggcaccacttttggctccactggctgttcatcccttccttcctgggtttcctattttgcaaatggtgccataatctgtctagttgtccatgacagaagccttgactctttcttccaacaaataa

SEQ ID NO: 269361 - DNA, 453 bp, Homo sapiens
attctacaggtatgagggagtttacatttggatttgtcaatggaaccattaggattttttgtttgtttgttttgtaaaaataagaacttttttccttagccttgtgtctgtgccaaaaatgtgacctttttttttctcccaagtgtgcccaaacagtaacaattttttgcttggattatgttaagaattagggcatttgaccataggcattagatgtatgtgcaatgaaagtgatcccctttaataagcataataggaacatggaatttgggcttttgtttgcagcttaggatgatggtgtgtcttgtaacccaaggaggtttttcacttttctgaaagtgagaagactggtcagcctaaacccgtggtgtcactgttcttaagggaaacctagttgaggagtgggagataaccatttcacatgttgtttttgtaccttggagaaaaaaaaga

SEQ ID NO: 269362 - DNA, 338 bp, Homo sapiens
gttgctctgcatcctcaccagcatttggtgtggtcagtattttggattttcaccattctaatagagattcacggatccatccgggtggtccgggcaccactggcgcccctctgcggctattccccagttccattttctgaagccacaggtcagaagccgctgtacaacactttgccgaactccagaatcttgaaggagacgtaaggagcagccacctgccgcgcaggcgcaagcctttctttcggcacaaagaccgtgggaggaggggtcggcgcaagcgctcggtgtctctctgaaaagaacatcatactgcctcctggctgacggagcgcagcgca

SEQ ID NO: 269363 - DNA, 557 bp, Homo sapiens
gcgatctgctatttgtttaaatgttgtttgcaaagttcctgaaaggaataataaaataatttgtcacttttatcttcctgggcaagagtttcctgcaatagtgaagttgtgatgatgaagatggtgcaataataaagctgtgttgatatggatagtaaactgtgtggtagagatggtttccattctgagagacaaatccaataggatgattaggattcttgctaagtaagcatttctttttaagaataactatttatttcctgattataaaagtcttatgtatccactacagataacctctaaaatattaaaaagtatcgtaaaataaaaattgttcttatctcattaagttcatttcaaaatgccataaactggatggcttcaaacaacaaaaatttattctctcacagttctggaggctaaaagtcaaaaatcaaggtgtcacagggccaagctttcatttaggatgggtagacatggcaaggccaagagttttgaagagtcttggagaataaaccagtcattagatcatctgttaaaaagttgtgcgatctgct

SEQ ID NO: 269364 - DNA, 319 bp, Homo sapiens
gaggatatggcccgtaagctgcccaatcttgcctagaactggctgcacctgctgttcttttgcttatgcgaattggctgcacctgttgttcttttgtttatgccttaaccccggttaccctaattcctattctcctgtctcaatagttctttacttctttctctcaaagcacgcttcttttatatttattacaaaggttgactttgtgtttcagataatgtcctctgtctttcaaaaatatttaaaatgtataatgctttattataggatccaccagagactaatgttcattgaaaataaaaaaatgagctaaggcgaa

SEQ ID NO: 269365 - DNA, 544 bp, Homo sapiens
aggtagactggggtaaagacggaggagaggatagtttagtttattacctaacagaaaggctattaaaatggacgagttgtagtcctatccctgacattttatgtccttggttaatgtgcttagccatcttgtgcttcagaaatgtcctcctatctgttcaaacctgtaatttttgaaggtttaaaccatgattttctgataatctcaaactgctcacatctccttgttagaactagtatcttagaaatgctaaaacgattagttctgaaatcacattgctcctaaaagaactaaatttttttgtattatcttcgtcttactattccctttcacttttataaagtcacagagagaagcactaaggtaaaatgaatgctatgttgagtttttaccatatatataacctagagcctaattttacctttcaaaactctagttttccatacctgtcaactcctaattgatgtctttatactgtgagctcactgtgtattcggaacaccaacccctgaaaaagcttaagccagagtagcacaatggaaga

SEQ ID NO: 269366 - DNA, 368 bp, Homo sapiens
ggaaaaatacctttgtgagtgttactttctatgttgttgcaataatattgcctgtgttaccaactgcccaggttggagagtcatgtgccataatctgtgtgaaagcacttttagaagtgctgtgcagttggaagcctgttattactgctacccccacaaccagtgctggtatcatcacatttgtaccctgactttggggtaggatatacggacatacacatttcatttctttccatctattttgagaaatctaagccagggaaatgcagtggaattcttcattaaaaattacctttggccaggtgtgggggctcacgcctggctgggtgacagagcgatacttcatctcaaaaaaaaaaaaaaatttc

SEQ ID NO: 269367 - DNA, 605 bp, Homo sapiens
ctatatggaagccctaacctccagcacctccgaatgactccaaatgagactgcctttggaaataaggtctttaaagaggtgatcaagttaaaatgagctctttagggtgggtgctgatccggtcacactggagtctttatgagaagaggaaagttagatgccaggcgtgtgcatgcactaagattaaaaaaaatagccacacaaaaacacattgggaaggtggccgcctgcaagccaggagagaggcctcaaaagaaaccagccccgtggacaccttgatcttggatttctggcctccagaactgtgaaaaaataaatttctgttgtttaagccacacagtctgtggtcctttgttcagcctaagcaaacaaatacagaaaggagtccggattcaggtgtggaaaatgatgataattcaatgtcaaaatgttgcaacagaaaataagtgtctggacaaagaggaaggagagagaaaagagggagtgggcttaagcaaggatcctggagttgggaaggaccttcaccgatgtctccccacaatcttccctccacggatccttgcgtgaccgatgccccctcatcctcatgagaggccctggctgag

SEQ ID NO: 269368 - DNA, 401 bp, Homo sapiens
tgaggctccgtctcaaacaaacaaacaaacaaacaaacaaacaaacaaacaaacaaaaaacagccgaactctgggcaagaacagtgggactcttgactcaggcctgctttcaatctccccttcctgcttggtcaggtgcaaaggttctgccagggtagggtaaaccatgaggactgatcctgaggctgtataaatgtgcacaggaacagggagtgggcccagcagaaagtaaaagccagggcagatgtggttttgtggcctaaactttgaatgtgttctgctatgcgttggcagagaacagaagcttgaagggctgagatatttgaatacaacctctgttcagtcactggttgacccataggctatacagacacaggggtgaccccgagaaagccaacttt

SEQ ID NO: 269369 - DNA, 419 bp, Homo sapiens
tgacagagcgagacaggtcctgtctcgaaaagaaagaagaagaattaaaaaaagtgattagatcccttgtgtttgggacacttgttggcagcagggatggtagcgtttatgagggttgcatgtaacatcgcctagctcagacatctgtttgactgtcttcccccctgaagcgcaggctctgtgagggcaggtcttttgtctttcttgttaatcttcatatgcttagtgcttgccacatagttgatgctcagtcgatatttggatgaattgaagggattaatgcattgaatctgaaccttgctttcttaatgcatatggggagttctttggaaagccacacagaggagcttggttgcctgcttcctctcttccccagattgtctttttattgttgtggcttcactgaagcactctcactt

SEQ ID NO: 269370 - DNA, 516 bp, Homo sapiens
aatcccaggtagctcacagccatactgttcctcaagtcctgaggtccttagacagtctctcactctcagagtcttcctatgtttatctgttctattgtgtccagagtttctaagacgtaaggatgaggaatggggcaactctacttggacagaaacagaagtctgcctagtagctttttgctttattaaggaaaggagagcaggaaggagggagaaagggagaatttcctttaacttttttgaggtataattatcaataattcacccatttaaagtaccaatccagtgtttttagaacattcaaagagctatgtaaccaacacaaagtcagttttggaagattattatcaccccaaaaagaaaccttgtgcttttttgttttggtgtgtgtgtgtgttttgtttgtttgtttgtttttttgagacggggtttcgctcttgttgcccaggttgcagtgagccgagagcacaccactgcactccagcctgggcaacaaagcgagactccatctccaga

SEQ ID NO: 269371 - DNA, 795 bp, Homo sapiens
agcaggagaaaaattcaacaaaatcctgtttctcagtgggtcattatttttttagttatgcttttaggcatgagctaatctctgattacctcaacactgacaataaaactgatttataaataatcacaatggaaccattcagtattggagcttgacaagcctttgttcaaagcccttcagtcactaaaaataatgtcccaataagacttaaatgtcataaaaccttttgcaacgaaaataaaagtttcatacatccactgaaacttgtacagtaagagaagcctgctaagcccttacctctcggctttcttgattaaaatgaaaagatattttactcttgagattgcctattttagagaaaaattacattttgaggatgggctcctgcttacccgatctctagaaagtggtctgacagtagcctctggttttgatttaatgagttgctttatcatttttttttctccttttaaaaatgaaaacagactgggcacggtggctataatctcagcactttgggaggccaagccaggcagatcacaaggtcaggagtttaagaccagctgggccaatatggtgaaaccctgtctgtactaaaaatacaaaaatcagccaggcgtggtgggcacctgtattcccagctacttggaaggctgagacaggagaatcgcttgaacctgggaggcggaggttgcagtgagccgagagcacaccactgcactccagcctgggcaacaaagcgagactccatctccagaaaaaaaaaaaaagaaagaaagaaaagaaaagaaaaca

SEQ ID NO: 269372 - DNA, 467 bp, Homo sapiens
caagtcccttatgtaaaatggtatagtattttcatataacctacatataacctcccatatactttaaatcatctctagattatttataacagctaatacagtataaatgctgtagtctttatactgtttttattgctattattttttatttttttcaaatatttttgatccacggtaggttgaatccacagatgtggaacccacacatacggagggctgactgtgtatgcttaatgacattttttcccttgtatgtacatagaaaaatattgtatacattgttagtccccctcatattctgtaatgagtttttcatttgttgatgttagtgtcaaataatttaaaatttaggctgggtgtggtggctcatgctggtaatcccagtgttttaggagggtgaggcaggagaatcacttgagcgcaggagttcaagaccagcctgggcaacgtagggagacccattctac

SEQ ID NO: 269373 - DNA, 456 bp, Homo sapiens
aactgaggctctggggattaagatcgtgaactgtggggagtggaggaggcacagctggagtgaacttgggtgtccagggttctgtttcgtctcacagaggatgtgcgagggtgtatgtgtgcatttgagaatgtgtgaggttgtgtgtgtttaagaaaatgagaatgaggctgggcacagtggctcatgcctgtaatcccaacactttgagaggctgagctgggtggatgacttgagcccaggagttcaagaccagactggggaacatggtgatgaaaccctgtctctacaaaaaaatacaaaaaattagcagggcatggcaatccatgcctgtagtcccagctacttgggaggctgaggtgggaggattgcttgaacccaggagataaaggctgcagtgagccatgatcgcaccactgcactccagcctgggcaacagagtgagaccctgtctcc

SEQ ID NO: 269374 - DNA, 447 bp, Homo sapiens
acatgaggacagagtgagaagatggctgtctgcaactgccctaagggccatcacaagaactcaaccgtgcaggtcttgatctcagacttccagcctccagaactgggaaacgccatgtgaagattatggatttctgctgccacaagccaagtaactaccagaagccaggagagagggctggagcaagggagcctggccctgacgacaccttgatctcagacttcgggcctccataattgcacgagccaccatgcccgaccaggaccggtgttcttataagaagagagagacatcaggaatgggtgtgtacagagaaaaggacacagcaagatggtggccatttgcaagccaaggagagagacctcaggagaaaccaacccgccagcaccttgatcttagacttccagtctccaaaattgggagaaaataaacgtttgttgtttaaga

SEQ ID NO: 269375 - DNA, 302 bp, Homo sapiens
gacatttccccaatatattattgtgaaaatttgcaaacagagcaaagttgaaaaaattttatagtgaacagcatatacctaccatgtagactaccactaacatttcactatagttggcttatcacatgtctgtacctttctctaagcattcgtcaatccctgttttttttttttttgggcgcatttaaaagtaaattgtagacatcagtagacttccgcctaaataactcagcatgtatatcattgactaggttaaatatttgttgacttttttcttttgaagtaaaatatgtatacaatga

SEQ ID NO: 269376 - DNA, 636 bp, Homo sapiens
actagcgcggcggccgccggcccgcaatggtgctaccctggttgctgctcgagactgcgcgcagggcggtcctcgggtccgcggaggctgcgctctgcgccatgaaaatgacagatgaaaatagaaaagtgtggctggtctgaagtggatgaagtaggtgaagctctacagatgaatccaagagacttcaaagagaagtacaatgaagtaaaaccatccaaatctgacagctagtgttttcttatttagccggagtgagaagcaagaaggccctggacacagcaatatctctgggctttcacagttactatgagaggtgtgttaaaatctctctctgaaagaaagaaagaaagaagaaaagaaagaaagaaaggaaagaaagagagaaagaaagagacaaccgtgaagcttgctgcatcagtggactcttcctttcacaaaacatttttctgtagtatgctatgctgtttgacagcattttactcacagtagaactgctttcaaaattggagtcagtcctctcaggccttgccaatactttctcaactaagtttatgtagtattgtaattcctttgttgtcatttaaacaatgttcatagcatcttcaccaggaatagattccatctcaagaaacc

SEQ ID NO: 269377 - DNA, 608 bp, Homo sapiens
actagcgcggcggccgccggcccgcaatggtgctaccctggttgctgctcgagactgcgcgcagggcggtcctcgggtccgcggaggctgcgctctgcgccatgaaaatgacagatgaaaatagaaaagtgtggctggtctgaaggtttgacgtcaataaagggaaactgccacaatttttatactgctatttctaaagatgtcacttataaggaacttaaaaacctgttgaattctaaaaatattatgttaattgatgttagagagatatgggaaattctggagtatcaaaaaatccctgagtctatcaatgtaccattggatgaagtaggtgaagctctacagatgaatccaagagacttcaaagagaagtacaatgaagtaaaaccatccaaatctgacagctagtgttttcttatttagccggagtgagaagcaagaaggccctggacacagcaatatctctgggctttcacaggtgtgtagatgaatgaaaaaatggattgataaatgtataatccaatgtttcatatatattacatttttatatgtctatttaagaatttcttgtaattactgtcagtaaaggcaggatagcaaaactaaga

SEQ ID NO: 269378 - DNA, 389 bp, Homo sapiens
cagtacttcatttttatgactaatattccattgtatgtatacatcacattttatttatccataatctgctgatgaacacttgggttgtttccaccttttggttattgtgaataaatataagcattagtgtacaagtatttgtttgagcccctgttttcatttgagcatatacatgggagtggaatagctggaaacctgttcgtttaaacctttatagctatttgtccatttttatgttactttcctagccatgaaaatgacagatgaaaatagaaaagtgtggctggtctgaaggtaagtgagttacctcaattgattgtccagtcagttacagatcgaacttgttctactctttccctccttctcactactgcacttgactagtctta

SEQ ID NO: 269379 - DNA, 389 bp, Homo sapiens
tccctgagtctatcaatgtaccatgtaagtgacatgtgtcttaaattaatttattaaaaaacatataaataatttactatatctaaaatctaactgaaattcttaacattttctttcagtggatgaagtaggtgaagctctacagatgaatccaagagacttcaaagagaagtacaatgaagtaaaaccatccaaatctgacagctagtgttttcttatttagccggagtgagaagcaagaaggccctggacacagcaatatctctgggctttcacaggtgtgtagatgaatgaaaaaatggattgataaatgtataatccaatgtttcatatatattacatttttatatgtctatttaagaatttcttgtaattactgtcagtaaagg

SEQ ID NO: 269380 - DNA, 874 bp, Homo sapiens
tgcttctcaaaaacatttaactctaggtggctattatcttactttaaaatgtggaattcagcccgacaccgtggctcacacctgtaatcccagcactttgggaggccaaggcaggcggctcacgatgtcaagagtttgagaccagcctggccagcatggtgaaaccccatctctactaaaaatacaacaattagccatgtgtggtggcggatgcctgtaatcccagctatttgggaggctgaggcagaagaattgcttgaacccaggaggcagaggttttactgagctgagattgcatcgctgcactccagcctgggtgacaaagcaagactctgtctcgaaaaaaaaaaaaaaaaagtggaattcgtgtttgaactaaaatgagtattatttcttcttcatgtgaaagtttataatattacctaatttagtaataatctatttgaattttaagctcttcttaataaggaaagagataaaaagaaaatcaacacatctataagttaaaacctatatgttattacatatttgaaaagtatttattgtatacctacaattcaagattgaaggaattttcattagcacatttttgttatgccttacagattttacttaatccaatttcatgagtgacacgctgtctttaaaaaggatgtttagaagcctcatgatttatatattctttgtgatggcatttttcaaaatcttaaatggcagtgaaaaatgccttcccaaatgctttgtagttcgtgtttcacaagttctcttgttggctcaattttgaaatgtgcaacatctgtttgatagtttcactaattctacaaatagaaatctataaatactttagacttctaaatttatgaatacagtaaca

SEQ ID NO: 269381 - DNA, 419 bp, Homo sapiens
tcggccgccccaaacttgcttacgtccaccctgctctccttctgaccgaccccaggatatctggagagatgtgaaaagtgtgctgacgcggaagaagtcggtttttccgcgagcaaagtgtcgtcccctcacgctctccacctgcagctccaggtgagctgcagcccagaccctggcgccgcccaacagcgtccgcgcgcggggaggactctgggtgggcttcacccgaccctcgaggttcctctcccagcccctttccactgtctccagagttacctctcagcagagcagcagcagccttcgctgccagcgagcaagacgatcacgttcactcgatttgaatttagttgttttaaccgtgctggaaaaaccctttaaacacagctttcctcccatcccttagacccctaacaccaaaa

SEQ ID NO: 269382 - DNA, 628 bp, Homo sapiens
ggtccaaagggaaaagagaaagagacatctttgtaacccttctcagaagagtgaggaacatctttcctaaaaagaccctcatgtgatggccacgccccctcttacgatgttatatcacgtgatccttcctatgctggatcttagtacagtcactcttcaaccacgggtaggatcagattcacaagacacctgagctgagtggaaaatcagccagtacattaatacaactggtgttttcttgggaagaagaaatgagagaatggatgccagacgcacaaccaaaaacaacccaaattccaacttgccaaaaattcttttttacccgaatagagtcaaagcaaaccatcctaatgaccatccctctgttgttcagtattaactcatgttggttttattaaatataaaatgctgcctggtcaaggaatctatgtttttcacaataatttcatagacatagtattaggggaaaatgtaaataattatttattttgaaagaaaccatttcatgtaacaccaagattcactttcttctgtattctgcatacctgaaatagtacaggaaacatggtggcccgccaaaaataatgatactatttctttccatttctatatattttcactttgggct

SEQ ID NO: 269383 - DNA, 419 bp, Homo sapiens
tgctttggttgctcagaggcaggtgttgtgtgactgagctttaattgaggagaacctgttgacttgtaaattgtaagtactcagttttcacatagtttcattttcctattaatctttgttttccttgacctgatttatatatgacttcctatagcccacctcagattcttaaatgatagtttgatgggacaatcatgaacacgaatatactgactttagttttaatttaccattttctttaaagctttgttgatttgttatagtttgttcctatgatttggttttggctcttataagtttcctgttacatttccaactttatttttttttagtcatgccacttttttctaacttaaactgagaataacaatatgacattcattcctaaggtgatttttctttttttttttccccctcaa

SEQ ID NO: 269384 - DNA, 315 bp, Homo sapiens
aaagaggaatgggccccagctgaccccctgaacccaggtggtgacatgtgcacggtggtgcctgctgaaggtgggcaagggagctgagcagggaccgggggctactgtacctccttttcacctcctcccgcatctggagcccctcctcctccacatgtgcgaatccaggagccacagaaggtggggcgcagtgggacatgggtaggaggaggaagaatatggggagattctagtccctcccacttagagatgcggtcgccatggtgactgaggaccagtgaggcgggatggggttgagaatgggggtgggggtgt

SEQ ID NO: 269385 - DNA, 664 bp, Homo sapiens
taagccccatttgtattagtatttttgggctgctataacaaattaccaaaactttggtagcttaaagaaatagaaatatattctcttatagttctggaggccagaagtccagcatcagtttcagcagccaggagcaggctgtcatcagacaaagctgctccagggtctccaggggcaagtctatttttttttacttctcttagcttttgttggtttaagctttcattggcttgagtccaaatcatttcaatctctgttgctgtcttcagatggccttctcttctgcaggatttttaaaaatgacatttaacaaagacaggcccctttagggcccacctggtcaatacaggataatctgcctgttttataatccttaatttcatgtgcaaaggctcttttcctgtgaaaggtacctgtatagtttccatggaatacagcctgatcatttgagcaccatactcagcactaaaccattatagaatgactcttcagtgttggtactatacacacatcacacgctcttctctctctctctcctcctctcgttccctctttcttccttctgattataaatctcctcacttccctaagcgtatccagtgccacctatgtctaggttagagcagcacacataggagggcctgcataggtatcattgtccctg

SEQ ID NO: 269386 - DNA, 393 bp, Homo sapiens
agaatttgctaatgtccagtattaatgaggaagaagagatgagaaaacagcattgctgttgatggcagcagaaattaatgcaatttaaaaagaaagtttggcaatatttatcaaaagaaaagaaattacacatgcatttggactcaacagttatgtttctagaaattttagtcaagtatattcacataaaacatgaaaagttatatgtacaaggatgtttaatgtaacattgtttgaaattgtataaaactgtgaatgaacagagtgatgtatacttaaagagactaatgaaataatggtaagtagaatactctttagttattaaaaagaatgagatgaatgtgtacgtactgataggaaagatgtgcaggataaattaagtgaaaaaaataa

SEQ ID NO: 269387 - DNA, 543 bp, Homo sapiens
ggctgcatagtgcaccggctggagcagcacgacagctgccccgtctgccgaaaaagcctcccgggacacaacacggccacgaacacccccgccccgggcccgactgggatgaactgctcctcctcgtggtcctccccctcctccagctcgcccagtaaagagaacgccacaagtaactcctgagcccgcgtgggccggcacccaccactgcccgctgcgcctgaggctgcggggaaaccgcggggactttcccaaccaccctcagccagggccgcacggcacccacagactgggtgccccagaggcgccagtcttggctggtcagcgctacaggccccgcctgttccagggcaggatcctggaccggcccaccggctccctggctcgggaaggcgtgggccacatggtcccctctggggcgccttcagcctccccgtcttttgtctaacctcaccctctaaacgttcagcggtggaaagatttttagaattttaaattattactgctttgaaataaatggaagttttagctcaaaaaaaaaca

SEQ ID NO: 269388 - DNA, 404 bp, Homo sapiens
cagggcagaatttagtgactgactggatttgaagccgagagtttggtggttgggggagtgaaggataacagttgaattattggtttgagtgactgggtaccaccttcagaatttgaagaaagaggccgggcgcggtggctcacgcctgtaatcccagcactttgggaggccgaggcgggcggatcacgaggtcaggagatcgagaccatcctggctaacaaggttaaaccccgtctctactaaaaatacaaaaaatcagccgggcgtggtggcgggcgcctgtagtcccagctactcgggaggctgaggcaggagaatggcgtgaacccgggaggcggagcttgcagtgagccgagatcgcgccactgcactccagcctgggcaagagtgcaagactccgtctc

SEQ ID NO: 269389 - DNA, 273 bp, Homo sapiens
ggtgtcagcactctccttcctcccagacctgctgtgaggattaaacgagactttacaggatctgaaagcactttctaaatgctaatgtgatgtccaaatagaaggcagtgttcatctccctcagccacttttgctgacttcagtctccccactaagtgaaatttcttaaatcccaaagcggaggctcccctcaaaaagggcatcataaattccctctgtagccaggagtcttaaagcttccctgaatttccccaaaccaagcaacacatttca

SEQ ID NO: 269390 - DNA, 509 bp, Homo sapiens
  misc_feature (286)..(286): n is a, c, g, or t
  misc_feature (387)..(387): n is a, c, g, or t
  misc_feature (414)..(414): n is a, c, g, or t
  misc_feature (469)..(469): n is a, c, g, or t
  misc_feature (502)..(502): n is a, c, g, or t
gcctattgactgcattaaaactgtggttattgttgagtgtttgcttcaaaagctgtttggttttaaaagcaagtaagagtttctttggcactaaagaaatttcagtatctgggcggatcacttgagctcaggggtttgagaccagctgggcaacatggcaaaaccctgttattacaaaaaaaaaaaaaaaattagaaaaaattagtcgggtgtggtgacatgcatcttttatcccagcctccagagtagctgggattacagtgcacaccggctgcactcggctgantttttgcatattaatagagaagagtttcaccagttggccaggctggtctaaactcccaacctcagtaacccactcacttcagcctcccaaactgctaggantacggggcatgagccaccacgcccggnctggtttttaaagaatgctcaagtatttctcatcatcatccatggagtttaaggngatttatttctatcatggaagtagccacttggncagtttg

SEQ ID NO: 269391 - DNA, 676 bp, Homo sapiens
cattatcttaagagaaacaactcagaaacagtcaataccacatgttcttataagtgggagctattaataaaaaatgtgcacacattgacatatatataatgtggaatgatagtcattactgactgagaagggtggattgggtgtggggagttaaggaatgagaaattacttaatgggtataatgtatactattcaggtgatggatacactaaaagcccaaatttcaccactatgcaatatatctatctaacaaaactgcacttgtaccccttaaatttatttttttaaaaagcgtgtatcctaatttgaatgagctgtttcttgccagaaccctaactgatatgtcctttgtctagcaattctacttctggaaattttcccacacttaaactggcacatgtgcaaaatgaaagagatttccttgcagaagagactggaaataattcaaatgtctatagtaggggtactaattatataaataatggtgtgtctatagagtagaactgtatccagctatttaaaaaacaaggatagaaagatcttccaaacatatttttaagtggaaaaagcagggtggaacagggactatacatgctatctcttgtctaaagatggggaaattaggaatatgtatttgtttttgcttatgcatgaagatactctgaaggattcacaa

SEQ ID NO: 269392 - DNA, 294 bp, Homo sapiens
gtctgtagaaacgacggaattgcctaacaggggcaagagaaaggcagttggaagcttctgcaaggcaccgttggtaccattctgaaaattcatgtttcctgtttgccaacacgtctgctttaaatccctcaagctgttaattacttgctagtgttatataccagcttttcttcatatttatagctttcatttctctttgaagttattcaagtaatatatgcttgttgtcaaaaatgtaaaatacagataagcgtaaaaaagaaaataaaaattccccataatatcaccacttga

SEQ ID NO: 269393 - DNA, 416 bp, Homo sapiens
ggaacagcactgtaaggtgataacttggggcaaacatgtaaataataaaacatatgttttaaatattcaggttagcacattttatgtttctgtgagattaaaattgtgtgtgacatacccgcttccttaaaggcaatgtttctgaaaatgttgtacctgctattcctgaatcagggatgggtcccagaatctgccttttaaacatctcagataatctgaagcctgcttaagtttgtaaggcactgcttttgcactctaaggaagaaaaaaacaagttttaattcccgtctctagaacatctcagtgaagcaaaacaggaaagcaaattataagttagtatatgtaagatttcagaaggcaaagttgtaaagattagatttccttagcctgggaacatggcaaaaccacgtctctac

SEQ ID NO: 269394 - DNA, 482 bp, Homo sapiens
agatttaataaaaacaataagatggcaccttagtgaggaatttttaaaattctgaaatatcagtataatcccttcactacacaattaaaattgtgacattttcaactattagttgcaaagagagatcctattattaagacctgacagtgttcacttctgcctgtaaagcaagacagttggactaaggtaatttctgtttagtgtcactcatcatattccagctgtggtacagctagctatgggaaaggctcagcaaagaggcagaagagaagggcaccggtgttccaagttgtttttacaagtccacgcaacagtacctgtggcctgaatagatgtctttttttcattagtcctgaagcctcttaggaagaacatgcaccagtcatttccctttctaaggaaagtgttgcagccttttttcagtagctgctgcaggctgagatttatgagaatagtcttgctagctgaactatgtttgaaaa

SEQ ID NO: 269395 - DNA, 484 bp, Homo sapiens
aaactatctaaataaataaacatccagtgttcataaatcaaaataatattgttaagatggcaatactctccaaatatatctacagattcaacacagtccttttcagaattccagttggcttctttgtggaaattgacaagttgattttctaaaatttatatggaatttcaagagaccctgaatagccagaacaatcttgaaaaagaaaattggccgactcatacttccaagtttcaaaacttacgtgaaacaataatcaaaacagtatggtactggcataatgatagacatataaatcagtggaattgaattgaggatccagaaataaacccatgggtctttagccagctaattttcaacaaggatgccaagaccattcactggggaaatcatcttccgatagcaacattcaaaagaataatgttggattactagtataagtttctaagggctgctgcaacaattattaccacaaactgggtga

SEQ ID NO: 269396 - DNA, 616 bp, Homo sapiens
catccagctatttttttgtatttttagtagagctagggtttcaccatgttgtccaagctggtctcaaactcctgaccttcagtgatccgcctgtcttggactgccaaagtgctgtgtttacaggcatgaaccactgcacctggcccataaagctttattctattttaatgaagcaaaaatgcataagtgtgtaagtgtgatcatatgtgtgtgtatgtctaacaggagcactacatagcaaaatgcgaatgctgcttatctttggtgttggtatcacgtgtgatttaaaatctgttttcttctatttttaaaaactttcaaaatgagtcatgactttgattattagggagctgggagaaatgagagattcctttgcaggtgtcacctccctaccagaaaattggccttgcaggaatgtcctacaagccagatgtgtctctttcccccagtccctgtgcctggtgtgaggtcgtacagacagtgagcatccttcacagagtctgacctgccaaggtaggggggaagtgggggtttagtgacattcaaaacccgggggagccgaacaggtgtgactgtatgtttgcagggtgacctctcccctcaaagagcaagaaat

SEQ ID NO: 269397 - DNA, 653 bp, Homo sapiens
catccagctatttttttgtatttttagtagagctagggtttcaccatgttgtccaagctggtctcaaactcctgaccttcagtgatccgcctgtgtttacaggcatgaaccactgcacctggcccataaagctttattctattttaatgaagcaaaaatgcataagtgtgtaagtgtgatcatatgtgtgtgtatgtctaacaggagcactacatagcaaaatgcgaatgctgcttatctttggtgttggtatcacgtgtgatttaaaatctgttttcttctatttttaaaaactttcaaaatgagtcatgactttgattattagaaaagaaatctataacaattgagaggaaagaaaaccccacctgttgttgaaactggctggagctgggagaaatgagagattcctttgcaggtgtcacctccctaccagaaaattggccttgcaggaatgtcctacaagccagatgtgtctctttcccccagtccctgtgcctggtgtgaggtcgtacagacagtgagcatccttcacagagtctgacctgccaaggtaggggggaagtgggggtttagtgacattcaaaacccgggggagccgaacaggtgtgactgtatgtttgcagggtgacctctcccctcaaagagcaagaaat

SEQ ID NO: 269398 - DNA, 386 bp, Homo sapiens
cacagaagtgagctaggccagggattgcaagatgcggtggcctgcccgtagcagagagctgtggggccctgatccgcggtaccccgcatggggacgctgtcacagagcaaggcaggaggaaaatgtggtggtcagtgacccggggaataggaagggagcagctagggttgagatgccaggccctggccagcaggtttggagtaaggggtgtagagaaacaggaagtgttactcagcctgggttcccctgttcctcccgatggctgcacccctcccctctccccggctgcagcagtcccagctaggccggactgctaagcctggcccagagcacggctgacaattcacggcagcctccctggcccagcctcctgcaagagaaggagg

SEQ ID NO: 269399 - DNA, 344 bp, Homo sapiens
ttgcctgctcactggaggggcaggggaagaagcagaagcaacagccatttgagggttgactggctctaaggaaaagctgtttgctggcagacacaggtggctggtgacaaagggaacagagcaggggaatggatagctcaaaacgagcctcgccactcctgaacagaacagcaatcccagctgtgtcctttcgagggtgagtgaaagcacatgctgtcctttacatgcttgaggcggacttgcctgtctcttcaggccggatgctcttcagggccctgtggggcttaaacacatgtactgagctagctccaatcttaatctgcacaacatcgcaacccctgagt

SEQ ID NO: 269400 - DNA, 427 bp, Homo sapiens
tgctctgtcatcagtgcccttcatgggacagaagacaaaattgtgtggaaaacacagacatctaacaactctgagtagaaaaggatgtgaaagagcaggactctgaatgtgaagaaattcttggaataccttcatcaaattatttcatttcaaatttaatttttaatgtatgttcaagaatgatagataaaatccaaatgtgaagaagtctgcaagagcccttttaatgggcataattaaaacttctgaatgataagaaattgtgtcatgtcagtttgacagtcatttgtcttttttagtagtacattaagatttagattcgataaaatggacatgttaattagcttgatttaatcattccacaatttatacatttatcaaaacatcacattgcacctcatgaatatatatatagttattatttgtc

SEQ ID NO: 269401 - DNA, 200 bp, Homo sapiens
tcattgtgataggaattttcttccaaagacattaatgcgctatgattattctcacattcccccttcctaacaccaatttgggaacatcactacttgtatattatcctactttgatagcaaattgctaaaagctataaatttttgtttttgacttacctggggctaaataaagtgttatttgcttcaaaatgatttaagtc

SEQ ID NO: 269402 - DNA, 632 bp, Homo sapiens
tgcggtgcctcacgcctgtaatcccagcactttgggaagccgaggcgggcagatcacgaggtcaggagatggagaccatcctggctaacatggtgaaaccctgtctctactaaaattagctgggcacagtggcgtgtgcctatagtcccagatacgcaagaggagaggctgaggcaggagaatcacttgaatccaggaggcggaggttgcagtgagccgagatcgcaccacactgcactccagcctggcaagagtgagactccatctcaaaaaaaaaaagaaaaactttagtttttcctgttataaaaaataatgcttgtaattcaagccgtagaataaagtgaaccgtgatcaggaagggaacgagggatagagtcaaggaagtgggtggctcacgttgcatgatagaaaaagagacttagcagccgggcacgttggctcacgcctgtaatcccagcgctctgggaggctgaggtgggcagatcacctgaagtcaaaagcttgagaccagcctggccaacatggtgaaaccccacctctactaaagatacatgaggaaggagaattgcttgaacctgggaggcagaggttgcagtgagccgagatcgcgccactgaactccagcctgggtg

SEQ ID NO: 269403 - DNA, 702 bp, Homo sapiens
atggcatcctttagagtaataggccaatttcagagtaaaataatgttactaatttcagtgacatattatgggatcttgttatttctcatacaattctacctgctcagcataaagcatttatcaggcagtttgtttaaatttataatgaatactcatagttaaaaataatcaagtaacaataagacacaatagtctgaggcttaagaaacttttccttcataatcagctagatgtattacagaactcctgcctaaaaagatctagaggttaaagtgtactgtagactcaggtattatcagtgtacccaactctataacaacatacatgattccattcagttgttctttgatctgtgatttagagataagatgatcataaactctttgcttatacttttagatttgtgggtcattgatcattggatccataagagatgttataggtgatcttttccaatcctcttaatttataaatgagaaaagaagatacagaaatgttatgtattgtggcccaggttatttaacaaattactgggtatatggcaggatttggagttagaactcaaggttgtcttgtttctgtattcccctagtcagctcttcatagacctttaggacttagctatattctgaagtactataaaaagagaaataaacatggttttcactaatgggaatttcatttagaaaaacaaattttcag

SEQ ID NO: 269404 - DNA, 474 bp, Homo sapiens
aaaaaaaagaactaaaagtattctagctctgtcaccaactagcaatgtgactcagggcaaatcatttaacctctttgggtttcagttttctcgtttgtagaataaatgagcttgctaagatcttatccagctatattctacttcaatgactaaacagatacttgtaaaatgacatttgtaatttatcagatttctggatctcacgtagtagttagttggaatatttttgtcctactcctaagtagcatgtttcaagaatacagggccttaaactattagaagacacactctaaactacctgctgctacaattttaatcagtgattcaatcttaaattctttactttcattcctaagagcagataggtaaactccttggaaataatgcttttaattgggcttacaagtgaatacactgggctaaagggttgattccttgatattatcatgtgaataagatacccagagatgacag

SEQ ID NO: 269405 - DNA, 113 bp, Homo sapiens
aatcccgtgggggagggggttcaagttctgagagttgagggactgcagccaacatgcctgggttccaatcgagggtcacccacttcctaacctaacagtataaacaagttacc

SEQ ID NO: 269406 - DNA, 408 bp, Homo sapiens
ttttcacagattatcccttaatctgtgtctaataaaatctaattctgtattattgaagtaaaacacacactaaagtgcacaaatcttaagtgtacagcttgtagaacgctgttgaacatactgccatatgcttattggccaagctctgcttcacttaactctcagccattgtttggaatcagcagaaacctctagaggaaatgccactacaaatgccaagcttgcattctggtttccttcctttcacagatcttaattttatgcttttcctagactttttctcaggaggaacatttatctgaataacctaatctgcaattgctagaagtgaaaatctcttctatttaattcttgttttcagggaattagagataagaaatagttcatcgtcaggtgaaaaaaaaaaaa

SEQ ID NO: 269407 - DNA, 609 bp, Homo sapiens
tagaagtgattttcattcattcacccatccattcattcatgtgtttgttcaacacatttttattgagcgtccttgtggacgtggcacagttccgagtgcagtgaataaatgtctccccctccttgagcttatattctatttttatttttgatgtgtcatagttacttctgttaatcagttcagtagaagtgctgagatactctgtgacaaaacagatcccatcgacatcatttttacaaataagaccagatgtcctttagccttgtcaacaggcttgggccatggtgaacaatgtctgcctctgaagtgctcagcagaccgtgtgaaagaagaaggtccgggtgtttggaaacaatggctgagtggcggtagtggtgcattgtgacctcattattctgcttttggtttctcgccttgtaatatgaataaggcacatgaggatttagtgtgtgtcataagataagtgactgtcacgttaagcttaatgtctctgtttctgtaactttctccataatctggcagtatctcatttcttcgtggccagtgtttgggcactgaaaaggtcaatcaatacatagaattgtgactcaactcacgctgaaaaaaaaa

SEQ ID NO: 269408 - DNA, 3307 bp, Homo sapiens
  misc_feature (525)..(525): n is a, c, g, or t
  misc_feature (641)..(641): n is a, c, g, or t
  misc_feature (856)..(856): n is a, c, g, or t
  misc_feature (1292)..(1292): n is a, c, g, or t
  misc_feature (1296)..(1296): n is a, c, g, or t
  misc_feature (2323)..(2323): n is a, c, g, or t
  misc_feature (2714)..(2714): n is a, c, g, or t
tccagccttattcatatgctgctcctgtttgatcttggtctactctgggaatggggctgtcttctgagaatgaatatttgtggtcagtctctaagacctactactactggtttcctctgaactccttgtgcctgcctactgtatcaccagagcatctcaccagttctgtggactttctttgacagtagttttggagaaggtgaaattacagctttatagggactttttcccccttgtttgtttcctctatttcatttcttaaatgagcacttggaagatttggaaccatgctgctgccatgtttcccaatattgacttaatgacagagttttgatgactgtgagagcaaaatcaaaagagtaaaattttttttgccttataactattatgcctaaatgagtgatgtgaattctcaagatcatttcattattacaatttggtagtcttaagatgtagtttatctaggaaaaggaaaatatttctttagccactctaactcttggaagagtatgtgtgtaaactctntttttttttttttgagacagagtttcgctcttgttgcccaggctgcagtgcattggcatgatcttggctcactgcaacctccgcctcccgggttccaagtagctgggaattacagncgcccacgaccacgcccgactaatttttttttgtaatttttggtagagatggggtttcaccgtattggccaggctggtctcaaactcctgacctcaggtgatccaccagcctcggcctcccaaagtgctgggattacaggcgtgagccaccgcaccagcctgtataaactctttagttaattttataaacgtcgtagtcccatcttccatcatgnggctatttagaatataaattcaatataaatttgtatcattttgtttgttatcttctaggccaattttttctttctgcttcatctttataaaattttgttttcttcttttttttccacccgaaacagggtcttgctcttttgcccaggcatggtgcagttgaggctcactgcagcctcaacctcctgggctctcaacctcctggactcaagtgatcttaccacctcagcctcctgagtaacagggaccacaggaacacaccaccacactggccaatatttgtaatttttttccagagacagggtttctctatgttgcccaagctggtcttgaactgctgggctcaagtgatccactcgcctggcctgggtctcccaaagtgttgggattacaggcatgagccaccatgcccagtctatggttttggttttttttttntttnttttttttttttttcagacagtcttgctctgtcgcccagcctggagtgcagtggcacaatcttggctcactgcaacttccgcctcccgggttcaaacaattctcctgcttcagcctcctgagtagctaggattacaggtgcctgttacctggctaatttttgttgtatttttagtagaaatgttgtttcaccatgttggccagcctggtctcgaactcctgacctcgagtaatctgcccacatggacctcccaaagtgctggaattacaggcatgagccaccgcgcctcgcccaatttttcatttacatgtaaaaaagtccctctttcttccttaggtttgagttagtcatggaatcggatttgaaataaatctttgtggacgagagttttatgttttgttgttaagaaaaacaaaagtcatgcatgacatagatattcattcttttactcaacaaacacttagaaacttttttcttaacttcttatttgtaaaccttttttccttaagacttttatagcaaaatttgaatgtcattaatataagaagagatttatatggaggttatcattgaacattggaccacaggtagctaggctgtttggatttaaatgccccattagcacctatctatgataagtataacagcatcttagaagaattttatgtggtctacaagagcctctttatcttgaaaatgtcgaattttttagaatgcttgggtgtcagcttagagtttcattcagttttcacctacctcgaagtttcctttgaaatataaaccttctgggcttcaggcaacatgaaggcagagcagtaagctcataagtcagaactgtagcaaccctggaggttgctagcggttatggttttaatgttcacaagaacaggaagaaagccttgggccacccagaaatggggaactgtaatcgatccctgcataaagcagagaccctggaagggcagctccctcaaagaaaggagaactaggaaaatgttttcgccatctcccaaagatgataggaaanttctgagcagggttctgggtatagccccttgtgagaaattcaaggcccaatcaatgccatagatgagttatatattccaaatttacactacttatgtaggtgtagtaacctccaaatcaataaattaatataaaattggcccaggactggtgaaacctagagtcctgtcagaagcaaatacaaagcagccctttaacaacagttttaaatttagggccttcaagacccccagctgaaaagaaagtctctactgaaagtgagctcacaatttaacaggagagagagagaaagatacactgtgaaggatagtcaaaagacattgcaaagaggaggactggtactgtccccacccccactaagagcttaagatagaacagtctgaatgagactntgaaatatatttaaaatgatgaaagaaaaatgtcagctttcctctttccagtcaagacaggtgggatcccattgtttaatctagaaatacctgtgtgagatactagtattgatggtgagacgtcaatagtaaaatatcttggaggtaaaactaaacattcttcagtcatttaaataccagcacagcaggcctgtttgccagttcactaactaccttgttgccacagtagttgactgcctttttttcagcaaagggaataatgatttagagggtagacgagtgagtcacaatgtaacttggctcagacaagaagaataaagcaaggattactatgcagatggaattggctgttactatgatgacagtaatgtgttaaggggcttttccagcacaggatcctgaagaaacttaacccaaatctacatctgttcccttttcattgaaatctaacctcccattggccacagagcctcaagcctaatatttgaggacagtcagcatgcacgcaagaatgctttacctcataagtaggaaagagaatttgggtcacagaaaccagggcaaattttctgctcttaaaatgaaaagaaaaa

SEQ ID NO: 269409 - DNA, 379 bp, Homo sapiens
atacatctgtcattcagtaacatgggatccaataggtgactggttcaggatttgaggatattggtttccagccattaatttctttgtatcaggaaacaagatacaaagagacaagaccacaaatcaagtgtttaaaatttatcaatgtaagtcgttatactcggtattatgcagttttctcttattttttaaatctctgttactgtaggtgtctgtttctgtttatagacatagttttttgtttatttgaattttgtgtttatttcttaaaattttaacctgaagtttcagttcaaaaattttaattctttatataataaatgacatttttaaacagaaccatctttagagtaaatttaaattttttatgtttttggaa

SEQ ID NO: 269410 - DNA, 182 bp, Homo sapiens
agagcaatatttcatcattaaaagttgcaactgctatgagaagctacgttccttgaaaacagagtttttggccaggaatagttgcttatgcctgtagttccagctacttgggaggctgaggcaggaggatcccttaagcccaggaggtggaggccaacctgggcaacatagccaggcccggt

SEQ ID NO: 269411 - DNA, 689 bp, Homo sapiens
tgagatggaatctcactctgtcacccagcctggagtgcagtggcatgatctcagctcactgcaacctctgcctcccgggttcaagcaattctctgatctcagcttcctgagtagctcggattacaggcacgcaccaccacacccagaaaatttttgtatttttagtagagacagggtttcaccatgttggccaggctggtcctgaaatcccgacctcaggtgatccgcccaccttggcctcccaaagtgctgggattacaggtgtgagccactgtgcccggctcaggttaataattcttaaggtactcaattgactagattgatatttctttaatgtttacttcataaattagtgttatctaatacggcatttaaaatgtttacatttaagcatggggggtaatgagaatagcataatgaagggaaagcattcatggggatgtcagttctctgcacaaagacaccacatatagccctctactgtaatgcagggggagctaactctgggacctacaggatgcctgaaatctctgaaatagagcacattcttatatgcaggcatcttgctggaagagacagaaaggatataccactagagtgggactgaccagaaacccaattccaattctctttagctgtgtgatgtgtgaaatctttgcctgtttccttatctgaaaaatgtggataat

SEQ ID NO: 269412 - DNA, 231 bp, Homo sapiens
gtccttattgtctctgctaagttctatttggattctactgccagcagtttctcctctatttgggctttgtcttggaaggaagtgttgatttgttagtctcaagatctcataaagttcagaccactccaatatctccagaactttaaaaattagaacagaaatcaatgaaattgaaaacagaaaataaagagaaaaaaatcaacaaaatcaaaagatgattctttgaaaaga

SEQ ID NO: 269413 - DNA, 361 bp, Homo sapiens
ctccctgtatcacctggtgcacatgtggtgtatgctaaaggtggccagggagggtcatggaaaggagggaaggtgtcccaggggagagcctggacaaggggaagcagggcctgagtcttgagggtcaagtgtgaatcagctccgagaagagagggcaggggacagtcccagcacaggtcatgggaaagagctgaggagcatccgctgggcttggcacatgagctgagatattcctactgtgaacctaataggtatcattttagatcctgagttatttaaaagaaagtcgaagccccctcactttactacagtgcgacatatcagtgtagcaaaattacacttgtatgttgtgaatatacac

SEQ ID NO: 269414 - DNA, 399 bp, Homo sapiens
agattttttttgtttagggattatttcatgtcctccattatagtattttgattttattaatgtcttgcatatcttttttgttgttgttagatttattcctaggaatcttatggttgctattgtaaattcttttaattgacattttccagttgtttattgctgttgtatcggaatgttaatttttcatttattgatcatatatagagcaatcttggtgatttattgtcataaaattgtttatagtattcacataatttttttttaacatggagtttatggccgggcgcggtggctcacgcctgtaatcctagcactttgggaggccgaggcaggcggattgcctgagctcaggagtttagcctgggcagcacagtgaaacctcgtctctactaaaataca

SEQ ID NO: 269415 - DNA, 389 bp, Homo sapiens
ctgataggtgaggaattgctaaaatatttttttaaattgggaggtcatgtataataattaaaaaatatatatataaattgggaggtcattaggctggaatggctcctgggctttaagttcccactaagcaaaccaaatcccagcataaaacagtgaaatgaaactagcgcctttatcagtcagaaaccaccaacagaagttagtttgtggttgctgactggtaaagactctagtcgatattgaaatacgttttctttgccttccttctgcatttagcccataaacttgctgtccaagctgctgcagcagtcttctgaactgcttctggttctgagtgctgcccaactcatgagttgttctgtggacaaataaactctgttaaatttatt

SEQ ID NO: 269416 - DNA, 457 bp, Homo sapiens
aggctgacatttgaacaaaggtttggatattaccaggcagagagatggaggtggtaggaattccaggtaaagcgactgggaaaacacatgctgtgcttgggtggcaggagcagtccagggaggacatggtgggactgtgctgcaagaagccttgtatgccaaggagatgagacttcccttgtacatacagccaaggataagaatttgatgacgatttctaatgtatcttagcatctaagttcccttaatttgtgctcactggaaaccacagagttttagaaggcttttgtcattgtggtttaaaagaaaaaaatagattgttcaaagaacagtgatacatagggaaaatattttgactcaggaacgtaatttctcactaaaattggcaatatttgtagccccatgggaactatgtttccataggacattctgttcgctgtccttgggaagctatcta

SEQ ID NO: 269417 - DNA, 373 bp, Homo sapiens
atgcattgtcaaaaatgaatctagtgtatcaaaaccatactgtcacaaagagtattgcttacagttaagctaggtttaaaaatttctatcttaatttacaaatgatcattagatatggcaaaaatcattgtagatatttgaggatgggttggaaattgcaactcaattcacaatctcattctgcttcaccttatgccccacacctatctgaatttccagttgctgtaagaagatgtaccaatgtcactgtgatcatttttcaatatgaagactcaaagaagactagaagcctaatatatagaacatgtttcttcagatgctttcatcacattaaaaataccaagacattttataaaacttaatgacttttata

SEQ ID NO: 269418 - DNA, 431 bp, Homo sapiens
gcctactactactaaattcgcggccgcgtcgatctccattttcattctggccatgacagatcaagaggttatattctcccatcagaccttactactttcctgtagagttgaatattattctgattttatgccatgtctgtgaatgtctttgtgtgcacgctacctagttatgcatctcctctttcaaagcatgttaaaagataccaatagtaaatgattctgcttatatgaggctaactaaagtagtcaaattcatagaaagtagaatggtggtgaccagggactggggagagagggaaagaggaattgtttaatgagtagagcttgagatttgttacatacatacagttctactgaactgtacacttaaatatggttaagatggtaaacttttatgttgtattctttttagcacaattaaaaaaaaagaa

SEQ ID NO: 269419 - DNA, 314 bp, Homo sapiens
cagtttatttttctgaaatatctagtttatctctaggcttaacttttacataaaattttatataaaatcagaattgttaattgatggacatgtaagtgacttatcatcattgctttacttgtatgccagtgaatgattagaccactttcttcagtttttaaaaaattaacacttttcttctaaggagagctttcttaggcatttcaaagaactttcgaaaaagtgtgtgctggtattgttactatcagcacattggtgaacttatttaccaataaatcaagtcttactattccccacccaactaaaccacatgt

SEQ ID NO: 269420 - DNA, 444 bp, Homo sapiens
tggagagatttttatatattcaggatacgagtcctctgtcaaatgtgtcatttacacacatttctcccagtcagtggcgtctcttttcaccctcttaacagattctcctacaaagccacattttaaactgtgattaattccagttcatccattttgttttacgaattgtgcttttggtgttccaactccttttaaaatccaagatcagaagaggtacctggacaaattacctgataccccccgcttccccagtgactagtttcctcatatgtaacacagggaagataattatggcatctacttcataagttgcatcaaaagagtaaagagtaaagctatatacgcacttaaaacactgtctgacacccctagtgtttgctgttactatttttactaatgaaaataatatcttcatttgttcagactaccttatgaaagtcctct

SEQ ID NO: 269421 - DNA, 1227 bp, Homo sapiens
cactgaaattcagagtgagcttaccaaattgaacttccaacgtttagttaggtaaatatgtactttcttaccacattaatacttttatgtttttcccatctctgctgcttttattttgcaacttttaataatttaggtagatttgcaatgaactttttggtttgtttctgtaaaatagtagtggatttccttctcttttatattcctttgtgatatgtagtgcaacacagtcttactgcttaaggttttcatccttacctctttgagttcaaagagatatttaaaacttgccattatttggttacctttatttggttgtcatgttgttagtgtatggcagaactattagtttcctctttttctgcatcacatttcataagtggtcaaggcatttggacatattcacctcctattacctattaaaaatacttcttaaagattgcttccttcgaaaaactgcttgtcatggagaggctgaggacatttgtaatttaaacctgtattttccttttcccagttgatacctgcccccagagaacactttagttcttgtctataaggcttaccaaaagtttgcgggaaaggtggtcctgtgctgttaccactttgaccaagagaagaacctggagattgggatgtttttgcatgtcaggatttattaattcaataacagagagggatgatgcttctcacttattctgatgaatcagcaaagattgcaaagcataatattaatgcttatgtcttgaattggcacattaaaaatgacactagcattaaaataagccactgttttcaaatgaaaatgataatttgagtaaagagtattgaattggaagaaaacattcttccagaagatttttttcatcataaaactatctgatttaaacatttcatgttttctattcacaacaaggataaatgattaggaattttggatgtctcaaatatttaatactgaatattgttcatgtgttttcttctttgtaaaagtactttgtatctgcctgtttgctgtggaatacttttattttgtaacttcaatgtctttacataagtatttcccctttcctgctctatactaggatctgtggtgttcacagtactaaatacttgtatgtaacgttagtagttgaaggaaatgagaaaagattaggtggaagatagaacgtatatattttatagaacatctaaaaactttaatgttctgaattactttcttaaatg

SEQ ID NO: 269422 - DNA, 435 bp, Homo sapiens
cactgaaattcagagtgagcttaccaaattgaacttccaacgtttagttaggtaaatatgtactttcttaccacattaatacttttatgtttttcccatctctgctgcttttattttgcaacttttaataatttaggtagatttgcaatgaactttttggtttgtttctgtaaaatagtagtggatttccttctcttttatattcctttgtgatatgtagtgcaacacagtcttactgcttaaggttttcatccttacctctttgagttcaaagagatatttaaaacttgccattatttggttacctttatttggttgtcatgttgttagtgtatggcagaactattagtttcctctttttctgcatcacatttcataagtggtcaaggcatttggacatattcacctcctattacctattaaaaatacttctta

SEQ ID NO: 269423 - DNA, 2407 bp, Homo sapiens
  misc_feature (1213)..(1213): n is a, c, g, or t
tgatctgtacaacagtgaggaagcaacctaaaaagacccctttgcctaccccgttggatgaaagagaggcttggcgctgggatgtagactgctaggcgcatgagacctacgaagaactgaggctgcgtccacttacccagagtgtctttggagagtaccttttagtccttcctcggggcagttgccatatagtctgaaaatgaagccacctcaggcagtgggcttcgattggctacaattgtgcccttcttactttagcactttggcaaacattgagaaaattattattatggaaattttctttctgttttgagacaggatctcactctgttgaccaggctggagtgcagtggtgttgtcatagcccactgcaacctcgatctcctatgcttaagcaatcctcccacctcagcttcctgagtagctagggccacaagcacatgccataactccgtggatgccgaaagtagataacgagacctactggatcagaatgaggcagattagtacacatcgcacagcaaatagcaggaatatcagcatgaaagtgctggtgcccctgacctcaagtctcgtggggtgacatgatgggcccagatgatgtctatgcatgaattgggtttgcctacagctgaggaaccaaggaccaccaaggacttagcactttcctttctttttttctttcttttttgtttttttgagatggagtttcgagtttcactcttgttgcccaggctggaatacaatggtgcaatctcggcccactgcaacctcctccgcctcctgggttcaagcaattctcttgcctcagcctagcgagtagctgggattacaggcatgcaccaccatgcccggctaattttttatttttagtagagacggggtttctccatgtttgtcaggctggtctcgaactcctgacctcgggtgatctgcctgcctcggcctcccaaagtgctgggattacaggcgtgagccaccacaccgggcctgggcttagcactttttatagcaagtgatagacaggccaggcttcttctcctcaatgggggcatgtcatgctacagtctccttgaccaacttcatgtcgccagctacaagaagacagaccttgcagtttggcactctcagcaaggacatgcagggatgcttggggcctcggccaaaggcagcatgatatagatggagcatagtttaattaatcatcctgtcntgttatttagaagtttccactttgttcctgtaagaaagaatcctgtaacattcttgtggataaagttttgctcacatttccagtgattttcttaggctagattcctgtaagtggacttactgggttagggagtttaactttgtagtctcttgatatgtactgccaaatgggttttcagaaagtgtgaatcagtttacacctcataccagtatatgatgatacttgttaatttatccttcctgacattgaattactatttttttaaacttttttttgaatttttttttttgaggcagagtcttgctctgtcacccatgctggagtgcagtggtgcgatcttggctcactgcaacctccacctccctggttcaagcaattcccctgcctcagcctcccaagtagccatgcctggctaattttttttgtatttttagtagagaaggggtttcaccatgttggccggactggtcttaaactcctgacctcaggcagtctgcccgcctcagcctcccaaagtgctgagattcaggcatgagctactgcacccggctgaatatttttttaatcttttgggttgctgatataattaaaattttttcctgcctctctcagcattggcagaatgaactttgttctaagaacctcggctagtgtttacatgtattagaatgggaaaattatagcagcttctttcccaggtcgttttttattcatctattcaacagatacttattgaacacctataatgagctggacactctatgggccttgcaatttagacatgaatagagttctcaggtaccttacattctaattagaaggagaactttgacctctaaccaagacctgtttaattcataggagggtttcttttcttttttttaaactgcactcacggtcatccccccaaaggatgagggtttcttaagttatgttgaaaattcaaaccttgagtccgggcatggtggctcacgcctgtaatcccagcactttgggaggccaaggcaggtggatcacgaggtcaggagatcaaaaccatcctggctaacacagtgaaaccttgtctctactaaaagtatgaaaaaattagctgggtatggtggcgggcgtctgtagtcccatctactcaggaggctgaggcaggagaatggcgtgaacccaggaagcctgggcgacagagcgagactccatctc

SEQ ID NO: 269424 - DNA, 410 bp, Homo sapiens
tatggctttgtatttactggttcttagggtagtgtgacatcttgggacagtaattattttatagaaataataatcaagtgttcctttagccaaaaatagtattttagaaaaattgctttgtcatatcattgcatctagtcaacatattgtaaaaatgtttcccatataaaatgaaataaaaacctttttccagttgagttacatgttcctgttttttcttgtgactaaactataaaaatccacggcaatttgacattgaacatctcagcatggtagtaataaagtaataattttataatactggcaattctttatgatttaagaacagatttttatagaagaactatacccaccctgctgggtattagcccagtggtgatgctcattagcagcaggtaagggagaaaata

SEQ ID NO: 269425 - DNA, 348 bp, Homo sapiens
gtaaaagcaaccaaaacagagtccaagtcagggtccttccatcctcaaaccaggctccagtggtctgctctagctcaggcgtgattagatttgcattttagaaagaaactttggctaccacatggagaaataatgaggagaagcaaatgagaagaccgcccaaagcagcagttctggcaggagatgggcactgggtctcctagttggtggctgagtgcagatgctggcaggatgtcctgaaggtagaatggagtgcataattctgcaggtgtgatgtatcttcaaatattagaaaagcaggaacatgctgagagcgaaacagaaaaataaatcaaaaagaaatcaaaa

SEQ ID NO: 269426 - DNA, 295 bp, Homo sapiens
acgccccccaactttggcttcccaaagttttaggattacaggcgtgagccaccattgccagcctctaaaaacctttaaatagtaatactggcctagttgagaaagtcagtgttgaaacattaataacaaagcaatggaaaagattccactagatttctcagaataattttatcttagaaaatattgggccaggcatggtggctcacgcctgtaatcccagcactttgggaggccaaggcggccagatcacctgaagttgggagttcgagaccagactgaccaacatggagaaacc

SEQ ID NO: 269427 - DNA, 438 bp, Homo sapiens
cacagaggtgatatttaacgattagcagcagagcccgctgacagtgccaggctcctttagggattagaggattcggttggttaacaaaagaaggagcccaggagaacagtgctttaattaccagagttgttactggaagacaaccggttgcctcctggaaaaagatctgtagaaggtggctgctcctgaatatcgctgctggttctgcccagtgcccggcttctcacctcagatgttctgaacagttgtcagatccagcccttgaatcgttggggagggaaaggaaagaatgactcgcataggattccatgccaggaaatgttcctgactgcactcggcagcagcgttggagcactccagttagggcagctcttcaggggacagcgtcgcatgcagacttcctgggaccggctctcagggccacagctctttcctcat

SEQ ID NO: 269428 - DNA, 580 bp, Homo sapiens
gtgtctgtaaagtaccatcacccttttctataaagtagtgcatcatgtggaggacatttcgtatctgtaaagcaccatcacccttctccctaatctgtgcatgtgtgtatctgtagaagtgtgcgtgtgcgagaatccacccttcatgatttaattgaaatcacagagcagtgatcagcagcagcgaagatgaccctcacagctggggagcccatgcttgatgtggtcagcattgcctccctgcaggagggcccggctcagggagtccttctcagacccctctgtcttccctatggtctattaatctccccatgcaagggaagatgatggacatcaaatcgactgtaggctgtgctcctctgtgcgctctcacgagcactaacacctcccagcatgattctccaggactgcggctccaagaggaaagctggccccagaagcaggctgctgttcagggcctccttgcctggtccagtccttgcttaggtgaactccagctgaccaagataagcattcactgcatttggtttaagcagcctttcgtgtttattgtgttagtgggtgcttttctttctaaagc

SEQ ID NO: 269429 - DNA, 850 bp, Homo sapiens
tgggcgggggcgggggcgggggcgggggcggggggaggtgcacaactgtaggccgggttctcaagctcgcccttagcagagcagagctgagagccacctactagcggcaggtggagcctcgagacgggtgctgtcgtggtgatggaggcgcacgctcgcttcccacgcagtttggcctttttgacgtccctggctgttgtgggcaaccgatttggttggtcgcgctgcttcctacgctcgccggcggagcagctagtggcacctgctcggagagagggagtggatctctcggaagtgcttggggtttcgctgaagcggacctgaacagaccatgtgtcctttaaatacagccatgcttttagaaacggactgtcactttatgtggactcaaccattgaacagaatgtgtgcttttgtgagtgctgcaattccttcaagtgtaattgcgctactgcatttttgttggtcgcagggaaggggtgtgcctgcaaatgtccgcgtggttcgtcctcagcctcttcctttttacactgtgctaggatgtttacttgcttgtggtggaggtaggggaagccagtatttgtgtactgtgtactgtcctgaaccggctttcattcctaacttttcaaagattgctttaaaggggggggggcgcgggtcaaatattgttttaaagggggggacggggtgaggtcaatggtgtgtgccttgtaagtagaaatgaatgaaaggaattttactaatgtgtcactcaattgtttgagctccttctgttttgcatgccaaaaatataaggcaaggaaaaatgtatcattctatcatgattttatggtgctctaattaaaggtgt

SEQ ID NO: 269430 - DNA, 807 bp, Homo sapiens
aatatggtgaaaccccgtctctactaaaaatacaaaaattagccaggtgtggtggtgggtgtggtggtgggtgcctgtaatcccagctactcaggaggctgaggcaggagaatcacttgaaccttgggaagcagagtttgcagtaagccgaggtcgtgccgctgcattccagcctgggtgagaagagcaaaactctgtctcaaaaaaagaaaagaaatgaaatgaatccctgttccagttgaattccaaagagtcgtgtgacttgtccagcgtcacaggttgttaatggcagaacttcccttaggctgaggtcccctcactgcccagccctgcccaaggactaagaccccagccccggaaagaggccctcctgccacagcagctgtactcacagcacccacgtgcttggcactgcagaccgaggcgctcggtctcttcttcctcttctgcccagaacaattttacagaaaaacaaagcattgccttgggaatatttcagtgttatttgcccctgaggtttctaggaacactggacttgtaagtactataaagctcacatgcctgttacttctgtgcaaatggagccacctgaaagatggtcacaatggtggagttggggagacttgagctggaatggtggttccttccctgacctgcttgtgaactgtggtttccttgcctgcagtagagataatacgagacactagataataccagtcatgcctcagggtcatttcaagggctaaactagatattgcacagtgcctggcacaataaaaaaggtctcctcttttcctcctccttcta

SEQ ID NO: 269431 - DNA, 1215 bp, Homo sapiens
aatatggtgaaaccccgtctctactaaaaatacaaaaattagccaggtgtggtggtgggtgtggtggtgggtgcctgtaatcccagctactcaggaggctgaggcaggagaatcacttgaaccttgggaagcagagtttgcagtaagccgaggtcgtgccgctgcattccagcctgggtgagaagagcaaaactctgtctcaaaaaaagaaaagaaatgaaatgaatccctgttccagttgaattccaaagagtcgtgtgacttgtccagcgtcacaggttgttaatggcagaacttcccttaggctgaggtcccctcactgcccagccctgcccaaggactaagaccccagccccggaaagaggccctcctgccacagcagctgtactcacagcacccacgtgcttggcactgcagaccgaggcgctcggtctcttcttcctcttctgcccagaacaattttacagaaaaacaaagcattgccttgggaatatttcagtgttatttgcccctgaggtttctaggaacactggacttgtaagtactataaagctcacatgcctgttacttctgtgcaaatggagccacctgaaagatggtcacaatggtggagttggggagacttgagctggaatggtggttccttccctgacctgcttgtgaactgtggtttccttgcctgcagtagagataatacgagacactagataataccagtcatgcctcagggtcatttcaagggctaaactagatattgcacagtgcctggcacaataaaaaaggtctcctcttttcctcctccttctaacaattttcatttatttctgtataaatgagaaatagagaaatgggtgatagagagaaaagtagtcattcatgcgtttattttattatcagaaagtatgtgttgaagttgtactggttatacccagcaggtggccatgagcagcagggggaagaactgggggcgaattcgccctcctgaagcccaggctagtgtgggcagtgccgttccagcctctcttgatggcaagagaatcttctggtgcatttcactgggaagttcagctctttaggttctgctgggcctaagggctcagaagatgtcaggatgctctctctttctctctctttctgttttttttttcccttagttcgccttacctcaggcttattccctttttactacagacgggctttctccagactctggaa

SEQ ID NO: 269432 - DNA, 782 bp, Homo sapiens
ccgccaacatgacaaaaccccgtctctactaaaaacacaaaaattagcggggcatggtggtatgtacctgtaatcctagctactcgggaggctgagacaggagaatcacttgaacccaggaggcggaggttgcaatgagccgagatgatgccactgcactccagcctggaagacagagcgagactgtatcaaaaaaaaaaaaaaaaagaaaaagaaaagataaaagaaagtattgtctcattctggatgctggaagtccaaaattatattgtcggaaggaccatgctttcccaaaggctccaggaagaatctgttccattcctttctcttagcttctggtgtcaccagcaatcttggcatttttttaccttgtgcctgcgtaactccaatctccacctctcattgcatggcatttttcctgtgtgtctctttataaggacatcagtcatatgggactaagggcccaccttatttgagtatgacctcatcttaagacattatatctgcagtgaccctatttccaaataagatcacattctgaagtgttagagagttaggacttactatttttgggaggacacaattcaacctttgacacttagcttaagacgtttgagattaatccatgtttttgcatgtgtcagtttattccctttttattgctgtgtagtattccactgtttggatgtattgctctttgtttatccacgtatcagctgaaagacatgtaggttgttttcagtattaggcaattatgaataaagccactataaacattaaaa

SEQ ID NO: 269433 - DNA, 403 bp, Homo sapiens
aacctcaaactcttgaaaagcagtaggtcagtaggtgaaaagtttattacgttatagttgaaaattattctccagggtacagttgtatttttcagaaacttgtcgcttcagtaacaaggagcacattcattggaagaggcacattaggcaagaggcaatgtaataaaagctggaggtcagccagacccaggactaaatcttggctcagccacttgctttctttaaaatgtggagcaaaatacttaacttttctgggctgcagtttgcttatcggtataatgggatacctgtactgtaggatttttatatgaggattcgtgacagtgtaaaaggacctcactgaatgtttggctgctttaacagagatcaaaggaacagtggttttttcaaggaaaaaaaaaaa

SEQ ID NO: 269434 - DNA, 643 bp, Homo sapiens
ggcagcctggctccaacatcccagggaattgtgtcactcccattgagcagctgtggggccctctcccacatggcccaggtccaccactctgtcaaaggtcgcacagcccagacaaaaacaggacacagcagtgtgtgaatgagccgggctttctccttccctccacgtaatagaaggtgcctgaggttgttgaaacacagtccatttctcctgggaatgacaagaatttgagggatgctgactttcaaggaatactgcatgacaggcatcaagataaacctgatgaagaaaacataggccagaatctgggaatcgggagcaaagtaatacagcttcggggacaggcacgtaatgaggtcatgatgtaggagactccctgcaggactggcggcccctgttccctgggttgttctggctctttcagaacctgaccctggaacaggactgagcaggtgcctgtgtgcacagaagaccttgtgtgagtcctttggtaccacgtttgctgcacgaatgtctgagacacctcacagtcgcttggttcagcctctccctcctctctccgctggggaacatcatccctcatcactggaagaaattacaaggattgtgtaaacaattacaagtattctacaaacagtgagca

SEQ ID NO: 269435 - DNA, 431 bp, Homo sapiens
gagaaatgcatcattaggtgatttcgtggttgtgcaagcatcatagagtacatacacaaacctcgatggcacggcctactgcgtaactatgctgtagagtacagcctgttgcttctgggctacaaacctggacagcatgtgactatactgaatactggaggcaactgtgacacaataataatcatttgtgtatctaaacatagaaaagatatggtaaaaataccatattataatcttatggattaatgtatatatgaggtctgtcattgaccaaaatgtcgtgatgtggcacacgattgtattaaaaagacagacagaggctggtactttggatcctagaaaatactcattactctagcactaaattatttctagagttctgtgcaggttcaaattgtacaaaaatgtgcaataaaatatttatgctaaaa

SEQ ID NO: 269436 - DNA, 328 bp, Homo sapiens
tagtggaagacaaccttttaggcttcctcaaaagcctggagttggggtatcttgctggtaattgaaattcctatgtaaaatgttggaataaagaataaagttaatttgggtgtgttctattttttccacataaacttgcaagttagacccacagtttttgcttatgtatcaatgttataatatgctactttaacactagtgctagtttattaatcctatgagttcaactgtgtaattttcatttttttgctgtgttttgtaggattttatgtagtttaatgttttcctccatatctgaaataaaatttaaaaaagtgtgcttgatagt

SEQ ID NO: 269437 - DNA, 437 bp, Homo sapiens
gtacttgatatagtggtatgtaaatcctctatattgttatcgattttattgtctacttgttctgtcagttactgagcaaaagattttacaattcccaactctgtgggtttgtctctttcttcctttagtactgtcaatttttgcttcacacattttgaagctttgttgttaaatctctacatttggattgctgtcttcttgatgagttgatcctccttattgctagtatttctctttatcttgaagtctattttgtcttatactaatataggcatacaagctttcttgtgattagagtttgatggtgtatcttcccattttacttttagcccatctttatatttaaaatgtgcttcttgtaaagagcatgtagttggaacatgcatttttatcttgtcttgttaccatttttttattggaatggttgaactattatt

SEQ ID NO: 269438 - DNA, 418 bp, Homo sapiens
tttaaattttcaagcctaaagctaattcccatattgcgatttttgcccaaattattaaatatctctggacacggagtttcatgcttccttctggaacaagaataaacaaccaagtgactcgatggccacagttctgagactttctgaaagctgtctatgaacaaacagccactggtttgtgatagatgataaatatgatcatgagaaaggtgtcatttaaaagtgttcaccttttaaaaattatatcagcaatacttacaggggatctttaaaaaaaactcccttgaaaatccttaaacaaacatctttttaaaaaattgccttccttcccctctattacccctctacctcctttccttcgtttctcccttccttccttccttgaaagattatttcttacaaatcttgcccccctccc

SEQ ID NO: 269439 - DNA, 447 bp, Homo sapiens
actcacccattatttccagttccgttgattctgctctacttcgtctctttccccatagcacttaatattgtctaatctattatgtaatttacttatgtctattttgtactgtcctccccacacaactagagtatcagccccctgaggacaagaacctttgttttgttcaccattgcaagctaatcccctttaacagtggctgacatagggtatgtatacatagtgtttgtggaatgaatgaagccctggtgcctagaacagggtgtgggatataaaacatgctaatgcatatttagtgagtggatgtaatggtaattcctgaggatttgacttagtccgggggagcttccctgtggagaggggcttggaagtggaccttaaaggctgaatcagacttagaaaaagagtgaggagagagagagagaaacagagagagagagagaaaaa

SEQ ID NO: 269440 - DNA, 457 bp, Homo sapiens
tcccagatctggagtcctcactttctcagcaagggcacctgcatcctgagcttttacatgtacacacacccagcgattgtgtgtgccgagaaagacccacatacgcacattgttttttcctcttccacgattatctgccagaattctactcagttaattgcggtttgagaacacaccatccacaggagagcaccaatggatctagtctagtgaggttacatttacttgtaatcctcccccttccctttcccatttctttgatgatttttcccataagtgtgtaagctactgggacttagtagaagcaggccgctcctcctaaatgtgatttggaccatatgctttctacattcattcccgcttcggcttttcttctctgcactaactgctaacacgttatagtcaccttgaaatttcctctgctattttccaattaaaagcttaatagccctgaaaa

SEQ ID NO: 269441 - DNA, 343 bp, Homo sapiens
tatacttgagtaataataattgctaacattattatataataccttacccataataagtagttttatatctattatcttaattttcacaacaacttagaagttagatactattattctgttttcagcctaagaaactgttagtaatttagccacagttgccacagctattaggtgctaggaccaggactagaatccatatctgaaccaaatgcccattaggttatattgccttccctgggtgatagtatagtagctacaatttaataagcatttacaacttcatgatgtaggtaccattattaccccatgttgtagatgagaaagctggctggaggagtaagta

SEQ ID NO: 269442 - DNA, 620 bp, Homo sapiens
  misc_feature (600)..(600): n is a, c, g, or t
caaatgtttttttctacatgtaaatgcagtgaaaataatgtataaaatgtgatatactgataacttgacaatattatcaaagaactactttttaaaaaaagaaaaactctgggtttgatacatttgctggtaaattcttcagaactttttttgaggaataaacaatttctgtatactacaaaatgttctcagttattaaaaagtaagcaggccaaagaggaatacaaagaaacaaaggtaacacttaaaaaaaaaaaaaaaaaagctatcattcagtttcactttttgaatatagttgtgttccttaaaatattaactggtagaatttatcagaatattggaggaataataagatttaaattaggctaagtctactggactaaaaccttgatagagatatatatcctctatccagaagtcataaatagttcagtattaagaaatatattaattcatcagatgtaataatagctaacatttattgactgcttactttgggttaggtaggcactgttataagcggttttatatttttatttagttatccatgctgtagacagttgtgccatggtcacacaatcacttgatgccagaactggngtaagcacgcgcttctgctt

SEQ ID NO: 269443 - DNA, 527 bp, Homo sapiens
ctagttccataggatatgaactgatgtcaggagaaaaattaaattagaaatttgcttcagtgccagattctcaaagccattcgtatgtgaatgtttagtgcaactctccaaaagagatgatttgatgtgttacatgtggcagtagtatgatgtgcagcccagatcccccttcaaagaacggcttgctccccacttgctgggtgtgatgttagcaggcagcctgcagctgtcagcccttttcaggaattggcatagctgtagaaaaccacttcacctaaggtcacacttttttgtggagtggcccatagccaaggattgatcagtgtggagatacaaagttgttctcttgcccatctgaggacatctccgagggccgttttaactccagagctccctgtggggttggccaaggctgtcgttggacctacattataactcattttctcccaattccgcttctctctctctttgaacaaatgtttggcaaaaggcacttcttaataaatatcctgcaattaaagtatatc

SEQ ID NO: 269444 - DNA, 221 bp, Homo sapiens
acatagcaggactccttattcgtgttgcccagcgcatgcgggggatcatagtccgactgccgcgacagaaaggctgggagtggatctgagactacagttccaacactacggggaaaatttcatcttctctgagactacagttccaacactgaggggataatttcatcttctcctccgcccctccatgtttccagtgcaacacgaataagggtaccgagctc

SEQ ID NO: 269445 - DNA, 546 bp, Homo sapiens
acatagcaggactccttattcgtgttgcccagcgcatgcgggggatcatagtccgactgccgcgacagaaaggctgggagtggatctgagactacagttccaacactacggggaaaatttcatcttctctgagactacagttccaacactgaggggataatttcatcttctcctccgcccctccatgtttccagtgcaattccgccctgctgaggggagcctatctgttcccaaacttctgcgtgcgaggagacagcgtggccagggcaggtggtctcacttgtaattgtgacacagtctccccacgtgccagttgtacgactatttgtgcctgaagtttgatttctctctgacaagacagagcccgggagcctccaacagcctgcccagcgttgccgtaacgcttgctctcggggagctgggcgcgcccagacctttgcagggcccctccctcagccccgacccttctcctcgcccctcccctgccacgcccctttcgacatgctggaaagtcatctacctttaataacagtcatctttgcaaaa

SEQ ID NO: 269446 - DNA, 300 bp, Homo sapiens
gcatatttcactatatttttctatttttctataactgggttttaaatatttttggtagaaaaataattatactttcattgctaaaaataaatatgcataacctacccctctatattgcttataacattttgatgatgtagccagtgaatatgtgctaatttaaataacttttatataaaattaagccaactgccgtattataactggtttctttttaacttaataggatattgttttataatattaaatcatatgtttaagctcattctctttaaaaataaacaataagcaatttctata

SEQ ID NO: 269447 - DNA, 460 bp, Homo sapiens
gaaccgcagacagatcaaaccctggtgagaggaacactttatttcccaactcatcatcctaagccaaggttggagggatgagcattccctaaacaccaaggcgagatcacctggtcccagtgcctcttttcacacaggccctagatttctatctctctgcagtttatgcatcggtaaaaaaaaaaaaatctctcccagtgtgccccgttagttttcagcattttgtaagcaaaatgaacttaacacatagtaattctaattgaaggtatgtacataaaaagcatgatagaatggcaatattgtatcaatggatgtacatttgtaatatttgtaaaaaaaaatccaaaaccttaaaatatgaatttacatgttaatttgcctctaagttctataaattgcacttcagtgatatctaataagtgaatgtttctgttaagtaaataaaaatattcagtaaaat

SEQ ID NO: 269448 - DNA, 294 bp, Homo sapiens
tacagtattgtctaagactactggctgggtaaagcctgcttctgctgcgtatatggcatggtgtagctgcgtatttaaatggagcctagagctgagtgtgctttcatttttaagccctgctgatggtttcatgagggattgttagtttgtaccctttagagggtgggcatagacaccctctatgctgagggtgagatttagcatcatttgtcatctgacttttgtcccttctctgtgtgccaacttgacaaattctaacaatatggctcccgtaacagtatctttaaaggtgcc

SEQ ID NO: 269449 - DNA, 245 bp, Homo sapiens
ctgtctccttcacgtcaccctctcacaatggacattgaagctttccttcagctccttctctgtgcagtctgtgtctccagttccatgtttccagccccagttggctttgtccccctgagtgccccaggctcacagcatgtctaacaacaaaccatccctcaaggccgctttcctttcccaacagcctctctgtgctcatcacagaggagagggagatcagacctcagagtctctttggccttctc

SEQ ID NO: 269450 - DNA, 358 bp, Homo sapiens
ggatcgacctataatacagagaagtataattcaacacagaaattctgatttctaggctattactggaatacactatttcaaggctattaatgactacatttatgttatttttcctaaaatatcaggaccttttaatctaatgactcagctcttctgtgtctctgtttttcttgcactttgtcttattgctttgccatttaaaaatccagccatgaaaggaattttggaaattgtgttcttttccatgtatgtaattgctccttaaaactgaaaagatcaattaggaaattattggctccttcgtacttcttttaccacctctatttattaattgattgaattgggttcgccaggttta

SEQ ID NO: 269451 - DNA, 1255 bp, Homo sapiens
cacgtcagcctcccacgtaactgggactacagagacccatgccaccatgcccagctagtttttttgtatttttgttagagacagggtttctaacatgttgcccaggcttgtctcgaactcctgtgctcaagtgaggcacctcatccagcctctgaattatttgaccaatatatcatagttactctctgtactccagaattgtcaggttacaaggaatgcatttgttttgttcctttttggattataaaattattttgtctcagttgtaattttattttatcaattaatgctatgacattattacagtgatctgaaatacctaattttgaggtgggtttctttttttaatttttatcatgtttttcagatttctttgttcctttcccactcccactacttcatttgactagccttaaaagaaataaattatttaattaaaaatgtttttacatccagtagaaaaatgtagtctgaaaataggatttttttttttctgatttgaaaatttaagaaactcttacttttgtaaaatgttacataacttgagccaaattctttcgtggcccactttactctctgtgactgggaaacaatggaaagttgcattttctgttttgatgtacagtttgttcgtgatcaaaacaaatccgtactcttaaggaacaccatagatttgagggagtttaattctagaactagctaattttcattttatatagttgcttaatgtcaactgagtcttttaaggttatataggcaccatatcaacagaggacagcaacaacaataagatgatcaagacatttaaaaaagaataaagcactacatatttgattgtatacttttactgaaatgttgtaagtaattgcttcatatctttatttaactttccttatgtgtatgctctttaaatttttttaaatgtttaaagttatccatgcaggatgaacagagaagccttcaagtagtaatgaggacttcttagataagcaaataattaaaatagaattttctgcatttagaacagtttttggtcttaacatactgaaataatataaaattcacctaatgagccaggtgcggtggctcacacctgtaatcccagcactttgtgaggccgaggtgggcagatcacctgaggtcaggagttacagaccaacctggccaacatggtgaagccccgtctctactaaaagtacaaaaattagcctggcatgggggcgcatgcctgtaatcccagctacttgggaggcag

SEQ ID NO: 269452 - DNA, 425 bp, Homo sapiens
gtggccccaaggctaggcttgtccagtggtggccagggtctgatgtgtgctgggtttcctgggtcttgagcctgcctgctttgaagtgggtgtggtgcagctcccatgtgaagggactctgtagcgggcctccttgttctgggcagcccatgaccctccctgggcaggcacgggcatgctcccctaggactcaggtgacagcagccccaggaacttcctgcttctattgccaatgctctgctttacacattcattcatttattattatttcttttcgtgacagagtgccaccctgtctcaaaaaaaaaaaaaaaaaagccatttaaattatttattctttatatgtaaaagattatatgtaacaacatagaaaattatgcacttcagcctgggtgacagagtgccaccctgtctcaaaaaaaaaa

SEQ ID NO: 269453 - DNA, 447 bp, Homo sapiens
gactagaataagactcaaagagtctgtgggtccaatttgccacaactctcaaagggacaaagtaacattttctggttatcaggcctctaatgtggattggccaacttgaatcaacctgatgaaactttcaattgtgaagccataaaatagacactaacaacagaattgtctttcctattctttgtcaatttggttcaagccaaatgacatttcaaaaggaaaaacagactgcctagtaataactaatcacctttactttcttggttgacatttgcaaggaaaataaattagtaacaaccataaaatgtgtttctaattaaatgaagaacaaaaacatgtgtctattttatctcgttttgggctttaaaaatcctttccatgctaaatgtgcagataaatgtactcagagttacagaacatctatccagttgtgaatttcctagacct

SEQ ID NO: 269454 - DNA, 421 bp, Homo sapiens
ctcctcaaaacatatttagaagctactgacctgtagatttttaggaattttattagggaaggcatttcttttctttaataagccccaaccaatactgatctgggtttctgagggctgtcaatttcttatttttgtttttgctactgatgatgatgaaagatgtatgagggtacagaaaatgcaatttttggaaagctgcatagtataagatttcatattgcttctttcttttcagagctaaagatattctaacaagagatacctggaaattatcaaaaaatagtattaaaaccaggttaaagtcgttatcagaattatagatttggctaggaagtattcttttcatgtgacaatttggtctatataatttgtgttcttttcagtactcgtactgcataattatgtataaagtaaaaaaaaa

SEQ ID NO: 269455 - DNA, 472 bp, Homo sapiens
cataattatgcaattgtgtacatataatcgcatacttctcctcacctttgtcatagtctgttggttaagaacaagtcacaggttctatctacactgaaagcgagaggggcacacaaggtgtaaacaccaggaggtggggaccaaccatggggggttcacttaaaagggtgtctgccagctggttgcagtggctcacatctgtaatcccagcattttgggaggcctatgcagtaagatcacttgagtctaggatttccaggccagctaggaagcatggtaaaatcccctttctgacaaaaaaaaagaaaagaaaaaatacaaaaattagtttggcatgtgcctgtagtcccagctactaaggaggctgaggctaggtgggaagatcacctgagcctgggaagtcgaggctgccatgagccatgatggcaccactgcactccagcctgggcaacagagcaagaacctgtctcaa

SEQ ID NO: 269456 - DNA, 519 bp, Homo sapiens
ccttttcataaggccaaaaagaaaatataagttattggtcatgacacatttgagttggacctcggattagataaaaagatgaaaatactccagctctgtcctcatggaactcagagacaagcaggaaagaaaatgtgacccaaataactacagtacaaataacccatgttatgacaagattcagagtgctcaaggaacacttcccattcccttaaaaaaaaaaattaagggactatccagtaactaagctggcaactccaagtgccctggaccccagtcaccaatccatcctctcagtctgtcagctttccatcctaaatctctaaaattcatccatatcttcctatcttcactgacactatccaacttaattaagtcattcaacaaatacttgagtacctactatactagatgtcagaaatcagtggtgaacaagacagacacctcatgaagctcacattctagttggaggaaaaaaccttaacaaggaagcaaaagaaataaaatactaagaaacta

SEQ ID NO: 269457 - DNA, 551 bp, Homo sapiens
accacccagaggaaccgcattgctgagcacggagcctcggccccatgacagcctggaggatgtgtgactgccattcaccccaccaggggccggccctgaagctcggagagaagcacatccgctgccaaggggaagggcaaacagccccagcctctgcgcagcccacgcctctggggcaggcgggtgggcctggctgcgctgcacagaccaccacaaagtcccactggggtccacgaagccactgcccacgaacgcccctcccagcccctggaatctcccctgaccagccgagctgaatctggccctcacgcagggccacggaggcctctgtcgggcagctcaggccacctggccctacctaaagccgatgcattattctaagacgattatttatccgtgcaatgctccggggacagcagcgttcccatttcagagcccgcatcctgtatttcctcgccgcctccatcgccccgggcaggcgctgaatgactcgcgatgccactgtcatttttataaagccttgttccgggtaaaaagcctctttgtttcag

SEQ ID NO: 269458 - DNA, 732 bp, Homo sapiens
gagctgtcctgggctgggtgccttgctctttgactgagactggagacagacggcaacagccacaggcagactgaggtggcaataggaaatctgccgagatgttcagtcaggtgcccaggaccccagcctcaggctgctactacctaaattccatgacacctgagggccaggagatgtacttgcgatttgatcagactacaagacgctctccttacaggatgagccggattctagcacgccatcagctagtgactaaaattcaacaagataggaaagtctactgacctccttccctgaaaatttggatcctcatattagcattccattccacttgctgtacttttagttggaaggtctaaggcagacaaagctgcttaaatatttttatcactgacttcctagaagaaggaggaaaaaatcttggcaagaagaagggaaatcagtcttgcagaatatcttgaagaagcctgcgaaggaattccactgactgtgttcattatctattggtcccaatactgagtggaatttttatgtgttatcactggccagggtggccaatccattggagttgcctggagcagcacatgacatggtagcacggggtgtacaaagatgggtatttaccttgtgcctttttctgtgccaatcttccaggagttactctgttggcagaatgttgaaacttctgttgttcttaggagcaaataattgaaacatgttggttgaatttca

SEQ ID NO: 269459 - DNA, 611 bp, Homo sapiens
gagctgtcctgggctgggtgccttgctctttgactgagactggagacagacggcaacagccacaggcagactgaggtggcaataggaaatctgccgagatgttcagtcaggtgcccaggaccccagcctcaggctgctactacctaaattccatgacacctgagggccaggagatgtacttgcgatttgatcagactacaagacgctctccttacaggatgagccggattctagcacgccatcagctagtgactaaaattcaacaaggtgagtggccggcagtggaaggctgttgctcattctgatttctgttggctctatttcatgctaacccagttttttttgtttgtttgtttccactttataacatatggatttctatgccacactacccgtaactttgaaaaataactttaggctgcagttttcagcaaacaggacagtccttagctgccacatagctcaacataaagtgcacaaaaaacttcacggtgggacagtgaatcataaattcccaaactgacgtgtgtctacagaacagatgagaactgttactcagtgtgtatcttaggagcttttctgcagtttcctcacactccgtcacatttaaa

SEQ ID NO: 269460 - DNA, 598 bp, Homo sapiens
gagctgtcctgggctgggtgccttgctctttgactgagactggagacagacggcaacagccacaggcagactgaggtggcaataggaaatctgccgagatgttcagtcaggtgcccaggaccccagcctcaggctgctactacctaaattccatgacacctgagggccaggagatgtacttgcgatttgatcagactacaagacgctctccttacaggatgagccggattctagcacgccatcagctagtgactaaaattcaacaagttgcttgactgactccatcttgaagaatctcttgggatttagtggtaggcagtggctccacaacttcaaaaagctggggatgtatgcatgcagcctccctgagaaataccacaagcgcctgattggaacaatctgtatcaaatgaaagaggagaataaagaactactctgcttcatggaaaacttgagtcaaaacaatctggtcagaaactatttggctgggagagcatctattttctgctttctttttctctcagattgactggggtttggggattgtaaacatttttttctttttaaatactattgggaatacaggcatggaaaatata

SEQ ID NO: 269461 - DNA, 617 bp, Homo sapiens
gagtagaaatcaataagatagaaaacaatagagaaaatcaataaaacaaaaaggttgaatttttgggaagatcaataaaattaataaacctctagtcaaacaaggaaaaaaggaacactcaaattaccaatatcaaggtaagatcagacatcatttcaatattgaatcaaaaaaacgagtgagaatacatcactccaaattttaaggatattaaaggatagtaggcaaacattatgaagactttctgctgataaattctacaacttcagtgaaatgggcaaattccttaaaagacacaaattgccaaatctcaaaatgatgagttaaataacttggacaaaaagtacatgctgtatgtccagtaacatacatttctggaagcacaaactaatgaatagtaacaaaaagtagataagtggttacctggggtcagtgtggaatggggagtgtgagattacaaagtggataaggacatatttgggaataatatatgtgctcattatcctgattgtggtggtgttttcacatgttagacatatgtcaaaatttaaattgtatactttgaatatgtgcagtttgttttatggaattatatctcaataaagctcttagaaata

SEQ ID NO: 269462 - DNA, 598 bp, Homo sapiens
aattcgcggccgcgtcgactcggaagacgacagaaggggtattacatagttgcttgggtcagtgtggaggacaagaagatatagacttcactttctgcgagcttacagcctagtgggcaggaggtcagtaaacctcaccttctaatggaaaccacctgccctttctcagctttttctatctctcatcatctattacaccattagcagctaggagccttacagactgaccttttcacaaagaacttgtgttttattataaaatcctagacgtggaaacatacagacttgacgactatcaaaaatatagatttaatgactccaggtcactcctccaaggacactagcctcaaaaaatcattcaaaatcaacattcctgagttattaaaaaccaacttgaattcctgtataaaaagttatgcttaggccaggcaggtggctcacacctgtaatatcagcacttggggaggctgaggcgggcagaccacttgagctcaggagtttgagatcagcctggtcaacatgggaaaccccatctctactaaaaatacattaacggacatggtggcacatgctctttccagccactcaggagctgggc

SEQ ID NO: 269463 - DNA, 469 bp, Homo sapiens
cagcgttgctcatgctcgcctgttctcagtgtatctgggaaactgacaattttcaatcgtgattctgtattctgggctctctagcacatggctgaaccatcagcaaaactctggccacaggctgtgtctgcatcactaaactcaacaccatccatcagcaagaggcggagcaaattaaaacaccagtaacaccctgtccccttctgaccccccctctcctgatggccttgcttatgccacaggaacagcatgcacatggcctgtacatgccctcagcttggctctcctcacagcaagctggtcttgcaggatcgtgagcagtaactccctctcctgtacatgtgtccacagttctctgccattagaacttaagctcctgaggggcacaggcctgttttttcatttttgtatcttggacacagcagacacaacaaatgtttgtctagagaataaagttcttatttacata

SEQ ID NO: 269464 - DNA, 560 bp, Homo sapiens
gaaatatatcagaagtttgtagtagattagagagtaccaactgggagtctgaaaagctgtccaaagtggcaaaacaggtacttagactctcaatcctaaggctgtatagagctataaacgtggcaagacctttggagtcagacagacccaaactcaaatgttggatccatgtatatggaaagcacctgacaacaagcctagcatatgtacttggtaaaaatgattgccaagtgtagtgttaatgagtttttggatattgagtaagttatttaaatttcaatttcatctttaaaatgaaataattggaaaggataatttgagtgagggtatgaaattatgtgttcataagagagggtatgtggccgagtgactagaggcgagtttataactattctatctaataaaactttgtaatctggtaatttgtgtgctaaaaataactttacctgttgtatagtactctttttttatgccttaaactaaagtgttcaaaatatcatggaaaaatgatctgtgttgcttacagatttggtgacttttaactttcctataatgttgtc

SEQ ID NO: 269465 - DNA, 378 bp, Homo sapiens
tgcatgagactccttttctgggagtttcaactgggtcataaagattaagaaggaagcagttggctgagatcattgagcagaagatgcggggaagttgagaaaaagtcagggacagagactggaaaaagtgactgaagcccacagtgccagcttggagggcttgggtttttatcttgtgggcaatgacatccattagaggtgtgtgtcaagaaactagaaagagagtggcttctgggaaataagaagaagcatgtggaaagtactttcaatctacttggtgctcttgcttcattgctgcttgaaccctatagtgtgttgagtagtgtccccccagaattcatgtctagcctgggcaacatagtaagaccctgtctttac

SEQ ID NO: 269466 - DNA, 368 bp, Homo sapiens
agaatggagccaacttggaaaacatacttcagaatatcattcatgagaatatccccaacctatccagacagaccaacattccaattcaggaaatccagagaatctcagtaagataagccacgagaagatcatccccaagacatataatcatcagattctccaaggtcaaaatgaaagaaacaatgttaaaggcagctagggagaaaggcaatgtcacctgcaaagggaattccatcagacttagcagaattctcagctgaaaccctacaagccagaaaagatattcaacttcttaaagaaaagaaatttcacgtagtatggcagagacagatataccatataataacatggtgttattataaatggtt

SEQ ID NO: 269467 - DNA, 511 bp, Homo sapiens
cctcaacctctgacaaatctattgatatttagtaccagcttttagctgtctttatggtcgaaaccaacaggacaattggctgagagctgggagccctcctccctccagagaatcctgatctccccaaatttggttgagatccaaagtgtattttgctgtacaactccttttctagagttttacttgcttccaacaaggaaagcaagttttcctgcttccatgacaatagaaggcaggtaactcctttctggagttagagctcacttccaacagagaaggcgaatttgagttttcctgcttctagaatggtagagagcagtcttcagcctgagacccattcctaggtaagtgactgaattggggtttcatcttggttaaagttatgatgcagctggtcgtagtttctccttactgttatagcgctcagtaatcatattgttgggtttttgttgttgtttgttctggtctttctcccatcagatttgaccaattctgcctgacttagtcaaat

SEQ ID NO: 269468 - DNA, 350 bp, Homo sapiens
cggttatccacatggctcatccgtcatctcctctatgtgtctgctcaaagatgtcttagtgagaccttcctgatcatcatattcagaattacagtccccacctcctactgggaactcctcaccaccccacccacttcttctatttgttttctccatggacttagtaacattcaccatgttattatttgtatattatttactgtgtctccccacgtagaatgtaagctccctaaggacagggattttgatctgttcagtttattaaggtatcaaccaggtgctagaatagggcctgatagatggtaagttttcaatgaatacttaaagaagccaggcaggaaatgataatc

SEQ ID NO: 269469 - DNA, 331 bp, Homo sapiens
ccagccagagcctccttaccttcccaccttatttccggccacttcccagcacccattcttactccaggtgggtctaaatcctctctgctcctcacgaggctcttccacgcttatcctggctcagaacatctctcatccccctgactgggcctccaccctccacggggaaccaaatcatgggaaagctggattccacaagccgccctgcaagcccactgaccgcagaaggttgccttctacaacagcttagctcaaaaccttcttttcgctaaataaagttgtattttacttccatgcaaaataaacaaaaactcagtttcctgccttcaat

SEQ ID NO: 269470 - DNA, 367 bp, Homo sapiens
gcacaaacaggccatagtttagttgaaggagaaactgcgaactcaaaggagcactgcttctctgcaggaaagatcccgtcagtggacctgcggggcacagctgccaccagtgtcatgtagctattcagtgtcggaaaactagaaatcacaagtgaagagaaattgtaaattacctcaaattctatgcccagaagcaaccactatggaaatccttctagacattgtcccgtataaatatatttccctaaaaaaaattataccccatactctgccacttcaaaaaaatcaagactgtttttccatgtcaataaatatctatatcatttaatgaatacataatactcccttgtttgaatgtacaatattc

SEQ ID NO: 269471 - DNA, 674 bp, Homo sapiens
tttagtagaatgactcatgtagaaaattattcaagttatgctgttatagtaaaaaaaaaagcaaatctcaaaaccatctgtatagtatgcttttactatagtttgcttatacatagaacaattatgaaaagatagtcaagataattttgtaataggtacctccagggaatggagtagaaaatatgggttgatttgcacttcaaatcttatatccttttgtatttcaatacttttataaatacatttactattaaaataaattttaaaatattttctccaagttatgattgaccagagattggcagtctctttagatctcagccagggatgggacatgcttacaggaaatgctcttaatctttgcagaaatgcttatagaaaatgctgttagtccttgaaaaactaaaatagatgcaaaggagaagaaaaagagtctgagtggaagatgaatggactgagaaaagaggccagggaggaataaaaggaaaagtaagggaagtctataggtgaggaagagaaggtgctatggacaatagtggttagattgtgactgggtctgctttactaccacagtgtccctgggttattatacaaggcatgtcaccaagggttccatttgggtgaagggcctataaggaaaaatcatatatagttatggcctcagtatcactcct

SEQ ID NO: 269472 - DNA, 339 bp, Homo sapiens
ggtccagtgaaatgtcacaatcctccttgtgggcaggactctggtgaagagtcacatcacttgggtgctggttttagtgatatatctaaatcttccccgtgggcagggcttaggcaggaaaggagacaaacttcacctaggcaattggcctggatatatgtcacaatggcccctgtgtgcaggaccaaggcaggagggtgaccttaccttgggtacagcaatatgtcacaatctctctggttgtcagggcccaggcaagacagaagaaacatcagctaggtgctgagccaagtgatatgttacaaagcttcctattggcagaaccacccccacctcaaa

SEQ ID NO: 269473 - DNA, 208 bp, Homo sapiens
taatgcaatttcctaaatgaactttaaggaaattaagacttgctctgggcaactcattaccatctacccggctgactgtcaactatcagagtgtagaggtttttaaccagacattcgtttcaatgatgatatttaatcactttcttcccttaatgtccctaccaagagcgaatcattgaatgtgcctactgcaggactctctccttgc

SEQ ID NO: 269474 - DNA, 373 bp, Homo sapiens
tcccaggctcaagcaatcctcccacctcagcctcctaagtagctgggactatggtgggggcacacgccaccatgcctggctaatttttattattattattattattattattattattattattatttgtagagacagggtttcaccatgttgcccaagctgtctcaaactcctgggctcacgcagtctgcccagttaggcctcccaaagtgctgggattacaggcgtgagccagcacgcccagttaagcattatagtttttgatccagtaatcctactactaggaatttatcctaaggaataaaagctatctgtatatgcccctcccccacaaaaaattttaaataaaagatactatatgaaaagctaatat

SEQ ID NO: 269475 - DNA, 383 bp, Homo sapiens
gagtgcctctgcccggcctcctcaccgtctgggaaatgaggagcgcctctgccttgccgccgtcctgtctgcgaagtgaggagtgcctctgcccggcctcctcaccatctgggaaatgagaagcacctctgcctggccgccgtcccatctgggaagtgaggagcacttctgcccagccgccaccctgtctggcaagtgaggagcacctctgcccggccccctcaccgtttgtaagggaggagcgcctctgcccagcccctgcaccgtctgggaagtgaggagcgcctctgcccggccccctcaccatctgggaagtgaggagcgtctctgcccgctgctgtgcaaccttccaagtgtgaagtgacagccttgtgtgtgatctt

SEQ ID NO: 269476 - DNA, 556 bp, Homo sapiens
ctgtaatcccacctactcaggaggctgaggcaggagaatcgcttgaacccgggaggtgaaggttgcagtgagccgagatcacaccagagatgcactccagccttggctacagagtgagactccatctcaaaaagcagaaacttacttctcgtggttctggaggctagaagtccgagaaaaaagcatgtttggtttcccctgaggcttctgtccttggcttgtagatggtcacctgctcactgcatcctcacagcgtttctcctctgtgcctgtgcatccctagtgtgtctctctctgtgtcctcatttcccctcctagaaggatatcagttacattggattagagtccactctaatggcctcattttaacttacatgcagtcactttctgaggcattaggagtttgggcttagaggggtgggacagaggatggggtaggtaaccactgaagatgcagcccaattcagcccataacaaaggcattattttttgttgccccaaagtgtggaggtctgctactggcatcatgggcagggggtcaggcatcctaagtgct

SEQ ID NO: 269477 - DNA, 663 bp, Homo sapiens
aaggagtcaacattttgttaactttgtcaaagttcagatggatataggtgtgcagctttcatcctcagagaaatgtaaatcaaaaccacaatgagataccatctcacaccagtcagaatgaatattatttaaaaagtcaaaaaataacaggtgccgtcaagacttcagagaaaaaggaatgcttatacactgttgatgagaatgtaaatagttcaaccatcgtggaaagtaattttgagattttgcaaagaacttaagcagaactgccatttgagccagcaaacccattactgggtaaataccaaaaggaaaataaattgtaacagacacatgcactcgtacgattatcacagtgctattcacaatagcaaggacatggagtcaaccttggtacccatcaacggtggactggataaataaaatgcagtacctatacaccatggactactacactgcaaaaaacaaacaaacaaacatgaaatcatgtcctttgctgcaacatggatgcaactgtaggccgtaatcctaagcaaattcacacaggaacaggaacagaaaaccaaatactgcatatcctcacattgaatgcccatggacataaagatggcagcaatagacactgaggactactagagaagggaaagagggaggtgggatggtctg

SEQ ID NO: 269478 - DNA, 201 bp, Homo sapiens
aaagactttgggaaaaggcaagatatttttaaactatgaccttgccatgcaataccacattacttttctctctctctcctccctctctcaatctctgtttgtgtgcatatataatgtatatatgtatgtgtatatatacatgtatatacacacacacacacacacagagagagaagagttgtaatggcaaaaactgaaaat

SEQ ID NO: 269479 - DNA, 683 bp, Homo sapiens
tagaagattagagtcatcatgtggttaaaggaaataaagttatttactataacatttaatcaagaatgtgaatgtagcagaacagggtcataacaggagatagaaaatctaatttaaggcctgactgaatctgcagaagtagcccaaataaaaacactcttataagaactctcaacatgggtcaatctttctcatttcttctggaccatcaacttcatccatttgctgtaatgaacttcctttctatggttcagttcctataaggctatctctgatcacctccagatgttctctattacccagtatcttcacaatgacctcctgtatccatccttttccttgaaccctggtccagaggcagatattgtactgaatatcagagagagacatctgaatttgataaagggggtctcatcagcaaatctcaagataaggataaagatgtcaaatcataaaagtttcatcatggaatgtaagattttatgcttcctcttcaatggctaataaaataaaatattaaacaacaaataaagaataattgtcacttttgaaaaaattattctttttaaaattaaaaaatattaatgaatttttattaatgaattagaagcttattctttaaatggcacctcattctaattttttaacaaagttttaaaatgcatgcatgaaagctatttttt

SEQ ID NO: 269480 - DNA, 103 bp, Homo sapiens
cctcagggagagagagatctggacagaattgccggacagatggcagctgccaacaagaagcattagaacaaaccatgctgggttaataaattgcctcattcaa

SEQ ID NO: 269481 - DNA, 569 bp, Homo sapiens
gagtggatattgaaagcagaaagagaaaagcaaataacaaataagggaatttccatactcctggaagcaggcttctcagcagaaacctgacagatgagaatgagtagaatgatatattcaaagtgctgaagggaaacaatcaaacaaacgagaaacctgtcaaccaagaatactgtacacagtaaagctattttttttaaatgaaggaaatctgaaggcattctcaaacaaaagctgagggaattccctgtaaccagatctgccttgcaaaaaaaggtgaagagagtttgtcatactgagagaaaaggatgctactgggtaacatgaaaaaaatctgaagatataaaacccacaggaaaaagtaagtgtccaggcaaattcaacatactctaatgcagtgattgtgggacataaaccacttatggtttaaccttcgttgttaggaagggttaaaagacaaaacaaaaataatagcaactacaataatttgctaaggtataaaaagatgtaaattatgtatataataaggtataataatataataaggtataaaaagatgtatataaaaa

SEQ ID NO: 269482 - DNA, 407 bp, Homo sapiens
gttagttgggggcatatgtcagagatgataaattcctcttcaaaggttttaattccctcttcttccagttctttgtttctctagtttctatagttacccgtgctgtaaacaacccttcctgccctgactgttccctgacatgtcctgacaagtctagacaggccttgcaccataatggatagccttccccttcctgcctagatagctgtattcaatttcaaacattagccaatcaggtcagtttagactgtgcagtccaaccccagccaatggagaaagaacacagcagtaggaaccaattgcattagggataaaaacccctgccctatcccccggctcggtgttctcttgtgatcgtgactggcacaagctgcgtccttctgcagaagtaaatttgccttgctgag

SEQ ID NO: 269483 - DNA, 416 bp, Homo sapiens
tgaggtattgtctgagtggaatgtttattaacatctccagcctctatccactagatactagtggcaccctacccccaatccagataaacaaaaatgtctctaaatattttcaaatgacccctagggggcaaatctacccttagttgagaaacataggtttatgctaattctaatttatactcagttggatttattctgaaaagaagaggggattaatgtctcatatattcagtatagatttccttttggaatgatttctatttaaagaaaattatcttttgaagatgaattaagtttatcttgattgtgttggtggttttgtgagtgtatacaattgtgaaagctcatctaattgtacactttaaataatgcaatttattgtctaaaattatattttaataaagttgatttttttg

SEQ ID NO: 269484 - DNA, 750 bp, Homo sapiens
tgggaggatcatgaggtcaggagatcgagaccatcctggctaacacggtgaaaccccgtctctactaaaaatacaaaaaaattagccaggcgtggtggcgggcacctgtagtcccagctacatgggaggctgaggcaggagaatggtgtgaacccaggaggcagagcttgcagtgaactccatctaaaaaaaaaaaaaaaaaaaaactacatgaaaacccaaggaaaactcttactgacattggtctaggcaaagaattcatgactaagaactcgaaagcacaagcaacaacaacaaaaaaagacaaatgagacaactaaactaaaaagcttctgcacagcaaaagaaataatcaacagaatgaacagacaacttgaagaataggagaaaatatttgcaaactatgcatccaacaaggactgatatccagaatgtaccaagaactcaaacagatcaaagacaacaaaagcaacaaataatcctgttaaaaagtgggcaaatgacatgaatagacatttttcaaaagaagatatataaatggccaaacgagcattatgaaaaaatggaaagcagtgtggagatttctcaaagaactaaaaatagaactactgtatgatccaacaattccactactaggtatatatgcccaaaggaaaagaaaccattatcttagatcctacacttatatggtattacaggtcaaccataattgcaaggccttttacctaagtggccaattggaggactggt

SEQ ID NO: 269485 - DNA, 320 bp, Homo sapiens
caagaccaacctgggcaacacagtccctgtctctacaaaaagccaaaagttaaggtgggtgtggtggcacacacctatggtcccagctccttagctccttgggaggctgaggtgagggatgaggactgcttgagggcaggagttcgaggctgcagtgagctatgatggtgccactgcactcctacctgggtgacagagtgagactctgtctcaaaaaaatgattttaataaataaatacaaataaaaaggtatatgtggatgagaacttaacttcacttagaaacaaatagcaactattataattgccaaaaagtagaaa

SEQ ID NO: 269486 - DNA, 321 bp, Homo sapiens
gcaggattttgttaaagcagcccaggatggccaagacagctttggaaatgaaaatggccactgttcgctacggagaagagaccctcattctagacttgtgactctccaattctgcactcccatttaatttccccagtgctctatttagaacatatcctcagggcctgccgatgctagtcactctctggaagccttgcttctagaactcctgggaaatttcagctctggcacagacagctctggccttcacgtcaggaggcctggatttgtgcccgagctttgctgctttgccttcaaataagactctttccagctctggtc

SEQ ID NO: 269487 - DNA, 393 bp, Homo sapiens
cacgagggggtgccccaccatgcacagctaatttttgtattcctggccaacatggtgaaaccacttctctactaaaaattaaaaaattagccaggtgtggtggtgggcgcctgcaatctcagctactcgggagtctgaggcaggagaatcacttgaactcgggaggcagaagttgcagtgagccgagcttgcgccactgcactccagcctgggtgacagggcaacactccatcttaaaaaaaaaaaaaaaagataggagtagggtaaaggcatgggatacaggatggaccctgagaggataatatgctggaggtgctcagggcaaacaactcagatgtgtgtgggagtgtgcatgcgagggtttttacgcatatggtatagtctttttcctgc

SEQ ID NO: 269488 - DNA, 492 bp, Homo sapiens
ttcagttttctgcctcctccctccactataccacaaatctatataaatgattttatccagtcatcagcaaccatactgccaaaaaggtaaactctaatcctatctccaattaatgttttcttacaagtctgtactccaatcaaactcagccaataactccccttaaaggctgcccattctactcatcaagccactgttcatacacggctgtgggcatcctctcactgtcttgttattagttagctttacatttatttccggggcattctcctaaccaggaggtcaacttggagaacaggacagggctgtataattgttatattctgttacagaacatgactttattatataacatactgtttgaaaatcacaaccctataagtattttctccatgaatcgggtgatacattattaacaattttaaataataattgggagctagaaaaactaatctgggaaaatggatcgttattatggcagttgaccacatt

SEQ ID NO: 269489 - DNA, 521 bp, Homo sapiens
ccagtggcagacactgaaaataaggagaatgaagttgaagaggtaaaagaggagggtccaaaagagatgactttggatgagtggaaggctattcaaaataaggactgggcaaaagtagaatttaatatctgaaaaccaaatgaaggtgttgatgggcagtggaagaagggatttgttcttcataaatcaaagagtgaagaggctcatgctgaagattcggttatggaccatcatttccggaagccagcaaatgatataacgtctcagctggagatcaattttggagaccttggccgcccaggacgtggcggcaggggaggatgaggtggacgtgggcgtggtgggcgcccaaaccgtggcagcaggaccgacaagtcaagtgcttctgctcctgatgtggatgacccagaggcattcccagctctggcttaactggatgccataagacaaccctggttcctttgtgaacccttctgttcaaagcttttgcatgcttaaggattccaaacgactaagaaatt

SEQ ID NO: 269490 - DNA, 216 bp, Homo sapiens
gataatgcttaactcaaggggcttgcgtagagattcagcacagtgccggcgcccagcaagcgcccctgagtggctgtttgctggtgtacagtctccaggtaaccgccacgtgcctcccggtagttccctcagcatcgctactgggcgccctgtgtccttcctgtggcactctatcctctcattgttcttctgagtaaagaaaggtggccatcgaca

SEQ ID NO: 269491 - DNA, 152 bp, Homo sapiens
taaagcccgccactattattatgaatttgtttatttctcctttgagttttgttaatttttgttttatgcatttagagattgtgttattaggttcatacccatttaaaattgacgttttctggtagagtgaaccctttattatgtgaaatggc

SEQ ID NO: 269492 - DNA, 406 bp, Homo sapiens
ctggcttagttcaagcactgtttctcgtactcacctttgctgcagtgttctgagtctgtctataaaaaacagacacacagaccagtggaacagaatagagaaaccagaaataagcccacacatttatagcgagctgatttttgaaaaaggcaccaagaacacacattggggaaagaacattctcttcaataaatggtgctgggaaacctggatagctacatgcagaagaatggaactagattcctatctctcaccatatacaaaaatcaactcaaaatggattaaggacttaaatgtaagagccagaaatatgaaactatttgaataaagaatagacgaaacactttaggacattggtttgggcaaagatttttttggatggtacctcgaaaacacaggcaacaaa

SEQ ID NO: 269493 - DNA, 528 bp, Homo sapiens
aacagtttgtatggggttcccaccttgccaggcatcaacaaacacacactggggagagaccctacagctgcctcaagtgtgagaagacctttgggcgaagacatcacctcatcaggcaccagaaaacccacctacatgacaagaccagcaggtgctctgagtgtggtaagaatttccgatgcaactcccatctggccagccaccagagagtgcatgcagaaggcaaatcctgcaaaggccaagaggttggagagagccctggcacaaggaaacggcagcgtgccccaccagtgccaaagtgtcacgtgtgcactgaatgtgggaagagctttggccgaaggcaccaccttgtgagacactggctgacccacactggggagaagcccttccagtgccctcgctgtgagaagagctttggccgaaaacatcacctggacaggcacctgctcacccaccagggacaaagtccccggaacagctgggacagaggaacatctgtcttttgaaatctgtttccactacagctat

SEQ ID NO: 269494 - DNA, 111 bp, Homo sapiens
ccaccaggacacagagcagtaagaaaacacaaagtccacctccctcaccatgggcagctcagcccagagtcttccataagggccaaacacagaccagcactaaaaatagtt

SEQ ID NO: 269495 - DNA, 469 bp, Homo sapiens
tcttttttttaattggttgaagctggtgaggtggtattgatgtgtggcatgatcgaaaataagtatgttaaatcacttctcaaatgatttgggatgaaagactagttttttggctggtttatttctaattggttgtaaacagatacttaaaaaaaatgcaatcaacatgaatcgttagaaaagtgttggcagggcgcggtggctcacgcctgtaatcccagcactttgggaggccgaggtgggcggatcacgaggtcaggagatcgagaccatcctggctaacacagtgaaaccctgtctctactaaaaatacaaaaaattagccggaagtggtggcgggtgcctgtagtcccagctactcgggaggccgaggcaggagaatggcgtgaacccgggaggcggatcttgcagtgagccgagattgcgccactgcgctccagcctgggcgacaaagcgagactccgtctca

SEQ ID NO: 269496 - DNA, 358 bp, Homo sapiens
tccccatttaccaacccaagcaagtaagcccacctgagccacagaaccttctccctccctacaaaaggctcaggagtaggaggcaccagacagcttttatcgtctctaacactaactcagttttgaataaattgaagagcgaggaagagtcaaaggaaaaaatgctgggtcagtgattacccttgaaaatactttgcaattacaaaaacaaacatttaatgaactgatccagttagtcaccaacagaatacttaagtacgcctcttgattcctttattggaagaactatgacccatccaaatcattcttcaaagtcagtctgtctgtgaagaataaaacaatgattgctaataaaatg

SEQ ID NO: 269497 - DNA, 464 bp, Homo sapiens
atactatgtgattctatttatatgacattctgagaaaggcaaaactatagggatggagactaggtcagtggttatcaggggttattagtgtaggggaggttttgactacaaggggaaagcatggaggaagtttttgggagtaatggcctaactgttctgtgtccagattgcaagggcagttacatgaatctattaataaatatgtattaaaactcatggaactatgcgccaaaaagttaaatttcatcatatgttaatttttttaaagttcccagcatagtacctgacacgtaattcaagctcagtgaatactcgctactttcccttttctcttttcctctatatatccaggaaatcaactagcatctgacagttgtatttttcttagatagggtctcactatgttgcttgagcccaggagttcaagaccagcctggacaacatagggagactctatctctacc

SEQ ID NO: 269498 - DNA, 659 bp, Homo sapiens
catatatgtggtaaagtacttgtttctaaaatatgtaaagagctctcatgactcaattatttttgtaaaaactatccaattaaaaataagcaaaagctttgaacagacttcaccaaagaagatacatggatagcaaataagcaggtgaaaagacgctcaacatcattaatccttagggaaatataacttaaagccagaatgagatagcactacacacctatgagaatgactaaaaccaacaatactgagcataccaaatctcagcaaggatgtggaaaaactggtaaatttgtacgctgctggttttgaatggaaagtggtgcagccactttagaaaacaattcagcaagttcttcaaaattagacatgtacctagtgtacaatccagcaaattttactcctatttatttacttaagaaaaccgaaagcctttgcccatagcaaagcttgtacacagatgtttttagcattcttagtgagggctaaaaaactggaagcaacctaaatgcccatcacaggtaaacaggtaaacaaatggtggtagatacatacactggaatgctactcggctctcaatccaaaggagtgaattattgataacgtgcaacaacagtgatgattctcaaaataattacatgaagtgaaagaagtgagacaaa

SEQ ID NO: 269499 - DNA, 501 bp, Homo sapiens
  misc_feature (485)..(485): n is a, c, g, or t
ccactttatcaaggcttttattttgtcctaatgtgtctgcttcctagatcttctctgaggtggataactgagagagagttaatgagtaacttagccaggtgaaacattaatattatttggatataagtaacatttaatggaaaatatatttataacaatataaacaagttatatgacaggctttagcaaatattaataacaaaaagagtaacaacaacaaataacctacacttaccctatgccttttcttgagttctaaagcccatgtgggctgcttagtaatgatagctcaactctgcttctaatctgggttacaacactcatgttaaaacctcttagtacctttccttcttgtgacagaccgagttgtttagtcagtaaacttatcttgaactcctggggaacatagtgagaccccggtctctaccatgcctggctgagacccctgggattataggtgtgagccaccatgcctggctgagacnccatctctttaaaaaa

SEQ ID NO: 269500 - DNA, 336 bp, Homo sapiens
gaaagaaatttattattaaaatttaagtgacctgaacttggagtaaaagaagtctttattaataccagccaggcgctgtggctcacgcctgtaatcccagcactttgggaggccgaggtgggtgaatcacgaggtcaggagttcgagaccagcctggccaatatggtgaaaccccgtctctactaaaaatacaaaaattagctgagcgtggtggtgagcgcctgtagtcccagctactcgggagtctgaggcaggagaatcgcttgaactcgggaggccgaggttgtagtgagccaagatcatgccactgcactccagcctgggcgacagagcgag

SEQ ID NO: 269501 - DNA, 335 bp, Homo sapiens
gcaccattgtattccagcctgggtgacacagcaagatcctgtcccaaaaaaaaaaaaaaaaaagttggaaagctactgttgaatatgggctggctaaagacagcaccactgaggcatcctgctatttaaatacaaggctagagtggaatgcactgttacagcaatgaaacaatatttaaattatcaatcatgataatgttggggctcagaaattcataccccaagctagagtacaagtcatccttccacctcagcatcctgagtagctgggaccacaggcacaccatcacacccagctaattttttagtagagatcccacattacaaaaaaaaaa

SEQ ID NO: 269502 - DNA, 464 bp, Homo sapiens
agggggtgaggggtaaaagactgcacactgggtacagtgtacactgcacaggtgatgggtgcaccaacatctcagaaatcagcactaaagaacttattcaagcatataaggtaacacatatgttaattagctatattgagccattccacaatgtatagatatttcaaaatatgtcacacatgataaattatagtttttgatgtcattaaaaattatatttaagttttgttattttgaaagctttttcacagatctttttcagttttgtttgtttttgagcctgtcttgtacctggttgcactaaatatataatagttctctcttgtgaaaaccttaaaagcctagatttgaacacatgttcaatgataatgatgatataacagaaaaaagaacttatttcatgtaaccagacaccacctgttccccaaaaccctactgaaataaacaaaacaaaacaaaaacat

SEQ ID NO: 269503 - DNA, 1223 bp, Homo sapiens
atacctgtaattccagctacttgggaggctgaggcacaagaatcgcttgaacccaggaggcggaggttgcagtgagctgagatcgctccattgcactccaacctgggtgacaagagcgaaactccctctcaaaaaaaaacaaaaaaaaaagtccccagggcccatgtccacccagccgtctctctccctcccggccaatgttattctttcctcataagcccttccagagcacaaacacacaagcacgtatgtttgtcttcttttctcataaatggtaacaagctctgcttgctgttgtgcagcttctcttttcacataaaaatacaccttgaagattatttcttatgagtacgtaagatgggcacctgagtagtttgctgttacagaccacgtaggcaatggccgcctgcacagattatttgcacaggtgggagtatcattagatgtttctggaagtgggatggctgggtcaaggtgaatgtgtgtttggaattttgaaagataaagtcataaagataagtaaaaacacctggcatcttggctcacggctgtagtcccaacacattgggaggtcaaggtgggaggactgcttgaagctaggagcttgagactggcctgggcaaaatagtgaggccctgtttctacaaaaaaaaaaaaaattaactgggtgtggtggtgtgtgcccatagtctcagctactcaggagactgaggtgggaggatcacttgagcaccggaggtcaaggcttcagtgagtcatgatcacacactgcagcctgggtgacagagtgagagcctgtctcaaaaaataaataaataaaaaatagatagatagattgattgattgatatagagaggataagtaaaaacaaaaacatgtatgtactataaaacctgggatgggctgggcgtggtggcttatgcctatactcctaacactttgagaggccaaggcaggcgaatcacttgaggtcaggagtttgagaccaacctggccaacatagtgtgaaaccctgtctctactaaaaatacataaataaataaataaataaatagccaggtgtggtggtgcatgcctataatcctagctactcaggaggctgagttgggaggattgcttgaacccaggaggtggaggttgcagtgagccgagatcacaccactgcacactcctcataagtgcctggaagggcaacacagtgagactccatctcaaaaaaaaaa

SEQ ID NO: 269504 - DNA, 364 bp, Homo sapiens
ctcaaccgggagagccccagagaggaagcagatttgtctcctggactatcgaagtgtcccggtggcaagctaagcggaaagctagcactgtgttgggagtaagcaatgtggagtcatctcttcccccagagaaacgctgacaagtattagctcacagacatgtgtgcacaaagatggatgctcacagttgtccgttggagcactgtttgaagcagcaaaaggaaccaattcaactttccctgagtaggaaaatggctaaataaatggtaacttattcacagaagggaatataatacagctgttaaaatcatgaaaaaaggtacatattataccatgaataaatctcaaaaacatcagttctaaa

SEQ ID NO: 269505 - DNA, 6097 bp, Homo sapiens
catcttaaagcttccctttgagagtgttgctcttagaacttttcagatcttgttcagtgacctgctacagttatgtgggaggatccaggtgtaaatagaatctgatgacagattctgtaagcgtaaacaagcatcttaggggtgagagatgaaggccacaaagtatcgagagtcatgatcacaattatacctacccgtaaaatgtaatactggactagagtattttttctttccttttgcccaagagctagctaattaggacccgtaatctggagcttcactgtgacagttccactttctatttagaatcagcctgagtctctcctgcctgccttatccttgggccatcagcccagggtcactgggaactctctcacaatcacctaggcatctttgagatatttgaggatgtccagagcagaattgtgtcaggttgacaagagtggttaattctgcctatgtctcagtgacaagagaaatgagacatcctgtgtttgctcctcccctcatacaagagatgtctttggttggtatccggttgagagtttcccagtttcctgatagttggatgaaaaacaaggaggaggtctggagactcaagcagataaactaattgctaccatttcatatggcccttagaaaaatagataaagcagtcatggtccctaccatctaggaactgttagtctagactagcaactgaatacgtggttgaattaagcatcatatggttggcaaagtgaatagatgtgtgggaaaacgtgtgggctttatttgggccactttctttatatcgttgtgactactgaggtcatcatttgaatgaatgtttatgaccacaagagttttaaatatttttatttcttttactttgctaagaatacatatttatcttataataaaattaccctagaaaaccccaggagatttgtttaaatggctaattagtatatttacacagttgatgggttgagcagagtaatatatagggtttactcccagctgcagttctgttcagattcaccctttttggaggctttatttaggtctggccccaccctggagtcttgcctcacagaactgattagaagagatcagagttttggctggtgcctttccggagtggttgctaacaattcccgaattccacaaggagataaatgggaaaaaaaggaaccactgacatttaaagatgtcgccatagaattctctctggaggagtggcaatgcctggatactgcacagcgggatttatataggaatgtgttgttagagaactacagaaacctggtctttttgggtattgctgtctctaagccatatctgatcacctgtctggagcaaaaaaaagagccctggaatataaaaagacatgagatggtagccaaacccccagtaatgtcttttcattttgcccaagacctttggccagagcagaacataaaagattctttccagaaagtgacactgagaagatacggaaaatgtgaatatgagaatttacagttaagaaaaggctgtaaacatgtggatgagtgtacggggcacaaaggaggtcataatacagttaaccaatgtttgacagctaccccaagcaaaatattccagtgtaataaatatgtgaaagtctttgataaattttcaaattcaaatagatataagagaagacatacaggaaacaaacacttcaaatgtaaagaatgtagcaaatcattttgcgtgctttcacaactaactcagcatagaagaattcatactagagtgaattcctacaaatgtgaagaatgtggaaaagcctttaactggttctcaactcttactaaacataagagaattcatactggagaaaagccctacaaatgtgaagaatgtggcaaagcctttaaccagtcctcacaacttactaggcataagataattcatactgaagagaaacccaacaaatgtgaagaatgtggcaaggcctttaaacaggcctcacaccttactatacataaaataattcatactggagaaaaaccttacaaatatgaagaatgtggcaaagtctttagccagtcctcacaccttactacacaaaagatacttcacactggagagaacctctacaagtgtaaagaatgtggaaaagcttttaacctattctcaaatcttactaaccataagagaattcatgctggggagaaaccctacaaatgtaaagaatgtggcagagcttttaacatatcctcaaaccttaataaacaggagaaaattcatactggagggaaactcaacaaatgtgaagaatgtgacaaagcttttaaccgatccttaaaacttactgcacataagaaaattctaatggaagagaaaccctacaaatgtgaagaatgtggcaaagtctttaaccagttctcaactcttactagacataagataattcatactggagagaaaccctacaaatgtaaagaatgtggcaaagcttttaaccaatcttcaaaccttactgaacataagaaaattcatactgcagagaaatcctataaatgtgaagaatgtggcaaagcttttaaccaacactcaaacctaattaaccataggaaaatttattctggagagaaaccatacaaatgtgaagaatgtggaaaagcttttaatcgatcctcaacccttactagacataagaaaattcatactggagagaaaccctacaaatgtgaagaatgtgacagagcttttagccagtcttcaaaccttactgaacataagaaaattcatactggagagaaaccctataaatgtgaggaatgtggcaaagcttttaaccgattctcaacccttactaaacataagagaattcatactggagaaaaaccctataaatgtgaagaatgtggaaaagcctttaatcaatcctatcaacttactagacataagatagttcatactaaagagaaactcaacaaatgtgaagaatttggcaaggcctttaaacagtcctcacaccgtactatacataaaattattcatactggagagaaaccctacaaatgtgaagaacatggcaaagtttttaaccagtcctcaaaccttactacacaaaagataattcatactggagagaacctctacaaatttgaagaacatggaaaagcttttaacctattctcaaacattactaaccataagataatttatactggagagaaaccccacaaatgtgaagaatgtggaaaagcttataaccgattctcaaacctaactatacataagagaattcatacgggagagaaaccttaccaatgtgcagaatgtggcaaagcctttaactgctcctcaacccttaatagacataagataattcatactggagagaaaccttacaaatgtaaagaatgtggcaaagcttttaacctatcctcaacccttactgcacataagaaaattcatactggagagaaaccctataaatgtgaagaatgtggcaaagcttttaaccaatcctcaaaccttaccacacataagaaaattcatacttcagagaaaccctacaaatgtgaagaatgtggcaaatcctttaaccagttctcatctcttaatatacataagataattcatactggagagaaaccctacaaatgtggagattatggcagagctttcaacctatcctcaaatcttactacacataagaaaattcatactggagagaaaccctacaaatgtgaatatggcaaaacttaattgatcctacaagcttactacacataagaaaattcatactggagagaaactacaaatgtgaagaatgtgttaaagcctttaacaagtcttcaactttttctgcacacacgaggtattttatactggtgagaaaccttacaatgtaaagaatgtggcacagcttttaactaatcttcaaaccttactgaaagttgagaaaattcgtactggagagaatcctacaaatgtgaaaaatgtggcaaatcctttaactgatcctcaacttttactaaacataaggtaattcatactggagaaaagccatacaaatgagaagaatgtggcaatgcctttaatcagtcctcacacctttctacacataagataatttatactggagaggaactctatagttgtgaagaatgtggcaaagcttttaaccaatcctcataccttactatacagaaattcatactggagagaaagcctacaattgtgaagaatgtggcaaagcttttaaccttccttaacccttaactgtagataagaaaattcatactggaaagaaaccctacaaatgtgaagtctgtggcaaagcttttaactgattctcaactcttactacatgtaagagtatttatactggaaagaaaccctacaaatgtaaaaaacgtggcaatgcctttaactggtcctcacaccttgctacatataagacagtttatactttgagagaaaccctgcaaatgtgaataatgtggcaatactttaaaccaatcctcaaacctcactaaacataagataatactgaaaactttacaaacctgaatgatgtgacaataattttgacaacacctcgaactttctaacataaatcatactggtgaaaaatcctagaaatgtgaaaaatatcacaaagcctttaaatggttgtcacacttgattgtaggtaagaatccatactgaagaaaactcctggaagtgtaaaaaatgtggcaacacttttaataaatgctcaccccttattgcacaggaaagcatttatacttcagaaagattgtacaaatacaaggaatgtggaaaagccattattatctgctcagattttactcaacattagagagttagtacgtaataaaagcattataaatgcaatttttgtcaagagatctttcagaaaatataagcctttaaagtgaagaagaggagccagttgtgctggctcacatctgtaatgccagcactttgggaggccaaggtgggtggatcacctgagggcaggagtctgagaccagcctggccaacatagcaaaaccccatctctattaaaaattttacaaaaattagctgcgtgtggtggcaggcccctgtaatcccagctaattgggaggctgaagcaggagaattgctcaaacctgggaggcgaagattgcagtgagctgaaatcacaccactacactccagccaaagcaacaagagcaaaaacttcgtctcaaaaacaaaacaaaaaaagagtattcattgtgaggacaaacaatacaaatacgaagagggttgtagtacctttacttgtatcacagatacttttgtacccattttgcactagaggaaaaccatgaagcagttgctcaaatgttgttcaacaccagaaaatttatattggagaaaagcactgtaaatgtaatgcatttgtgaaaacattttttaaaaaactacagcttagaaaataccagaggcctcatactaaaatatatttttgcaagtgaagtaaatataaaaataatttaatccaaaattaagtctatataaatatcagagaattcacagtagaaatatctaaggtactgacacttcagacattgctgagtatagaatcagaatgctgagtatagaaaataatttaaaactaaagttggtaggtaaataatgtgtatataactttaaaagaagtagaatttttttgtagatgtataattacattcaaattatattttttcttgaaaaattagtttttgaaaagcaaataatgatgtaattcaactcaaattcatgctcttcattcctattgtattcacatgtgaaagcatgtgattaatttttcatgcatcaaagatatgagaaatcatttctgttaggtcggtattatttatgacactttctatgaaagaataaggacattaaaatgtaagatgcatgatgaaaacctgagtgaagaggctgtttgtgtttaacttataatattgagtgatccatgaagtaggttttcagagcaatattcttctgcattatagtaagagaaaaccatttttaatcttagttaaaattaaagtgaattagtagtatatcattttactatttgtacttttatgtaataaaatgcaatgtgttt

SEQ ID NO: 269506 - DNA, 1870 bp, Homo sapiens
ttcggggatttggcggggcctttgtctctggctgcagccggagctcctgctctcctcctcactgctcagtgtcctctgctcctagaggcccagcctctgtgtccctgtgacctgcagatattgggagatccacagctaagacgccgggactccctggaaacctagaaatgactgtgccataacacacatttgatgctgaaatccgggataggggaactcctttgggagtcgtgtcccttaaccccttcccccgacttcttgaagagacccacccgcgacctcggtacctcggaccagctctgtaaaagccccgcctctgccttcggatagatattgttacctgtttcggcctccctacttccatccaatctgacagtggtccagccttcattagccaaatcacccaggcagtttcccaggcccttggcatccagtggaatctccacaccccataccatcctcattcctcaggaaaggttgaaagagccaacggcctcttaaaaactcaccctccaactccgaaaggactggactgttctcctaccacttgtgcttctcaggatctgagccaccgcccatgaacctaccaggtatagcccattcgaactcttatatggtagtacttttctactggggcccaacctcatcccagacaccagtcctccaacaggctaggaatgaaatctgtcaggctgctaaccttcttttacccacctcagatacccagccatatgaggacactctggccagacagcccatcctgataaagagcttaaccccctgatctctacaacctcagtggacaggacccttcctggtcgtttatggtaccccaatggctgtctgcttacaagatcctcctcagtggattcacccttccagagtaaagctgtgtccatctgacactcagcctgacccttcttcctcctcttggaagtcgcaagtactctccccgacctcgttaaaactcaccgaaatccctgaagaaacttaaatgtcctgctcctgtccgccctgcttcttcaccctcttcctccactctatttgccaagacatctcctggtttcatccccaaactcccaccttagattctctcttaaactggatagatgatctcatcttttagggcactctgtataacttcttcccagatgagacgcctctgtttaccttcctactcactctttatctatccctcctgctcctttggctacctggcatggccgcactcccacttccagtaatgcctaattacctctacaaaactctcaacccactctctgttaaaccagtccaacccttctttggcaaaggacgctggctttgcatttctctatcagctaccacttacgttgccactctcattcccacaaaaaactgggtagttactagcttaacctaccaccctcgtaatgaaggaaaaagccccttctaactcctacatatgcagtcattggccaacttctccatcaatgaaatgaccgaaaatatcctgacaggtcgtgcagttcaacttttacgctcctacatgtccagcctcacccattacacaagtaatgaaaagcccatacacggccctgtgactacaacgctgtcttaactttccaagcccctttatgcatccaacacaacctgtcatcaggcctacctctaggtcacctactgttccatcagtgacaactacgccttgcagcttcaagccccaactgactgtattaacttccaggtctcccaaacagctacattcaaacagcctgtccgcttctcaaagcccccagaagtcatcagcacctctctgcttaacaaacaatccgggttttgtaatggcaggcatacgcactgcatgaccattcacccctggacctcctgc

SEQ ID NO: 269507 - DNA, 1481 bp, Homo sapiens
ttcggggatttggcggggcctttgtctctggctgcagccggagctcctgctctcctcctcactgctcagtgtcctctgctcctagaggcccagcctctgtgtccctgtgacctgcagatattgggagatccacagctaagacgccgggactccctggaaacctagaaatgactgtgccataacacacatttgatgctgaaatccgggataggggaactcctttgggagtcgtgtcccttaaccccttcccccgacttcttgaagagacccacccgcgacctcggtacctcggaccagctctgtaaaagccccgcctctgccttcggatagatacccagccatatgaggacactctggccagacagcccatcctgataaagagcttaaccccctgatctctacaacctcagtggacaggacccttcctggtcgtttatggtaccccaatggctgtctgcttacaagatcctcctcagtggattcacccttccagagtaaagctgtgtccatctgacactcagcctgacccttcttcctcctcttggaagtcgcaagtactctccccgacctcgttaaaactcaccgaaatccctgaagaaacttaaatgtcctgctcctgtccgccctgcttcttcaccctcttcctccactctatttgccaagacatctcctggtttcatccccaaactcccaccttagattctctcttaaactggatagatgatctcatcttttagggcactctgtataacttcttcccagatgagacgcctctgtttaccttcctactcactctttatctatccctcctgctcctttggctacctggcatggccgcactcccacttccagtaatgcctaattacctctacaaaactctcaacccactctctgttaaaccagtccaacccttctttggcaaaggacgctggctttgcatttctctatcagctaccacttacgttgccactctcattcccacaaaaaactgggtagttactagcttaacctaccaccctcgtaatgaaggaaaaagccccttctaactcctacatatgcagtcattggccaacttctccatcaatgaaatgaccgaaaatatcctgacaggtcgtgcagttcaacttttacgctcctacatgtccagcctcacccattacacaagtaatgaaaagcccatacacggccctgtgactacaacgctgtcttaactttccaagcccctttatgcatccaacacaacctgtcatcaggcctacctctaggtcacctactgttccatcagtgacaactacgccttgcagcttcaagccccaactgactgtattaacttccaggtctcccaaacagctacattcaaacagcctgtccgcttctcaaagcccccagaagtcatcagcacctctctgcttaacaaacaatccgggttttgtaatggcaggcatacgcactgcatgaccattcacccctggacctcctgc

SEQ ID NO: 269508 - DNA, 1600 bp, Homo sapiens
ttcggggatttggcggggcctttgtctctggctgcagccggagctcctgctctcctcctcactgctcagtgtcctctgctcctagaggcccagcctctgtgtccctgtgacctgcagatattgggagatccacagctaagacgccgggactccctggaaacctagaaatgactgtgccataacacacatttgatgctgaaatccgggataggggaactcctttgggagtcgtgtcccttaaccccttcccccgacttcttgaagagacccacccgcgacctcggtacctcggaccagctctgtaaaagccccgcctctgccttcggataggaaaggttgaaagagccaacggcctcttaaaaactcaccctccaactccgaaaggactggactgttctcctaccacttgtgcttctcaggatctgagccaccgcccatgaacctaccagatacccagccatatgaggacactctggccagacagcccatcctgataaagagcttaaccccctgatctctacaacctcagtggacaggacccttcctggtcgtttatggtaccccaatggctgtctgcttacaagatcctcctcagtggattcacccttccagagtaaagctgtgtccatctgacactcagcctgacccttcttcctcctcttggaagtcgcaagtactctccccgacctcgttaaaactcaccgaaatccctgaagaaacttaaatgtcctgctcctgtccgccctgcttcttcaccctcttcctccactctatttgccaagacatctcctggtttcatccccaaactcccaccttagattctctcttaaactggatagatgatctcatcttttagggcactctgtataacttcttcccagatgagacgcctctgtttaccttcctactcactctttatctatccctcctgctcctttggctacctggcatggccgcactcccacttccagtaatgcctaattacctctacaaaactctcaacccactctctgttaaaccagtccaacccttctttggcaaaggacgctggctttgcatttctctatcagctaccacttacgttgccactctcattcccacaaaaaactgggtagttactagcttaacctaccaccctcgtaatgaaggaaaaagccccttctaactcctacatatgcagtcattggccaacttctccatcaatgaaatgaccgaaaatatcctgacaggtcgtgcagttcaacttttacgctcctacatgtccagcctcacccattacacaagtaatgaaaagcccatacacggccctgtgactacaacgctgtcttaactttccaagcccctttatgcatccaacacaacctgtcatcaggcctacctctaggtcacctactgttccatcagtgacaactacgccttgcagcttcaagccccaactgactgtattaacttccaggtctcccaaacagctacattcaaacagcctgtccgcttctcaaagcccccagaagtcatcagcacctctctgcttaacaaacaatccgggttttgtaatggcaggcatacgcactgcatgaccattcacccctggacctcctgc

SEQ ID NO: 269509 - DNA, 1623 bp, Homo sapiens
ttcggggatttggcggggcctttgtctctggctgcagccggagctcctgctctcctcctcactgctcagtgtcctctgctcctagaggcccagcctctgtgtccctgtgacctgcagatattgggagatccacagctaagacgccgggactccctggaaacctagaaatgatggagtctcgctctgttgctcaggctgaagggcagtggtgcgatctcggctcactgaaacctccgccttccgggctcaagcaattctcctgcctcaacctcgcaagtagctgggattacaggcatgcaccaccatgcccagactgtgccataacacacatttgatgctgaaatccgggataggggaactcctttgggagtcgtgtcccttaaccccttcccccgacttcttgaagagacccacccgcgacctcggtacctcggaccagctctgtaaaagccccgcctctgccttcggatagatacccagccatatgaggacactctggccagacagcccatcctgataaagagcttaaccccctgatctctacaacctcagtggacaggacccttcctggtcgtttatggtaccccaatggctgtctgcttacaagatcctcctcagtggattcacccttccagagtaaagctgtgtccatctgacactcagcctgacccttcttcctcctcttggaagtcgcaagtactctccccgacctcgttaaaactcaccgaaatccctgaagaaacttaaatgtcctgctcctgtccgccctgcttcttcaccctcttcctccactctatttgccaagacatctcctggtttcatccccaaactcccaccttagattctctcttaaactggatagatgatctcatcttttagggcactctgtataacttcttcccagatgagacgcctctgtttaccttcctactcactctttatctatccctcctgctcctttggctacctggcatggccgcactcccacttccagtaatgcctaattacctctacaaaactctcaacccactctctgttaaaccagtccaacccttctttggcaaaggacgctggctttgcatttctctatcagctaccacttacgttgccactctcattcccacaaaaaactgggtagttactagcttaacctaccaccctcgtaatgaaggaaaaagccccttctaactcctacatatgcagtcattggccaacttctccatcaatgaaatgaccgaaaatatcctgacaggtcgtgcagttcaacttttacgctcctacatgtccagcctcacccattacacaagtaatgaaaagcccatacacggccctgtgactacaacgctgtcttaactttccaagcccctttatgcatccaacacaacctgtcatcaggcctacctctaggtcacctactgttccatcagtgacaactacgccttgcagcttcaagccccaactgactgtattaacttccaggtctcccaaacagctacattcaaacagcctgtccgcttctcaaagcccccagaagtcatcagcacctctctgcttaacaaacaatccgggttttgtaatggcaggcatacgcactgcatgaccattcacccctggacctcctgc

SEQ ID NO: 269510 - DNA, 5523 bp, Homo sapiens
ttcggggatttggcggggcctttgtctctggctgcagccggagctcctgctctcctcctcactgctcagtgtcctctgctcctagaggcccagcctctgtgtccctgtgacctgcagatattgggagatccacagctaagacgccgggactccctggaaacctagaaatgatggagtctcgctctgttgctcaggctgaagggcagtggtgcgatctcggctcactgaaacctccgccttccgggctcaagcaattctcctgcctcaacctcgcaagtagctgggattacaggcatgcaccaccatgcccagactgtgccataacacacatttgatgctgaaatccgggataggggaactcctttgggagtcgtgtcccttaaccccttcccccgacttcttgaagagacccacccgcgacctcggtacctcggaccagctctgtaaaagccccgcctctgccttcggataggtctggccccaccctggagtcttgcctcacagaactgattagaagagatcagagttttggctggtgcctttccggagtggttgctaacaattcccgaattccacaaggagataaatgggaaaaaaaggaaccactgacatttaaagatgtcgccatagaattctctctggaggagtggcaatgcctggatactgcacagcgggatttatataggaatgtgttgttagagaactacagaaacctggtctttttgggtattgctgtctctaagccatatctgatcacctgtctggagcaaaaaaaagagccctggaatataaaaagacatgagatggtagccaaacccccagtaatgtcttttcattttgcccaagacctttggccagagcagaacataaaagattctttccagaaagtgacactgagaagatacggaaaatgtgaatatgagaatttacagttaagaaaaggctgtaaacatgtggatgagtgtacggggcacaaaggaggtcataatacagttaaccaatgtttgacagctaccccaagcaaaatattccagtgtaataaatatgtgaaagtctttgataaattttcaaattcaaatagatataagagaagacatacaggaaacaaacacttcaaatgtaaagaatgtagcaaatcattttgcgtgctttcacaactaactcagcatagaagaattcatactagagtgaattcctacaaatgtgaagaatgtggaaaagcctttaactggttctcaactcttactaaacataagagaattcatactggagaaaagccctacaaatgtgaagaatgtggcaaagcctttaaccagtcctcacaacttactaggcataagataattcatactgaagagaaacccaacaaatgtgaagaatgtggcaaggcctttaaacaggcctcacaccttactatacataaaataattcatactggagaaaaaccttacaaatatgaagaatgtggcaaagtctttagccagtcctcacaccttactacacaaaagatacttcacactggagagaacctctacaagtgtaaagaatgtggaaaagcttttaacctattctcaaatcttactaaccataagagaattcatgctggggagaaaccctacaaatgtaaagaatgtggcagagcttttaacatatcctcaaaccttaataaacaggagaaaattcatactggagggaaactcaacaaatgtgaagaatgtgacaaagcttttaaccgatccttaaaacttactgcacataagaaaattctaatggaagagaaaccctacaaatgtgaagaatgtggcaaagtctttaaccagttctcaactcttactagacataagataattcatactggagagaaaccctacaaatgtaaagaatgtggcaaagcttttaaccaatcttcaaaccttactgaacataagaaaattcatactgcagagaaatcctataaatgtgaagaatgtggcaaagcttttaaccaacactcaaacctaattaaccataggaaaatttattctggagagaaaccatacaaatgtgaagaatgtggaaaagcttttaatcgatcctcaacccttactagacataagaaaattcatactggagagaaaccctacaaatgtgaagaatgtgacagagcttttagccagtcttcaaaccttactgaacataagaaaattcatactggagagaaaccctataaatgtgaggaatgtggcaaagcttttaaccgattctcaacccttactaaacataagagaattcatactggagaaaaaccctataaatgtgaagaatgtggaaaagcctttaatcaatcctatcaacttactagacataagatagttcatactaaagagaaactcaacaaatgtgaagaatttggcaaggcctttaaacagtcctcacaccgtactatacataaaattattcatactggagagaaaccctacaaatgtgaagaacatggcaaagtttttaaccagtcctcaaaccttactacacaaaagataattcatactggagagaacctctacaaatttgaagaacatggaaaagcttttaacctattctcaaacattactaaccataagataatttatactggagagaaaccccacaaatgtgaagaatgtggaaaagcttataaccgattctcaaacctaactatacataagagaattcatacgggagagaaaccttaccaatgtgcagaatgtggcaaagcctttaactgctcctcaacccttaatagacataagataattcatactggagagaaaccttacaaatgtaaagaatgtggcaaagcttttaacctatcctcaacccttactgcacataagaaaattcatactggagagaaaccctataaatgtgaagaatgtggcaaagcttttaaccaatcctcaaaccttaccacacataagaaaattcatacttcagagaaaccctacaaatgtgaagaatgtggcaaatcctttaaccagttctcatctcttaatatacataagataattcatactggagagaaaccctacaaatgtggagattatggcagagctttcaacctatcctcaaatcttactacacataagaaaattcatactggagagaaaccctacaaatgtgaatatggcaaaacttaattgatcctacaagcttactacacataagaaaattcatactggagagaaactacaaatgtgaagaatgtgttaaagcctttaacaagtcttcaactttttctgcacacacgaggtattttatactggtgagaaaccttacaatgtaaagaatgtggcacagcttttaactaatcttcaaaccttactgaaagttgagaaaattcgtactggagagaatcctacaaatgtgaaaaatgtggcaaatcctttaactgatcctcaacttttactaaacataaggtaattcatactggagaaaagccatacaaatgagaagaatgtggcaatgcctttaatcagtcctcacacctttctacacataagataatttatactggagaggaactctatagttgtgaagaatgtggcaaagcttttaaccaatcctcataccttactatacagaaattcatactggagagaaagcctacaattgtgaagaatgtggcaaagcttttaaccttccttaacccttaactgtagataagaaaattcatactggaaagaaaccctacaaatgtgaagtctgtggcaaagcttttaactgattctcaactcttactacatgtaagagtatttatactggaaagaaaccctacaaatgtaaaaaacgtggcaatgcctttaactggtcctcacaccttgctacatataagacagtttatactttgagagaaaccctgcaaatgtgaataatgtggcaatactttaaaccaatcctcaaacctcactaaacataagataatactgaaaactttacaaacctgaatgatgtgacaataattttgacaacacctcgaactttctaacataaatcatactggtgaaaaatcctagaaatgtgaaaaatatcacaaagcctttaaatggttgtcacacttgattgtaggtaagaatccatactgaagaaaactcctggaagtgtaaaaaatgtggcaacacttttaataaatgctcaccccttattgcacaggaaagcatttatacttcagaaagattgtacaaatacaaggaatgtggaaaagccattattatctgctcagattttactcaacattagagagttagtacgtaataaaagcattataaatgcaatttttgtcaagagatctttcagaaaatataagcctttaaagtgaagaagaggagccagttgtgctggctcacatctgtaatgccagcactttgggaggccaaggtgggtggatcacctgagggcaggagtctgagaccagcctggccaacatagcaaaaccccatctctattaaaaattttacaaaaattagctgcgtgtggtggcaggcccctgtaatcccagctaattgggaggctgaagcaggagaattgctcaaacctgggaggcgaagattgcagtgagctgaaatcacaccactacactccagccaaagcaacaagagcaaaaacttcgtctcaaaaacaaaacaaaaaaagagtattcattgtgaggacaaacaatacaaatacgaagagggttgtagtacctttacttgtatcacagatacttttgtacccattttgcactagaggaaaaccatgaagcagttgctcaaatgttgttcaacaccagaaaatttatattggagaaaagcactgtaaatgtaatgcatttgtgaaaacattttttaaaaaactacagcttagaaaataccagaggcctcatactaaaatatatttttgcaagtgaagtaaatataaaaataatttaatccaaaattaagtctatataaatatcagagaattcacagtagaaatatctaaggtactgacacttcagacattgctgagtatagaatcagaatgctgagtatagaaaataatttaaaactaaagttggtaggtaaataatgtgtatataactttaaaagaagtagaatttttttgtagatgtataattacattcaaattatattttttcttgaaaaattagtttttgaaaagcaaataatgatgtaattcaactcaaattcatgctcttcattcctattgtattcacatgtgaaagcatgtgattaatttttcatgcatcaaagatatgagaaatcatttctgttaggtcggtattatttatgacactttctatgaaagaataaggacattaaaatgtaagatgcatgatgaaaacctgagtgaagaggctgtttgtgtttaacttataatattgagtgatccatgaagtaggttttcagagcaatattcttctgcattatagtaagagaaaaccatttttaatcttagttaaaattaaagtgaattagtagtatatcattttactatttgtacttttatgtaataaaatgcaatgtgttt

SEQ ID NO: 269511 - DNA, 5381 bp, Homo sapiens
ttcggggatttggcggggcctttgtctctggctgcagccggagctcctgctctcctcctcactgctcagtgtcctctgctcctagaggcccagcctctgtgtccctgtgacctgcagatattgggagatccacagctaagacgccgggactccctggaaacctagaaatgactgtgccataacacacatttgatgctgaaatccgggataggggaactcctttgggagtcgtgtcccttaaccccttcccccgacttcttgaagagacccacccgcgacctcggtacctcggaccagctctgtaaaagccccgcctctgccttcggataggtctggccccaccctggagtcttgcctcacagaactgattagaagagatcagagttttggctggtgcctttccggagtggttgctaacaattcccgaattccacaaggagataaatgggaaaaaaaggaaccactgacatttaaagatgtcgccatagaattctctctggaggagtggcaatgcctggatactgcacagcgggatttatataggaatgtgttgttagagaactacagaaacctggtctttttgggtattgctgtctctaagccatatctgatcacctgtctggagcaaaaaaaagagccctggaatataaaaagacatgagatggtagccaaacccccagtaatgtcttttcattttgcccaagacctttggccagagcagaacataaaagattctttccagaaagtgacactgagaagatacggaaaatgtgaatatgagaatttacagttaagaaaaggctgtaaacatgtggatgagtgtacggggcacaaaggaggtcataatacagttaaccaatgtttgacagctaccccaagcaaaatattccagtgtaataaatatgtgaaagtctttgataaattttcaaattcaaatagatataagagaagacatacaggaaacaaacacttcaaatgtaaagaatgtagcaaatcattttgcgtgctttcacaactaactcagcatagaagaattcatactagagtgaattcctacaaatgtgaagaatgtggaaaagcctttaactggttctcaactcttactaaacataagagaattcatactggagaaaagccctacaaatgtgaagaatgtggcaaagcctttaaccagtcctcacaacttactaggcataagataattcatactgaagagaaacccaacaaatgtgaagaatgtggcaaggcctttaaacaggcctcacaccttactatacataaaataattcatactggagaaaaaccttacaaatatgaagaatgtggcaaagtctttagccagtcctcacaccttactacacaaaagatacttcacactggagagaacctctacaagtgtaaagaatgtggaaaagcttttaacctattctcaaatcttactaaccataagagaattcatgctggggagaaaccctacaaatgtaaagaatgtggcagagcttttaacatatcctcaaaccttaataaacaggagaaaattcatactggagggaaactcaacaaatgtgaagaatgtgacaaagcttttaaccgatccttaaaacttactgcacataagaaaattctaatggaagagaaaccctacaaatgtgaagaatgtggcaaagtctttaaccagttctcaactcttactagacataagataattcatactggagagaaaccctacaaatgtaaagaatgtggcaaagcttttaaccaatcttcaaaccttactgaacataagaaaattcatactgcagagaaatcctataaatgtgaagaatgtggcaaagcttttaaccaacactcaaacctaattaaccataggaaaatttattctggagagaaaccatacaaatgtgaagaatgtggaaaagcttttaatcgatcctcaacccttactagacataagaaaattcatactggagagaaaccctacaaatgtgaagaatgtgacagagcttttagccagtcttcaaaccttactgaacataagaaaattcatactggagagaaaccctataaatgtgaggaatgtggcaaagcttttaaccgattctcaacccttactaaacataagagaattcatactggagaaaaaccctataaatgtgaagaatgtggaaaagcctttaatcaatcctatcaacttactagacataagatagttcatactaaagagaaactcaacaaatgtgaagaatttggcaaggcctttaaacagtcctcacaccgtactatacataaaattattcatactggagagaaaccctacaaatgtgaagaacatggcaaagtttttaaccagtcctcaaaccttactacacaaaagataattcatactggagagaacctctacaaatttgaagaacatggaaaagcttttaacctattctcaaacattactaaccataagataatttatactggagagaaaccccacaaatgtgaagaatgtggaaaagcttataaccgattctcaaacctaactatacataagagaattcatacgggagagaaaccttaccaatgtgcagaatgtggcaaagcctttaactgctcctcaacccttaatagacataagataattcatactggagagaaaccttacaaatgtaaagaatgtggcaaagcttttaacctatcctcaacccttactgcacataagaaaattcatactggagagaaaccctataaatgtgaagaatgtggcaaagcttttaaccaatcctcaaaccttaccacacataagaaaattcatacttcagagaaaccctacaaatgtgaagaatgtggcaaatcctttaaccagttctcatctcttaatatacataagataattcatactggagagaaaccctacaaatgtggagattatggcagagctttcaacctatcctcaaatcttactacacataagaaaattcatactggagagaaaccctacaaatgtgaatatggcaaaacttaattgatcctacaagcttactacacataagaaaattcatactggagagaaactacaaatgtgaagaatgtgttaaagcctttaacaagtcttcaactttttctgcacacacgaggtattttatactggtgagaaaccttacaatgtaaagaatgtggcacagcttttaactaatcttcaaaccttactgaaagttgagaaaattcgtactggagagaatcctacaaatgtgaaaaatgtggcaaatcctttaactgatcctcaacttttactaaacataaggtaattcatactggagaaaagccatacaaatgagaagaatgtggcaatgcctttaatcagtcctcacacctttctacacataagataatttatactggagaggaactctatagttgtgaagaatgtggcaaagcttttaaccaatcctcataccttactatacagaaattcatactggagagaaagcctacaattgtgaagaatgtggcaaagcttttaaccttccttaacccttaactgtagataagaaaattcatactggaaagaaaccctacaaatgtgaagtctgtggcaaagcttttaactgattctcaactcttactacatgtaagagtatttatactggaaagaaaccctacaaatgtaaaaaacgtggcaatgcctttaactggtcctcacaccttgctacatataagacagtttatactttgagagaaaccctgcaaatgtgaataatgtggcaatactttaaaccaatcctcaaacctcactaaacataagataatactgaaaactttacaaacctgaatgatgtgacaataattttgacaacacctcgaactttctaacataaatcatactggtgaaaaatcctagaaatgtgaaaaatatcacaaagcctttaaatggttgtcacacttgattgtaggtaagaatccatactgaagaaaactcctggaagtgtaaaaaatgtggcaacacttttaataaatgctcaccccttattgcacaggaaagcatttatacttcagaaagattgtacaaatacaaggaatgtggaaaagccattattatctgctcagattttactcaacattagagagttagtacgtaataaaagcattataaatgcaatttttgtcaagagatctttcagaaaatataagcctttaaagtgaagaagaggagccagttgtgctggctcacatctgtaatgccagcactttgggaggccaaggtgggtggatcacctgagggcaggagtctgagaccagcctggccaacatagcaaaaccccatctctattaaaaattttacaaaaattagctgcgtgtggtggcaggcccctgtaatcccagctaattgggaggctgaagcaggagaattgctcaaacctgggaggcgaagattgcagtgagctgaaatcacaccactacactccagccaaagcaacaagagcaaaaacttcgtctcaaaaacaaaacaaaaaaagagtattcattgtgaggacaaacaatacaaatacgaagagggttgtagtacctttacttgtatcacagatacttttgtacccattttgcactagaggaaaaccatgaagcagttgctcaaatgttgttcaacaccagaaaatttatattggagaaaagcactgtaaatgtaatgcatttgtgaaaacattttttaaaaaactacagcttagaaaataccagaggcctcatactaaaatatatttttgcaagtgaagtaaatataaaaataatttaatccaaaattaagtctatataaatatcagagaattcacagtagaaatatctaaggtactgacacttcagacattgctgagtatagaatcagaatgctgagtatagaaaataatttaaaactaaagttggtaggtaaataatgtgtatataactttaaaagaagtagaatttttttgtagatgtataattacattcaaattatattttttcttgaaaaattagtttttgaaaagcaaataatgatgtaattcaactcaaattcatgctcttcattcctattgtattcacatgtgaaagcatgtgattaatttttcatgcatcaaagatatgagaaatcatttctgttaggtcggtattatttatgacactttctatgaaagaataaggacattaaaatgtaagatgcatgatgaaaacctgagtgaagaggctgtttgtgtttaacttataatattgagtgatccatgaagtaggttttcagagcaatattcttctgcattatagtaagagaaaaccatttttaatcttagttaaaattaaagtgaattagtagtatatcattttactatttgtacttttatgtaataaaatgcaatgtgttt

SEQ ID NO: 269512 - DNA, 421 bp, Homo sapiens
ttttttttctatgtagtgtttgccttttttaatcgttagtagtctttctatgtattttatgtgataaatatctatgtaaatatctatatccacatatacctacatataaaatatttcttacctactcattactttacggtttttcctttttgtgttttatttaaggctttctctaactccaagatcacaaacataggatcttagtgtgaggtaggaattttattttattttattttccaaatgactagacaattatcttgatgctatttattgaatacttcatcttttctctgctgttttgaaatacttttttagaatagtaaattcccatataaatggcaaatcttcagatccacttacatagaagtggatctgaaaccaagagaaggaggaagtccatgaggagagaattggaattggt

SEQ ID NO: 269513 - DNA, 526 bp, Homo sapiens
gtgatccttctgccttggcctcccaaagtgctgggattacagatgtgagccacttcgcccagcccaccgttttattttttcttactcaaaaggaagtgagtatgaggtgaactgcattaacctaaagtgctgcagagataaacttaaagcaggaagcaacataccatgaatgtactgcaagggaacacatttgtgtcatgtgaagagacatgacaaaaacagccctccttaaattatttgtggcaatagtgatcacattcattttaattttgccggaatatttcaagacaccgaaagaaacctggggctacaaaaaggaaagacaactcttcgatcaaggagttttcagtcgggaggacaactgactggcaaacaactaaataaaatacaggaattaactgaaacagggatgtaaacaagatgcaatggaaacataagtattgcttccacgtcagtctttgggaggacgttccttgtatttccatttgcaaagagaaataaataattgtcagagttcaaatgatca

SEQ ID NO: 269514 - DNA, 966 bp, Homo sapiens
ttatggccgggagagcattgaatttgcaggtgctttcagcagagaccacgcagaggctgcctttggatcaagtccaggaagtgcttcccccaattccagaactataagttacttccacagtgcatcagtgagatcaatatacacgaatatccccgggcaagttggaccgagccctttgaagaatactcagaagtttattttgtgaatgagtagactggaaaatgtttgtgtccagctgaggatgcacagttggaaagcaggaggaatgctgactggttgatgaaaactagcttaagagcattcattcgctccatgagatcaagggaacaagagtgtttgcaagaagccattatgagtcatggaaaaaaagatgatgaaacccatggaaacagcaagagaattcccactctctctcttcttaaaaaaaatctatcattatacagcacagagtggagccaagtttttaattttgaggaaccaaaaacaggatcaaatatgaaaaccctttcttttattgggccacattgtagatgctgatttgataattgtttcctatgcagatagattatttttatttcacagattatttaaaagggaagagggcctggttgtttatttatatgtttgtttgcatttatgaatcttgctgccttttagcaccaggatgtttttaaattgggattctgaggtgggaggatcatgaggtcaagggatcgagaccatcctggccaacatggtgaaaccctgtctctactaaaaacacaaaaattagctgggtgtggtggtgcgcgcctgtagtcccagctcctcaggaggctgaggcaggagaatcacttgaacctggcaggcagagtttgcagtgaaccaagatcacgccactgcattacagcctggtgcagagcaagactctgtctcaaaaaaaaaaaaaaaaaaaaatcaaagataccaataaaacgaatttaaata

SEQ ID NO: 269515 - DNA, 1727 bp, Homo sapiens
gtgatccttctgccttggcctcccaaagtgctgggattacagatgtgagccacttcgcccagcccaccgttttattttttcttactcaaaaggaagtgagtatgaggtgaactgcattaacctaaagtgctgcagagataaacttaaagcaggaagcaacataccatgaatgtactgcaagggaacacatttgtgtcatgtgaagagacatgacaaaaacagccctccttaaattatttgtggcaatagtgatcacattcattttaattttgccggaatatttcaagacaccgaaagaaagaacattggagctatcatgtctggaagtgtgtttgcaatctaattttacctattcactctcctccttaaatttttcttttgtgacttttctgcaaccagtaagggaaactcagattatcatgagaatctttctaaatccctccaattttcgtaacttcaccaggacttgccaagacatcacaggtgaatttaaaatgtgctcctcgtgtttggtttgtgagtctaaaggaaacatggattttatttctcaggaacaaacatcaaaagttcttatcaggagaggatcaatggaagtgaaagcaaatgattttcattcaccttgtcagcactttaacttcagtgtagctcctctggttgaccacttggaggaatataacactacctgtcatctaaaaaaccacactggaagatcaacaatcatggaggatgagccaagcaaggagaaatcgataaactacacttgtagaatcatggaatacccgaatgattgtatacacatttctttgcacctggagatggatataaaaaatatcacttgttccatgaagatcacttggtatattttagttctattagtttttatatttttgatcatcctcactatccgcaaaatacttgaaggccagagaagagtgcaaaagtggcagagtcatagagacaaacctacatctgttctcttaagaggaagtgattcggagaaactgagagcattgaatgtgcaggttctttcagcagagaccacgcagaggctgcctttggatcaagtccaggaagtgcttcccccaattccagaactataagttacttccacagtgcatcagtgagatcaatatacacgaatatccccgggcaagttggaccgagccctttgaagaatactcagaagtttattttgtgaatgagtagactggaaaatgtttgtgtccagctgaggatgcacagttggaaagcaggaggaatgctgactggttgatgaaaactagcttaagagcattcattcgctccatgagatcaagggaacaagagtgtttgcaagaagccattatgagtcatggaaaaaaagatgatgaaacccatggaaacagcaagagaattcccactctctctcttcttaaaaaaaatctatcattatacagttgggattctgaggtgggaggatcatgaggtcaagggatcgagaccatcctggccaacatggtgaaaccctgtctctactaaaaacacaaaaattagctgggtgtggtggtgcgcgcctgtagtcccagctcctcaggaggctgaggcaggagaatcacttgaacctggcaggcagagtttgcagtgaaccaagatcacgccactgcattacagcctggtgcagagcaagactctgtctcaaaaaaaaaaaaaaaaaaaaatcaaagataccaataaaacgaatttaaata

SEQ ID NO: 269516 - DNA, 2009 bp, Homo sapiens
gtgatccttctgccttggcctcccaaagtgctgggattacagatgtgagccacttcgcccagcccaccgttttattttttcttactcaaaaggaagtgagtatgaggtgaactgcattaacctaaagtgctgcagagataaacttaaagcaggaagcaacataccatgaatgtactgcaagggaacacatttgtgtcatgtgaagagacatgacaaaaacagccctccttaaattatttgtggcaatagtgatcacattcattttaattttgccggaatatttcaagacaccgaaagaaagaacattggagctatcatgtctggaagtgtgtttgcaatctaattttacctattcactctcctccttaaatttttcttttgtgacttttctgcaaccagtaagggaaactcagattatcatgagaatctttctaaatccctccaattttcgtaacttcaccaggacttgccaagacatcacaggtgaatttaaaatgtgctcctcgtgtttggtttgtgagtctaaaggaaacatggattttatttctcaggaacaaacatcaaaagttcttatcaggagaggatcaatggaagtgaaagcaaatgattttcattcaccttgtcagcactttaacttcagtgtagctcctctggttgaccacttggaggaatataacactacctgtcatctaaaaaaccacactggaagatcaacaatcatggaggatgagccaagcaaggagaaatcgataaactacacttgtagaatcatggaatacccgaatgattgtatacacatttctttgcacctggagatggatataaaaaatatcacttgttccatgaagatcacttggtatattttagttctattagtttttatatttttgatcatcctcactatccgcaaaatacttgaaggccagagaagagtgcaaaagtggcagagtcatagagacaaacctacatctgttctcttaagaggaagtgattcggagaaactgagagcattgaatgtgcaggttctttcagcagagaccacgcagaggctgcctttggatcaagtccaggaagtgcttcccccaattccagaactataagttacttccacagtgcatcagtgagatcaatatacacgaatatccccgggcaagttggaccgagccctttgaagaatactcagaagtttattttgtgaatgagtagactggaaaatgtttgtgtccagctgaggatgcacagttggaaagcaggaggaatgctgactggttgatgaaaactagcttaagagcattcattcgctccatgagatcaagggaacaagagtgtttgcaagaagccattatgagtcatggaaaaaaagatgatgaaacccatggaaacagcaagagaattcccactctctctcttcttaaaaaaaatctatcattatacagcacagagtggagccaagtttttaattttgaggaaccaaaaacaggatcaaatatgaaaaccctttcttttattgggccacattgtagatgctgatttgataattgtttcctatgcagatagattatttttatttcacagattatttaaaagggaagagggcctggttgtttatttatatgtttgtttgcatttatgaatcttgctgccttttagcaccaggatgtttttaaaaaaattcaaagaggccaggcgcagtggctcatgcctgtaatcccagcactttgggattctgaggtgggaggatcatgaggtcaagggatcgagaccatcctggccaacatggtgaaaccctgtctctactaaaaacacaaaaattagctgggtgtggtggtgcgcgcctgtagtcccagctcctcaggaggctgaggcaggagaatcacttgaacctggcaggcagagtttgcagtgaaccaagatcacgccactgcattacagcctggtgcagagcaagactctgtctcaaaaaaaaaaaaaaaaaaaaatcaaagataccaataaaacgaatttaaata

SEQ ID NO: 269517 - DNA, 1925 bp, Homo sapiens
gtgatccttctgccttggcctcccaaagtgctgggattacagatgtgagccacttcgcccagcccaccgttttattttttcttactcaaaaggaagtgagtatgaggtgaactgcattaacctaaagtgctgcagagataaacttaaagcaggaagcaacataccatgaatgtactgcaagggaacacatttgtgtcatgtgaagagacatgacaaaaacagccctccttaaattatttgtggcaatagtgatcacattcattttaattttgccggaatatttcaagacaccgaaagaaagaacattggagctatcatgtctggaagtgtgtttgcaatctaattttacctattcactctcctccttaaatttttcttttgtgacttttctgcaaccagtaagggaaactcagattatcatgagaatctttctaaatccctccaattttcgtaacttcaccaggacttgccaagacatcacagttcttatcaggagaggatcaatggaagtgaaagcaaatgattttcattcaccttgtcagcactttaacttcagtgtagctcctctggttgaccacttggaggaatataacactacctgtcatctaaaaaaccacactggaagatcaacaatcatggaggatgagccaagcaaggagaaatcgataaactacacttgtagaatcatggaatacccgaatgattgtatacacatttctttgcacctggagatggatataaaaaatatcacttgttccatgaagatcacttggtatattttagttctattagtttttatatttttgatcatcctcactatccgcaaaatacttgaaggccagagaagagtgcaaaagtggcagagtcatagagacaaacctacatctgttctcttaagaggaagtgattcggagaaactgagagcattgaatgtgcaggttctttcagcagagaccacgcagaggctgcctttggatcaagtccaggaagtgcttcccccaattccagaactataagttacttccacagtgcatcagtgagatcaatatacacgaatatccccgggcaagttggaccgagccctttgaagaatactcagaagtttattttgtgaatgagtagactggaaaatgtttgtgtccagctgaggatgcacagttggaaagcaggaggaatgctgactggttgatgaaaactagcttaagagcattcattcgctccatgagatcaagggaacaagagtgtttgcaagaagccattatgagtcatggaaaaaaagatgatgaaacccatggaaacagcaagagaattcccactctctctcttcttaaaaaaaatctatcattatacagcacagagtggagccaagtttttaattttgaggaaccaaaaacaggatcaaatatgaaaaccctttcttttattgggccacattgtagatgctgatttgataattgtttcctatgcagatagattatttttatttcacagattatttaaaagggaagagggcctggttgtttatttatatgtttgtttgcatttatgaatcttgctgccttttagcaccaggatgtttttaaaaaaattcaaagaggccaggcgcagtggctcatgcctgtaatcccagcactttgggattctgaggtgggaggatcatgaggtcaagggatcgagaccatcctggccaacatggtgaaaccctgtctctactaaaaacacaaaaattagctgggtgtggtggtgcgcgcctgtagtcccagctcctcaggaggctgaggcaggagaatcacttgaacctggcaggcagagtttgcagtgaaccaagatcacgccactgcattacagcctggtgcagagcaagactctgtctcaaaaaaaaaaaaaaaaaaaaatcaaagataccaataaaacgaatttaaata

SEQ ID NO: 269518 - DNA, 586 bp, Homo sapiens
gagggaatgctttctaacacatttgaagccagcattactctgttactaaaaaccttgcaaagacattacaagaaaggagaattatgagtcggtatccttcatgaagatagattcaaaaggtattaacaaaacattaacaaatcaaatccaacaatttagaaaacaattcatcatgaccaaatgtgttttctttcaggaatccaatacaatttaacattagaacagtaaacaatgtattttaccatattaacaagctaaaaatgaaaatcatataatcatttccatagatacagataaagtattggataaatttcatcattaattcctgatgagaaactttcaagtaactaataatagaagagaactctttcaagctgataaagggaatgtatgaaaaatctataggcaacatcataattgattatgaaacactgagtgttttcctcttacaatcaagaaagtcaaggatgtccactattaccatgtctatttaacatttcactggaaattctaactagcacaataagacaagaaaagcagatgacatgattgtcccatggaaaattcaagggaatccatgaaaaaa

SEQ ID NO: 269519 - DNA, 240 bp, Homo sapiens
agattcaccacttactatagctagacaccatgtctggcacacagtaggtgctcagtaactatctgttctactagccatgaggccttgggcaggtacttaccctcctaagcctcattttcttatacaaaagagaataatataacctacacctcagaaggctgctgggggattcaatgagaaaacataaataaaaatgcttcagcaccatacatggcatacagtcagttttaccagaatata

SEQ ID NO: 269520 - DNA, 1779 bp, Homo sapiens
aaagacctttcttcatggctcagagtttaatcgacatcagaaaattcatactggtgagagaaactatgaatgtaaggaatgtggaaagaccttttttcgtggttcagaacttaatcgacaccagaaaattcatactggaaagaggccatatgaatgtgaagaatgtggaaaagcctttctctggggttcacaacttactcgacatcagagaatgcatactggtgaggaaccttacgtatgtaaagaatgtgggaaatcttttatctggggttcacagcttacacgacataagaaaattcatactgatgcagaaccttatggatgcaagaaaagtagccacatctttagtcaccattcatattttactgaacaaaaaattcataatagtgcaaatctctgtgaatggacagactatgggaacacctttagtcatgagtcaaactttgctcaacaccagaatatttacacttttgagaaatcctatgaatttaaagattttgagaaagcattttcttcaagctctcacttcatttcactcttgtgaaatattatataaaagtgtaggaagggctttattcatgactcattaattgatgtcatttatttttttctcttgaggaacaccacaaatgtaagtaatattggaaggcattttaacagagcacacatccagcagcagcagcagcagcagcagcagagaattcatcatgcaatcaatataggaaagaaattactgatcagttatcaattgcagaatatcagggtaaaattttatgagatagcatgaattctttttgaatcattctcaaaacattctcatcagagatgttgcataaagaatttatatataatttggccaagcatggtggctcacacctgttatcctagcactttgggaaacagaggtgggtggatcacctgaggtcaggggttcgagaccagcctgaccaacatggtgaaaccctgtctctactaaatatacaaaaattagccgggcgtggtagcacacgcctgtagtcccagctactcgggaggccgaggcatgagaattccttgaacctgggaggtggaggttgcagtgagccaagatcacatcactgcactccagcctgggtgatagaacaagactccatctcaaaaacaaaaacccacaagaatttatatataattcattttggaaatctttcatcattagcaaaattctgttgtatttccacaaaaatcatgtaattaatctagaaaagccttgaactatgtcatacaatttatttggcatgtcttgtttcaatacatcctgcctctatttttttttttggaaagtatcttaaatctatgtctgtttaatcgtattcattagattataagggttgaatgatttgagatttacatgacttagtgactgtcatttgtattggtattaagccattttatgagaggaggacttttaagactataatgattatagacaaatatgtcatctctatttatgtcttactgaacatcagaatgttaattctgaaaaaaaatcagtaaaatacaatgaagaaagctttgaatattaatttcacatgctacatcaaaaaaacctataaaagaaagccttatgactttagtaaaagtggggttgttgagtgttcagcagttttttaaaagacattcagaaataacttctctctaacaaatttctaaagccaagtgttatataattctttaccacagttataactcagaaactagcaaatggatagccatatggattcttacctctttgaaatttac

SEQ ID NO: 269521 - DNA, 207 bp, Homo sapiens
ggccaggtggaaccaaacccattggacttgaacagaacctcgccttccccttcctgtccactcttctctgtgtcaggtgtgcagtgtgcacagcagcaggatctataatatccagactttccaaataagttgaatgtctatcaattagaacatcttttcgtacatcctgccatccctactgctggtaaacactaacatgttctctgt

SEQ ID NO: 269522 - DNA, 471 bp, Homo sapiens
caagatagggcaggaatgggatgaaaggggactggcctgttggctaggtcagcaaatttgtctgtgatttacagcactaagctcaggatttgacttgattagaatttgattgcctttcatttgattcaagttggagccactgctccgggctgttctatctagtggatggaccatagaagcagggatctcatgacttagcaatattaaaacctcaggcaggtggcttgttggtctgagcagcctctaaatttgtacaaaagcctggtggctggctgggttggtaaaaatggcagctgtcctgcatgctgacattgggagttactctgcactgctgcaggctgtcctggcacactgcaggccgggcatcatttcatggtggaggacgtcactcagttttgcatgaggctcttgcatcacatttgtatttaaggaattcacaccttattttagggaaaacatctgttccttggt

SEQ ID NO: 269523 - DNA, 305 bp, Homo sapiens
agcagaatgctttgaatgacaaagcaagaaagaattcaaagatgacttttcaaggtgttgatgaacctgaagaacctggattatcatgatgagaatgggaaaaaagggaagccacacagcaggtatggggttgagaatgaacttgtttgtgtgatgtgaagagtgaatgtgggagtgagaggcccatgagcagggaaaaggaaatgctgatgaaggtgaagtccagctgccatggttataaagggactgggaattagatccaaaacctgaaatcatgcaatgcctggagtatttttatactacaa

SEQ ID NO: 269524 - DNA, 538 bp, Homo sapiens
gcaatcaccagagaatatcactatttgctctgtgctccctcaacacttaaaccatgcctctttataacatttagatcaccgtccttataatgcgcctttctgtctctttttaaaccttgagcaccttgaaggcaaaaatttcaactttctttccctagtgtcttgcactccctggtatctagcacatagagagctcaataaatgttttttgaatgagtaaatcattgcacgaatttataacttcatgaacccatggaacccattgactggtctgccctcatctccgatccttggctgaaaagcctaacaagccattatctgtccgtactgaaacactcctcctgatgtcaagaaccttctaaacataaaaccacctggtgcacggatcatttcttcttccaagatgtatctgccattgagagaaagaacaaatactagcttcagctttgtttgtaatactcatttgcaggaaggcaaacatgattatatatgatttaaatggaataaatgtatagtaaggagaacaaatgagtttatt

SEQ ID NO: 269525 - DNA, 700 bp, Homo sapiens
aaaagaggcgtccctcaacacgtccctccctattcattgcagaaccaactcaaacaggggctgcttctgctcaggcacccgctgggcaccctctgcagccctgacttcagggccatgctcgctggggccgtgtggcagtgcctctaaatgggacccattgtctcacactggttctgcaggtgtgcctcctgccctctgggagcttgtgactttgagcaccgtgaagggcaggggatggcggcacagacgctcaggctcctaggggctctgaggccaaggctccttatgtctacatgtgtgaggtgccaggtaatttctgatgcccctggggtgtaaaaccagctaatccagaagccctgtgacctgccaggatcaggctgctgagaccaggccagaggataagcgggtcctccttcccggtgggtcctggaggaggagagagagtccacttctctcccactcctggctgcccaatccttagggtcaacagaagcttaaatggaaaggtcctgcctgccctctgctcagggtagaggaaaactaaataccctgggatcagagtaggggcctgtacctcctctcctcctcctcctcctcagggaggagactgatagttccggcaagaagtaaggtgggatgcagttggggtgggaggaatccacaagctggggagaatcatggctcactgagctaaaaaaaa

SEQ ID NO: 269526 - DNA, 268 bp, Homo sapiens
agtcaaatcgtatttgtaaaaggagtagagtgaaagacagagctttacttttttgtcatgcaacaggattccatctgagatgaaacttggagccatcacctttcccactcagacctgttccattttcacaatgtgacctcttcagagagcaaaatcaataatgtgtctgtctcaaaagctctggttgtgatacttacttttaaggcttatcatgactttcataaaaacagcaataaatgtcctaataaatgtgcaattctaaataaca

SEQ ID NO: 269527 - DNA, 503 bp, Homo sapiens
atcacacttcttggtatttatccaaatgatttgaaaatttatgcctacatgaaaactgcacataattatctagtagctttattcatagtttccaaaatttagaagcaaccaagatgtcttttagtaggtaaactgataaatatgtaccacatccggctagtagaatgttattcagcagtaagaagaaatgagcctaccagtcatgaaaatacatagaagagggccaggcgcggtggctcatgcctgtaatcccagcactttgggggctgaggcgggtggatcacgaggtcaggagatcaagaccatcgtggctaacacggtgaaaacctgtcttcactaaaaacacaaaaaaaattagccaggcgtggtggtgggtgcctgtagtcccagctatttgggaggctgaggcaggagaatggtgtgaacccgggaggcggagcttgcagtgagcctaggttgcgccactgcactcagcctgggagacagagccagactccatctca

SEQ ID NO: 269528 - DNA, 471 bp, Homo sapiens
cagtcttggcacacctggaaatattagtgtgcacccaccatcaaagggacatgcatttcattcattcatcaattcattcattcaagaaacatttattaaggatctaccatgaaccaggcactattagaggtgcttacaccagtttgatcacactaacttcatgtaaatcaatactgaaaaatatcgtccaggcgcagtggctcacacctgtaatctcagtactttgggaggctgaggtgggcagatcacttgagcccaagagtttgagaccagcctgggcagcattatgaaaccctatctctacaaaaaatacaaaaagtagccaggtgtggtggcacatgactatggtcccagctactcgggaggttgaagtcgggggattgcttgagcccaggaggttgaggctgcagtgagccgagatcacaccactgcactccagcctgggtgagacagtgagacccctgtctccag

SEQ ID NO: 269529 - DNA, 502 bp, Homo sapiens
aaagaccacagtcaggccttgggaggatttctcattagctgtatgctctggtgggtacccagatccccctttcagaaccgaggcactatttccccacctactggaagtgttgtctgctgatgactcacggctaagtccctctactggacttgactgctggtgcaggaagctgccctctccaaggagaagagatagactagaatcctcgaggacctgctcccagagaacatttggagatgtcctaagacaattggctatgtggatagggagatctggtttagggaccatatcatacagacagtagaagccatggatgatctcattccaggagcacatatacagtgggaagagaatgaagctgaagacaattccagctccaaagatagtgacaagagctgttcatcttcatcatcctctctgtaggcatcttgaattagaagatactatttagtgtggtctcttacccaagataaataatctaagtttccgtaatctttcctca

SEQ ID NO: 269530 - DNA, 399 bp, Homo sapiens
tgtttccatgaactcttgctcttttgaaggtgtaacttatgctcacatgaatagcacattatgctactaacttattagtagttttaaaagaaagcaagaggacaagaacatttatttcagagactctgttttcttttaaaccctaacggttgagtcaaacaaagtcttttttgtaaatactgtagctaaatcttggcatgcttttactttaagcaagggaggagttttactgacatttggatgtgctagatatttttgacatcaatccccaagatgatttcttcttgaaggttctctggctttttactatctttcctaacggtcacatttttagtttaccattagcaacaggaaaatatttaactgctggttttcagcatttattgggtagaccattat

SEQ ID NO: 269531 - DNA, 277 bp, Homo sapiens
acagttacatcaagtctgtcttcattattcatccctatgtttttcctcatcactggaacaatgtttccccacattgcttcatggcagcatcttactcattgaagatctgtttcaaatgatacctcatttctaaggcttccttcaaattcccttgttaaaataggcctgtcttccaggtacaaaatataccttagttacagattttatgacaggctgtcttgtgtttctgcccctcgtgtatttttctgccttctcgaacccacactagatctcctat

SEQ ID NO: 269532 - DNA, 204 bp, Homo sapiens
aaaagacttacccagggtcacacagcactggccacaggatgctctcctggttctacctagaagcctcatagtgagtgtctagaactaaagagacaggccaggtgtggtggctcatgcctgtactcccacatcttggaaggctgacgcaggtggatcacttgaggtcagcctggccaacatggcaaaaccccatctctgctaaat

SEQ ID NO: 269533 - DNA, 430 bp, Homo sapiens
gaaaaagaaaaaagaatccacagattcctcgacccacccaagaccaatcaagtcggaatcccgagggtgccccaggcatctctggctttttaaactgccccgctgattctaatgtgctcgcaaggctgaaatcactaatttagaagatccaggtgacatttccgcacagacctcctgcttcctgttctgaaacctctcactctggacgaagcacgagggtctgtttggaggaaggaatcctaagagggcagtggacaatccttgatgctggtattgctgtggacacacgggaaaggcacttcaatcaagcagctagaaaggacagcttgggatgcagcttggaagagtggccgagagggagcagccgaaagcaggcaggtggtgtaattcattggttctgctggtgtaattgatcatcagagcccacctc

SEQ ID NO: 269534 - DNA, 420 bp, Homo sapiens
gagcacatgtttgatcactttgacttttcataatgaccttagcatatatactgggtaaacagctctgaaaatgtgagaacagtaagagtataccattcattggtaattttttgaggaaaagttcattgtttaggagaactataggttaactcatgaactttaaccatccttgtcataaatactgttgacctcagagcaaaataccccagaattagcaccaacatctacatgcatatttactgtagacttcaaactgcagattttgttttttcatcttgatcacaaatgcatttttcaatctttacaatatgaaatttatttataactttagttccaaaatggactctgtaatgcatttgcccatatttttagtcgtaatggatgtgattatattttattgaattaaaaatctaacagaag

SEQ ID NO: 269535 - DNA, 676 bp, Homo sapiens
tttacttccagtagagactggctaggggagatcctgctggactcaccccaacccagaaaacaactgtaaagtctagacataatattttaaaaagctacctgaaagtactaacgagtgaagagaagcaggcagattttggaggaagaaagctgtaaagtgagtccccattttcaaggtgcaagggtcaggtactgtaagaatggtaagcaagggtacagaaatactggtagaaaaatagtttttctggcctgaggaactagaacactgaaggtcagaaaaccacagcctttggccaagggggaaggggattccagaaagaaaagaatcagaaaagaaagacccaaattctgtctactcacatctttggctaaccactgagtcacacatgtacggaacaaatttcaaagcagttcaacaaaacacaaaatatttgaactgagaccagagcttccacttaagaaacagagtttgcagttctagtctaaccaagataattacctgtcaaatatcaacaattgaaaactttctcaaaagaaaaaaaaaatcaactctagaaagtattcaaataaaccaataaatagcatgaaaagaatatcagagggacaaaaacagaaaggacaaattaaaaaggaataatacaatggtagacgcaaagttaaaagcaataattgcatta

SEQ ID NO: 269536 - DNA, 586 bp, Homo sapiens
gcccaggctggagtgcagtggcatgatctaggctcaccgcaacctctgcctcccggctttaagcaattgttgtgcctccatctcccaagaagctgggattacaggtgcgcaccaccatgcctaatttttgtatttttagtagagagtagggtttctccattttggccagactggtcttgaattcctggcctcaagcaatccaactgtcttggcctcccaaagtgctggaattacaggtgtgagctgcctcacctggcctggaaaaacagcattcaaacatgagataggaccttcaccagaaaatgacttttatgtcttcagaatattaatgttctttcccatcatcctatatccagacagattttttttgtttcaataagtattctgattccttccattaagttgatataattgtttagctagtatttatcgttgagtaactgttacaaccacagtgttggagctgggaggttaaacacaaaagcaagtagctgtcttatgatagaatgtgtctgaaaaagcacagtgggagccatcaaaagaagttaacagttctatctgggagaacagaggagtctttatcagg

SEQ ID NO: 269537 - DNA, 904 bp, Homo sapiens
ctgagattgtggcacggggtgtgtagtgggcaccaaggccaatcacctcactctccctgggtcagttggagttgtccacgtggatggaataggtgagagagtgtgtgcaaagacgggaaggtgagagagaacctggggccttaaggagagcttcgattctttggccgtgtttgtaggcttagggcctatgtgagagtgtcaaaagacagtgatgaagtaggaaggccccagatgttgaattttaaatgcagttgataggaagcctttgaaacaatatatatatatatatttttagtagagatggggtttcaccgggttagccaggatggtctcgatctcctgaccttgtgatccgcccgcctcggcctcccaaagtgctgggattacaggcaggagccaccgcacccggccgcctttgaaatattttaagcagagaagtagccagagcaatagttttcagagcttaatgtggtggatgctgtgtttactgtcaagattcgcttcaaagaaagactcggtgcccagcctcttgggagtgaccgctttagccattgcctcagctgcagtgaaccaccttactcaaaggatggagatggagggtcccacatccagggactaatgaggtgggaataggaagattgagccatctaggcccaacttaggacaactctgagagccatgttacctccagagctcaccatggggttagtagaggcgattattgagcctgctttgcaactcaactttctcctctgctcactcctgcttccttctctactctgcaatctgggcctttctcactgtctctctgtgaagttggcgaggctctatttggtgtcccttgatgtgcttaggtctggaaattgtttccaggtggggagcacaggcaatcatggggctcacg

SEQ ID NO: 269538 - DNA, 422 bp, Homo sapiens
gggaaggcaaaggaggagagagagacatattttcctttttctgagttttgtcagagagagatcttttttgcaattactcatttggaatttgaaaggtatcttttgtagatatcacctggtgggtagccctgtcaatatggttactcaacaacaaagtcaaaatgaggaagaccatatggttaaattttcctgagctactcttcgattcctatatgatgtagatggcaactcagaaacagctgggaagtttgtggcagggacagggtgatcactactctaggaatatatagctctacaataagggctggagagcaggtttccttggctagtactgaataaggaccacaacagacctcagagacatctatagaaattagtgggacctgatgtgagaccagttcagcaagggaaccctcttctcc

SEQ ID NO: 269539 - DNA, 347 bp, Homo sapiens
ttgtataattgaacaggaagctcatgtttatttccagtttgctctcaggaaagaaagcagtaatggggtgacagggaggatcctgttctttgaaggacatgctgagagggaatagtcggtgtgaggggccgtttagcctaatggtgaaatgcttagtcaactggaacctgactgcctggctccaaatgctggctttgccacatgtggcctgtggaaggtacgtagacatttgtgcctccgctgcctcatttataagttaatgacaggaagactacctacttctcagaggcatgatcagggataaataagtcaatgcccattaaaaaaaaaaataacagtacaggtgt

SEQ ID NO: 269540 - DNA, 587 bp, Homo sapiens
agagccttgtatccctgtccagggcattacatttcatgaaggcaagaacagaccaaatcctgtggacttttggcagtctctggggctttcatgtgaacctgtttcaactcctgaggccaaatatgctctatgtgtcacccggagagtcccagctaagaggccaaatgagtaaaatgcaagacatgaagctgggaggggtcggaatgctgatctgacctcaggctgctggagagaagttaactagctttttaaaatttttatttatttttttaagagatagtgtcttgctatattgcccaagctgaacttgacttcctgggctcaagtgagcctcctgcctcagccttctgagaagctgggactacagaaatgtgccactgcacttggctggaaccagcttttgaggcattctttgcctctgaagaacctaggatgaagttcctcttacctgaggaagcggagaagcttccagaggctttgactgtgctgctttctaacccatgagcctgctgtttccagaaggaacactctattagtctgttctcacactgctataaataaatgcctggcactggataatttaaaaa

SEQ ID NO: 269541 - DNA, 835 bp, Homo sapiens
tgttagcatatatttcatcttgtgtctgtgtatgagtgtgtgtgtttctgtggtccttcactttcactgaattatcataccataaaggagacctcagaacaggtcacagccagcgctggtggtcagaatttgcttcacccctgccctgggccctatccgctgtcagctgcctgagctgaagagagatgcgtccagctcagaccctccgcctgctgagtaggctgggtggaggaacaggatctcccatgtctaagccaaacctgttttaagccacaattacccagtttcaattccagccctgcttggtcagcatcatgtgttcctccacgttcctcctggtagccacagactgcgtggctagtcaggccagcagcaaaacaagatatctgggagtctgctgagggttgaaggaatgcccatcgtctattctgtgtacagtattgtttttatttttgttttgttttttgagacggagtcttgctttgcactccagccgggtgacagagcgagactgcctcaagaaaaaaaaaggaaagaaaatcaggctccaacaataagagaaatatattacctcatgtaacaagaagccccaaagtagagtggctgcaggttggtgtaaactctgccctcaggccagggcccccatggttgccaaagagcatcacctggatatggtaatgtcctgccgagagagcatcagttgctttctatgtggctctttttaggagtaagccaatctctcccagatgtcacatgccctgtcctaatccaagtccctcagggcactggaatgaccagaggctctcaaagtgtggttccccagaccagcaccatc

SEQ ID NO: 269542 - DNA, 417 bp, Homo sapiens
ggctgaggtaggagaatcgcttgaacccaggaggcagaggttgcaatgaaccaagatcacgccactgcactccagccgggtgacagagcgagactgcctcaagaaaaaaaaaggaaagaaaatcaggctccaacaataagagaaatatattacctcatgtaacaagaagccccaaagtagagtggctgcaggttggtgtaaactctgccctcaggccagggcccccatggttgccaaagagcatcacctggatatggtaatgtcctgccgagagagcatcagttgctttctatgtggctctttttaggagtaagccaatctctcccagatgtcacatgccctgtcctaatccaagtccctcagggcactggaatgaccagaggctctcaaagtgtggttccccagaccagcaccatc

SEQ ID NO: 269543 - DNA, 292 bp, Homo sapiens
cggccgcccgggctaagagcggccggctggagccgctgagcccccgctgcggccgggagctgcatgggggagcgccggcagcgcttgggaagatgccccggccggagctgcccctgccggagggctgggaggaggcgcgcgacttcgacggcaaggtctactacatagaccacacgaaccgcaccaccagctggatcgacccgcgggacaggtaggaccctggaaccctcctccgtgcccccacacccccgcctgggcccccacctgcccctggagccgccggccgggactg

SEQ ID NO: 269544 - DNA, 700 bp, Homo sapiens
gcggccgcccgggctaagagcggccggctggagccgctgagcccccgctgcggccgggagctgcatgggggagcgccggcagcgcttgggaagatgccccggccggagctgcccctgccggagggctgggaggaggcgcgcgacttcgacggcaaggtctactacatagaccacacgaaccgcaccaccagctggatcgacccgcgggacaggtacaccaaaccgctcacctttgctgactgcattagtgatgagttgccgctaggatgggaagaggcatatgacccacaggttggagattacttcatagaccacaacaccaaaaccactcagattgaggatcctcgagtacaatggcggcgggagcaggaacatatgctgaaggattacctggtggtggcccaggaggctctgagtgcacaaaaggagatctaccaggtgaagcagcagcgcctggagcttgcacagcaggagtaccagcaactgcatgccgtctgggagcataagctgggctcccaggtcagcttggtctctggttcatcatccagctccaagtatgaccctgagatcctgaaagctgaaattgccactgcaaaatcccgggtcaacaagctgaagagagagatggttcacctccagcacgagctgcagttcaaagagcgtggctttcagaccctgaagaagtaagtacaccctgcat

SEQ ID NO: 269545 - DNA, 534 bp, Homo sapiens
cggacaatatgttcccgagaagcaggcagggatagtgctctacctccttggccagaaagaaaatgactaagtgagcctcacaaaacaacaccttggagaaatcagaagtggctcgcagcagggaaatttggggcaagagaaattctcctctggacacacagggctcctggaagtgccccacttctcagatgcataagtgcaaatacctccacctcctccccccatgttaacccctggggtcttcccgctgttcacagcataatatctgaaacccttaacttcttttacagggtctttcacatgtgacttcctctacactgagtcttcaaagagagtcaggggttgtgtgtttgtgttttttgtgtgtgtttcttttgagacagggtctcgctctgttgcccaggctggagtgcagtggcatgatctcagctcactgcaacctctgcctcccgggttcaagtgattctcgtgcctcagtctccagagtagctgggatgcgccaccaccacacctggttaatttttgtatgtttag

SEQ ID NO: 269546 - DNA, 595 bp, Homo sapiens
tatttctttgagacagggtctccctctgacacctgggctggagtacagtggcgcaatcactgctcactgcagcctcaacctcccaggctcaagcagtcttcttgctcagcctcccaagtagctggggccacaggcatgcgccaccatgcccagctagcacgtctgtttctgtgcgcaaatctccccttttcataaggacaccagtcactggattagggcccaccctaatgacctcattttcacttcaggacctctgtaaacacccacctctaaatgaagtcacatgctgagggatgggggttcaggatcccaacctatccttgggggtggaggacacaatggaattcataatgctcccgaagtggttttcggcggggatcgtgaattaggtgtccagcgcgtaacacacagacaccatctggttctctgtgtgagaaggagggggttgcagcacacccgtcatgaataccagctctggagcaggacagacaggttcaaagcctggctccaccccgaccagctgcatgatcctggccaagtcacatcacttctctgtgactcagtttactccttgtaaaaaaaaaaaaaaaaaaag

SEQ ID NO: 269547 - DNA, 490 bp, Homo sapiens
tgacaccttgatgtgctgaatactttgaactgaagattggaaaggcctcaggagcaaagtctctccgaccttctcctgcccttctttctcccctgaagggagtcatagaaaccagaatttctccatcacaagccgggtcatagaaactagaactcctcttccccaaagcgagctgtaaaacctaaaaaggccacactctttcccttctccctttgcccttaaagaacctcaattcagagggcccctgacccacgggaggcggggaatgctttacagagacaccaaaaagcatctgaacagacaggcctcactggctttccccatgtcaattaccattcgatcacacccttttgtccaatcacatttctacatggctgtctatccctaactataaaatagacggttttccctggatctttgggtcttcatttctgcaggctcccatgtcacacagaattttgattaaataaatttgctactcttttatgtt

SEQ ID NO: 269548 - DNA, 904 bp, Homo sapiens
accacgcccggcccagaactggattttaaaaggaagtgcacagatgggcctaggagaggactcaggggcctgactgattaaagcttggccaagcacagaatctttcccactctccagaagctcaccctgacctctccttttcactcaggccctgtctctcattaacagccagtagcttattggtgatcctagatgcagcctgcaaccttttgtacaactcacagaagcactgatttgctgtcaaatggtggaaaagttcaagctgccaaactttttcttaaaggaccaaacagtgaatactgtaggccttaactgttgcaacaccatagcctctgttgcaacaactcaactctgtccttgtagtacaaaagcagccactgacaatatgtccataaatgaatgcgcatggttgtgttctaataaaactttatttacaaacgggcggcaggctcatttcagctccgtcagtttgctgacgcctgattttaagcatagggtgaccagtcgtcccagtttgcccggaactttcttgattttagcactgaaagtcccatattccgtgaaactcagccccagtaaaccaggttggccctgctatttaagcaacacttgcattatcccattcaaaactcacactaccttgtgggggtcaggtcaccgcccagtggatccaccttgcctgctgcctagacagagccgatttatcaagacaggggaattgcaagggagacagagtaattcatgcagagcaggctgtacaggagacggggatcagagtttttaacgacaatttggcgggtaaggacttgggaagttgggagtgctgattggtcaggttggagatacagtcatagggggttgcagtgaggttttcttcatgtcttctgttcccggctgcgatggc

SEQ ID NO: 269549 - DNA, 322 bp, Homo sapiens
cttctccttcctgttaccaaaccacctccctcccttctttacagctgtttgggagcaacatgttagaagcggagtgtgtgtgtgtgtgtgtgtgtgtgtgtgtgtacatcgggtcctcccatgtgtggtgttcttctggaggttgtctctttggtcaaggtgaacttttaatgtttattattttcttctccgcacaaagtaaagagcctaattttgtgtattctggtggctgctgtcatgagatgataaaatgtaaaacaaaactctagtcaacgtagaaagagttaactgtgctgaaaaactaataaagaacctaagaaga

SEQ ID NO: 269550 - DNA, 358 bp, Homo sapiens
tggtgctgttatttcatattaaaatgagaaaaagaacaagaacatgagaataaatgaattcttttcctctcaaaaacaacatccaatcaaaatacctaatgaaaaatgaagatgacacataatgcaatttttgtatgaatagttcttttgattaattatatagaagatctaagatgaccttctttcaatggttgagagatctgtcaagtgtttttacagtgataggatagagaatagtcactcagacacacatatacacacctcctatatctgcatgcattcatacacacacacacacacacacacacacacacacacacacattacagataagtatatatatggaaaaatatgtata

SEQ ID NO: 269551 - DNA, 488 bp, Homo sapiens
atcagtgtagactcatggatttttattttattcagtgagttataatccattactgtcctcaattattttgatcctcaaattgtcccagatttggccagcagaaggtcccttccgtgtcccgatcattttttgagcacatcctttctctctggcatcacaagatgttccaggttcatctcgtacgaaccgggaatcagccatttctccaaggagccctggtttcctggagcaggaaatgtttagaatccaagatctgggcaatagatgtgctccttggtactgaggtgtcattgcttttaagtccttccagcaaagagagctaaggaatgtgtctatgtggctgggcgcaggagctctcacctgtaatcccagcactttgggaggtcaaagccggaggatctcttgagcccaagagttcaaggctgcagtgagttatgattgcaacactacattccagcctggatgacagactgagaccctgtctctaa

SEQ ID NO: 269552 - DNA, 2912 bp, Homo sapiens
  misc_feature (1)..(2): n is a, c, g, or t
  misc_feature (6)..(7): n is a, c, g, or t
nncacnnggcgcgtgcatcagcctctctggcgggggattctccccggactccggccagcgccaatcaggtcgcgcggtacctgcccccagccctggccacctggaggggcgatgaggctccacgcccggagcagggcagtcctcggagcgccggggaggccgcggagcctcacgtgtgccgccccagccgctggcgcccggaaggacgcgctgcgaccccgtgggagccgaacgcgggagtcgctgcccgagcggagctgctcagccgcgggactgatgcccttggccagacgcacccccaactgctgtctgctcaggtgtagcccgcgtgactgagtcaccgctgctccagctgtttcacgtcgccgttccctttactgaatagtttgatggggcgccgggcggatgacagcgggaacggttgtgatcactggcggaatcctagctacggtgatcctcctctgcatcattgccgtcctgtgctactgcaggctccagtattactgctgcaagaagagcggaaccgaggttgcagacgaggaggaggagcgggagcacgaccttcccacgcatcccagaggccccacctgcaatgcctgcagctcccaagccctggacggcagaggcagcctggcgcctctcaccagcgagccctgcagccagccctgtggggtggccgcgagccactgcactacctgctccccatacagctcccccttttacatacggacggctgacatggtgcccaatgggggtggaggcgagaggctctcctttgctcccacatactacaaagaggggggacccccatccctcaaattggcagcaccccagagttacccggtgacctggccaggctctgggcgtgaggccttcaccaatccaagggctattagtacagacgtgtaaatccttccaccccgacccgcacacacacccacactgctgccctggcgggggccatgggggtgatgaatgaccctccaacagccccacatgggttgtttctgtttctttggcttttctcgctccgcagtggagggtttactaggatttaagcttttgagtgcattgagaaccaagacagggcctggctccaactctgtgggccagaggtgggggactgctaggtcgagtctgcagcttcgccagtttcttggttgggacactcctctggcagccccagcaccaccacaaccccttgcagtgtgccccagtcccctggattcgctggactgcaaaaaggagcaccagggaaagctcagcaaaggctcaggaggcctcccgggtcctcgggagatgaagcatccgtgcctaggaaaaggggacagagggcaaggagagaagtgagagctacaattccagcattggagaagcgaggggcggggcgtcaacggcactgcttcaggacgcgcttgctgaaacgactccaacagctagttcacagcccagctttgtacgttggttaccatagctactgctgtcactgtagctgctcccgtagggtcgttgattcctgaacgtatcacatctcacctgcccccttcctcgtgggacgtgtcaagttgactttaaagcctaaggtggcttgtggggactgcaccagaaagtgtctaaccttgtgttccccgaaatcctttctctgacttaggaaccagcgccccctgctggagaagttttttcattttgttagccgacttctggtagcttagcaaagagaccagctgactgtctctcggcccagcccaccacgccgagtagcttgtgtggatgcagtcctgtgagggtgtgcataaccgttcccaggtgtacgcacgcgcgcgcgcgcgcacagacacacacacacacacacacacacacacacacacacagtaaccacgggtaggcaccaggggctttgtacattcaggagctgcagagaggaaaggtctcccatgtaccagagaaggaaaagtctgatcccgaaacagcttgaacgaaaggtggttaacacgtgaccaatccccatggcagacagcgggctggtgaacaggaagagcacagaatctctgtggggcgatgctgcagcggctgaaaccacgtcaagtcccccagagcccggcattctatgtaagcatccacctgtgacgccgtggagcaggatcttcattcatctcaccagagcaacagcccagtcctgaggatgggagggacgtgacttagccttgggattccacgctcgccgccctcccttggccgccctactccccagtttcctggcgatgagccatttattgtgtctcacaccagcctcatttccaactccgacttcctacttagaatgtggcagtggctttgtgagtgagaatcctgatgagttttccagtggcctctgcagaagctggcccccttctaagggcatagctaacccccttcccactcctgagtcactgaattcgaggagggtggggcagggaaagggctggcccccctgctgaaatcttgattctgcatttgaggaaggtcagggtgccgctgggggagcagggagcggggagggaggaagaggggaatgcacatcttttgcgccactattaaggcacctgtcaccttacatctcaatctggaatcaaagtgccctgggttgagaagcagacctgggctctggtcacactttggtcactcattagctctaggaccagtcactaatctctgagactccattttctccagggaaacgaggcttgcccagatagactaacaaccctttagtgctccaagaagtgagaatttccgaaaaagatctgccggcccagagcactccctcttgccctaatcctggcagggtctggatgtatttacccaactctgatcttgcgtgcagggatgcttgctgatggatgaaagaccacaataaaacaagattagcagca

SEQ ID NO: 269553 - DNA, 3467 bp, Homo sapiens
  misc_feature (1)..(2): n is a, c, g, or t
  misc_feature (6)..(7): n is a, c, g, or t
nncacnnggcgcgtgcatcagcctctctggcgggggattctccccggactccggccagcgccaatcaggtcgcgcggtacctgcccccagccctggccacctggaggggcgatgaggctccacgcccggagcagggcagtcctcggagcgccggggaggccgcggagcctcacgtgtgccgccccagccgctggcgcccggaaggacgcgctgcgaccccgtgggagccgaacgcgggagtcgctgcccgagcggagctgctcagccgcgggactgatgcccttggccagacgcacccccaactgctgtctgctcaggtgtagcccgcgtgactgagtcaccgctgctccagctgtttcacgtcgccgttccctttactgaatagtttgatggggcgccgggcggatgacagcgggaacggttgtgatcactggcggaatcctagctacggtgatcctcctctgcatcattgccgtcctgtgctactgcaggctccagtattactgctgcaagaagagcggaaccgaggttgcagacgaggaggaggagcgggagcacgaccttcccacgcatcccagaggccccacctgcaatgcctgcagctcccaagccctggacggcagaggcagcctggcgcctctcaccagcgagccctgcagccagccctgtggggtggccgcgagccactgcactacctgctccccatacagctcccccttttacatacggacggctgacatggtgcccaatgggggtggaggcgagaggctctcctttgctcccacatactacaaagaggggggacccccatccctcaaattggcagcaccccagagttacccggtgacctggccaggctctgggcgtgaggccttcaccaatccaagggctattagtacagacgtgtaaatccttccaccccgacccgcacacacacccacactgctgccctggcgggggccatgggggtgatgaatgaccctccaacagccccacatgggttgtttctgtttctttggcttttctcgctccgcagtggagggtttactaggatttaagcttttgagtgcattgagaaccaagacagggcctggctccaactctgtgggccagaggtgggggactgctaggtcgagtctgcagcttcgccagtttcttggttgggacactcctctggcagccccagcaccaccacaaccccttgcagtgtgccccagtcccctggattcgctggactgcaaaaaggagcaccagggaaagctcagcaaaggctcaggaggcctcccgggtcctcgggagatgaagcatccgtgcctaggaaaaggggacagagggcaaggagagaagtgagagctacaattccagcattggagaagcgaggggcggggcgtcaacggcactgcttcaggacgcgcttgctgaaacgactccaacagctagttcacagcccagctttgtacgttggttaccatagctactgctgtcactgtagctgctcccgtagggtcgttgattcctgaacgtatcacatctcacctgcccccttcctcgtgggacgtgtcaagttgactttaaagcctaaggtggcttgtggggactgcaccagaaagtgtctaaccttgtgttccccgaaatcctttctctgacttaggaaccagcgccccctgctggagaagttttttcattttgttagccgacttctggtagcttagcaaagagaccagctgactgtctctcggcccagcccaccacgccgagtagcttgtgtggatgcagtcctgtgagggtgtgcataaccgttcccaggtgtacgcacgcgcgcgcgcgcgcacagacacacacacacacacacacacacacacacacacacagtaaccacgggtaggcaccaggggctttgtacattcaggagctgcagagaggaaaggtctcccatgtaccagagaaggaaaagtctgatcccgaaacagcttgaacgaaaggtggttaacacgtgaccaatccccatggcagacagcgggctggtgaacaggaagagcacagaatctctgtggggcgatgctgcagcggctgaaaccacgtcaagtcccccagagcccggcattctatgtaagcatccacctgtgacgccgtggagcaggatcttcattcatctcaccagagcaacagcccagtcctgaggatgggagggacgtgacttagccttgggattccacgctcgccgccctcccttggccgccctactccccagtttcctggcgatgagccatttattgtgtctcacaccagcctcatttccaactccgacttcctacttagaatgtggcagtggctttgtgagtgagaatcctgatgagttttccagtggcctctgcagaagctggcccccttctaagggcatagctaacccccttcccactcctgagtcactgaattcgaggagggtggggcagggaaagggctggcccccctgctgaaatcttgattctgcatttgaggaaggtcagggtgccgctgggggagcagggagcggggagggaggaagaggggaatgcacatcttttgcgccactattaaggcacctgtcaccttacatctcaatctggaatcaaagtgccctgggttgagaagcagacctgggctctggtcacactttggtcactcattagctctaggaccagtcactaatctctgagactccattttctccagggaaacgaggcttgcccagatagactaacaaccctttagtgctccaagaagtgagaatttccgaaaaagatctgccggcccagagcactccctcttgccctaatcctggcagggtctggatgtatttacccaactctgatcttgcgtgcagggatgcttgctgatggatgaaagaccacaataaaacaagattagcagcaaaacaattttaattgtcagtgaaaagcaaacatgtttgtcagactctcctgtggagtcatttcaaatggtaactcttctcttgtaccaggaagcagctgtaggtggggtaatgggatctgtctcctggtgcagaggggcagcttatggcggcagcagcttcaacaagcccgtcccacggccagccctaactgggccaagtgcaagctcctgatgagctgctgggcctggcagcgttccccacttcctagtgccttgctcccctggaattccacagccaatcaaccacagcagccgtgtcctccttgccagaaataacatcattcgtacgtcctgcccgtcacatctgcttggcctcatgcttgctggcaagtcatggccctgacccagctcttctccctggtggccctcaactgccttcagcctcagctccagctggggaggagggtggaagagcagcttgagtcagactgaggaatgcaagagaggtgctggccgtccttgtcactgttctttggaaaatgcctccatcagtgcctgaagttcaaggagtgtgg

SEQ ID NO: 269554 - DNA, 410 bp, Homo sapiens
ttgttccccttgtccagacataggtgcctgctgtggaagctgccgtgcagtacatctggtccagctgcagcctcacatggagccggcacctgtgtcagcacctggagctgcctgccctgccacagcagctggcatgcctggctgtatgcagtggctggaccctgcacttgctcggccacacaccactcatctctttgtgcctggcccacccttggtggatgtcggatccaggctggtagcatgagccaagtgcagcctgccagtctgagtgggcaaaatgagctcaacaggtgcaagcaatactcaggcagaaagcaccagtggacacagaggtttccagctgatgaagtgacacaccaaagatcctgtgacatttattactaaataaatagtattgcatagtttcttca

SEQ ID NO: 269555 - DNA, 945 bp, Homo sapiens
gctccgtgtgccccggggccgcgggaatgcggatcgcagccggcagggaggggccgcggcggagccttagacttgggggagccaaggaggccactcccaggaggctgcggagcaaatgactgcctccccgagcccctggctgcaaaagcagaggttgcccgtggcttttgcagctctggacacgcgggtgcagcccagggaacgtggacaagaggtgttgacggaccggaccgtgcatttgagttggggcatatcgaagtggtttaattaaaagccgcgagtgtggccccagatcctggcgttatcaaagcaaatcaaagcctttcttttccagccgagcgggccctgtggaaatgagatgtacatttacccttgacgcaccgcaagcctggccgaggctctcaggttaattgatatttaatggaaatcatgcccatgaatatagtttccatcatttcacccttgatagacgtcagccctgggcgcagggggaggctgaagaatgcaggagggggcattaggcttgctgagagagtaaatagaagagcggacagaaacgttctgaggcgggaaaaagggctcgcgctggggagggtgacatttcctcgggcaggacgcggctcccgggtctcagccccggcgcgcagcgaaccagggccggctgcggttcccggaggagtgcggagggcagacgaccgcaagttccccccaggagcctcccagccggcgttcagatcgcgccggttccaggcagctgcaggcggcccatcttatgctaacgatcctacttcctccgccaagcctgtgaaattactgccgagagagcgcgcaggcctcaaagttacgaatttttcccaaagcagagaaagagaaggctcagcctagtttgtgagcagagatgaagaaaagttgcccgagtcatgtggcccagtcgagtgtgaatcg

SEQ ID NO: 269556 - DNA, 590 bp, Homo sapiens
ttatgaactcacagttccacaaaggagaatctctatagtattgattacaatacagtgtgttcaattaataatgtataaagtattatatattataagtattgagatatagggtttttgccaaggagaagttagtgaagacttgaagatggggagatttttgatctaggtcaaaattaaggaattggttagaaaaagaagactagtccagccaaacttgtgaaaaaagaaacaaggatgtgtttagaaaacagcgagtgagtactttattatacttggaatataaattacatgggggtaattggcaagagatgagactctttgaggctagatgttgactggccttatatgccagtagaggagtgtagacttatatgtagaggagtgtagactttatgccaaaaagtgtggaatccaggaatcattgttaaataggagtttttattactagataatttttttaacagataagatacattataaagaatgaacaaaagaggagaccatcagtgaagagatgagtttggaatctactggaatagtcttatgagtgataatgaagctaaaggttgggccaaagaatgaaaaaggaa

SEQ ID NO: 269557 - DNA, 454 bp, Homo sapiens
tgggcctagcgactttaaaaagactggcaagccagtatggcaaatgttaacatttgttaaatctgaggagtatgcatgtgggtgttttattttttctctgtactttattttatgttttaatatttcataatttaacatttaaaatttttaaaaagatcctcagccgggcatggtggctcgcgcctgtaatcccagcactttgggaggctgagtcgggtagataacttgaggccaggagttcgagaccagcctggccagcatggtgaaagcccatctctacagaaaatacaaaaattagctgggtatggtggcacacgcctgtaatcccagctattctgctccagaggctgagacacaggaatggcttgaacccaggaggtggaagttgctgtgagctgagattgtgccactgcactccagcctgtgtgacagagcaagactgtctcaaaaaaaa

SEQ ID NO: 269558 - DNA, 478 bp, Homo sapiens
acacaacttacctcactttcccctttttgttgacctttattatgactttcaccaaaagttgaaaatgtatgtttctggttaatttttactttatatttttcatttgtaattcttttgaattattttgacctatttattggccaattataattactgctgtaagaattccctatttcatttggtagggaatgtacaatgatctactgtctaatatcttaagggcttagtatttttctcagtgactttgtgggttctttgtactgtaagattattaacactttattgatatttgattcagcattttctccagtttgtggtttgtatgtggattttgaaaagtattttccatgttaagaatttgaacatttttatttaataaaatatattgcgaaatttgtattaatgatttacaatcatcttaaatccaccattttgtggtattattgtctccaggtttctccttacttctaaaaaaaaa

SEQ ID NO: 269559 - DNA, 363 bp, Homo sapiens
ggttaaagtgggaggatcccttgagcccagaagttgagaccagactgagcaatagagcgagactcccatctcaaaacaaaaacgaaagcaaacaaaacagcttcattttgccccattttgagtttgaaaaatacaacaaaaacaacagagaataaaaccagaatagggaggcaatttcattttttcacattttctcatttaaatgtagtgattttggctctggatcccttaacagaaactgatttgtgaaatagtattgctgtcacagaaaagcaaacaaacagcaaaacatatctaacataaggatgcatcgttgttcagtaataagatggtaaataatgcacagaggcagtgaagggaaaa

SEQ ID NO: 269560 - DNA, 648 bp, Homo sapiens
tattttcttgaattcataacagccagtgtgtcctttcttcccatttcaccctatttctgccaaaccagagctttcaacatttctcttgtcccctttttaaatttttttttttagttttgtattagagacagggtctcactgttgtctaggctagagtgcaatggcgcaatcgtatttagctcactgcagccttgaactcatggtaccaagtgatcctcctgccttggcttccccaaatactgggcttacaggcatgagctaccatgtaagccctcgcttgctacctctgcacctgttttaccgtgtgtctgaaatacctttcttgtgttactttacctaataaattacagacatttttcaagacaaagtcaagtgtcacttctttggtgatgtttttttctaatgctcccagagttagcctgctctgcccttatacccccagcactctgtttgtaactctacaatagtatctgtatgttgtctggtagtcatgtgtatatttgtctcctgtagccgactggaaactccttgaggacagtaagaatatctccgtcagttttgcccccaccatgcatggcagcacttttttttaaattgagacagtatctcactacgttacccagtctggccttgaactcctgggcccaa

SEQ ID NO: 269561 - DNA, 420 bp, Homo sapiens
gagaaatgctccattatttgattaattgtcttggataaaagccttaactgatgttccagttgacctacaaatcttgtgaagtgagttttaaaagtatttgtaaatagtatgtatccttatagctcatgaatgtcagaattctacactggggccagcacagtggctcatacctgtaatcccagcaatttgaggggctgaggaggaagattgcttgaggctaggagttcaagaccagcctgggcaacataatgagaccccatctctaccaaaataaaaattatctgggtgtcatggtgtgagcctatactcccagctacttgggaagctgagctcagaggatcatctgagtcctggaggttgagtctgcaatgagcaatgattgtgccactgcactctagcttgggtggtgatgaagtgaga

SEQ ID NO: 269562 - DNA, 403 bp, Homo sapiens
gccaccattcagaagttcaggctgaacaccaaatcataaaccagtatacataaattcagaaaattagtttgaaaggtgatatggttaggtgttgtgtcctcacccaaatctcaccttgaattataatctccataatccccacctgtcaaaggagagaccaagtggacgtaatcgaatcatggtggtggcttcccacatggtgttctcatgatagtgagtgagttctcacaagatctgatggttttgccaagtgttcgatagttacttctgcatccattctctttcctgctgccttgtgaagaaggtgccttgcttctccttcaccttctaccatgattgtaaatttcttgaggcttccccagccatgctaaactgtgagtccattaaacctctttcctttata

SEQ ID NO: 269563 - DNA, 673 bp, Homo sapiens
tccccatcatgaacacatgcttctttttttcctcgccttcaccctcaattttttttgtggaaattcaatggttgactgtaccaagccagctctctgggtgagaggttccttctaacaaggattagaaacccctctcatgtaggaagaggtggatttgggggattatatgatccaaccctctacctttggacagaatacaatcgagatgtctccccagtacacagaactgcttttccagcaagttctctttgttaagccattctggtatccctcaaatcccttgttatgactatccacaattctccatgccccatgaccctttcttagctaaaatgaaaaataattgcctagttccctcatgtagagaagttgagctattaccttgacttcccccttctcttccaaaaaagattacaattcctttaattttctttcccatcctagggtgtcctctttgctctctccatattctccaaataaaaattcaaaactgagcagcaaatcctgtgcctcttcatccaacccctcctcatcatgaatcattatcactcaggaagtaaggacctggtttactatctgagaactttagtcctaataatttctctacaccaacttctagtcctaataatttatccgtataatgctcagaaacactccgagattctcagtaaaa

SEQ ID NO: 269564 - DNA, 423 bp, Homo sapiens
gccagccccccgcagatgctaggagggaagcttggaaggaattctccccacagccttcagaaggagccaatcctattgttacaggaaaggggtcccgatccagatcccaagagagggttgtaggatctatcgcaagaagaattcagggcaagtagtctgtaatgtgagagtaagtttattaggaaagtaaaggattaaaagaatggctactccatagacagcagcctcaagggctgctggttgcctatttttatggttatttcttgatgatatgctaaacaaggggtagatgattcaggcctcccatttttagagcatatacggtaactttctaacgttgccatggcattcgtaaactgtcatggccctggtgggagtacagcaagaacgaccagaggtcatcctctggtggccatctaggtt

SEQ ID NO: 269565 - DNA, 817 bp, Homo sapiens
taagtgggtacttacttcacaatataaataaataatgtcaaccttagtattgtgattacatattactgctttccctgctataatactgtattttattgtacgtgagttacggccagttgactctaaactgtgtcccagtgtagcaaataccatataccaagcaagtacaattttgtttctttcaaaaaaagggaactaagacttagctactaagagcctataccaaaactttgtcccacaaagcagcttcaggaaagagaggacttttattcctttgcagatatatagttctatagttttattttatgaaagcataaatacagggagttttttcttattagcatcttaactcctgagacctcttaaaaaagagcattgatttcttagctgtactgggtaggtaatacgctgagagtcttttagcagcgagaagggcaggtgggttagttaaaggatcaggaaaactggctggttttccttctaaatttgttgagtcaatactaggtaagctttaaatatggatcatcaatgttcttctacatgagtcagaaagaaagactgtgtttcatcacgcctgtgatcttcccaggctcttccaaagctggtaaaccagttaacttgaagggacagaagctgatagaaaaaccatgccaggagaattaaactaaattataaataaaacaactcctataatttcctaattctaaaaacagagtctcatttagcttagtgtaaggaactttgtcataaccaggcctcttaaaaccaaaataatcatccattttgtagagttacaaaattataaagtaaacagtta

SEQ ID NO: 269566 - DNA, 335 bp, Homo sapiens
actttttaaagttatgtctatgtaataaagctgttggacctatactgaatttttggtaccacagtttccctcttgaatgtactaaaacacaaaaaactgacagctctgagctgtggccttaccttggaattaaacatttccacctttgtaaaacatcctatttttgtttctacctttggctttccaggtcaggacctctacctgatcagtaacctattattttgtaatgatttttaagctgcagaatctctaccttgtctttgaaactggcacattagttgtggcacccatgtgattagatagttcctgacaaaataaatgtatgtccttccatg

SEQ ID NO: 269567 - DNA, 334 bp, Homo sapiens
aatcaaggccccaagagaggaaatggggtggcaggttgtggtgggggattgcctgcctatgtcctctgactcttgaacagcactaggcaaagggctggccacacagcaggtgctcaatctgtgggtgagaaaacactgaatgaacacaggggtcatctgagcctctgaacctccaaggcagcctcccggcaaaatgtccccgcaaatgttccctctgaccccagctcattccaacctctttcctaagttagtgggaaagggcttgatcccatcccctcacaccccatcagcacccactgctgcccagcacccacagggcgccagacgcttcacc

SEQ ID NO: 269568 - DNA, 538 bp, Homo sapiens
actgcttcaagggagggtctgggagaggagtgaatgggaagatgcccctaaacacctggaggtgattcagcctcaccctccccgaacatctggcacctacctccccttcccaagcacctcacacctctgctgaggcggttcccttggtctggaatgccactctccactctgcccagatgacgaacacctgtgcctctttcaggacttggcttgggatctttcctcggaagattttccagaactgtcctgagatagtgtttccatttctccccatgctcccactggaccctctatgtatttccatcatagcacatataccttctgctccaggattgcaaattccccaaggcaaagatggccttgtctttctttttagactcagtacctggaatggcaaatgagatagatactacccaggtagagcttatgatcaggtgggatttttataaagatatctgaataaggaattaagccttcagtgaggagctttaaatgcatgatattttaccaattacactaccaggactttagcacctaa

SEQ ID NO: 269569 - DNA, 529 bp, Homo sapiens
acagtggcgtgatctcggctcactgcaacctctgtctccgggttcaaatgattcttctgcctcagcctcagcctcctgagtagctgggactacaggcacgcacaaccacacccggctaatttttgtatttttagtagagatgggatgtctgagtttattttttaagagacagggtcttgctctgtcacctatggtggagtgcagaggtgccactgtaacctcaaattcctgggctcatgtgattctcctgcctcagcctcccaaagcactgagattatacgcacgagccaactcacccatcttgttttttaaaatgaaatcattttctaaaatggcaaatagactaaaaaaggaaaaaataagcaatcacaatagaatgttgtggaaaaaaacaagtgacagctctgggccagcacagtggttcccacctgtaatcccagcactttgggaggccaaagcaggcggatcacctgaggtcagaagtccgagaccagcctggccaacacggtgaaaccccgtctactaaaaa

SEQ ID NO: 269570 - DNA, 385 bp, Homo sapiens
gacattcacgggaattatgtcctagaagcttggcaatttttttttccaaaagcattctttgtttttctaaaaatatcaatttggtattaggaaatgaaagacctgtaggtcctggctgggcgtggtggttcacgcctgtaatcccagcactttgggaggctgagttttttcagacttggctctgggtaggtcctcctaagcactcagttttgagctgcatatgtgaaggcagagcaggaataaaaggagaaaatactgagaagagtccaaaatatgactaaagagatgaaaaaaacaaaatgaatggttgctcacacctctttcctatccctacatagaaacaaacaggaaaatcagagcaacagggagttttagtgataaaaca

SEQ ID NO: 269571 - DNA, 387 bp, Homo sapiens
tctgtgtcagtcacactgaggcaaatgcacacgaatagcatggcacctggcccagggggaaggcagggcagggtggagtgtcaccagcaggcccatgacagtatgtggataggacagaggtcagggagggcacaggtcagcatttcaggaactcgcagtattctttttccctcccttggaggtggggacctgacttgtaagttaatttggtaatttttaactaggaagtaaatttaaaatttacagaaaagttgcaaagaagatagaattcctgcttagcttttgccccaatttcccacttgccacccttccctctttgtgtttgtatctttttttttctgagccacatgaaagtaaagctgccttttgtgtctgtgtcaaaaaaaa

SEQ ID NO: 269572 - DNA, 419 bp, Homo sapiens
ggagaggcaggatgaatggatctctttgatactcaaagttttttaagccattgatgtgttatgtgtctaaaataatattcttttttgaaaaattattgtttcatgatatgattaataaattattttctttgttaaatatcgattaaaaattatattaataattatgttaataattaagaattatagataaggataaaattccttttgactgttacagcagtccactcccaagagaataaactgttaccttccagaccttttcaaaattgacaggatctatttaaagtcctgtattttatttgaccagaaaattctatttttcagatgttacatttaagaaaacttcttgaatgtacatgacaaagaatgaacaagcatatttattgcaacattgtttataatagcaataaaggtaagca

SEQ ID NO: 269573 - DNA, 430 bp, Homo sapiens
catcgtgctgatgagcaaggactagggaagaagatgctcaagaaacatccatgaaaacaaccaggagggctttgagagaatgcggagctggagctcggatcttcctttctgaaaagcatgagaaaacccagaaggctctgtcttaagataaaaagaccagggactttctaggggtcataagatgttgacatttaattgccattgtaacagctgtgagaggtaggaacttggagtggtgattaggccatgagggctccaccctgatgagtgggactggtgctgttataaaagggcaagttagtcccctcttaccttctgccttccaccatgcaacgtcacagcaagaaggccctcacaagatgctggccccttgatctacaatttccctttttcctgaactgtgagccaatacatttctgtttattataaa

SEQ ID NO: 269574 - DNA, 470 bp, Homo sapiens
tgggttcaagtgatcctactgcctcatcctctcaaagtgctgggattacaggtgtgagccaccacagccagccacaaatagagattttatctactaccaccagaaatcttctgacatactgttttaccgcatgaactattgttttctttataaattccttaacaaatctctgttgtatagaatactgttggttaaaatatatcagcagctaatagctcattttaaatagattctgaaagttcaagaatttcaggttgccagacactaatatactctacaaaatcagaaaaggctcattactgcttacttacacaacaaaaaatttcctaaaaatcatttttaaatatgtttgagttcaaaacataaaaatgccatgttacgatatttttaaacttaatgaaactggatatatttgctgattcttgtaagaaacacaatcacaaataaagctcatctgtttgtccaaacca

SEQ ID NO: 269575 - DNA, 461 bp, Homo sapiens
tcttcggggaaggggcggggagagatagcaagccacgaacctgcacagcgtgtagatcagggacggttcctgcagactctagaggagacgggactggaacgcaaagagaggggctagaacctaggaggcgggttgcaacccgcggaggacgagattctcaggtgctgggggcagggttaggtcgggagttgagcaggattagaaccactgacagggcatagttaaagccagcagagaagggattagaatgtgggggttttgcttagaccttgagttgaggctgtattttgggagcatttttgataaaaagagactcctagggcaggctcagtggcttccgcctgcaatcccaacactttgggggtggaggctgcaggatcgcttgagcccaggagttccagaccagcttgggcaacatggcgaaacccccgtctctactcaaaatacaaaatacaaaaagt

SEQ ID NO: 269576 - DNA, 697 bp, Homo sapiens
aaaactagaagagtggtgaggacctgagggagtgagaattcagagggtaaggttgtgcagagtttggcctgaccttaaattttcttttccccttgagttaattactcagttcaaaaaaatccagctgagaggttgaaaagctgagaagcttctggcagtctgcagagctgggaagacaaaaagggaatttaggggtcattaaatgctatagaagtttatttaggaccctgaaggctacagaggggtggatggaggtgtcagcaaatgacagcctgtggggtcacattcggtcctccagctgtgtttatgtgggacatgagctaaaaatgttttttaccttttaaaatgtctgaaaaaaatttaaaagggaataatattttatgacacaggaaatcataacgacattcaggtatgagtgtttaaaactaatgttttatgggaacaaaaccacacccatttatttgggcattatatatgacttctgttgcactacagtgtcagagttggttgctgcagagagcacatatatttcaaattgctgctctgcatgctacgaatcacaatgacatagttacagtttgtcagtatgtgtgtgtgtgtgtgcgcgccacacatattgccctggcatcttatttatttctctcattaccagtgcatacccacctatatggttcaagatttttcttaaccttagtct

SEQ ID NO: 269577 - DNA, 875 bp, Homo sapiens
aaaactagaagagtggtgaggacctgagggagtgagaattcagagggtaaggttgtgcagagtttggcctgaccttaaattttcttttccccttgagttaattactcagttcaaaaaaatccagctgagaggttgaaaagctgagaagcttctggcagtctgcagagctgggaagacaaaaagggaatttaggggtcattaaatgctatagaagtttatttaggaccctgaaggctacagaggggtggatggaggtgtcagcaaatgacagcctgtggggtcacattcggtcctccagctgtgtttatgtgggacatgagctaaaaatgttttttaccttttaaaatgtctgaaaaaaatttaaaagggaataatattttatgacacaggaaatcataacgacattcaggtatgagtgtttaaaactaatgttttatgggaacaaaaccacacccatttatttgggcattatatatgacttctgttgcactacagtgtcagagttggttgctgcagagagcacatatatttcaaattgctgctctgcatgctacgaatcacaatgacatagttacagtttgtcagtatgtgtgtgtgtgtgtgcgcgccacacatattgccctggcatcttatttatttctctcattaccagtgcatacccacctatcatgttaaaacaagaaaaggagaaaagtggactttatatgtaacactttagaggtatagtggaatgtatattattattaacaaattagatagcaaagcattatatttattatgctagaagactatggctgtgctaaaagaatataatatatgtcagcattaccagacttggcacttctcacaatattcccagccaacaggaataaaac

SEQ ID NO: 269578 - DNA, 616 bp, Homo sapiens
caaaaggtgttgaacatgggaagcattgatactggaattagaggccagtaaggggttgaatccctagtcaagtcatcagagtttcattattttctgttacctaccaggtcatcggatcaaaaggatctcatttctcagcactcctctagtaatcttatggggctcgagaaatagtgaccataaaagctttcagaaatatggtggaaggataggaatttggggactagaagccagaaaacagaatctaaaaaatactggcagttaaaaaagtaaataaatagaaagctaagaaatatcaaacgtcagaaggaccgagacagaaaatacagtcatgtgttacttaatgatggggatatgttccaagaaatgtgtcattaggtggtttagttgttgtgcaaacgtcatggagtatacttctacaaacctagatggtatagcctaccggacacctggtctatatagtgtagcctattgctcctaggctacaaacctgtatagcaggttactgtactgaatactgtaggcaattgtaacacaatggtaagaatttgtatatccaaacatatctaaacatagaaaaggtacagtaaaaatacagtataaaagagaaaaaaaa

SEQ ID NO: 269579 - DNA, 526 bp, Homo sapiens
gtgcctgggaaagcctctgatcacacatttcctcagggattttttaggcctgatgtccctttgaatttactttaacaatccttttgtaattttattttttacatcaattgtaacttagtattattatatatataggcatttgggtgtgtcttgaaggcatgtcctggtttcaaactgatttgtggtatattattgaattaggcccatttactggaattataaactgctatccaactacacaaagagctgaggattctggggaggtcaggatggagatgaaatagaagtgaggagaaaatagctctctctctcacatgcagattctttatggataaaatgcataattacctaaaatttaaaatactcaaaaaattatctaatcagtatgtaatggaaattatagagcaaagaacaaaacaaacaccaaaataattttcttttttctacataaaaattaaataatttacataatgaaatattccatgatcccagtgtaaaatgccaatagaatatatgtaaaaaaaaa

SEQ ID NO: 269580 - DNA, 378 bp, Homo sapiens
tcaaattcttatattacatctgttccctaaactttacccttttattcatacatctgattgttagtgttatgatatatatctttcattctgagcactcacaaagccagtgattaagtaattcagcttgataattagttttaacttttcagtggttttaaagccccactcatataattttttgttggatatagtataaaattatttagtcagtggagaatcctttcaggagttttcagggaatacaagattgttgacatctaaatctgcagctgcattctaataaattgccactttatttacttgaattatattttctcaggaaacccaaacttgcaaatttagtcttttaaatttaagtgtaccagcttaataaactta

SEQ ID NO: 269581 - DNA, 447 bp, Homo sapiens
cagcgagctcccaatccactgatcctacatcaaagttaccagtcattgcctggcccattgcagcaacaaattccagtaagaaaaaaaagagatctattacgaaaacaatcttacacaaaagtggaaacatctactccgtcagctcagtccactcttcttaataagagtcagaaatcactagcatgtaaagagaactagcaacataaaaagagaaataacaaattttacaaagtagaaaaataactttggagtaagatgaaattatttaggtaacacaaaagaagttaaaaatcattcttataaatgttttccaaaagattcaaggaggccaggcgtggtagctcatgcctgtaatcccagcactttgggagccaaggcaggaagattgcttgaggccaggagtttgagaccagcctgggcaacatggtgagacacctccatctctac

SEQ ID NO: 269582 - DNA, 402 bp, Homo sapiens
ttgtccaatgtaaacttgttctatagagttgttattttcccaccttttagagtttgtagaatcctgtgttttcatcttcaggaactgtaacttatcttatctttcagggatagggagtacatagtggaggtggccagataggccatgagaagatgaagcatttgtcatgaccacacattgtttccaggacctcctgagaagcctgatagaatcctagggcttccagaaacacttttggaaaaacacagagctttctaacttcataaataaaatgtgaatggtgtgtgataggtgtaacaaacaaaatgtcagaactggctttttaaatatctttagatttttgcatctctatagaaattatcactaataataaataattacatgtgaatgattttgcagaca

SEQ ID NO: 269583 - DNA, 810 bp, Homo sapiens
catcctaaaaatgcctgggaacccaagactttttttgttactaatctcccaagctcgggggcgggggtttgtcataagaagtcctgtccataaggagcttttgttttctcagccgttgttgcctggttaatgccgggaaagtccaatcccaggaggggacacctggtgtcacagattactggcacccccctcacaactgtgactggcacccccctcagaaatttgtgggttccttaatatctgtggcaacaagagtcttttgctctcttagcctgtttccgggagtgagatttttggtgggggaatctttggcattgtttttgtctatgccctaaaattacattctggctttacaggaagaggcttttggattgagttgttactggaataagtacaccactggaaaccctaattgtcggtggccagaagacggatcctttaagttagactaaaattcctaaattaaaaaaaaaaaattagagatatcttacaccaaacaattgatgcgaagattaaattaaaaggatacacaggctgggcactgtggctctcccctgtaatcccagcactttgggagggtgaggtggcggatcatgaggtcaagagatcgagaccatcctggcctacatggtgaaaccccatctctactaaaaatacaaaagttagccgggcatggtgtgtgcctgtagtcccagctaccccggaggctgaggcaggagaatcacttgaaccggggaggtggaggttgcagtaagtcgagattgtaccactgcgctccagcctggtgacagagtgagactctgtctcaag

SEQ ID NO: 269584 - DNA, 346 bp, Homo sapiens
gaaattgtaaacattataagtcagaccttgtgattatatatcaaactctgtaacccagtaccaaaaaatgtacttcttaagtgtttctagaatgttttaaatgtctcccatgcactaatttgtagaaatttttaatgaagcagaaattactagagatgtaatgagaattagaaacacatccaaacaggagattttacatcattctcaatccaagaccaatcaagtgatcagaaataagtgaaattatggaaattgtaaacattataagtcagaccttgtgattatatatcaaactctgtaacccagtaccaaaaaatatacttcttaagtgtttctagaatgtttt

SEQ ID NO: 269585 - DNA, 695 bp, Homo sapiens
ttctccttctcaggagtcccattttcttcagattagatgaaataaaagggctctgactagtgcaaagcactgttacagctgaggtgacaaatgacaccagattttcaagtgacgcttccctaaactacctccacgacactctacagcacagagcctggataccatttgtccagagtaaagcacttctccactccagtggcaaacacacagaccaaggaggtggcctggcacacgcagcttttgtggcactaacctaagtctctgcgaaagtttaacgcacagaaaccttccccctgcttcctgcctgccctgactgatcctttatcagcacaacatcaggtagtcaaggttagtaaaggtggcggagcgggcaggagctttacaatgtaaaactttcgcggggaattgtgtttcaaacgtcccgcctttttggccagcctgtgaggggcacaagcaaggatctctaacagcccagccccactgacaaggaccacacgcagtggaatgccagtggcttcactctaatcctgttttacagtctccttggtttccaaccccactaccagcaacactaataagtagcccaaggtcacccagttagcaagtggtagaaacaagattgaaactcgagtcatctgatgccaggtccgcgttctcaatctccgcaccctgctcccagcttcggtggcaacatg

SEQ ID NO: 269586 - DNA, 506 bp, Homo sapiens
  misc_feature (57)..(57): n is a, c, g, or t
  misc_feature (66)..(66): n is a, c, g, or t
cagctacagaggaaattaatggtttccttcagaggcttttatttatacaaatggcanaaactcccntattataccttccccagatttgtagacctcttgctgttgttttttcctcctgttgcttggagtaaagaagtgggaatgatgcaaaaatgaaaccactttagtaatacaggagagtgaccgtttggtgtcaaattgtggactatgtggcttcctgattgtggcagtaatggcaggccagttctggaacacagctgtgggaatcatcctggaggtccatgctgaagcctcctccagcccttccagccatgttgatgttgagctatacagatcatgaaggcttgaataaagccaggcagaggtaaacagagttgaaaaatggagggcgagggatagagctgataacatcacctgaattcctgactcagccatgtttgaagccataatcacccacttggatttctcatttgtatgagtcaataaattcccctttgtggcttaaa

SEQ ID NO: 269587 - DNA, 410 bp, Homo sapiens
ggatatttaacatagtaagtaaaagatataacataaaaaaaaaacaagaatagcttagtgtaatacataatgaatatgttatacttataaacagatatataagatgtaataatagtagattactatatagttctgagctatcactatctcttagaagtatggtccatgtcagggccaggtgcagtggctcaggcctataagatcccagccctttgggaggctgaggcaggcggatcacctgaggtcaggagttcaagaccagcctggccaacgtggcaaaaccccgtctctaaaaaaaaaaatatatatatatgtatatatatatatatatatgtgtgtgtgtgtgtgtgtgtgtatatatatgtatgtatgtatatatatacacactgtacacacacacacaaaataaa

SEQ ID NO: 269588 - DNA, 130 bp, Homo sapiens
tatatataagtgtatatatttttttcttttcattgtgaggcatctggaatgtagcaggaaattttgaagccatgggatgttatattttttgtttttttccctttttaggttgaaagccaaattatgacaa

SEQ ID NO: 269589 - DNA, 411 bp, Homo sapiens
agtggtaccccgtattcatcattcttggggaggactgatgcttgagcagaggccgtgaggtgccctcttcaatggcacccatcttcaattcttcctttttatcttttgcttttgacctttcctgaagtggctgaagattgtagcaatacacaagcatactccgatttcccctaagatgttgtgcctcccatctgcttcttgtttcatattgttctgttttcatgtgccctaagggacagttatgttgtataaagagcaagtcccccaagtgtcctccccacttcgggtctgcagaaaaatgattgattatgaggaatgtgatttcagtaatgcaggcaggattaaatgcttgccatctatcgacactttgcagtgccttaaagagagcttttaaaattttgggctatcact

SEQ ID NO: 269590 - DNA, 240 bp, Homo sapiens
cagggtgatgtgataagagcccagtgacactagcagatgaagtaggttatgttacaggagaggagtccttagtttagggaacctgaatctttcatagtgggctgcaaataaagctgtctgatctttgccagagagggagacattatctttattttcccacatggtaaacaaacctgccctctgtaccagagggagacatctctttatctgccaaggctatttgctatataaacaccactg

SEQ ID NO: 269591 - DNA, 728 bp, Homo sapiens
attatgtaaagtagttgaagatgggggatagcctatgggtcttcagaaagcctctgggtttctagagatctttctggaagaggttaggaggatgagtcaagtttagaatggaagaggatagatgaagcttgcatttggtagtaaaaaccaaggatgaatgtgtgaggcatgattatttgtcacaagtttccaggtgacactctggcactcagtccttgttgaattaagcaagctttcttactgttttacttggctgtgttaaagtagagtaacaggaaattagacttcccataatgtctcaatagagctgtttaagtttctagccataattggtatgggaatatagctctaaaccttcaaggctgctaccatttctcacattcctatatctagaaactgtagccaggcagcactttcagtgaggtgagtgggtccaggtttgttcaattacttttgtaccaacctaataccttaatagtatttgtcctaatttacaaaaataggtaatgaaggattcttggttttacctcagagctaactgtccattaatggcaacatcccacatttgttgaagcatgattttgttgtttgtactttgacatgcatttgatattttaagtaacgccttgaatgcatcttaaataataatttatatacagttaacactcctgtttgtttttaggaattcttagtgttgccaatttcctaggatgtagaagagcatagta

SEQ ID NO: 269592 - DNA, 272 bp, Homo sapiens
gataatcccagcactttgggaggccgaggtgggtggatcacctgaagtcaggagttcgagaccagcctgaccaacatggtgaaaccccgtctctactggggttttaattttgtaaaaatacaaaattagccaggcatggtggtgcatgcctgtaatcccagctacccaggaggctgagacagaggattgcttaaacccgggaggcagaggttgcagtgagccgagatcatgccactgcactccaccccaggtgacagagtgaactccatctc

SEQ ID NO: 269593 - DNA, 561 bp, Homo sapiens
tagaaaaaggggtatgtcatgaatccataaaatatatgtaggtactagtctattttgtgatttgctaccataaaatatacacaaatctattatagaaagcaaatttattaaaacttatgcaaagagaccatacatggcaccatttacagtagaaatatttaaaagtaatgatgcagtgttaaatcatagctgcataaaattaactgtagtacatactgttctattataataattttgtagccacctacagttgctattgcagtgagttcccctgctgtgagtattcgcttaaatgctgtgtgatgctaaggaattgtgtatcaaagtaaaaagtgatctctttgggttctcctgtacatttcatcatgtttggtacaatacagtaaaccttgaatcacaccatagtgatgctggaagtgctcccaagaagcagagaaaagtaatgacagtacaagaaaaagttgaattgcctgacacataccatagattgaggtctgcagctgcagttgcccaccatttcaagataagtaaaccccatgtaagggccatagtaaaaaaaga

SEQ ID NO: 269594 - DNA, 467 bp, Homo sapiens
gtggactttgaaaatcacacacatcacatcaccagtgccaaaatggctgtttctgtggctgactttggcagtctctctgccaacgagaccaatggtttcatcagtgcccatgctctgcatcagcacgcggccctacactctgagtgacctgagtgaggatcccggaactgcgtgtgcagcaccagtaaacttgaggggagctatcaggtttgcatagtctttcactggaagtttgaacctttctcactatgacatcagtgatgtcagtatgtatagaactatatcttgatttatcaagagtattttcatttttcaatccataaatgtggaaatgaactatgatcagcagagttgggaactaagattgaactctgtggtgcagctttaagctctgcttctctcttcctcatctcccaatacctcttccccactcccttctttttctattcttttgtgttccccactgc

SEQ ID NO: 269595 - DNA, 407 bp, Homo sapiens
ctcccacctcaccctccctggtagctgggactatgggcatgtgctaccacacctggctgatttttgtattttttgtagagggtgttgccatgttgccggggctggtcttgaactcttgggctcaagcaatccccccacctcagcctcccaaagtgctgggattacagacatgagccaccatgccctactgaaagaattttaaaaagtaaccccagggttatatgtatccattgattacgagcatttctaatgaccccataactgatttcttgtgaatgaagattttggccaggcgtggtggcttgtgcttgtaatcctagcactttgggaggctgaggcgggaggattgcttgaggccaggtgttcaagaccagcctgggcaacacagtgagacccccaccttcgtc

SEQ ID NO: 269596 - DNA, 280 bp, Homo sapiens
tttaattaattataatctaactacctgaagtagaagaggaagcagtgggctccacatgggccaggtcctttaacacatgaactttgatcccagcccccgaggtcagccatcagctcctcatcctgcagcctgcccaatgcttcattacccaattaacccgtcattttagagccaggtggtttaagggactgtgtaagaagaacctgggactccagggccgcagcctttggttatggtcctgttgtggttctaatgcacgaattaaatatctgtctcttct

SEQ ID NO: 269597 - DNA, 629 bp, Homo sapiens
tcttcgcccaggtctatggaaaggcaaatgaccgaacactcgctcaggatccagggacccctccaacactgctccaggtcagcttctccacaaacaagcagagggacacaggccgctcctcttccagcccctcctagggcgcagcaaagggctgagctccgggtaattctacagctgttcagcgagcacaagtcaggcactgcagggatggtgcagacgacaccacgccgtcgtccactggacaagatgaccccaaagcgcaaagctagagagcctcacgggacacagcggaagggcgcggggaaagccaggcaatgtcggacccaggcggcaccgggtctgggaggtgggcaggcaggagtggtcaccacttcagggtcatccaggaaatacagaacattttccagaaaacttctgggcatcatgaaaaacaaaagctgggctgggctgggcgagggccagggcctgtccctccctgctggctcacatggactggcagccagacctgaaaggggcccagggaatcagaggtgacccccagggctcagccagggaaacctggggccccattgagcaaaacactggccaaggccactgaggaagtcactggcacaggaggggctaccatc

SEQ ID NO: 269598 - DNA, 430 bp, Homo sapiens
actgcaccattggctcccctggggctccagcctgccagcctccataattgtgtgaagcaattccttatactaaatctccatatgtgtgtgtgcatgtgtgtgtatacgcatatacatacacattctattggttctgtttctctggagaaccctgactcattcaggaaaaatgatagattctgaactcatttgacataaacagcttggtttcatctaaatatgctctaacacacaatggacatttcatttgagatgttcctgaacctggacctgaaccttagttgaaagtgtgatttcctgcctgttttcaactgttctgtttagtttcacatatatttaattgaattcaccatagggagatgactctgatttaaattgcctaggttcatcctaatttgttgtaagtcacaaaaaaataaggaaatttaga

SEQ ID NO: 269599 - DNA, 239 bp, Homo sapiens
  misc_feature (1)..(3): n is a, c, g, or t
nnngcttccttcccatctcgctcttgggtcatgcctggccagcagaaagcagctccataggggaggagagccacgcaggatctcacagctgcagtctaatagtaacacagaggaatgtcttccaggaggcccctgatcttctctgctcagggaccactcttatctgacccagagacagcacatatctttcgttaaagatcagatcaataaaatattttatttattcattaatttaacaa

SEQ ID NO: 269600 - DNA, 1923 bp, Homo sapiens
  misc_feature (1)..(3): n is a, c, g, or t
nnngcttccttcccatctcgctcttgggtcatgcctggccagcagaaagcagctccataggggaggagagccacgcaggatctcacagctgcagtctaatagtaacacagaggattcagcagtggccaccatgggttctgtgaattccagaggtcacaaggcggaagcccaggtggtgatgatgggcctggactcggcgggcaagaccacgctcctttacaagctgaagggccaccagctggtggagaccctgcccactgttggtttcaacgtggagcctctgaaagctcctgggcacgtgtcactgactctctgggacgttggggggcaggccccgctcagagccagctggaaggactatctggaaggcacagatatcctcgtgtacgtgctggacagcacagatgaagcccgcttacccgagtcggcggctgagctcacagaagtcctgaacgaccccaacatggctggcgtccccttcttggtgctggccaacaagcaggaggcacctgatgcacttccgctgcttaagatcagaaacaggctgagtctagagagattccaggaccactgctgggagctccggggctgcagtgccctcactggggaggggctgcccgaggccctgcagagcctgtggagcctcctgaaatctcgcagctgcatgtgtctgcaggcgagagcccatggggctgagcgcggagacagcaagagatcttgatccagacagagcagcatatctttgctcatacaaactagaagaaccagctgatccttgagaaatttacgcttagtctatcaaacaagaaatgctggcttggcccggtggctcatgcctgtaatcccagcactgtgggagaccacggtgggggaatcccttgagcccaggagttggagagcaacatcacaacaccccatttctactaataatcaaaaaattggccgggcatggtggcatgtgcctgtagtcccagctacttgggaggctgaggcaggagaatcgcttgagcccaagaggtagaggttgcagtgagccaagatcgcgccactgcactccagtctgggcaacagagtgagaccctgtctcaataataataataataataatgatgatactctaagaaaaaaatctcaacatacttcatttaatagctcgttaccaagtgtgaatgaagcaatatgtcataatagagtagccactggttgcataataatagagacctaaattctcaaatagggaaagaggttttaaaatcaaatttgaggccaggtgcagtggctcatgggcggaggagggcagattacttgaggctaggagttcaagaccagcctggccaacatggtgaaaccccatctctactgaaaatacaaaaattaggcatagtggtgcacgcctgcagtcccagctactcaggaggttgaggcagaagaatcgcttgaacccaggaagtggaggttgcagtgagccgagattgtgctgctgcactccagcctgggtgaaaaagacaggctgtgtctccaaaaagaaaaaaaaaagtcaaattcaaatatcatctggacatgtcacaatggatcgcggatccttatgagtgattttccccagtggcccctggggatgtgccactgtcactcagaagggcaagctaggcagggcccatacaacagcaggggtctgcaggttagacgttccctgccctgggacgctcacccctgggcaagaggctggaagttcacaccatccaaaatttatccttgttttttttctgatgctaattagcctctcccgattttatgacatcttgtgttgatctttttcaaaaactcattttcttttttttccttctcttttctccttcttgtagcacatatctttcgttaaagatcagatcaataaaatattttatttattcattaatttaacaa

SEQ ID NO: 269601 - DNA, 1621 bp, Homo sapiens
  misc_feature (1)..(3): n is a, c, g, or t
nnngcttccttcccatctcgctcttgggtcatgcctggccagcagaaagcagctccataggggaggagagccacgcaggatctcacagctgcagtctaatagtaacacagaggattcagcagtggccaccatgggttctgtgaattccagaggtcacaaggcggaagcccaggtggtgatgatgggcctggactcggcgggcaagaccacgctcctttacaagctgaagggccaccagctggtggagaccctgcccactgttggtttcaacgtggagcctctgaaagctcctgggcacgtgtcactgactctctgggacgttggggggcaggccccgctcagagccagctggaaggactatctggaaggcacagatatcctcgtgtacgtgctggacagcacagatgaagcccgcttacccgagtcggcggctgagctcacagaagtcctgaacgaccccaacatggctggcgtccccttcttggtgctggccaacaagcaggaggcacctgatgcacttccgctgcttaagatcagaaacaggctgagtctagagagattccaggaccactgctgggagctccggggctgcagtgccctcactggggaggggctgcccgaggccctgcagagcctgtggagcctcctgaaatctcgcagctgcatgtgtctgcaggcgagagcccatggggctgagcgcggagacagcaagagatcttgatccagacagagcagcatatctttgctcatacaaactagaagaaccagctgatccttgagaaatttacgcttagtctatcaaacaagaaatgctggcttggcccggtggctcatgcctgtaatcccagcactgtgggagaccacggtgggggaatcccttgagcccaggagttggagagcaacatcacaacaccccatttctactaataatcaaaaaattggccgggcatggtggcatgtgcctgtagtcccagctacttgggaggctgaggcaggagaatcgcttgagcccaagaggtagaggttgcagtgagccaagatcgcgccactgcactccagtctgggcaacagagtgagaccctgtctcaataataataaaaaaagataaacatggtgttaccatttgacccagcagtttcatacccaggagaattgaacgcatatgtccacatagaaactcgtacacagaagccaaaatgtggaaacccacgtgtccatcaacagatgaacggttaaacaaaatgtccatccatagaacggaatattattcagtcataaacagaatgaagtactgtaagtgaaaagccagttactacatattgtgtgattccatttatacggaatttctagaataggcacatccatagagacggattagtggttgcttaagactgggagggagggggaaataggaggtgacagctaatgggcagttttatttttgatgtaatgaaaatgtgcttacataagccgagcaggcataaacagaaaaagtgccctaagattgtgataatggtacaattctgtcaattgcataattggtggatgatgtgtgaattatgtctcttaggataacagctttactggcgttaccagaaaaagataaaataattacattccg

SEQ ID NO: 269602 - DNA, 478 bp, Homo sapiens
cttaacaggtggggattacaatttgagatgagatttcggtgggaacacagagccaaaccacatcaaccagtaaatcttgggctgatttgttacacagcgatagataacttactacgtcaggatcatggttactggaagactggtttatgtcctgctggtcctccccaccttgccttgcttgctctatggaaggggcttccattatgggaactgcctggggagaggctcatggggcaaggaactgatgcctccagccaacagccagcaaggacctgagggctgcccactgccatgagtgagtctggaggcagattttccaccctgagatgcctgcagctccagccagccccttgactctagccttgaggaacctacagccaaagccacccagttaccctcacccagattcctgactgctggaaattgtgacatcgtaaatgtttcttgttttaagccaatacatgttggtgtaattttt

SEQ ID NO: 269603 - DNA, 380 bp, Homo sapiens
aaagcaactcatgacatataatggagctcccataagattatcagtgacttattcagcagaaattctataggccagaagggagcacccaaatatatgaagcaaatattgaatggaagggaaaataggcagcagcacattaacagtaggtgatttcaatacctcgcttacaacaataggtcaaacaaccaggcagaagatcaataaagaaacagagaacttgaacaacactacagacttaatggacctaacaaacatatagagaatattctacccaacaacagtgaatgaactattccaagagttcacagaacattctccaggataggtaagatgttaggtcacaaagcaagtcttaacacacttgaaaagattgaaatcat

SEQ ID NO: 269604 - DNA, 595 bp, Homo sapiens
tcagtgcccttagcaagcacagcaatatttataaataaatatttattaatgaagatcctaataataagttccttataggattaagtaatgtgctatgcgttatttaggaataattcatttaagaatgtattctgatactggaatcctacttgctcaagaaattaacacatacttgttttacctgtggaaatacacatttcctcaaagccaactcactaataaagcaagaaaatttatatcaaaacaacaatgattaggtttgactatgcaattgtgagttgatttctaaataacaaaggtatggtgtttttcttccttttggttaaacatatatcctttatatatatgacatttcatgccacatatgcaaacacacatataaataacgtcgtgaataatatattctggaaatgaacctctggtcattctagtttagtcggtgttctcacaaaggaaagaaaaaaattagacacctacccaaggcaagtaaaattatttttttacatatactaataatgattttactttttcacatgctttttctaaacattttgtcactttattgcctttttgcatgtatataaaatgtttgtgg

SEQ ID NO: 269605 - DNA, 541 bp, Homo sapiens
tcagtgcccttagcaagcacagcaatatttataaataaatatttattaatgaagatcctaataataagttccttataggattaagtaatgtgctatgcgttatttaggaataattcatttaagaatgtattctgatactggaatcctacttgctcaagaaattaacacatacttgttttacctgtggaaatacacatttcctcaaagccaactcactaataaagcaagaaaatttatatcaaaggtatggtgtttttcttccttttggttaaacatatatcctttatatatatgacatttcatgccacatatgcaaacacacatataaataacgtcgtgaataatatattctggaaatgaacctctggtcattctagtttagtcggtgttctcacaaaggaaagaaaaaaattagacacctacccaaggcaagtaaaattatttttttacatatactaataatgattttactttttcacatgctttttctaaacattttgtcactttattgcctttttgcatgtatataaaatgtttgtgg

SEQ ID NO: 269606 - DNA, 371 bp, Homo sapiens
cagcgggctaggaggcagggaacgcccttccacctgactgtggcctgagggtgccttccctggggcccagccggttccgcgggccagagcggtggctggcgcagtgctggggcgaggctggaggctgggtacttggccaggtctgaggccacgggaacagagggcttggtcccacccggctcagttaggagcagggagctgaagtgtggcctctttgctgctgaactgaggactttttttcagaagggattaggcaggaggaccatgtgaccaatgaggaaactgttttgttttgtttgatttttataagtgtaggaagctcttttgacttagttgcttttacaacaactttaccaagtctcatcacaatt

SEQ ID NO: 269607 - DNA, 533 bp, Homo sapiens
aggcatgagaatcacttaaacctgggaggaggaggttgcagtaagctgagatcttgccactaaacttcggcctgggtgacagattaagactgtctcagaaacaaaacaaaacaacaaaaaagcttttagagcaagttcatgggagatgcagcaggaggcgcaggaaccacacatgtgctagtgaggagtgtggggagactgggagggcccacaggtattgtgctgcttctggctgagggcaggggaatagggtggctgcttctgaaagcaaatatcctgaaaaacctgttgctggtactccaaattctggttcccatgtagatcatgaaacctgaaaaacttccaggcaagtagctttcagaatctttcctgctgtgattagctttcactgcaggtagtgattacctgtgagataacatctgggaattattgattgaaaagaccttcactatcggttgggggcggtggctgatgcctgtaatcccagcactttgtgaggctgaggcgggtggatcacctgaggtcaggggttc

SEQ ID NO: 269608 - DNA, 1132 bp, Homo sapiens
aggcatgagaatcacttaaacctgggaggaggaggttgcagtaagctgagatcttgccactaaacttcggcctgggtgacagattaagactgtctcagaaacaaaacaaaacaacaaaaaagcttttagagcaagttcatgggagatgcagcaggaggcgcaggaaccacacatgtgctagtgaggagtgtggggagactgggagggcccacaggtattgtgctgcttctggctgagggcaggggaatagggtggctgcttctgaaagcaaatatcctgaaaaacctgttgctggtactccaaattctggttcccatgtagatcatgaaacctgaaaaacttccaggcaagtagctttcagaatctttcctgctgtgattagctttcactgcaggtagtgattacctgtgagataacatctgggaattattgattgaaaagaccttcactatcggttgggggcggagattacaggtgtgagccaccacacccagccagaatttcttgaataatctgtctccatttctctatatagcctcattgatctatctaaactcccatatctattttggttgctagactgttcatcccaattacatgtgccagtgtcactgctacactaattgaattactataaatgtataatgttttcctatatgttcgtggtacattttttttgcaacgttctcccaaggtctgaggaacactatgtcaaggcatggcatgaaaggaatacaggtctcccaaggctttagagaagaatgatttgttcatggtgtcacaaagcaaggggtgaggggcacaattgggatgaaaacccagggatctacgtaattcctccatctttccactgccccagagtgggaaggtaggggtagctgagaggttttgaggaccagaggatagcggggagtagtctggatagacttttctgtctctaagtcctgttaactccactctcctattgcttttgcatgggtccctccccagctatcagcatcctgaggcctcctctctcacccagagtattgcaacagttgtgcaaaccttcctgacgaagaccaggtcagcactcctttgggtgagagaggaggcctcaggatgctgatagctggggagggacccatgcaaa

SEQ ID NO: 269609 - DNA, 924 bp, Homo sapiens
cacgtgccaccacaacatgctaattttttgtatttttagtagagacagggtttcaccatgttagccaggatggtctcgatctcctgacctcgtgatctgcccgcctcagcctcccaaagtgctgggattacaggcttcagccaccgcgcccggcccagtttttaagtgttgtagagatggagtcttgctttgttgcccaggctggtcttgaactctgggctgaagcgatctgcccaccttggcctctcaaagtgcggagattacaggtgtgagccaccacacccagccagaatttcttgaataatctgtctccatttctctatatagcctcattgatctatctaaactcccatatctattttggttgctagactgttcatcccaattacatgtgccagtgtcactgctacactaattgaattactataaatgtataatgttttcctatatgttcgtggtacattttttttgcaacgttctcccaaggtctgaggaacactatgtcaaggcatggcatgaaaggaatacaggtctcccaaggctttagagaagaatgatttgttcatggtgtcacaaagcaaggggtgaggggcacaattgggatgaaaacccagggatctacgtaattcctccatctttccactgccccagagtgggaaggtaggggtagctgagaggttttgaggaccagaggatagcggggagtagtctggatagacttttctgtctctaagtcctgttaactccactctcctattgcttttgcatgggtccctccccagctatcagcatcctgaggcctcctctctcacccagagtattgcaacagttgtgcaaaccttcctgacgaagaccaggtcagcactcctttgggtgagagaggaggcctcaggatgctgatagctggggagggacccatgcaaa

SEQ ID NO: 269610 - DNA, 724 bp, Homo sapiens
gcactgcctctgagctcggaggccccggtcgcctgggcccggacgccggcccggacgccagcccgggaagcagcaggtcaggagcgggagccggagccaaagctggacccaggccggaagtgcggcgccctccgtgggcctctctaggagcggaggcgaccgcgtctcagtgggaataaccccttcagctccgggaggccgtcgccgcgtgaggtgttcgctcgctttcctcctgagaagggccgaatgatggccgctagtcactctggggacatttggaggattgaatgcctgtaaccgcgcagggcccacggcctgggtttccatccccgatccgcctcatggctgagctcctcggacaagttattcaacctctctgagtcacagctttcttccttgcaaggggttgctgtaaggattccatgaattaatgcatgtgcagcactcagaagagaggctggaccccgcgtggtggcgcgcgcctgtgatcccagcactgggaggccaaggcgggaggatagcgtgagcccagaggcttgaggctgcagtgagctatgatcacgccactgcattgcagcctgggtgacagtgagacactgtctggaggggaaacaaaaaagctatatatcatttttttccattatttatactctgctataaaagaacttttggtggagggtcacgtttgagacatgagaataagaaacatgataaaaatgatagt

SEQ ID NO: 269611 - DNA, 496 bp, Homo sapiens
ccgagatggactgtgagctccagagctcgctgcagtggcccttgttcttcccggtggatgccagctgcagcggagtgttccggccccggcccgtgtccccaagcagcctgctggacacagccatcagtgaggaggccaggcaggggccgggcctagaggaggagcaggacacgcaggagtccctgcccagcagcacgggccggaggcacaccctggccgaggtctccacccgcctctccccactcaccgcgccatgtatagtcgtctccccctccaccacggcaagtcctgcagagggaaccagctctgacagttgtctgaccttctctgcgagcaaaagccccgcggggctcagtggcaccccggccactcaggggctgctgggcgcctgctccccggtcaggctggcctcgcccttcctggggtcgcagtccgccaccccagtgctgcaggctcaggggggcttgggaggagctgttctgctccctgtcagctt

SEQ ID NO: 269612 - DNA, 562 bp, Homo sapiens
agagaacaaagtaataagagtacatttgtatgaagataaacattccatactaacttttaaaaatgcaattttgttttccaaatggcttaagaccaggaagcgtactttaacatttacagcagagactgtccaagttcagggttccaagcatgaaatgaaaaggggatattgagttgtttgtatctattcaataagtaaaaatatgtttcctgaggttttagaactgaggttttagaagaaggtggagacaagaggggtaaaagaagggattcaatgggaaacttcaaagtattaattaactcatccaactgtgtagagatctcagcttaatgtatgaaaattcagtgtcaaacttagtttaaaaggcagactacagaacgagtgcttggcaagccaggaatcaacgcacttttgtcagctagaatggtttggctccaagggagtgtgagcagtgaagagcatttcaagtggaggaataggaggagaatctccttcaccctactcactgtaagcattgtaaggcacatggaaatacaggaatgtttgaaagccactggatccg

SEQ ID NO: 269613 - DNA, 604 bp, Homo sapiens
aatcaaccagaaagctttgctcctactaaatatcaagaaaaagcaatgtattcgtttcaccgcttggtaggattttattatgaaaatatgaagactgccttgtgctatttgataagcacccttaccatctgtgccttaatggaaaattcattacattttacatgaacctgatctatatccagacctcagagtaaaccatagctttttattttaactggttacttgctaatttcattttctctgagcgatttcatttctgcagtttggtctgtcttaacaaaggatttttcttaaagaaaaacccagatcaaaagcgaattccagactaaagctttctgattctatgtgcaaatgatattggctgctaaaaaatagttacttataagaaagtttgttatattttttagaatatgagaaaatagttcaaaattatttttattttgctttgaatgtagatgcagagaatgccaagaaattatcacaattttaatttttatataaaagatcataaaaggtatcactatatgggctgcattatactacactgaacagataatttatacagcttcagacttccttaacatttaattaaagtatttcttca

SEQ ID NO: 269614 - DNA, 480 bp, Homo sapiens
caggagagaataaccagaggaagggctgaaaatcctggagaacaccaacattaacaagcttcagtttgtcagaaccagttgggatgcaacaggattttcagttttgctgtcttccatgcatgaatggcttctgttaggttggaatgaccaagatgatttttccacccattcttgggacctggactatgatagccacagcagctaaagatgccagcaggtccaaaggactccactgactcaactgatctgagggaccccatgagaagcctactcatcaaagaatgcagtttctaaatcctgatgagttcaccccccttgccctgaccaatcaacaatcctaattctccagtcccttgccctccatgatcctcttaaaaaccctagcccagaattcctcaggaagatggatttgagggtctccttccaactcctcactcagcgccctgtggtcattaaactttctctgctgcaaacctgctg

SEQ ID NO: 269615 - DNA, 510 bp, Homo sapiens
caggagagaataaccagaggaagggctgaaaatcctggagaacaccaacattaacaagcttcagtttgtcagaaccagttgggatgcaacaggattttcagttttgctgtcttccatgcatgaatggcttctgttaggttggaatgaccaagatgatttttccacccattcttgggacctggactatgatagccacagcagctaaagatgccaggttctgcatactatgaaactactacatcagcaggtccaaaggactccactgactcaactgatctgagggaccccatgagaagcctactcatcaaagaatgcagtttctaaatcctgatgagttcaccccccttgccctgaccaatcaacaatcctaattctccagtcccttgccctccatgatcctcttaaaaaccctagcccagaattcctcaggaagatggatttgagggtctccttccaactcctcactcagcgccctgtggtcattaaactttctctgctgcaaacctgctg

SEQ ID NO: 269616 - DNA, 395 bp, Homo sapiens
agtgtcatttgctctctgcaaatttgtgaattttcaagttttcctaacctcttgtgatcagggaagatattttatatgatatatatcttttaaaatctattgacccttaatttatggcctgacatggtctattttggagaatatcccatgtgcaagtgtattctattgttatcgtgtattctatatattttctgttagatctaattggcttattgtattgttcaagtgctctatttccttattggtcttctgattgttttatttattattgagaatgggttattgaagtctctaactattgttgtagaactgtctatttcttctgttaattctgtgtatttttccttcatatattctgatggtctgttattaggtatataaatgcttataattgt

SEQ ID NO: 269617 - DNA, 404 bp, Homo sapiens
catccagaagccacgagatggtaacagtgcttcctctgcaggggctctgatcgaccttgggtctgcaaggggtagcagtcaggggtcacctgagcctagctcagtgggtgtgctcctcacactgcatgaccgcatgctgtgggtgggcctgtgcacatgtgtgtttgtgcacacagaggaaacgagtgtaggcggggatcaaggtcatttttacaaacagaaaagctgcagcatctccataactcagcttgtgggctagacagtcaccacagaaaaaaggaagccagaccaaaactgaaccactggactactgcaagcccgccccagcagggagccagtgcaggacccctgtgagaaatgggaactctgtactatctttatagcttttctataaatctaaaact

SEQ ID NO: 269618 - DNA, 417 bp, Homo sapiens
agttggattcttacagatgaaagatagaagtagaccttgttttaaggatcagacgcggtcttgaaaagttgtgtatatgatgaaatttcgttaatcagatcacacttcccaatagacaaataatgatatcaaagattctttatttcattgttccaacacttaagctttttattttttcaacccttcaaaggattagatttctgtgcattccccattcctatacagttgttaatttatttactaagatgctgtgcaaaacatgtaagttttttagtggatatcaggaacatatgagacagggcgcggtggctcacgcctgtaatcctaacactttgggaggccgaggtgggcagatcatttgaggtcaggagtttgagaccagcctgaccaacatggtgaaaccccatctctattaaa

SEQ ID NO: 269619 - DNA, 720 bp, Homo sapiens
cttgtaaaatttctgacaatatgtctgctgatagttgttactgtgttcctctgtatgtgtttgtatgtatgtgtttttaattttctttctgctggttaattttaagattttctctttacaatcgttttccagaaatttggtaataatgtcctttaatatgtctatgtatgctgtcagtgtgtttatcctacgtgggattcgtagagtttcatcgatctgtgggatatagttttaatgaaagtgtgaaagaaatattaaacattatttcttcaactgctattcccaatttgttctttatgagactctatcccatgtatattagccctcttgatattgtaccacaggtcactaaagtttcattcatttttttggtcaatcttttattccactctgtacttcattttggataactattaagtgtttggattttgttgtcttcctttaaaaaatgttgaagttgaaaaaactggaacatttgtacactgttgatgggaatgtaaaatggcacaccattgtggaaaacagtaggacaatccatcaaaaaattaaaaatggaattaccatataatcgaggaattccacttctgggtatataccagaaagaactgaaagcagggtctggaagaggtatctgttcaccattgctcatagcagtattattcacaaatggccaaggttggtagcaacccaagtaaccatttataaacaaataacaataaa

SEQ ID NO: 269620 - DNA, 443 bp, Homo sapiens
gggtgtgtagaactccactcagcctcatggatacatctacaagtctctcaacccatcctgttacagttctccatgagagtcacctcacacttggaaaagaaggaggttaaagcagagtattgttggcagccagctatgcccatcctcttgtaaataactttccaacacacccatttccttgccttaaggtgcaggttcctacttctacaaaatttcaaatgattgcaggtcaaaaacctttggagttactcacaaataataataaaatttcaaataactagggtctacttgtccatcaagatgacattaccagtggaacccacctgttaattttaaagtagcttcagaacccaacaaaaattatgtaagcctggttaaatgtccttttttcttcttgcctctaataaaatcaggatcttcggccttgatactaaatatgtgta

SEQ ID NO: 269621 - DNA, 607 bp, Homo sapiens
  misc_feature (8)..(8): n is a, c, g, or t
  misc_feature (14)..(14): n is a, c, g, or t
  misc_feature (33)..(33): n is a, c, g, or t
  misc_feature (37)..(37): n is a, c, g, or t
tttggttnggtttnggatttggggaaagccagnattncaggcatgagccaccatgcctggcctttaatatctttaatatgaatctttaacagagaaggattttttaaacaattacaataccttatattatcttatgatctgatatccagtttgtacttattttctgtcttgtaaatgtcttttaaaaatagattttttttcacattagaatccagaaaggttcacaaattgcagttggctgaaatgccttatctcttacgctaatagttcctccactaattaaaaaaaaaattgagtagttttagatttttagaaaaattgcaaagatgctataaagaattcccagttttctcatattactaacaccttacattagtatgataccgtggtaagaaaatgaaaagacaagctacaattgagattagttgcaaaatcatctgtctgataaaggacttgtatccagaatatataaagaactcttacaactcactaagacaagcaatccaatgtaaaagcaggagtacaaaattagtgtaaaaaattctaggtttattctcagggctaaaccatgggcaagagatttaaagagtgattttacaaaaaaaaa

SEQ ID NO: 269622 - DNA, 1070 bp, Homo sapiens
ccacggtctctaaggtgaaggtcaaggtggatgcgacaatggatttaatataatgagtaatgtatgtatttaatttaatttttggtaagggattctttttcagctttaatcttagatccaggggtacatgtaccggtttgttacgtgggtgtgttgcatgatgctgaggttaagtgtacaattgatcttgtcacctgggtagtgagcatgatacccagcaggtagtttttcacctcttgcccctccctcccttctccctcttctagtagtccccagtatctgttgttcccatctttatgttcatatgtacccagtgttcagctcccacatataagtgagaacatgcagtattgagtgttctgttactttaatttacttaggataatggcctccagctgcatccatattgctgcaaagaatgtgattttgttcttttttatggttatgtagtattccatggtgtatgtgtggaaatctttaaacatttatgaaatgaaacagtagaatgagccaccatgcctggcctttaatatctttaatatgaatctttaacagagaaggattttttaaacaattacaataccttatattatcttatgatctgatatccagtttgtacttattttctgtcttgtaaatgtcttttaaaaatagattttttttcacattagaatccagaaaggttcacaaattgcagttggctgaaatgccttatctcttacgctaatagttcctccactaattaaaaaaaaaattgagtagttttagatttttagaaaaattgcaaagatgctataaagaattcccagttttctcatattactaacaccttacattagtatgataccgtggtaagaaaatgaaaagacaagctacaattgagattagttgcaaaatcatctgtctgataaaggacttgtatccagaatatataaagaactcttacaactcactaagacaagcaatccaatgtaaaagcaggagtacaaaattagtgtaaaaaattctaggtttattctcagggctaaaccatgggcaagagatttaaagagtgattttacaaaaaaaaa

SEQ ID NO: 269623 - DNA, 604 bp, Homo sapiens
tcacctgcctcagccgcccaaagtgctgggattacaggcatgagccaccatgcctggcctttaatatctttaatatgaatctttaacagagaaggattttttaaacaattacaataccttatattatcttatgatctgatatccagtttgtacttattttctgtcttgtaaatgtcttttaaaaatagattttttttcacattagaatccagaaaggttcacaaattgcagttggctgaaatgccttatctcttacgctaatagttcctccactaattaaaaaaaaaattgagtagttttagatttttagaaaaattgcaaagatgctataaagaattcccagttttctcatattactaacaccttacattagtatgataccgtggtaagaaaatgaaaagacaagctacaattgagattagttgcaaaatcatctgtctgataaaggacttgtatccagaatatataaagaactcttacaactcactaagacaagcaatccaatgtaaaagcaggagtacaaaattagtgtaaaaaattctaggtttattctcagggctaaaccatgggcaagagatttaaagagtgattttacaaaaaaaaa

SEQ ID NO: 269624 - DNA, 581 bp, Homo sapiens
ccacggtctctaaggtgaaggtcaaggtggatgcgacaatggatttaatataatgagtaatgtatgtatttaatttaatttttggtaagggattctttttcagctttaatcttagatccaggggtacatgtaccggtttgttacgtgggtgtgttgcatgatgctgaggttaagtgtacaattgatcttgtcacctgggtagtgagcatgatacccagcaggtagtttttcacctcttgcccctccctcccttctccctcttctagtagtccccagtatctgttgttcccatctttatgttcatatgtacccagtgttcagctcccacatataagtgagaacatgcagtattgagtgttctgttactttaatttacttaggataatggcctccagctgcatccatattgctgcaaagaatgtgattttgttcttttttatggttatgtagtattccatggtgtatgtgtggaaatctttaaacatttatgaaatgaaacagtagaatgagccccatcaatcaactacagtaagtaggatcgattcccattttatttcatctttgtttgacctatacttttc

SEQ ID NO: 269625 - DNA, 160 bp, Homo sapiens
gcgaatgagattttaatcacctgtcactgccgcccgcactttctctatatttatgataatttttgggtctttttattgaaatcagtgttgactgaatcaagtaatcctgattagcaatctcactgtacccagtcaagagtgaaatgcatcccagccccgc

SEQ ID NO: 269626 - DNA, 876 bp, Homo sapiens
gagctatggatagtgccactgtactccactctgggtgacactgcaagaactgtctcaaaaaaaggcagggagattatttaatgcggttcattcaggatgagcttgtaaagtgttacatagctaactagacctagttgggtttcagaggtcaaatcaagtaattaggttttgggctgcatgcagaggtggttagtagttttgatgtccgcacactgggcttgaactgtgactcctgagtagctgggattacaggggcctgccaccacattgggctaatttttgtatttttagtggagatggcgttcaccatgttggctaggctggtcttgaactcctgacctcaggtgatccgcccgcctcggcctcccaaagtgctgggattacaggcgtgggccaccgcacctggccctcgtgttgggttttaaaacccactcttttttttcccccccaaactctgacttcacctttctctttatgaaaccgttctctttttggggcgggggtggtggtgaagaagctgctttggatggtggtgtgtggtacttgtgtcatcttcactcctgatgatccctttcctcataaactctgcactgcttttagcctgttttgttcgtgttataagttcttccatccagtccctgcactccaccttttaacccttttcaaaagctgcttcgcaaagggtcttgactaaagttgcttgcttaatgaatatgaagcagcctaaggatgagagaaaacgaggcagcagctggaccctctggagaatgttactttgtattttgtttacagctggttgtgactaagctctgtcctctaaagtcggttctaggggattaaaacagctctggctgatggcgcccaataaaataaaac

SEQ ID NO: 269627 - DNA, 939 bp, Homo sapiens
gagctatggatagtgccactgtactccactctgggtgacactgcaagaactgtctcaaaaaaaggcagggagattatttaatgcggttcattcaggatgagcttgtaaagtgttacatagctaactagacctagttgggtttcagaggtcaaatcaagtaattaggttttgggctgcatgcagaggtggttagtagttttgatgtccgcacactgggcttgaactgtgatcctgagatttatgttcccagtctccttcaatctggagagattattacttacaatgagttgatccttgttatactttggtattttggaagaaagttttatccccagacatgttgagacaagagatctaactgaaggagatgagaggatttctataccatatgcgttaccttctaatgctggccacctctgaagggcacgtggcagctgagacgaaattgattttcttcatcactgatcccgtggcctttacacaggctcagaggtgcatcagaatccacaatgaagtggacaagattagtgaccaacacatctgtaaatgttatattttctttttttagttccttagctttttctaccctaggataaattattgaccagttttctgcagtcagattcctgaatcatgttgggttttttttttttttagtttcactcttgtcgtccaggccactcttgtcttgcctcactgcaacctctgcctcccgggttcaagcgattctcctgcctcagctacttgggaggcagagacaggaggaacacttgagcccaggagatcaaggctttagtgacctgtgattgtgacaccgcactccagtctgggtgaccgcatgacctggtctcttaaaaaggcaggaaatttattggctattatccagccttttctaaattaaaccaccccaagtactattctcatatccatgctgttccg

SEQ ID NO: 269628 - DNA, 461 bp, Homo sapiens
ccctctctcaagggctttctgggaacccaggggactatctgcagaagaacgttctttggggcgcggtgggaagccaagcaggcctcctcttttgggcgctggtgaacgcaggatccgcatggaagcgactccgaccccacggcgtttccacgcctctgcggcttgggagggagctaggggcttcaggaactcaggctgtgggttttcgagttgctttcctgataaatgaaaatcctcctgataacatttagattttgtctctccaatagaaacggcagcacgtctcgctgaggcccgcgcctgcccccgggtactcgaggctcggtggctgctcctctagcccctcccgcgacgccttcgtccggtcactccggccttgcaccctgtggcgctcaggcctctccgctctcgtttgctctcgtacagacggtttccctaaaaaaaatctttacacgtttaaa

SEQ ID NO: 269629 - DNA, 1318 bp, Homo sapiens
ggcaatcagatctggatctgccctgggtgtaacaagcctgacgatgggagtcccatgattgggtgtgacgactgcgatgactggtaccactggccctgtgttggaatcatgactgcacccccagaagagatgcagtggttctgccccaagtgtgcgaacaagaagaaggacaaaaagcacaagaagaggaagcatcgagcccactgacgactcccgaggggctggaccaagcggggtcagcccgggcttcttccctggcgcctctggaagggagctggtgcaagtctgccgtcacatccacccccagatgcctgtggataaagaacccaggaggactgaggctggaacacaccgcgcacctggattgttcactcccgagccgccttggcctgtggctccgtggcagtgcgacagaaggaaactcaagcagaggcgtggcctgggggctgcccctcctccacttctctaataccagtgacaagtattattaataaagagcgtacatcttcccttttgatttcctttattctctccagggccttttcattgaggtattagatgagaagataatgtacaaactgcctcaactgtaatttaaggatgatagagtctgtatacagttttcagcccctttccctctatagtaagataatcagaataacataaaagaaaactccagttggagtaccggtaaatatttttgtgataagaatatatgaagcttccctccttcccccgtttttagtactaacatgtaaaatgttcaggcttttgtgaaataccttatattttttaagaaaaaggtttctatcatgtcctgtttgcttttgtgcaaattatttttgtttaatgtattttatatcttcgttgcattctaattttgcccttctttaaactgctggagtctcttctcactgcttgtacatttcatcaacttgtataaaaactcttcagactaaaagattgcccctaatgtaaataataaatatttatgaagtagttattttttaaatttttatcgtgtttaattctggctttctctgaaatccactgtgatttcagccaggtctgtaatgacgctggacagaaacaaggctagagaaaaagccatcgttcaaagaaatttcccttgagctcagcctgcgcagtgcccggaaacatggtggggaaagggcccgagcagttggaaggaaaacaaggcaatttaaatttagagtttatgacttgaagttgttttgtttgttgtctattttgtttttgtaaatttctttgacagacttttactaaaaggacatgtagtttccatgaaagtaaaaaa

SEQ ID NO: 269630 - DNA, 509 bp, Homo sapiens
ggcaatcagatctggatctgccctgggtgtaacaagcctgacgatgggagtcccatgattgggtgtgacgactgcgatgactggtaccactggccctgtgttggaatcatgactgcacccccagaagagatgcagtggttctgccccaagtgtgcgaacaagaagaaggacaaaaagcacaagaagaggaagcatcgagcccactgacgactcccgaggggctggaccaagcggggtcagcccgggcttcttccctggcgcctctggaagggagctggtgcaagtctgccgtcacatccacccccagatgcctgtggataaagaacccaggaggactgaggctggaacacaccgcgcacctggattgttcactcccgagccgccttggcctgtggctccgtggcagtgcgacagaaggaaactcaagcagaggcgtggcctgggggctgcccctcctccacttctctaataccagtgacaagtattattaataaagagcgtacatcttc

SEQ ID NO: 269631 - DNA, 1078 bp, Homo sapiens
ggcaatcagatctggatctgccctgggtgtaacaagcctgacgatgggagtcccatgattgggtgtgacgactgcgatgactggtaccactggccctgtgttggaatcatgactgcacccccagaagagatgcagtggttctgccccaagtgtgcgaacaagaagaaggacaaaaagcacaagaagaggaagcatcgagcccactgacgactcccgaggggctggaccaagcggggtcagcccgggcttcttccctggcgcctctggaagggagctggtgcaagtctgccgtcacatccacccccagatgcctgtggataaagaacccaggaggactgaggctggaacacaccgcgcacctggattgttcactcccgagccgccttggcctgtggctccgtggcagtgcgacagaaggaaactcaagcagaggcgtggcctgggggctgcccctcctccacttctctaataccagtgacaagtattattaataaagagcgtacatcttcccttttgatttcctttattctctccagggccttttcattgaggtattagatgagaagataatgtacaaactgcctcaactgtaatttaaggatgatagagtctgtatacagttttcagcccctttccctctatagtaagataatcagaataacataaaagaaaactccagttggagtaccggtaaatatttttgtgataagaatatatgaagcttccctccttcccccgtttttagtactaacatgtaaaatgttcaggcttttgtgaaataccttatattttttaagaaaaaggtttctatcatgtcctgtttgcttttgtgcaaattatttttgtttaatgtattttatatcttcgttgcattctaattttgcccttctttaaactgctggagtctcttctcactgcttgtacatttcatcaacttgtataaaaactcttcagactaaaagattgcccctaatgtaaataataaatattttggaagcggcgctttaatttatcggggtaacggggtctctgaaaccaggggtacgcggggaaaccgcgaaaagggggaaacccctca

SEQ ID NO: 269632 - DNA, 400 bp, Homo sapiens
tctccaccagctgccaggtcacagaggcaggaacaaattcttctggttcatcggcctcaacaatgatcacttggctgcttggagggatcatttcagaattctttgcaacagtaatggccgtttgaaggttatcacctagaagacaaagaaactttgcttgctgtatgtacaaacctcccctcagcaacaagaactgaggtctcccttttccactctgcttggtgttctttgagagcatttaccgctttctgccttattttatcttcctctctgctgtagactgcccctactgggcaaacactatgttcccatctccctctccatattctgcatcatatcctggtccatgtgtatttcaaaacatgtgtgaattaataaagaaatacttaagcatttaaaa

SEQ ID NO: 269633 - DNA, 498 bp, Homo sapiens
agccttggtcgcccctagtcggtcgtgagcctctttgccgcttgtctcccccagaagctgctgttccgcccacctagctttacccgccgttttacccccactataagggactcccatatttcttggcccctcccagctaatgggcacataggccttttgaacttttctttttaaagttggtatccatccactgggattgtcgacatctcgagtcttcttaaagaggtctcctggccgggctcagtggcttacgcctgtaatcccagcactttgggaggctgaggagagcggatcacttgaggtcaggagttcgagatcagcctgaccaacatggtgaaaccccgtctctactaaaaatacaaaaattagccgggtgtggtgatgcgcgcctgtaatcccagctactctggaggcagaggcagaagaatcgcttgaaccctggaggcggatgttgcagtgaccgagatcgcgccactgcactccagcctgggtgacaga

SEQ ID NO: 269634 - DNA, 507 bp, Homo sapiens
ttctgtataccagccgtgaacaagtagaatttgaaattaaaaagacattaagtatgaacaggttttttaatgaggcagactataaaactgtgatgaaatgtatcaactaaatagatattccatgttcacagatagaacaactcaataatgtcaagatataatttcttcctagcttatctatggagtcaatgcaatcccaatccaaatcccagcaagtcattttatggatattgacaaactgattataaagtttatgtggaaaggcaaaagaccaagaataaccaactcaatattgtgggagaaacaagttagaggactgacgctacctgactccaagacttagtataaagctacattaatcaggacagtgatattggtgaaacaacaagtagatcaatggaacagaatagagagcccagaaatagactcacataaatagagccaactgatgtttgacaatggagaaaagatagtcttttcagcagattgaaacactatctgcatgca

SEQ ID NO: 269635 - DNA, 413 bp, Homo sapiens
agcgtccagcagcagcgaggggcacggagagcaggcagtgcagaagtcaaacccctaacagccacaggaaactcagggcaaacggaagcgtttccattctccagcccttctttcaatattcttaacatgagcaatccatgagccctcattttgcagcccacagaacctcagccagcgtgtgaggaagaagctccaggcggcggcagccagcgtgtgaggaagaagctccacgcggcggccagtgtgtgaggaagaagctccacgcggcggcggccagtgtgtaagaaagaagctccacgcagcggccagcgtgtgaggaagaagctccacgcagcggccagcgtgtgaggaagaagctccaggcggcggcggccagcgtgtgaggaagaagctccacgcggcggccagtgtgt

SEQ ID NO: 269636 - DNA, 464 bp, Homo sapiens
aggcggcgccttcctcttggcccaggggctctcttggggacagtgtgcagtactccccaagggggctttgctgtgcaaaagcagcccctgccgatgctgcggctcccgtggatggagcactgccgtgggaacagagttggaactcatccaaaagaataaaagacaactgtgttggaagattgccaaggtttgtagctgtgccaccgcagacttcagagatgaacactgccttggagacgaggaggattcaagttgcagaagcatttaggtgctgcgtgaaccccagcagggccattccagatgctccacaggacagcgctgaacgcaccgcagtgagcctgggaggccctgggctactgctgcctccccttctctgggctgaacatcaaggtagtgcttctgtgttcttctcccaacttgtgcaagaaaggacattaaagttatttttatgaaattgcctaaca

SEQ ID NO: 269637 - DNA, 426 bp, Homo sapiens
actttgggagggccgaggcaggtggatcacttgaggccaggaggatatatatatatatatatatatagtattaaatacattatatgtattttatcatcatccaacaggggaagtccaaccagcaaacccttctgttggagatgtggcaacatgtggcaaaagccttgaaccaacacccactcttagcaccaccaaatccacttctgggtttttatctgaaggcaattaccaaggatacacagtcagcactgtttttatagcaaaaccctggaaataactgaagagcctgacaatggatagagccatacaatggaattccatggaagctatggaaaatgaaggcataccctatatttacgcataaagatataaagacttgtccaagatattttctgtaccaaatcaatatttgcatgcatatataga

SEQ ID NO: 269638 - DNA, 364 bp, Homo sapiens
  misc_feature (37)..(37): n is a, c, g, or t
gagtgaaagtgagcggcggcccgggcgggccaggggnggcgtgaggggaagtccaaccagcaaacccttctgttggagatgtggcaacatgtggcaaaagccttgaaccaacacccactcttagcaccaccaaatccacttctgggtttttatctgaaggcaattaccaaggatacacagtcagcactgtttttatagcaaaaccctggaaataactgaagagcctgacaatggatagagccatacaatggaattccatggaagctatggaaaatgaaggcataccctatatttacgcataaagatataaagacttgtccaagatattttctgtaccaaatcaatatttgcatgcatatataga

SEQ ID NO: 269639 - DNA, 2480 bp, Homo sapiens
gtcgacccacgcgtccgcggacgcgtgggcgcgcgtccggctgcgcttgcagcccagggcgtgaggtgctctttctggatcgccagcctcgaagttgaggcgtggactctggccaggtggctgttccagagcaacatgggagatgctgaagcaggcaagaagacctttattcagaaatgtgctcagtgccacacagtggaaaaaggtgaaaatcacaagactggtccaaatctctggggcctctttggctgaaaaacaggaaaagcaccaggattttcttatacagaggcaaacaaaaacaaaggatcgacgattcaatgatgaaatcgacaagctaactggatacaagacaaaatcattattgtgcatgcctatccgaagcagtgatggtgagattattggtgtggcccaagcgataaataagattcctgaaggagctccatttactgaagatgatgaaaaagttatgcagatgtatcttccattttgtggaatcgccatatctaacgctcagctctttgctgcctcaaggaaagaatatgaaagaagcagagctttgctagaggtggttaatgacctctttgaagaacagactgacctggagaaaattgtcaagaaaataatgcatcgggcccaaactctgctgaaatgtgaacgctgttctgttttactcctagaggacatcgaatcaccagtggtgaaatttaccaaatcctttgaattgatgtccccaaagtgcagtgctgatgctgagaacagtttcaaagaaagcatggagaaatcatcatactccgactggctaataaataacagcattgctgagctggttgcttcaacaggccttccagtgaacatcagtgatgcctaccaggatccgcgctttgatgcagaggcagaccagatatctggttttcacataagatctgttctttgtgtccctatttggaatagcaaccaccaaataattggagtggctcaagtgttaaacagacttgatgggaaaccttttgatgatgcagatcaacgactttttgaggcttttgtcatcttttgtggacttggcatcaacaacacaattatgtatgatcaagtgaagaagtcctgggccaagcagtctgtggctcttgatgtgctatcataccatgcaacatgttcaaaagctgaagttgacaagtttaaggcagccaacatccctctggtgtcagaacttgccatcgatgacattcattttgatgacttttctctcgacgttgatgccatgatcacagctgctctccggatgttcatggagctggggatggtacagaaatttaaaattgactatgagacactgtgtaggtggcttttgacagtgaggaaaaactatcggatggttctataccacaactggagacatgccttcaacgtgtgtcagctgatgttcgcgatgttaaccactgctgggtttcaagacattctgaccgaggtggaaattttagcggtgattgtgggatgcctgtgtcatgacctcgaccacaggggaaccaacaatgccttccaagctaagagtggctctgccctggcccaactctatggaacctctgctaccttggagcatcaccatttcaaccacgccgtgatgatccttcaaagtgagggtcacaatatctttgctaacctgtcctccaaggaatatagtgaccttatgcagcttttgaagcagtcaatattggcaacagacctcacgctgtactttgagaggagaactgaattctttgaacttgtcagtaaaggagaatacgattggaacatcaaaaaccatcgtgatatatttcgatcaatgttaatgacagcctgtgaccttggagccgtgaccaaaccgtgggagatctccagacaggtggcagaacttgtaaccagtgagttcttcgaacaaggagatcgggagagattagagctcaaactcactccttcagcaatttttgatcggaaccggaaggatgaactgcctcggttgcaactggagtggattgatagcatctgcatgcctttgtatcaggcactggtgaaggtcaacgtgaaactgaagccgatgctagattcagtagctacaaacagaagtaagtgggaagagctacaccaaaaacgactgctggcctcaactgcctcatcctcctcccctgccagtgttatggtagccaaggaagacaggaactaaacctccagctcagaaagacctaacatctcaaggatgcactgggaaccatgcctgggctttcaccttgaagcatggtcagcagcagagagagcaacgggaaggacaaagaaagaggtggggcagggagcacaccccaggaccctcacttttccctaatgaacacgcatgggctgaaatgaaggctctgggtaggggactgttttggatccaaggacctgtggacagtcggcctacttactctgagctgagggaacactgaacagtaaaagcgtcattagcgctg

SEQ ID NO: 269640 - DNA, 3255 bp, Homo sapiens
tggaaagatgttacttcatctcccaggtttgctcactgcaaatacaatcctgagaactgaactagggccttaaagtcctgacatgcatggcttggttttgtggattgcctctctcaacaggtggtgaaatttaccaaatcctttgaattgatgtccccaaagtgcagtgctgatgctgagaacagtttcaaagaaagcatggagaaatcatcatactccgactggctaataaataacagcattgctgagctggttgcttcaacaggccttccagtgaacatcagtgatgcctaccaggatccgcgctttgatgcagaggcagaccagatatctggttttcacataagatctgttctttgtgtccctatttggaatagcaaccaccaaataattggagtggctcaagtgttaaacagacttgatgggaaaccttttgatgatgcagatcaacgactttttgaggcttttgtcatcttttgtggacttggcatcaacaacacaattatgtatgatcaagtgaagaagtcctgggccaagcagtctgtggctcttgatgtgctatcataccatgcaacatgttcaaaagctgaagttgacaagtttaaggcagccaacatccctctggtgtcagaacttgccatcgatgacattcattttgatgacttttctctcgacgttgatgccatgatcacagctgctctccggatgttcatggagctggggatggtacagaaatttaaaattgactatgagacactgtgtaggtggcttttgacagtgaggaaaaactatcggatggttctataccacaactggagacatgccttcaacgtgtgtcagctgatgttcgcgatgttaaccactgctgggtttcaagacattctgaccgaggtggaaattttagcggtgattgtgggatgcctgtgtcatgacctcgaccacaggggaaccaacaatgccttccaagctaagagtggctctgccctggcccaactctatggaacctctgctaccttggagcatcaccatttcaaccacgccgtgatgatccttcaaagtgagggtcacaatatctttgctaacctgtcctccaaggaatatagtgaccttatgcagcttttgaagcagtcaatattggcaacagacctcacgctgtactttgagaggagaactgaattctttgaacttgtcagtaaaggagaatacgattggaacatcaaaaaccatcgtgatatatttcgatcaatgttaatgacagcctgtgaccttggagccgtgaccaaaccgtgggagatctccagacaggtggcagaacttgtaaccagtgagttcttcgaacaaggagatcgggagagattagagctcaaactcactccttcagcaatttttgatcggaaccggaaggatgaactgcctcggttgcaactggagtggattgatagcatctgcatgcctttgtatcaggcactggtgaaggtcaacgtgaaactgaagccgatgctagattcagtagctacaaacagaagtaagtgggaagagctacaccaaaaacgactgctggcctcaactgcctcatcctcctcccctgccagtgttatggtagccaaggaagacaggaactaaacctccaggtcagctgcagctgcaaaatgactacagcctgaagggccattttcagtccagcaatgtcatccttttgttcttttagctcagaaagacctaacatctcaaggatgcactgggaaccatgcctgggctttcaccttgaagcatggtcagcagcagagagagcaacgggaaggacaaagaaagaggtggggcagggagcacaccccaggaccctcacttttccctaatgaacacgcatgggctgaaatgaaggctctgggtaggggactgttttggatccaaggacctgtggacagtcggcctacttactctgagctgagggaacactgaacagtaaaagcgtcattagcgctgcttcattttgtatagggcttttctgtttgttacaagccaaacattgcctgtctttgcttcccgtccctgaatgcctttttgtgccagactgtcccaagaatcctaatttgtattccatagaggtattttatttttaatcctagagcttcttattgatggatcctttagaattgcctacctaaaaggtaaactatactatccttataaatactgatcaatcccagttctccccctaaaaatgaatacatagtaggactatagcaaatgtgtttgatgggtaattctagactgggactatggtacccttttccagagttttaaaattcaaccttcattacagacaaagttttctcccagaaggaatggattgatagattttgattaaagtaagggtggaaggaaatctgtagctggatttaccacaagtgacatctagaaactatagttcacaggacagagcagagccatggagaataagcattgactaccttgagttctcctagtgaggagttctggtataaaatttaagattactaccagtaaccaacttaaagcaaactataggggtccctaattttggatttttccttaagtgtaagaaacaatgcttcaaatgttaagaaataacagtctgggcaaagaacgcatattctataggaagccaggtttacaataggtaagaataaactgtattaagtagatgtaatgactagaaagctgctttgctccctatattgagaaattgtggacatggtatgtgttatccaaagaacattgggctagaagatagatttctatccttagctttggcattattgactggattgacttgaacaagtcgcttaacttctacaagcttgtttccttatttgtcaaattagattacactaggaaacgattctcgaacatgttttaaccttacaactctttgttcaaataaatctttcaatgaatccccaacatataaaacgtcaaaaagctgaattcctatgtgaattataagcagggtttggacatccagagcacctacaaaccttcatctctttgattacgtacatgggggtccacagggactctgaagagtttgaaaatccctggcctagattaaacctgagagccattctagctcttaaaaaaatctgaaatttacaaaccatttttcttgttattgtttttgtttctttgtttgttttcgagatcacgtcactgccctccagcctgggcgaccagcgagactccgtctcaaaaaaaaaaaaaaaaaaaaaaaaaaaa

SEQ ID NO: 269641 - DNA, 3520 bp, Homo sapiens
gtcgacccacgcgtccgcggacgcgtgggcgcgcgtccggctgcgcttgcagcccagggcgtgaggtgctctttctggatcgccagcctcgaagttgaggcgtggactctggccaggtggctgttccagagcaacatgggagatgctgaagcaggcaagaagacctttattcagaaatgtgctcagtgccacacagtggaaaaaggtgaaaatcacaagactggtccaaatctctggggcctctttggctgaaaaacaggaaaagcaccaggattttcttatacagaggcaaacaaaaacaaaggatcgacgattcaatgatgaaatcgacaagctaactggatacaagacaaaatcattattgtgcatgcctatccgaagcagtgatggtgagattattggtgtggcccaagcgataaataagattcctgaaggagctccatttactgaagatgatgaaaaagttatgcagatgtatcttccattttgtggaatcgccatatctaacgctcagctctttgctgcctcaaggaaagaatatgaaagaagcagagctttgctagaggtggttaatgacctctttgaagaacagactgacctggagaaaattgtcaagaaaataatgcatcgggcccaaactctgctgaaatgtgaacgctgttctgttttactcctagaggacatcgaatcaccagtggtgaaatttaccaaatcctttgaattgatgtccccaaagtgcagtgctgatgctgagaacagtttcaaagaaagcatggagaaatcatcatactccgactggctaataaataacagcattgctgagctggttgcttcaacaggccttccagtgaacatcagtgatgcctaccaggatccgcgctttgatgcagaggcagaccagatatctggttttcacataagatctgttctttgtgtccctatttggaatagcaaccaccaaataattggagtggctcaagtgttaaacagacttgatgggaaaccttttgatgatgcagatcaacgactttttgaggcttttgtcatcttttgtggacttggcatcaacaacacaattatgtatgatcaagtgaagaagtcctgggccaagcagtctgtggctcttgatgtgctatcataccatgcaacatgttcaaaagctgaagttgacaagtttaaggcagccaacatccctctggtgtcagaacttgccatcgatgacattcattttgatgacttttctctcgacgttgatgccatgatcacagctgctctccggatgttcatggagctggggatggtacagaaatttaaaattgactatgagacactgtgtaggtggcttttgacagtgaggaaaaactatcggatggttctataccacaactggagacatgccttcaacgtgtgtcagctgatgttcgcgatgttaaccactgctgggtttcaagacattctgaccgaggtggaaattttagcggtgattgtgggatgcctgtgtcatgacctcgaccacaggggaaccaacaatgccttccaagctaagagtggctctgccctggcccaactctatggaacctctgctaccttggagcatcaccatttcaaccacgccgtgatgatccttcaaagtgagggtcacaatatctttgctaacctgtcctccaaggaatatagtgaccttatgcagcttttgaagcagtcaatattggcaacagacctcacgctgtactttgagaggagaactgaattctttgaacttgtcagtaaaggagaatacgattggaacatcaaaaaccatcgtgatatatttcgatcaatgttaatgacagcctgtgaccttggagccgtgaccaaaccgtgggagatctccagacaggtggcagaacttgtaaccagtgagttcttcgaacaaggagatcgggagagattagagctcaaactcactccttcagcaatttttgatcggaaccggaaggatgaactgcctcggttgcaactggagtggattgatagcatctgcatgcctttgtatcaggcactggtgaaggtcaacgtgaaactgaagccgatgctagattcagtagctacaaacagaagtaagtgggaagagctacaccaaaaacgactgctggcctcaactgcctcatcctcctcccctgccagtgttatggtagccaaggaagacaggaactaaacctccaggtcagctgcagctgcaaaatgactacagcctgaagggccattttcagtccagcaatgtcatccttttgttcttttagctcagaaagacctaacatctcaaggatgcactgggaaccatgcctgggctttcaccttgaagcatggtcagcagcagagagagcaacgggaaggacaaagaaagaggtggggcagggagcacaccccaggaccctcacttttccctaatgaacacgcatgggctgaaatgaaggctctgggtaggggactgttttggatccaaggacctgtggacagtcggcctacttactctgagctgagggaacactgaacagtaaaagcgtcattagcgctgcttcattttgtatagggcttttctgtttgttacaagccaaacattgcctgtctttgcttcccgtccctgaatgcctttttgtgccagactgtcccaagaatcctaatttgtattccatagaggtattttatttttaatcctagagcttcttattgatggatcctttagaattgcctacctaaaaggtaaactatactatccttataaatactgatcaatcccagttctccccctaaaaatgaatacatagtaggactatagcaaatgtgtttgatgggtaattctagactgggactatggtacccttttccagagttttaaaattcaaccttcattacagacaaagttttctcccagaaggaatggattgatagattttgattaaagtaagggtggaaggaaatctgtagctggatttaccacaagtgacatctagaaactatagttcacaggacagagcagagccatggagaataagcattgactaccttgagttctcctagtgaggagttctggtataaaatttaagattactaccagtaaccaacttaaagcaaactataggggtccctaattttggatttttccttaagtgtaagaaacaatgcttcaaatgttaagaaataacagtctgggcaaagaacgcatattctataggaagccaggtttacaataggtaagaataaactgtattaagtagatgtaatgactagaaagctgctttgctccctatattgagaaattgtggacatggtatgtgttatccaaagaacattgggctagaagatagatttctatccttagctttggcattattgactggattgacttgaacaagtcgcttaacttctacaagcttgtttccttatttgtcaaattagattacactaggaaacgattctcgaacatgttttaaccttacaactctttgttcaaataaatctttcaatgaatccccaacat

SEQ ID NO: 269642 - DNA, 4446 bp, Homo sapiens
  misc_feature (869)..(869): n is a, c, g, or t
  misc_feature (1110)..(1110): n is a, c, g, or t
gcagcggcggcagccagaacaggagcagcgatagctcgggtttccggaacaggagccggggcagcggcggcagctcagtgctgggcacctgtgcggagcaggagtagcaggaccacggggtggggtcggcgccagccactctgagccagagaaggaaggggcatctcccagattccactgctgggaataatctccaggggaggtggcgctgaactgggaatactggtgggggtgaacatgtgcaggaacagctagaggcctcggggcaggaaaacatttggttcacgtgtaaacaggcaaggaaagctgtctgggaccatggcagcctcccgcctggactttggggaggtggaaactttcctggacaggcacccagagttgtttgaagattacttgatgcggaaggggaagcaggagatggttgaaaagtggctgcagaggcacagtcagggtcagggggctttaggtccaaggccctctttggctggtaccagcagcttggctcacagcacctgcagaggtggcagcagcgttggtggtggcactggaccaaatggctctgcccacagccagccccttcccggtggcggggactgtggtggggttcccttgagtcccagctgggccggtggcagcaggggcgatgggaacctgcagcggagagcttctcagaaagagctaaggaagagttttgcccgctccaaggccatccacgtgaacaggacctacgatgaacaggtgacctcccgggctcaggaacccctgagtagtgtacgacggagggcacttctccggaaggcaagctccctgccccccaccacagcccatattctcagtgcgctgctggaatcgagagtgaatctgcctcngtatccccctacagccatcgactacaagtgccatctgaaaaagcataatgagcgtcagttctttctggaattggtcaaagatatctccaatgaccttgacctcaccagcctgagctacaagattctcatctttgtctgccttatggtggatgctgaccgctgctctcttttcctggtggaaggggcagctgctggcaagaagaccttggtctccaaattctttgatgtgcatgcaggaacncctctgctgccttgcagcagcacagagaactcaaatgaggtgcaggtcccctggggcaaaggtatcattggctatgtcggggagcatggagaaacggtcaacattcctgatgcctaccaggatcgacgattcaatgatgaaatcgacaagctaactggatacaagacaaaatcattattgtgcatgcctatccgaagcagtgatggtgagattattggtgtggcccaagcgataaataagattcctgaaggagctccatttactgaagatgatgaaaaagttatgcagatgtatcttccattttgtggaatcgccatatctaacgctcagctctttgctgcctcaaggaaagaatatgaaagaagcagagctttgctagaggtggttaatgacctctttgaagaacagactgacctggagaaaattgtcaagaaaataatgcatcgggcccaaactctgctgaaatgtgaacgctgttctgttttactcctagaggacatcgaatcaccagtggtgaaatttaccaaatcctttgaattgatgtccccaaagtgcagtgctgatgctgagaacagtttcaaagaaagcatggagaaatcatcatactccgactggctaataaataacagcattgctgagctggttgcttcaacaggccttccagtgaacatcagtgatgcctaccaggatccgcgctttgatgcagaggcagaccagatatctggttttcacataagatctgttctttgtgtccctatttggaatagcaaccaccaaataattggagtggctcaagtgttaaacagacttgatgggaaaccttttgatgatgcagatcaacgactttttgaggcttttgtcatcttttgtggacttggcatcaacaacacaattatgtatgatcaagtgaagaagtcctgggccaagcagtctgtggctcttgatgtgctatcataccatgcaacatgttcaaaagctgaagttgacaagtttaaggcagccaacatccctctggtgtcagaacttgccatcgatgacattcattttgatgacttttctctcgacgttgatgccatgatcacagctgctctccggatgttcatggagctggggatggtacagaaatttaaaattgactatgagacactgtgtaggtggcttttgacagtgaggaaaaactatcggatggttctataccacaactggagacatgccttcaacgtgtgtcagctgatgttcgcgatgttaaccactgctgggtttcaagacattctgaccgaggtggaaattttagcggtgattgtgggatgcctgtgtcatgacctcgaccacaggggaaccaacaatgccttccaagctaagagtggctctgccctggcccaactctatggaacctctgctaccttggagcatcaccatttcaaccacgccgtgatgatccttcaaagtgagggtcacaatatctttgctaacctgtcctccaaggaatatagtgaccttatgcagcttttgaagcagtcaatattggcaacagacctcacgctgtactttgagaggagaactgaattctttgaacttgtcagtaaaggagaatacgattggaacatcaaaaaccatcgtgatatatttcgatcaatgttaatgacagcctgtgaccttggagccgtgaccaaaccgtgggagatctccagacaggtggcagaacttgtaaccagtgagttcttcgaacaaggagatcgggagagattagagctcaaactcactccttcagcaatttttgatcggaaccggaaggatgaactgcctcggttgcaactggagtggattgatagcatctgcatgcctttgtatcaggcactggtgaaggtcaacgtgaaactgaagccgatgctagattcagtagctacaaacagaagtaagtgggaagagctacaccaaaaacgactgctggcctcaactgcctcatcctcctcccctgccagtgttatggtagccaaggaagacaggaactaaacctccaggtcagctgcagctgcaaaatgactacagcctgaagggccattttcagtccagcaatgtcatccttttgttcttttagctcagaaagacctaacatctcaaggatgcactgggaaccatgcctgggctttcaccttgaagcatggtcagcagcagagagagcaacgggaaggacaaagaaagaggtggggcagggagcacaccccaggaccctcacttttccctaatgaacacgcatgggctgaaatgaaggctctgggtaggggactgttttggatccaaggacctgtggacagtcggcctacttactctgagctgagggaacactgaacagtaaaagcgtcattagcgctgcttcattttgtatagggcttttctgtttgttacaagccaaacattgcctgtctttgcttcccgtccctgaatgcctttttgtgccagactgtcccaagaatcctaatttgtattccatagaggtattttatttttaatcctagagcttcttattgatggatcctttagaattgcctacctaaaaggtaaactatactatccttataaatactgatcaatcccagttctccccctaaaaatgaatacatagtaggactatagcaaatgtgtttgatgggtaattctagactgggactatggtacccttttccagagttttaaaattcaaccttcattacagacaaagttttctcccagaaggaatggattgatagattttgattaaagtaagggtggaaggaaatctgtagctggatttaccacaagtgacatctagaaactatagttcacaggacagagcagagccatggagaataagcattgactaccttgagttctcctagtgaggagttctggtataaaatttaagattactaccagtaaccaacttaaagcaaactataggggtccctaattttggatttttccttaagtgtaagaaacaatgcttcaaatgttaagaaataacagtctgggcaaagaacgcatattctataggaagccaggtttacaataggtaagaataaactgtattaagtagatgtaatgactagaaagctgctttgctccctatattgagaaattgtggacatggtatgtgttatccaaagaacattgggctagaagatagatttctatccttagctttggcattattgactggattgacttgaacaagtcgcttaacttctacaagcttgtttccttatttgtcaaattagattacactaggaaacgattctcgaacatgttttaaccttacaactctttgttcaaataaatctttcaatgaatccccaacat

SEQ ID NO: 269643 - DNA, 2117 bp, Homo sapiens
  misc_feature (1)..(1): n is a, c, g, or t
  misc_feature (3)..(6): n is a, c, g, or t
  misc_feature (8)..(8): n is a, c, g, or t
  misc_feature (11)..(11): n is a, c, g, or t
ngnnnngncangaaaagtccactgtgtgttgggaatagattatgaagggctttgagtgtaggccctgtaagcaataggaagccatggaacagccagaaaggttatgcagatgtatcttccattttgtggaatcgccatatctaacgctcagctctttgctgcctcaaggaaagaatatgaaagaagcagagctttgctagaggtggttaatgacctctttgaagaacagactgacctggagaaaattgtcaagaaaataatgcatcgggcccaaactctgctgaaatgtgaacgctgttctgttttactcctagaggacatcgaatcaccagtggtgaaatttaccaaatcctttgaattgatgtccccaaagtgcagtgctgatgctgagaacagtttcaaagaaagcatggagaaatcatcatactccgactggctaataaataacagcattgctgagctggttgcttcaacaggccttccagtgaacatcagtgatgcctaccaggatccgcgctttgatgcagaggcagaccagatatctggttttcacataagatctgttctttgtgtccctatttggaatagcaaccaccaaataattggagtggctcaagtgttaaacagacttgatgggaaaccttttgatgatgcagatcaacgactttttgaggcttttgtcatcttttgtggacttggcatcaacaacacaattatgtatgatcaagtgaagaagtcctgggccaagcagtctgtggctcttgatgtgctatcataccatgcaacatgttcaaaagctgaagttgacaagtttaaggcagccaacatccctctggtgtcagaacttgccatcgatgacattcattttgatgacttttctctcgacgttgatgccatgatcacagctgctctccggatgttcatggagctggggatggtacagaaatttaaaattgactatgagacactgtgtaggtggcttttgacagtgaggaaaaactatcggatggttctataccacaactggagacatgccttcaacgtgtgtcagctgatgttcgcgatgttaaccactgctgggtttcaagacattctgaccgaggtggaaattttagcggtgattgtgggatgcctgtgtcatgacctcgaccacaggggaaccaacaatgccttccaagctaagagtggctctgccctggcccaactctatggaacctctgctaccttggagcatcaccatttcaaccacgccgtgatgatccttcaaagtgagggtcacaatatctttgctaacctgtcctccaaggaatatagtgaccttatgcagcttttgaagcagtcaatattggcaacagacctcacgctgtactttgagaggagaactgaattctttgaacttgtcagtaaaggagaatacgattggaacatcaaaaaccatcgtgatatatttcgatcaatgttaatgacagcctgtgaccttggagccgtgaccaaaccgtgggagatctccagacaggtggcagaacttgtaaccagtgagttcttcgaacaaggagatcgggagagattagagctcaaactcactccttcagcaatttttgatcggaaccggaaggatgaactgcctcggttgcaactggagtggattgatagcatctgcatgcctttgtatcaggcactggtgaaggtcaacgtgaaactgaagccgatgctagattcagtagctacaaacagaagtaagtgggaagagctacaccaaaaacgactgctggcctcaactgcctcatcctcctcccctgccagtgttatggtagccaaggaagacaggaactaaacctccagctcagaaagacctaacatctcaaggatgcactgggaaccatgcctgggctttcaccttgaagcatggtcagcagcagagagagcaacgggaaggacaaagaaagaggtggggcagggagcacaccccaggaccctcacttttccctaatgaacacgcatgggctgaaatgaaggctctgggtaggggactgttttggatccaaggacctgtggacagtcggcctacttactctgagctgagggaacactgaacagtaaaagcgtcattagcgctg

SEQ ID NO: 269644 - DNA, 851 bp, Homo sapiens
gtcgacccacgcgtccgcggacgcgtgggcgcgcgtccggctgcgcttgcagcccagggcgtgaggtgctctttctggatcgccagcctcgaagttgaggcgtggactctggccaggtggctgttccagagcaacatgggagatgctgaagcaggcaagaagacctttattcagaaatgtgctcagtgccacacagtggaaaaaggtgaaaatcacaagactggtccaaatctctggggcctctttggctgaaaaacaggaaaagcaccaggattttcttatacagaggcaaacaaaaacaaaggatcgacgattcaatgatgaaatcgacaagctaactggatacaagacaaaatcattattgtgcatgcctatccgaagcagtgatggtgagattattggtgtggcccaagcgataaataagattcctgaaggagctccatttactgaagatgatgaaaaagttatgcagatgtatcttccattttgtggaatcgccatatctaacgctcagctctttgctgcctcaaggaaagaatatgaaagaagcagaagttatgtaagggatgtgtattagtgaaaatgtctcaagtttgaccaagaacctgtttcttcctgatagtgaggaaaagctgctttgctttgctagaggtggttaatgacctctttgaagaacagactgacctggagaaaattgtcaagaaaataatgcatcgggcccaaactctgctgaaatgtgaacgctgttctgttttactcctagaggacatcgaatcaccagtaagttatcttttatcttttaaagttgaagactgtgtgaatggaataaagttgagtttatttataattaa

SEQ ID NO: 269645 - DNA, 435 bp, Homo sapiens
acacatcttaatttttaccctcttctcttttttttttcaggaaccttattacccggttttctttaaatcaaataattaggggttgaaataatcaaataattagaggttgaaagtgcaccaacatattaggtgcattttatggcccaggaagtgcattggcattttatatacaatgcagttcaatttcaaaaatcctatttattaggtgttactaggtgatatgatcgtcttagagatgaagaatccagcccaagaagatgaaattgcccaagtcacagatttgtaaggcacagaggtgtcatgtaaaccttggctattttgaattcaatcctttctttctccttccctttctgccattaccctgggccattttccctagactgagttttaaaatttttggttggattgtaggttttttgtgtttggaagggtttc

SEQ ID NO: 269646 - DNA, 349 bp, Homo sapiens
ggagacagagtctcactctgttgccaggctggagtacagtggcgtgatctcagctcactgcaacctccacttcccgggttgaagtgattctcctgcctcagcctcccgagtagctgggatcacagacacatgccaccatgtctagctcattttttgtattttttttttttttagtggagatggggtttcaccttggccaggctagtctcaaattcctgacctcaggtgatccacctgcctcagcctcccaaagtgccgagaatacaggcatgagccaccatgcccagccttaatcttttattaacatatcccatgagaaaattggatatacttcttataaatcaagggc

SEQ ID NO: 269647 - DNA, 3267 bp, Homo sapiens
taatgaggaatcaaaggaagaagaagaaagagagaggaaggaaggttggaaggaaggaaggagggaaaattagaaggggaaaccatgattgctggtgaggttttgagcacattttcctgcaggctggtatgggtgagaggtttggtcttgtttgcaaatcttctgaaggccattccagaggagcagttgccactgccccatcccctgagctctgagcatgggggttcccctggggagactcctggtgagaggatgccgatttctgctgatctgtcactgggtaccgaggactgggtgtgtttaaggcagacagccaggtgaggatcccagctactggggcctgctgtcatctcctgggagtacccgggggtcaggagcctaggggactcttgcacttcacatccagccatgctaattacactttttggcaaaggaaacagctaggagcagtttctttcactcctacagccccgttttctcagtgtttagacctcgaattattactgggctagagggaaggcagcctctgaagtgtggcaggaggaggggaagtctgcctgcatcttggtgtgtctgtcagatgccagcactaataacctggcttctgtgaggcctgtcagtgctctcaggaatgaaaggggacccctgagaggtgctcagtaccagcaggctgtgaatgctctctacccaccaccctcacctcctcgttaaagatggtgctacctgccacacagcagacatctggtcgctgcacacccgaaagaccccaaggcagtctgccccttgtccagccacacgccagcacccaccctcctggcccctgcctcggcctccccagaccagctgcacccagcccccaacacgcaccccttctccagatgtgtgcagggcctcattttgcagagcaaagacagatgtttcagccacacgctttattaacttctaaaacctgtgctcaggacactcttcaacagtcatgaaaagtttgatcacttgccacagtcaggacctttgtgtggggctctgatctgatgttcggtctcatcatctcccaaaccagcagtcgtttgtaccccaaccctctgctcaggggctcatacccccaaatgattttcctgatttatgtatttccctacaaagggctttctatacctagcatctgcctccagcatgagaagggggaataggtgagacccatttgccagtagcagacggggaccctggggagaaaatggcagagcctgttggagactccctgtctccagctgaccagccaatgggattcctcttccctccactgtctcccacaaagtagaagaatcctggtacatttagcccatgagcctggcacagatccctatctagacatgaggccctttagacatgactttggcattgaccagcctgttggcaatgggtcggggaggcagaggggatgctcacaccagtaattctcatcccctgaatgcttgggatcacctggggagagttcacaaaatactggtgcaggggtcccacctctgatgatgctgagtggtgggtctggggtgtggcccaggcatcatgatgtttcaggcccccaggtgacttcttaggcagcccagctaagcccctagagccttgcaatttcccccaaatgacctcagagggcccgatttgagggaaatgcctaacttcaggggccgtaagaatcccccagggagcatgtgaaatgcagataccaggcccacccccagagatgagctgaggtgggtcaggggtgaagtgcagggatcagtgtttttcacaagctccatacctccaggaaatggtgttgtggttgggcccgtagaaaacattctgagagtcctgttgcctgtgccttggtgcacgtggggtggaatcccagtggccctgccttgaggaggatgtgcattaacgtggtaggggagacagagacagctccacctgccccctgtcccaccggggacctccaaaaacttcatggatgttagagcaagcagccatgctgcagcagaggatgaggctggcggatttagtaagagccctctgtgtttgggctgagttctttctctagttgccctgtcatctggcctctggataacccacctctcctccctcatcctaaaattacagatggcgaaagacggccacatttagtgagacccctaaggtcctccaactagggtgggtccacagtggcccctggtgcatggaccacacactctcttccctcctctggctcaggactacggtctgaaattagggagatatgaatgtctttcttgaaaacttctcttcccagtcttcccactttgcttgggggtccttggtcaaggccagctttggggactagggcttgttgcgactaccagctgtctcattttgctgtactgcaaactcaggcttggttccaagcttatgggggccctgtccttcccctagtagggtttgttttggggtcacatctggtcatacccttcagagagctcttccccagcctctacatcagggagagaggtaggtagggaggagcattcaaggattagaagaaggactaaagtacaacagccttggaggaactgccaggaactaagggcgagcactggagaaggcaacctgggaccccctgcgcttctgagcaggaagaccaagaccttcaggggccctaagcactgaaaacatcattcctcatccccaagccctggcatccccctgttcttctaaaataattcttttctaggtatttctgattgcaaaattctggatgggttcatccaagctgacctttgctgttttttcccttcccaacaaggcctcactttttggagccaccttagctggtgcctaggcagaggggcagtcagcagtggttatcaggatcctggctctatgggttgccttcctcctggtctgtaaagcccctgcaggcagggacttcttagatagctgcttccttagggcatggcatgtagtgggtggttaatgaatggaagagagggaatgagtgatcaagggagggaggagggagtggagtggagatttctcatcctttcctgttaatttatgacatcctcctgcctatgagtccttgactctggagttttacaaagcagtcacatttcaaataaaagtctgggaaagcaacacatcatcgccaacttttaattttgctaaataaggatattagaaaaagaatagaaaattgcagtcccttactgtttaaagaaaaaccaaaagaagttaaaaaaaaaaaaaaacaacctc

SEQ ID NO: 269648 - DNA, 374 bp, Homo sapiens
cgccatggccatctcctgctcgaagtccagggcaacatagcacagcttctctttgatgtcacgcacgatttcccgctcggccatggtggtgaacctatagccacgctcggtgaggatcttcatgaggtagtcagtcagttcccgcccagccaggtctaggcgcagggtggcatgggggagggcattcccatcatagatgggcacagtgtgggtgaccccgtcaccagagtccatcacgatgccagtagtacggccagaggtgtacagggacagcatggcctggatggccacgtacatggctggggtgttgaaggtctcaaacatgatctgggtcatcttctcgcggttggccttggggttcaggggggcctcgg

SEQ ID NO: 269649 - DNA, 151 bp, Homo sapiens
  misc_feature (40)..(40): n is a, c, g, or t
atccataccgaggcaacagagagaagatgactcagattantgtttgagaccttcaacaccccggccacgtacatggctggggtgttgaaggtctcaaacatgatctgggtcatcttctcgcggttggccttggggttcaggggggcctcgg

SEQ ID NO: 269650 - DNA, 441 bp, Homo sapiens
tagtgaaagagaattaactataggtgtatgcagtaagactgaagaaagtaatataatgtcaagtgaagaaggcaaattgcagaagtctatatgaagtatgccttttttttgtatgaaactcacaagtgagcgaaactaaatgataaatagtttaagggtgctgccaagtgtgcaaactattcaaaaacaagggaacggtaaaagcaaatttcagaatgtcggttatctcttgtgggacagtagagaggaaacaggtagtttcagtgggttcataagtcagatggtgtgtttacaagtgttcattttattatgcttcataacacagtatgtatgttagatattcttcataagaaaaaagaatacagaccaagcatggtggctcatgagctcatgctcatggtggttcttatattgagaaccctgtctttacaaaaacaacta

SEQ ID NO: 269651 - DNA, 374 bp, Homo sapiens
cttgaggtcctaaatgcagaagggaaaaagcaacttttgtcagatgcctacttcactttcattcatctctaatattttggatggggaatcatccaaagcttctgagtgcatgaaggtcaagtgtgccagtgtgcagctgggcttcttttccagaattaaaagtattttgggtggtgctgaaggtcagcggaagaagtaaagattgcaagaaaggagaaacatgggcttggggagatcccagaattggggacagaagacctggcactaggctacagcacttagcacctctgatcttgtttttcctcacctgtaaaaggagattaacaatgcttttctgcccgcctcttggggagaagggaagaatataattggta

SEQ ID NO: 269652 - DNA, 1174 bp, Homo sapiens
  misc_feature (381)..(381): n is a, c, g, or t
  misc_feature (399)..(399): n is a, c, g, or t
  misc_feature (440)..(440): n is a, c, g, or t
  misc_feature (443)..(443): n is a, c, g, or t
  misc_feature (459)..(459): n is a, c, g, or t
  misc_feature (472)..(472): n is a, c, g, or t
aaaaaatgaagacaagattatataaaagtcatggaaaaagcaacaagactaaaaaatgtattatggaagtaagcagaaatacttgcctaaatggaaaaccaaactgggaagtcaaataatttgtctctaagacttgcctaaacttgctttggtaaaacttacagtcctatggccaaagctaagtcagatctgccctagagcctttgaaggtaaaaataagatactggttaccactgaaatcgtcaaatttattaggactaaccacattctaacaataaacttaaatgagagttcaaggtatttaaactctcattaatttagaagttaatcaaattaatgaatccgattgatctgattcagacctatactttgatccaaggnctgcacagatatctatcnatctatgctgaggagcaagagaaaggatttggaaggcaggnagnctgatggtcaaactgnaggccagctactntgttaactatgggatcatgaggcaattaatcagctctaatccatagttgtttatttaacagtaggttataggaacacagatgttatgatggctttatgagatgataaatgcatagaacatattaggatgtctagcccagaatacaacactcaacagatattagtttcttccatctatattttcttagttaacataattttttaaatctatgaaatcttacctgactgcagattcatcaggaattccaacatctattaaagaaaaaggtaaaatgcattttaaatcaataataaatgtacagaatattaaaatcataagaatgcacagtgatgcatgcctctaatccaaactacttgagaggatgaggcaggaggatcactttagtagcccagaagtttgagaccagcttgggaaacatagtaagactctaccttcataaaaaaattgtgcacacttgtgtgtatgctttagatcctgtttgttgttgttgttgttgttgttgttgttgttgttgttttggtttggtttggttttttaaagcataagactgacgctttgttacaaagcattcctttgggagcatgcctgggatcttattagaattaacattcattatacgtattggtaggtaattaatgcagtaagaactcttccctctgtgtttattagatgcaaagaagaataaatttattaaaatttggt

SEQ ID NO: 269653 - DNA, 1259 bp, Homo sapiens
  misc_feature (381)..(381): n is a, c, g, or t
  misc_feature (399)..(399): n is a, c, g, or t
  misc_feature (440)..(440): n is a, c, g, or t
  misc_feature (443)..(443): n is a, c, g, or t
  misc_feature (459)..(459): n is a, c, g, or t
  misc_feature (472)..(472): n is a, c, g, or t
aaaaaatgaagacaagattatataaaagtcatggaaaaagcaacaagactaaaaaatgtattatggaagtaagcagaaatacttgcctaaatggaaaaccaaactgggaagtcaaataatttgtctctaagacttgcctaaacttgctttggtaaaacttacagtcctatggccaaagctaagtcagatctgccctagagcctttgaaggtaaaaataagatactggttaccactgaaatcgtcaaatttattaggactaaccacattctaacaataaacttaaatgagagttcaaggtatttaaactctcattaatttagaagttaatcaaattaatgaatccgattgatctgattcagacctatactttgatccaaggnctgcacagatatctatcnatctatgctgaggagcaagagaaaggatttggaaggcaggnagnctgatggtcaaactgnaggccagctactntgttaactatgggatcatgaggcaattaatcagctctaatccatagttgtttatttaacagtaggttataggaacacagatgttatgatggctttatgagatgataaatgcatagaacatattaggatgtctagcccagaatacaacactcaacagatattagtttcttccatctatattttcttagttaacataattttttaaatctatgaaatcttacctgactgcagattcatcaggaattccaacatctattaaagaaaaaggtaaaatgcattttaaatcaataataaatgtacagaatattaaaatcataagaatgcacagtgatgcatgcctctaatccaaactacttgagaggatgaggcaggaggatcactttagtagcccagaagtttgagaccagcttgggaaacatagtaagactctaccttcataaaaaaattgtgcacacttgtgtgtatgctttagatcctgtttgttgttgttgttgttgttgttgttgttgttgttgttttggtttggtttggttttttaaagcataagactgacgctttgttacaaagcattcctttgggagcatgcctgggatcttattagaattaacattcattatacgtattggtaggtaattaatgcagtaagaactcttccctctgtgtttattagatgcaaagaagaataaatttattaaaatttggtatctacaagtgaactgcagtatacaagtcatcctagccaaagcctatgagattgagtaaaaatggtattgttagcagaacaggtg

SEQ ID NO: 269654 - DNA, 401 bp, Homo sapiens
agccactgtgcctggccccaaaattgattgtttagaagtaattttatgctagttcaatttcgctataattgattttctttataatgccttgtattttatgcatttaaaacattctgagaagagatgtatggggagaagaggtatctggttttgagaatacatctgtgtataatgaatggcaaatagctgttaagaatggcatatacaaatatgaatgtataggaaaattgaaaggattttagagaaaagggaacagagtagctgaaactttttttttttgtttatgtgttctttttttttttttgagacagagtctcgctttgtcatccaggctggagtgcaatggcgagatctcagctcatggcaacctctgctgcctgggttcaagcaattctcctgtc

SEQ ID NO: 269655 - DNA, 341 bp, Homo sapiens
tggaaagcataaagtggatgaaaatgaaaatagatgttgaaagcagaatcctaagaatgaactgaagtggaaacccattatatcttccctccttcaataacatcttttttctgaatgagagaatataagtagaaaaggagaaataagctatcacaaatgaatgtccgtcagtataaagtcatagcacctttcaaccaaggaagaaccccctataagtagcttctgcattggacaattgctactccaatatacaaatacaattattgtgccatagtcccctagcagttgaataatctctttgaattcatctaagaaacctaacctaatttcttctttttata

SEQ ID NO: 269656 - DNA, 239 bp, Homo sapiens
atctgggccttcgcagcccggctagggagcgtggacgagtctccgggacatcctgcgcgaagggtccttctgtgcgtgctgcgcgggcgctaacgaggccagccagagtcaccagggatgaaggctatagggcccggttttaactcattcggttcctggccattgactgtccttttttcagttctggggcctcatcccttcccaaactgagaaaataaaatacagcccaacacccaaaa

SEQ ID NO: 269657 - DNA, 618 bp, Homo sapiens
cgcttgttagtttgtggctatggaataaacacctctgagccaggtagccaaaaccaagtttgattccaagttctatccagtgatcttaggctatcatttaacctctctgaagctccatttccccatctgtaaaatagaactgactatagcagctacctcacaggattgttgtaaaacccaaatgagataacatgttcaagcattttgtgaactgtaaagtagtatataagtatacaatattattatttatgataataaatctgtacaataatagaaagattatagatttctcctattatctattatagattaaagattatatggtgaactaattttaaaatttataaagagctaccgaattaactttaaaatttagaaaacttgttgagtatgtataatgaccctttgaaggggaggggctaatactaggttcataacttaacgtaaattacaatgaacaatccaaggaattagattatttcccgtcccagccagctttgtaaaggcacaacacgtgttgcagtgatcacttaaatttgtacctaacttgtgcaagctacccctggtggtggaatgctgcccttctcagagtgaggctgaatgtgggcctaaagtatc

SEQ ID NO: 269658 - DNA, 430 bp, Homo sapiens
gagcccagcaactctgtccctgggtttctccttttctaggtggccaacagtttgttggggcagatttgagtccctgatgtatccctagctgcaccatggaaaacagcacatccattttgtaagagtatccaccacaggcatttaatggaaataaaccattctgacagcccaaaagggtgcttcagtcgattgtggaagcttgaaacaaagcaggaagaattgtttaggcacagcacacccaatgagaatggaaccaaccaacacttctagttctttttcaacctgcgtaccagtgtctagggctaaagaagatgaggacagccaaccattccaaggatagaagcctgaattaaccaagataattggcaaagggtcacagaaaatgtccttttaaaaataataatgcttactctttttcttaactgtccca

SEQ ID NO: 269659 - DNA, 779 bp, Homo sapiens
catcctggtggcattttgctaatgccccattgtcagcgttggcactcccacccaggcttccaggctcatctgctctcccatatttggggtgaaaggaaagtaggtggggcaggcccgggagacaggcacgaaatgggggtcgcaggaggtggcacacacctccgtcaacagtcagctccttctgcccaggctggaaatggttttaacaggcggtaaaatttcatcttgcggtgtcaaattggggtcattttggggttagagttctcagtgtccgagaggagctgtccagctgcgtggggactcattaactgcaaaagatctgtttcagtaaaaacaattcaaagacaatcagaaggctaaagaccctctacaaatcgcattttacaagtgccccagaacaaatatggatggtgaaacctatttcttcagaatcccaaatcagctacttagctctggagtgggggtgggggtactgcataaaaaagaggtgaaaaggaggggaccaagcgggtggggaccagtggaagggggaatcgggcctctcaaatttaagagtctgtttttaatcacctctttcttattgaagcagccccaagagttctgaaaactgctacttttctatttttcattttctttttttgagccaacatggaatgctattataggtaacatttaagatttaaaaggaataattgaattccactatagtcccttaatttgaagggcattggctttatggggagtgtttaatttgaaccaagaatttatgaacccagact

SEQ ID NO: 269660 - DNA, 398 bp, Homo sapiens
acaaaaacgtcaacattattacttagctttttactgatagaagctgggttagagaacacagcttaggcttgtgggaaagtgggtttattatttcacccttaaatgagagactcccggacagtcatggtggctcacacctgtaatcccagcactttgggaagacaaggtgggcagatcacttgaggtcaggagtttgagaccagcctggccaacatggtgaaaccctgtcactagtaaaaacacaaaaactagccaggcatggtggtgtgtgcctgtactcccagctacttgggaggctgaggcaggataatcgcttgaacctgggaggcagaggttgcagtgagccaagatcacaccactgcacttcagcctgggccacagagtgagactctgtctca

SEQ ID NO: 269661 - DNA, 345 bp, Homo sapiens
aattcccctctcgacattgacattggcaaaaacaaaaaatttggtcaagtttccaaaaataattgtaagaaaaacaaaaattgacaagattgacctaaaatggacaaaaaaatgacctaaaattgacccaattaaactaaagagcttctgcactgcacagtaaaagaaacagagtaaacagacgacctacagaatgggaaaaaacattggcaaactatgtatccaacaaaggcccaatatccagaatctattaagaacttaacaagcaaaatccaaaacaccccattaaaaatgggcaaatgacatgaacagacatttctcaaaaaaagacatataagtggccaa

SEQ ID NO: 269662 - DNA, 389 bp, Homo sapiens
agtgatgtctactcctgtgcacatgtacacaacacaatcttgctctttctctcatacacacacacacacacacacccccaaagaacacacacattgggctaacttctaccctccttcagctactagcttaaatgttgattctatgaagagacctcccctggtcacctgagaaagccttaccctctattcatgttgccttcacactctgcacatctcctattgcctttactgcaactctaattgaaaagacaaagatgaaattcaagttacccccattcaatttgcaaaaattaagaagtctggcaacagcaagtattggagagaatgtgggtcaaccattctaccatacattgttggtgggagtgtaatttgtcacaaccgttctgaaa

SEQ ID NO: 269663 - DNA, 317 bp, Homo sapiens
gcttaaaaaataacagagtttgaagacttacattataatcaaataaacacaaatgaaactccaaaaataaatccatttagatatattgttcaagcaatccaatgggagaaaagagtctttcagcaaatagttctgcaataactagatatccataagtaaaaattggatttggcttcaactcatacaataaatggattttaatttgaccagattaatagaactaaatacaaaaaccaaagagataaagcttctagaagaaaacacaggacaatatcatcatgacatgggagtagccaaaggtttcttaggacacaggc

SEQ ID NO: 269664 - DNA, 704 bp, Homo sapiens
aattgactccgtcaccaaagaaagcaccagaaaacgtgagtcccgtttgacagacttctttccttttcagaactgtgtcctacaaaccaaacaaatctcccccaattgttaaagccatatgcattttgaaggaaatgtaatccatatgttcctgagtcacttatgcctaagtcattaaaaagttattttttaaatgtgatttcatgtttgaagtcattttagagtatttttagtagactctcattcttcataatgctaaatttttcttggtttgttttcttgttttatttaaacacactgtatatcatcttaacacatcctgtggcgaggcacaaagggaatcttgaactcagaaggagggtctggtgtactggaataacacatttgaggcagtttctattttcagaagtttacaactgtccccccccccttaattttttattttatgtcctgggctgcttttaacctggtcacatcgtcatcccagccctctccccccgcattccttaaatggttgtccatgaagaagaaaagggaaaagagaaaaatgacaaagaataaaatcacatggcctcctaggatatacttctgcactgtgctatgtgatcctttcttcccagaattgaatgtattttccccttttacctactattgttgctagctgggagaattaaggtgtttcttaaagtgccaacaaaagagag

SEQ ID NO: 269665 - DNA, 567 bp, Homo sapiens
agggcaggctagaaagaagtagacaattgaatcgatgttgaaaatatagaatgtacaggctctggtgattggttggatggtgagtgggagagaggaaggggaccaaggtgcttccctggggtctagtttagatgggttgagggcggggcaatcagagaaagactagttgtagagagagggagcaggaaaagggaaatagagctagaaagttaattagaaccatgctgtgaggatactgaatgccaaggtcaagactgtattgaaaaacctgagccgaggctgggcacagtggctcacgcctgtaatcccaggactttgggaggccaaggtgggtggatcacaaggtcaaagagatcgagaccagcttggccaacaatggtgaaaccctgtctctactaaaaatacaaaaattagctgggcgtggtggcatgcgcctatagtcccagctacttgggaggctgaggcaggagaatctcttgaacccagaaggtagaggttgcagtggcctgagatcgtgctactgtactccagcctgtcaacagagcgagacaccctctcaaaaaaaaa

SEQ ID NO: 269666 - DNA, 378 bp, Homo sapiens
tttctctgtgcattgtttatgaatcttttctgttctccaagttttgtatcaactagaaaagccttcctcattgttcctcattgctcagctgtatttgggaaaaaaacccttacattttctgtttaatacttaattgtttttattttttacttttactgctgcaactagctggattctttttgctattgttgtaaagccttagccagagatctgtcttaatttttcttcaagatgcctacacatttgtcccaataccatttattgaataatctatattttccccactaacatgcaatactacattagcatatacaggcataccttggagatattgcgggttcgattccagaccactgcaataaagcgagtatctcagta

SEQ ID NO: 269667 - DNA, 424 bp, Homo sapiens
ctgagacttaggttcaagtgcatgagtcacaatctcaacagtggattgcatcctgccatgagagccccaatcccttctccaagctgtgttccagtagaggagtcgcaacatcaatggtgtgctgaatcctggttggagagttcccacttcacctgtggactggatctgtatataagaggagagatgtcgactctcatgcctgggcttagggcaatgggcatgatcctacatttgggattgtagcaacaactcttgactgcccctgggtgtgagattcagaacctcaattgtgacctgtgtacacttgggcatgtgacaatttctacttttggctgtgtgttcatacaagactctcaatctcacctgtgttctgggccctgttattaaactctctgtaccacccacggggtttattcaatatgca

SEQ ID NO: 269668 - DNA, 401 bp, Homo sapiens
ccataaaaaaatgatgagttcatgtcctttgcagggatatggatgaagctggaaaccagcattctcagcaaactatcgcaaggacaaaaaaccaaacaccgcatgttctcactcataggtgggaattgaacaatgagaacacatggacacgggaaggggaacatcacacaccggggcctgttgtggggtggggggaggggggagggatggcattaggagatataactaatgttaaatgacgagttaatgggtgcagcataccaacatggcacatgtatatatatgtaacaaacctgcacgttgtgtacatgtaccctaaaacttaaagtataaaaaaaaattgggggttgtgattttaacttacatttctttgtaaccataaagatgctttaaagattgga

SEQ ID NO: 269669 - DNA, 100 bp, Homo sapiens
cagaaaggtagactagatgacttctggtcatcctcccaggtctgtttccatgaatcttgattctggggtttcttctaagtcctcatgctaaactcctctg

SEQ ID NO: 269670 - DNA, 380 bp, Homo sapiens
cggggccagtgcttagaggaccctcaggctctggcttgttgagggtcccagggagaaggccagcggaagagggcgtcttcatgcgatgggttgaggagtgacttttcctttctgattttttacatttttcagattttctctaatgaactggtttgactgtctttttttttttttttttttttttaatttttttattgatcattcttgggtgttgtcttaaaagagccatttatttcatagcaaaacagttcttgtgcactcagggcatggtgaggggcctcatttgtcttttttttttttataatttgaaaaaaagtcatccacagctctatcacccacctacaatagtcctttcctaatttcttgctataagcacactt

SEQ ID NO: 269671 - DNA, 526 bp, Homo sapiens
agattttgagcaggttgagaactttaagctggcagtttttaatagttgtaggtctttgcttgaatagaaggtaaccctggtttaatgtttttttgtatgtctgcagtcgtcattaattgcagtggttatcaaagtgtggtctgcagacctcaggtcattcctaagaccctttcacagagttgcaaggtgaaaactattttcataataatactgagatggctattctcatgatttatctgcccttaaataggaacagtagcatacccagtgccctagcatagtaatttattctcctccttctcttcttctcttcttccttttctctgtacttctaccttcctcctttctcttctccaacatgcccatgcacttgtttcttcatttatacaatgaggtttctaatacagtgaggtcattggattgttttgaagattaaatgtgttaacatcataagtaacgcataaagtccttaaaatggcacttgacacatagtaaatgctcaataaatgctactaatgttaaccat

SEQ ID NO: 269672 - DNA, 473 bp, Homo sapiens
ggcctggggaagaggaggtgctgcccatcctccttctcaggaggatctgagcactttggaagcctctgactgtcaccaatgtgcccggtgaggtccagatcattaacagctgtccccaatatcccagcttttaagtcactgctctggaactgcattctttacattgattaaaggaggcttaatgaatcttggccaggcacggtggctcatgcctgtaagcccagaagtttgggaggccgaggcgggcagatcacctgaggtcaggagttcgagaccagcctggccaacatggtaaaatcccgtctctactaaaaatccaaaaattagccgggtatgctggcaggcacctgtaatcccagctacttgggaggctgaggcaaaagaatcacgtgaatctgggaggtggaggttgcagtgagctgaggttgtacccctgcactccaacctggtgacagagcaagactctgtcttta

SEQ ID NO: 269673 - DNA, 433 bp, Homo sapiens
tctgagatggagtctcactctgttgcccaggctggagtgcaatataccacgatctccactcactgcaacctttgcctcctgggttcaagcaatcctctcaccacagactcctgagtagctggaattacaggtgtgtgccaccatgcccagctattttttgtatttttactagagatggaatttcaccatgttggccaggctggtctcgaaatcctgacctcaagtgatctgcccgcctcgtcctcccaaaatgctgagattacaggcaggagccaccgcgcccagcccagttttcttatttaattcaatgaattctctctattcaaagaacaatatccagttgctgctgttgtggttacttaaatttccacgtgcaaaacaaaacaaatgaacacccaactagtctgcactgcagccagtgaatcaaagcatg

SEQ ID NO: 269674 - DNA, 267 bp, Homo sapiens
ggaaaacaagctttttgtttgtttgtttattttttatttttgtggagacagggtctcgccatgttgcccaggcgggtctcaccatgttgcccaggctggtctccgactcctgggctcaagagatccatccgcctcggtctccccaggtgctgggttacaggcgtgagccaatgctcccagccaaaaacaagcattttgtgtcacactaggcactttcacctattttccacttaatgcttacaacaatcttgtgagtagttattacca

SEQ ID NO: 269675 - DNA, 510 bp, Homo sapiens
tagtttttaagacttggagacaaactgacgaacatacaaatattttgctgtttatcaagatctcttagaattttgtatgtattttatttttagacactacataaataagtaaggcacatttccctctttacatcttccatagcaccgagtttttgtgtcttgctttagccctggaaacctggcgtccagcccagtgctggtggggccctcaccatggccttccatcagcagaggcagtttctccaagtgagtccaggtctcaaccagtgacttgttcccatccacatcacctagcacagcccttctctgtggcagagaactgaaggaactcaagtgtccttaatttccaatccctcacagattggtacttctgagaatataaataatattcattattaaaaaaaacatgaagagatatacagtacaacattttaaaacctcaatttttattgttagatttaacagacgtaaacttccatttctttaaatataatcacaataaacatagga

SEQ ID NO: 269676 - DNA, 430 bp, Homo sapiens
gaaagtagctctatcaggttttcaaatcttttttaatctgcaaagattaagaatatgcaaggattgccatacagattacaattaaggaagtatcacaggtcagttgagggaaaaaaaatttatttaactgatcataggggaaaattgactagctccttgtgaaaaacaaaacaaaataaagtttcctgtatgttttcaattcacactgaacacagaaataaattcttcatagattttaaagataaggtaaaagataaaaccattacaacctggaagagaatgtatttaacatatgtaagtgaatgctaaccagtctcagaacttactaagcataaaagcaaaggaatacttcaaaaagaaaaacactcagtagattagactatataaaagttaaagacacgctcaccgtaagtaccataaacaaacaata

SEQ ID NO: 269677 - DNA, 294 bp, Homo sapiens
aataatgatgaccaaactctatgaactgtctggattcctctctcagcacagcagtagttgtttgttgaagccagttttttatgtatttctgagaaagaaaattgagtaatttatctggttgctctcaatagagggataagagagggtttcatatgcagtatttatatacttgtcagtaacctcagaaacttttttttttttacagtagctttggctacttctgtctcccacctggggctgcagcttagcttcccaacttatgggagaaaaaatggcctaagttcacagcgctcc

SEQ ID NO: 269678 - DNA, 454 bp, Homo sapiens
atcgggtagcccgtccatagttggccagagcacaaattcacaaaagctttcatcatgggtttgtgctgcaaggatgttctctctctcctcgcctcatatgcagttttcaaaggcactgtgaggctgccttcaattatgcttgagaggaagacgcgctgttgggagcccgaaagagccaagaggcacacaatagagctctctggcgcctcgtttgggagatttaccagcgatcccttgaaaagggaaaagggattacagatgtgaaattagacacaaagattgaagaggggaccagctgtatttttggatattagagttactttggcacttttgggtggtttcctcgggaagtacagtggcagagtgtagctgaattattaatatttctgagactatatacaaggcttcttttaaaaaaacttttattatggaaaatctaaaacatatacaaaag

SEQ ID NO: 269679 - DNA, 230 bp, Homo sapiens
tataactagtttcatgagaacacttactaataaaaataaattcgtagacaacattgagtcaaatatagtaagaacaaaacaaccaaacttaaggaaagcatatcatttctttttgtaaatggatttgagacatcatttattgaaaaataacatagtaggaaggctttctttttcaatatcttcaaagttaattttttgaatctcatgatacagggctgactaatttctgg

SEQ ID NO: 269680 - DNA, 1029 bp, Homo sapiens
cagagactagagctgtgttctcacagggcccaccacccttccacctccttggccattgacacctgcgtccctggcccagctgctcccaggtaacccccaaagcagctggcacatcccacctctggtgtggccggggctgctgtgtgtccgcagggcctgccccgtctattctagcttgtttgtcctgtctgaaccagcgcctactccaagaagcctctgctcagcccagcggggatgcttctaagctccggacgagcctctcggaagccttggtgattggtggtgtagtcatcttgggatgcagatgtcttaccaacctgcaagaacaaaaaccctgtggcttcctctggtgcagggtatttagtcaatgtttgctgaggtcccgtctggttctggctaattggcaggggtcgtccacccattctttccctgctctgctgtctgtgccaggagagacgggggccagtcggccaaggggccagctcctgctgcctgctcctcttgggcacgtgcgggggccccctttctctgagcagggatagggatcagtctgccggagggatgtggtggacaggcctaaagcatttggggcggggcatgccacttgagctccctaaatctgtctcctcataggtgacaccgctccagggccccccagtggcctctcctttcagagctacctaaattctggtcacttcagagaaatggagcacccccttctccctggtccaggtgtggacagcctggcacactgagcacacctggcatggctggtaatttcagaaagaagaggggccggggtccagtgggaagcagcggtgaacccctcgtgagtgggctttgcagtccctccccatgccacggcagagctgccctcaacacagccttcctcttcctcatcggagagcacaccctgtccccttgccgagctgtgccctgtgccttcggtggtatttgattttggctgctactggctttgttgggatctggaagtcgcttcccctgcgtggtgcgtggagcactgtaagt

SEQ ID NO: 269681 - DNA, 752 bp, Homo sapiens
cagagactagagctgtgttctcacagggcccaccacccttccacctccttggccattgacacctgcgtccctggcccagctgctcccaggtaacccccaaagcagctggcacatcccacctctggtgtggccggggctgctgtgtgtccgcagggcctgccccgtctattctagcttgtttgtcctgtctgaaccagcgcctactccaagaagcctctgctcagcccagcggggatgcttctaagctccggacgagcctctcggaagccttggtgattggtggtgtagtcatcttgggatgcagatgtcttaccaacctgcaagaacaaaaaccctgtggcttcctctggtgcagggtgacaccgctccagggccccccagtggcctctcctttcagagctacctaaattctggtcacttcagagaaatggagcacccccttctccctggtccaggtgtggacagcctggcacactgagcacacctggcatggctggtaatttcagaaagaagaggggccggggtccagtgggaagcagcggtgaacccctcgtgagtgggctttgcagtccctccccatgccacggcagagctgccctcaacacagccttcctcttcctcatcggagagcacaccctgtccccttgccgagctgtgccctgtgccttcggtggtatttgattttggctgctactggctttgttgggatctggaagtcgcttcccctgcgtggtgcgtggagcactgtaagt

SEQ ID NO: 269682 - DNA, 721 bp, Homo sapiens
cagcgtgtgtgtgttggcctgcagctgtttctgccatttttaaatggctccagtcgggcaccgggcaccctgtgtaccaggggagctcccgagacaccgacgacttggatctcaactttggaaagcctccccttctcacggttctgaaaattctttgtcccactggagccaaacccagcccacggccgggcatccggccatcgcagccagccctttccataggaggccggggagcacgtggactttattgattttcctcttgccttttttgttgggtttgactcagaaaggacagctaacttgtgacaccgccacaccggaggctcgcccccagtggcttttagagaccgaggcgctactcgagaaacgacacccccaaacgtaaacatcccctgccacagggcctgcccagcttccaggctcgaaataaagggtcgagacgagcccgcgggcgctgacactcagagccagcgttgcggcggctcctctccctccgggaccccagtgaaggcgtgggaaaaaaataataaagttgaaatcaggcagcggggagttttcaacaactctgacccaacctggcgatctgcttgcgcctcgggcctggcccaggggccgattccgagcagaccccgacgaggccgcggaaaggttcgatccccttaatgtcgaccgggccacgccgggcggacgctaatgtgatcccgaaaaccacgcgcggccg

SEQ ID NO: 269683 - DNA, 459 bp, Homo sapiens
gccagtgctatctgtgaggctgctgacaaggaagagcctccctcacagaagaagcgagtggacacatggccagctggtcagccagggacaaatccgtgtcacaggacgacatggacgagattgaagtgtacggcagcgacgcccagtcgggcacacagctggccacctacctttgaggtgtgtgacagcatccttaacattggaccctgcaccaatgctgccatgggtgagcctgccttcctgtctgaagagtttcagaacaaccctgagccggacctggagattgtggtttgctccagccacaggaagaatggggctctgtcggtgctgcagaagagcatccagccccaggtggtgacaacctttgagcttcccggctgctacgacatgtggacagtcatcgccctggtgcctaaggaggagaaagagaatcccaagggggagggcacggagcaggaa

SEQ ID NO: 269684 - DNA, 679 bp, Homo sapiens
cccagctaactttgtatttttggtagagacagggtttcaccatgttggtcaggctggtctcgaactcctgacctcaggtgatccacctgcctcaacctcccaaagtgctgggattgcaggcatgagctactgcacccagccaccttgaactttcttttaccttaatcatgtgatgccaagagtttgtgttaaaggcattttttaaagatagataactctaaagtaggcacattatttatatcagaaaaagacttttttccagaataacattaattcattatgtttaccattttactcttgatagaactctagacataaaaatttttacaaaatgcatttaaatagttacaaaatgcattttaatgttatttttaaagtatggattagagtattaatatattagttattagggatttttttccctctattgctgtattcccagtacctagaagagtgcctagtatatttaatacttttttaaataaaagaatagaatcatgtttccagcctaggtttgaacctctccatcaccattttctagtctctgatcctcagttttctcatctgtataatggggttagtagtagaccacatttcataggttgttgtaatgttttcttgaaaaaactctttaataaccgttgggctcatttgacttgcctttagggggccggttcct

SEQ ID NO: 269685 - DNA, 888 bp, Homo sapiens
agtatatgcttaaacatcacacgattttataaagcaagaaaaatgaaatgatctccctattcccccacggtgtaggcctccagatccttttctggcttttaggcaggacaattaacaatgtggattctgcagtcagactgatggggtttccatgcatggcctcaccattaactcctcactggggagaccttgggcctcggttttttattcatagaatgcatgttgaataaaccatgtgggaaaaagcagagccagcaccagcccctgctgactcactgatccctcggaaaggtctgggatgagtcaagtcttcagggaataagcagcaaggacttggaattcctgagcaagccttgggttccccacgccctaggaagtccctctggaaggggagcaggacctctcccaccagatgacggagtttgctttctcgcccagcgcagctcccaccaggcgtgagctggcagtccagaagcggccccagatgtggctatccaccgcccagtctgcttccctgcctcaaaccccagggagacagaaattacctaaaaatgcatatcattgccttatgccaagatgattcaaataagcctgagaaagagaggccagcgctaaatacagacttggcagaactacttcacccagtaaacatctaatcagcacctgcaggatcctcattctgcccttctgggcagagcaccacgaactttccctgagttattttctaccaacaatttagaatgaattgctcgtgaagtagaaatgaggggaaaagcaactaatggtggtagaacaaagtaatttttacaattaaaagaagtagctgccagatgacagaacaaagtagaggacgagaaaataaatcattttcagggaaaaaataaaaaa

SEQ ID NO: 269686 - DNA, 392 bp, Homo sapiens
accataccctcaccccatgcctcctctagctgctctagttcacaatattctctctcttctctgaacttttacttcctgtagcaccgacagagccttgatatacttcctcctctcatgagttaatttccttgtgtgcctgtttgcctcaaaaccagataataggcccttggcccctctccctgtgtcatgcacagagtgggcattcagtgaatggttcttgatttgattatacattcatgacgtcaccgtaaagttagtctccctgggctacatatcaacatggaagaaaactgcagccccctgacctattagaaggatgtgacatctcacgggagtgctcagttgcccttcaaagacaggaaaataaatgtcagatttggttttgtttatct

SEQ ID NO: 269687 - DNA, 332 bp, Homo sapiens
acaaaagaaaataacagtaagattgaagacaaatcaatagaaatgatctaatctgatgaataaacaacaaaaaaagacaataaaaatgaacagagtcagggacctatggaacaatgtcaaaaggcacgatgtatgtgtaactgcattcccacaaagagaccaagagaaatttggacaaaaagcatttgaagaaacacaatgactgaaaactccccaaatctggtgacaaaaaggtacagattcaagaaggtaagtgaacttcagatgggataaattcaaagagaaccaggcctagacacatcataatcaaactgctgataaccaatgataaa

SEQ ID NO: 269688 - DNA, 463 bp, Homo sapiens
tggtatattatacaatgtatttggcaataaaaaggaagaagtactgatacatggcatagcatggatgaaccttgaaaacattatgctaagtgaaagtaggcagtcacaaaagaccacatagtttattatccaatttataataaatggacatatcaacaaatctatagagaaagtagattcgtggttgcatggggcttgcagaagggcaggaatgaaaaatggtaataggaaggttttctttaggggtgatgaaaatgtaaaattggatagtggtgatggttgcccacctccataaatattctaaaaaccattgaattgtgcactttacatgggtgaattataaggcatatgaattatatctcaataaagctgttaaagagaaataattatctacaataaaaataagaacaatgtgttacatggcttgtaacatatgtagaagtaaaatgtacaatgtggtggt

SEQ ID NO: 269689 - DNA, 413 bp, Homo sapiens
tttttcgtttaactgcaaggtacaggggatgaacatcaaggagccaccagagctgccattagcaagatgcttgcattgggccctaagtttcctcatctataagtagaggagattggaaagttatatttacggtgctgtctggctccagcatttcataagttcactggttttccaggctctggattcttaattattcatgctaatggagaaaagaagtgggagggtaattgaaattcacagataatccctcaaattgtctctgaatccttgcccaccaggccttcatcctttcatttcagttactgacaagtagatgtaattgactgatttgagcttgatcttccttctgatcttactcattctctggaggaaatgactaatgagcagaaaaattgccaaatgggggagggaga

SEQ ID NO: 269690 - DNA, 354 bp, Homo sapiens
ctcaaagacctatggtgttttgctgatttggggccattgcctcagtggatttctgttaccatccataactagagtttactggtgtttcctttctttctttgcggttgtctaggcctttgtgagtagcagtggcctgttgagtgcctaagagaatcagcacactacctgaccccctgtttgggagtatgtggcagaggctgtttatttcaggctttggcagtgataacccagtggccctgtgtgttctgggcagtggcagaaaggtagccctctaattccaggtcacatccccattctgcatttagtgacaaccttcctttcacatatccgtcttagaagtcttgtgttctcagc

SEQ ID NO: 269691 - DNA, 388 bp, Homo sapiens
aaaagtagtcgtaagaagttgtattattagacccaagtgacagatcaactcactgagaagtagattaagttgcccaatgtcccagggggaataaagagagttggcagttgagctcttgtccctcaattccaaattcagagtctttttcataccactctgccatcatgtcggtttcattttttcaggatgggttatgaaggacatgatacccattttcttggcagggagagagtgtggtttaagaaagtctttggtggcaggtgcctgtagtcccagctacttgggaggctgaggcaggagaatggtgtgaacccaggagggagagcttgcagtgagccaagatcatgccactgcactccagcctgggtgacagagcgagactccatct

SEQ ID NO: 269692 - DNA, 354 bp, Homo sapiens
gtcacacctctgcactccatccagcctgggcaacagaacgagattctatgtcaaaaaaaaaaaaaaaagctacattgagccaggcacagtggcccatgcctataatctcaacactttatcagtctaaggcaggagaatcccttcagtccaggaattcgagaccagcttggacaacatagtgagacccccatgactacaaaaaaattaaaaaatcagccagacatggtggcctacacctgtggtcccagctacttgcagccgtgcacggcaaggctgcagtgtgccatgtttgcaccactgcacttcagcctgggcaacagagcaagaccgttgctcaaaatttaaaaagacaaa

SEQ ID NO: 269693 - DNA, 470 bp, Homo sapiens
tctctattttgcacatcctactttgcagattattcatctgaataatgaggccacagatcacctaaagaatcttttcataatattgaatctatgaattgaactggaattctgctctaagaaatgacaactttgtatctcgtctcaggaaaagactattataacatcttataaaaatatttcatagcggctgggcgcggtggctcacgcctgcaatcccagcactttgggaggtcgaggagggctgatcacaagttcaggagatcaagaccatcctggctaacatggtgaaatcccatctctactaaaaatacaaaaaattagccaggcgtggtggcaggcacctgtagtcccagctacttgggaggctgaggcaggagaatggcgtgaacccaggaggtggagcttgcagtgagctgagactgtgccattgcactccagcctggttaacagtgcgagactctgtctcaaaa

SEQ ID NO: 269694 - DNA, 675 bp, Homo sapiens
tagctgggtgtggtggcacacacctgtggtcccagctacttgggaggctgaggtgggaggatgacttgagcccaggaggcagaggtgagtcatgcagtgagccgagaattgtaccactgtcctccagcctgggcgacagagccagaccctgtctcataacaaaacaaaacaaaaagaagtggttaaacttactgcttatagtagcaatattttatctcttactctaaaagcagcttgatgcccacgagggtctggaaatctgtatggtagagtacaaaatgatgactttgctatagagccaccagatcagaggaagtgagactatgtaaatgaaatccctaagtaggactcttcactgtaggtggatagcactgttttaccattttaagtcatataaatggccagaaatctgtgtcttctcttgggaagatgtttctggctgatgtctattaattataggtattttagttcctgaaattttgctttaataaattaatttccttcagtatagaaattgaaattctctagttgtaaaaggctatatctaatagcctcagaggtcacaattctgcacatgagaaactccaagacatgtgaagtaatttggtgggtgaagtagctgaacactaacaacactactaggttttatgggaagagacaaacctaaaggcattt

SEQ ID NO: 269695 - DNA, 362 bp, Homo sapiens
catgctggaaacgcagcaatggacaagacagccaggctctgcccccacaggactcagagtccagtggtggagtcagatccatcccaagataatgatgacagagggggcagcactgggatgggggaccccagagggctgtgggagcacaaaggaggaagcccgactcagcctgggagtcagggagggcttcctggaggagggggcacctgacctgagatccaaaggatgagtaggagtgagccagatggcacattagggagttgcatcccaggctaagggaccagcctctgcaaagaacctgagttgagagagaactttcattcgttcaataataaactcaatttcaggcacacctcatttta

SEQ ID NO: 269696 - DNA, 398 bp, Homo sapiens
gataacataagtagataacatgcaagaacagatggacagtgcaagcagagagatggaaatttttagaaagaatcaaaacgaaacactagagataaaaaaaactagcagaaacgaaaaatgtttttgatggactcaacctctgagcttgaggatatgccaacagaaacatccaaaactgaaggcacagagagaaagatgacctaaaaaatggaacagaatatacaagaagtgggcaactacagaagattaacatacttgtaaatgataataccagaaacagaagatgagaacaaaaatatttgaagcaattatgactgagaatttccccaaattaatgccagacactaaaccacagatccatgaagctcagaaaacaccaaacaggataaatgccaaaa

SEQ ID NO: 269697 - DNA, 346 bp, Homo sapiens
tataggatgtgggcacctagcttcaatctagccagacaatttttataaagtagtctactctttcgggctctttgtattagtatgttataatatagatatgttatacactatacaaattgcacttttggacggctatatacaacagaaaaaaaaaatttacttctcaaaatatcctttaaagtctaaatatttcttgtgttttttatgttattaaaaagtgcccttgggaaaaaaatattataaatttttaagtatagtatgctttattctatgttccttgagatcaattcctccttccttttcctcttttgccaattctaatgacatggactatacaaaggtgatg

SEQ ID NO: 269698 - DNA, 459 bp, Homo sapiens
tgagatgcagtcttgctctgttgccaggctggagtgcagtggcatgatctcagctcactgcaacctctgattcccgggttcaagtgattctcctgcctcagcctcccaagtagctgggattacaggcgcatgccgccacgcctggttaatttttgtatttttagtagagatggggtttcaccatgttggccaggatggcctcgatctcctgacctcgtgatccacccgcctctgcctcccaaagtgctgggattacaggcatgagccactgcgcccggcctaaaatctttaattttttaatatgatatgactaagacatgagctgtatttgaatcgagcattgtgtctagcacaaaataggtatgtgagagtgtttatcaactgaatgaaccttttagggtctgggtgaagtttaaatatatctgttcatcaaacaaaaggaaccagtttttaaaacat

SEQ ID NO: 269699 - DNA, 344 bp, Homo sapiens
aggattttctagatacacaatcatgcttcttgggagtaattatagttgttctaatctttatgcttttagttctttttattgtcttaatgcactggctaagacctctagtacatatagtacatctagaccatataagagcattgctttgttcctaattttagaggtgaaagtatttagtctttcaccatcacatgtgatgttagctgtaggttgaagtttttgctttgtggggtttttttgttttgagactgagttctactcttgttgcccaggctggagtgcagtgagccaagatcacatcactgcactccaacctgggtgacagagtgtctgaaaaaaaaaaa

SEQ ID NO: 269700 - DNA, 442 bp, Homo sapiens
cggcctgaggaacaggtgttgcactcagaaacactgaatatggggtcacaggatctgactttgagccttggctctgctatttatcagcaggatttgaagaaaatctctctgggcattggcatctcatctataaaagtggtttaagaatgattaccttggccaggagcagtggctcacacctgtaatcccagcactttgggaagccaaagccggcatatcacttgaggccaggagtttgagaccagcctggccaagatggcaaaaacccatctctactaaaaatataaaaattagcctggtgtggtgacgcatgcctgtaatcccagctatttgggaagctgaggcacgagaatagcttgcgcccagaaggcggaggttgcagtgagccgagaaagcgccactgcattgcagcctgggggacagagcgagactctgtcttaaa

SEQ ID NO: 269701 - DNA, 326 bp, Homo sapiens
ccacttagccatacatattactgggtttacggggagagtaagcagaggaaatgctgatagaaattaaaaatatgcagctgacatactggaacatacattatgttttttgttttgttttgttttgttctgagactgagtcttactctgtcacccagtaaatcataaacaaattcattaattgcagatttaaaagatgtattagccgggcacggtggctcacacctataatccagcactttgggaggccaaagcaggcaaatcacgtgaggccaggagtttgagaccagcctggtcaacatggcaaaaccctgtctctactaaaaaca

SEQ ID NO: 269702 - DNA, 517 bp, Homo sapiens
acagaaaaggaataaagcttgcctctttttttgaaaaacccagctggacaatgggcatattcaatggccaaggcctcctctaattgctggcttgggaagaactggagataactcagcaatggagagacaaggagggctcctagggaacaacttggagaccgaggaatcttgctgaatgccagcagaaaatctggaagcagagccagtataattcagcattactgagcccactgagctctccagggaagtataaattgagcacagaagctctgaaatggattgtaaccacaacatcagaggttataagaccctcattccagagtggtactgccctgcgtctgggaagaaggaaggccacacagagagaccaagaagaatcctaacagacagggcttgcttggtttccccctcagtctcttaccgttagatcagacctctttggtcctaccacgtttctacatggctgtccattcttcatcgaatctaagaataaaaattggttggtttcccctgaaaa

SEQ ID NO: 269703 - DNA, 482 bp, Homo sapiens
attcctgagaaaggggtctcaataaaatcttttccgcatatcatgcaaaaatcacaggagccctttgcacaatttattgcacagttacaacagtcagtgaggcatcagattcctcatactgctcctgcgaaaatgcttactttgaccctagcttttgaaaatgcaaatgcagattgtaaatgtgcattagcacccgtgagatgtacaaacagcttgggaaattttctcaaagcctgtcaggatgtgggaactgaactccatcgttcaactgtgttagctcaagtaatagctaatttagtagtgaacaaatctgaaaagggccaagggttgagccctaaagtgggaaaatgttataattgtggaaaaattggacatttcaaaaaagaataccatcagacctctgggcagaagggatcttacaatgcaataccgcccccccctccccgccccgctccccccaacacacacacacagaaaaaaaa

SEQ ID NO: 269704 - DNA, 679 bp, Homo sapiens
ctaagattaaaggcacagagtgggaggtgaggaggctaggaagttctagagggttcaaatcagaaatgctttgtcctgtaaatcgtgtggagctgtggaaaggctttaagcaggtgagtgatgtgattaggtttacgttcccgagaaatcattccatcacactgtggagaacggactggaaaaagatcttcgtggatgcagaagatgagcatagacactgttgctgtggcccgagcaggagagaatgaggcccagacccagggcagtagaggtggaggtgtagaggagggacacagtgagagagagagatggaggagactgaagaacactgagtgagtaaactggaagtggtggatgcaggagaccaggaggagccagggttgtccaggatttctggcagagctgacttggtgagtgagggcattattgactctgacagataaatgagaagaaaaccagcttctgaggggtagtggaagcagataggggcatgcggggcatgttgagatgtgttgggacatgctgcgattgaaggggcctgcggccatcaggtgaagtgtgtagccgacatttggaagtactggcctagagcttaggtgaaagcctggctgaataggtaaggtgccactggtgtcataggacgagaagcggcgaaggacgagaagcagcgaagggttac

SEQ ID NO: 269705 - DNA, 548 bp, Homo sapiens
  misc_feature (45)..(45): n is a, c, g, or t
agaccaactgtgttcaccctagagagaagcagagatgggggaganaatgaaaggagaatgtgaggttacagtcaccttcttaagaaccttttcatagacacatttctgttattgccaacaatgtccttaattacctagcattgctttgatcaagaaaaaaagtgatgtaaaactttatttatttatttacatatatatatatatattgagatggtgtctcaaaaagaaaaagaaaatgtggtatactttgcctcaaaaataaacacataaaataaaataataaataaataaataaaacagttgggatccacccaaatggagatttgcaaagtgggaaacataccctgtgataagcacgtaactagagataattccagaacttatgagaagagacaggaggctcttgggaataagaccatgaaacctgcaagcatcgagccaaaactctgaaaagttttcgacacagttccaagctaatagtgcatgcagagaaccgggctggaacatttaggaggggggtggagagtggagaagagaaagaaatgtta

SEQ ID NO: 269706 - DNA, 634 bp, Homo sapiens
tacaagataatatatgtgcttgctttcttcttgattttgaaggaagaggttgcatgttccatcatcaagtataaacataaggtgagggtttttttcttctaaagtcctaattatttttcttattttaaaatatagaaatagcatccaatttttatcaaggagtattgcattttttgagatgagcattttggttttgcttactgtgttaatattagaaaacattcattcatcatttggatatatccattttaatcatcaaaatatgcaacacatatacagatgtcatacattatcaggtatacaactatttttaaattatacaattttaaaatagtacaatttaaaaatagttgtgtacttgattatcagagttaagaacacttttcattagaaggaccaagtagtcaaagtgaatagacgttttttggccctcccacctcacccctaacatacacacatattttatgtcagagttctcaacaaaaataaataacaaaataagaaattctaatgaatacatatatttgaggcttatttttcacaatacttttttcagtgctgttataataacaaaatataaactgcatggctttgttctttaacatgttcaagtttaggtgtatattgaattatg

SEQ ID NO: 269707 - DNA, 465 bp, Homo sapiens
ggccctgggacccgccccacccgaagcccggggagatccaaccgcaggctgcctccggccagcggactcattcacactccgcaaacaggctggggccagacgccgccctgccctaggtgcccagcaaacacgcgggccagccagacccctggaccttcacagggaggaggagatggagatgggttcaccccccacaaaggagggaggggaggggatggccgccatgcccaggtgccgggacaggagccgagggccgcgtgcaccccttgggcccttggaggggccggcatgtgcctctctgtccctgtgccacttccactggccgtacagggccaccaccgcggaaaccgcatgtgtaacccctggaaacagggtcctccttgatgagtcatgttctaagttgggaggaaaattcactggatagtggaggcagtagaaagaaataaaaaaagtctttgttccaca

SEQ ID NO: 269708 - DNA, 499 bp, Homo sapiens
aacaaaaaaaaaagtaataggcaactgtaaaacagcctcacagtggtccttcacgaggcatttcagagggcattgttatcatagatgtcgacagatccatatgcattattggcctagaggagcttccagtgggacaagatctggaggtagaaaacagtgatgttgatcatactgaccctgtgtaggcctacgctagtatgtgcatttgtgtctttgtttttaacaacaacaacaaaaaaattaaaaattaaaagatgtaaaattacaaaaaaatcttagagaataaggatataaggaaataaagtatttctgtgtacaatatgcgttttaagctaagtgttgttacaaaagagtcaaaaagttaaaaataagttaaaaagtttataaagtaaaaaagttactgtaggataagtttaatgtattttgaaagaaataagtttctttataaattttataaattcagtgtttataaagtctacagttttgtacaatgatgccc

SEQ ID NO: 269709 - DNA, 439 bp, Homo sapiens
aggcacagtaaaaaaaaatatcactttatctgttatttcctttagccattaagatctgtagtcttttttgtctgcttactgatgaaattcttttttactttgacacttagaagttcagaattctgttattcaatggggagtaaatatgaaagtcatcatgtagtcagaactggatcaagtgttccccaaaataaaaggaaaaggtaagactgtcagtaactactaaggacagaatccttctgtatactaatgtttaaagaacaaaaagaggaagatacgctcttgtgtgggaaatgcagcaaaaaataaatggtgaaaggtgaaccaggagagtatgaagctatgactatcgagggtatttagagtttcaaggagaaagtgagggaccatgttaaatgtagtagatatgtaaaaaaaacaacaacaaccaaaaaaaaaa

SEQ ID NO: 269710 - DNA, 462 bp, Homo sapiens
atttatccccattttataagtgaggatgctgaagctcagaaagggtaagaccatgtagcgaattagggaggttacgtatcaaacccaggtcttctgacaaaacctgatgtactttaatctcccttcatgctgtaacgttggcaggttaatgatgaaagaaattgacttttcccccttttcctggcaatggtaaatagtgatccttctttgccaggctggattatacacagtgaggtagtggcaaggggacagtgaaccagggatgctggtatggctagtggagtgtaatttgtataaactttctggaaggcaggttcaatacgtatttgtaacttaagtttatacccattgacccatatcagttccctttctaataactaattctaaggcagtaataagcattcatgcagattgttgtacggaatgttgtttagaggactttttataatagccaaaaaaaaa

SEQ ID NO: 269711 - DNA, 376 bp, Homo sapiens
acttcaacctgggtgacagagcaagacatgtcttaaaaataaataaatattagatagttcaaatgttaagtagatcagacaaaaatcatgctggtctcagccgggcgcagtggctcacgcctgtaatcccagcactttgggaaaccaaggcgggcagatcacctgaggtcaggaattcaagactaacctggccaacatggcaagtccctgtctctactaaaaatagaaaaattagccgggcctggtggtgcatgcctgtaatcccagctacttgggaggctaaggcaagaatcgcttgaacccgggaggcagaggttgcagtgagccgatcgtaccaccgcactccagcctgggtgacagagcaagactccgtctc

SEQ ID NO: 269712 - DNA, 590 bp, Homo sapiens
aattcgcgcccgcgtcgaccgcggccgcgtcgacgacgacagaagggggcagtttctcaaaacttaaacataccacctatcctatgaaacagcagtgtcactcctaaatatttgtccaagaggactgaaaacacaaggttcacaaaaagactagtacacaaatgtttacatcaactttattcttagtaaactacttgaatgttaaatgaagggtagatacaccaatcatgttacatttatacaatgcaatactactcagtaataaaaagaaatgaattatcaatacacagaacaacttggaacaacctcaaaaactttacggtgagtgaaagaagccataaacaaaaggatacatgatgtacgattccatgtgtatcatgcgtagattaggcaaaactaatcagagatgaaagaaatgagaacagtgaatgtttacaggagatgttgacagtgaagagatgtgagcaacctttctgggatgatggaaatattatattataataggatggtgattacataggtgtctgaatttattagaagtcatcaagttccacacctgttatctttgtattttaccaagtattttctat

SEQ ID NO: 269713 - DNA, 459 bp, Homo sapiens
taactttattttattttgtttttaaaaaaatgctgtatctatcttttctgaaggcgaatctccaaataaaaggaatctttattctgttaagttttaaataataaacaaaactccaacttgatttaattttatactcagttccctttagcaaacgagcaagccagcagtcatattttcatgtggttacttgttttcataacttttcaccaagagcttaagataggagtttgaaattattcttatctttgacattaccttaacaattcacccatgtaataattttaaacatatatgtgggtgtcttactctatcttcttgtcttaaactaacacttaaatgtttaaccatttccttattatatgtaactgtaatatatgagagaatactgttaatttctataagttgtttcatgccatgtttttcaaataaataaataaataaataaattcactttaaaaa

SEQ ID NO: 269714 - DNA, 1080 bp, Homo sapiens
gagccagtgtccagtagtccctgaaatgtctgatcatctccctttccccagtgcacagttaccctgataaaaggccagaggtctctttggggaaggatgggagaaagattcactgcatacattgtcggtaatgtagtggggtccttcctcaaggggacccgacctccccttcattcaaggggttctgggtctgtaaactagctcaagtctggaaattgattgaagagccatgattctctgtttttataattcaaattagtgttttggccatttgacctagaagttttctgcttgtataaattaagtaggaatgcagtgggcttcctatcaatttcacttctaggaacaccatgattaattaaccaatgccggagctctacacgagccagactgttctgattgctgctttgcctctgctgtccattagggtagctgtgcccacctgaccttatcatatctagtttttgaaacatggcagggaaaatgattccacgtaacctgaccatatcagctgggtgactgaataaaacaccttctcagctcgctttcctctggcctgaagctttttgctgtagctgcttttgcaacaaaggacacagttgtaggcagtggatcctaaatggaggtttcctgggggactttagggaaagcttatattttcctgataaaactgtcaagtgtggccaagataatacttccccgttttctgactttaatgaaaatacaaggccctcaacagagatagctgacttctgactttgggagagaggtcagggaacagcagtgatgctgtcgctgatgtttttgagctattggtctgatatcactagaggcttcctttacatatttgagccatcctaaatctataattttctgtttacttgtagccaaaaatattctaaatgtttcaccctcatactttttgagaaaaaaaaatagcttaataataataaagtaccttaaggcaatttgccattcttttcctttcttcaaaatcagcaaagcatggcaggacacatctgaaagtctgtttactgttgtttttgttgatgttattggcaggcagggcacttatttcca

SEQ ID NO: 269715 - DNA, 460 bp, Homo sapiens
gatttatttaggtttggaaggaatacagtcttgacctacagcaaggtttctcagcattagcactgttggtattttgaggcagataattctttgttgagggtgctcggagtgtcctgtgcatagtaaaatatttagcaacattcctggcctctacccactgtatgccagtaacatcgcatcactcgccacatccccatttgtgacagattgtttccagacattgccaaatgtccggggaggtagggatgggggataaaatctcccttggttgaaaaccattcatttaaaatactggagtatgcagggcacagtttcgtgttcctgtagtcccagctactctggaagctgaggctgaggtaggaggcttgagttcaggaggtcaagggtgcagtgtgagatgattatgcctgtgcatagccactgcactccagtctgggcagcacaacaagatcccattgct

SEQ ID NO: 269716 - DNA, 626 bp, Homo sapiens
atctcctgaccttgtgatccacccgcttcggcctcccaaagtgctgggattacaggcgtgagccacagcgcccggcgaaaagatgtggaaaattcttaaagctgatcagcagctactttgctactctggatctttcttcatttcctttaagctgaggaattgcatgttactgaaaaatggcattggactgagacccttgaaggcctatttgtcttctagtgggtcagctctttttagtattatcgaaggcaatgtttcaaaattcgcagttttcttttggattagtatgggtttctttaaagtgccacactattctaataaagcttaacatgaataatgtgactttgttccattaaaaataacagggctttgtttcacaaacttttgaatcaattttatgtaaacatacataaacatacatgtagttgtaatcataatgtagacctaagtttgttgtttgcccttttttcttgacttatacacattcccgcatgttactctttagtcttcattgtaaaatttaagatgatgttccataatttacccgaaactattgtgtcagtcaatgttctactggagaaacagaaccagtagaataattctttcttagagaaacttcagttttg

SEQ ID NO: 269717 - DNA, 854 bp, Homo sapiens
ccatgttgtgggtattttattattaataagtgcaagctattatctcactttgtatatctcaactcattatcacttctttctagcttgctccttctaacaccccaataacaatccttctgggactttcaatccattgatcctaccatttttcacttttttcactcagcttttgatttactgtcttcctctctcacctagcctgaattccattgttctataaatacaacgttctcttgaatacaccatcaactctctggcccctctctcacttctctgtacttactccaattctcctgaccattccttctgtccatttccaactctcttacagggtctttctccccttaaatctctgacacttgctcccacatcctcacactcagctgatgacttcactttctccttaattataaaattagaagaaatcaaaagagcatttctataaatgctcaccaacatagtggctcacttactagcatctgtatcatatgttctacattccctcctgttatcagagatccactctgtccaacagagtaaccactaaccacataggggtattaaacatttgtaatataactagtgcaactggggaatgtaattctttattttaattaaaattcaaaaccaaagcattgtaaacattaaacaactttattattttggtagaactatatttcccattttaatgatgggaaatttagcacccaaactgagatatgctttaagtgtttgaaaatctagtatgaaaaaaaagaatgtaactatttcataagtcattgttatattgattctatgttaaaaccacagtattttggatatacctggttaaataaaatattatattaaactta

SEQ ID NO: 269718 - DNA, 366 bp, Homo sapiens
tatttttccccacccattattgcattgatccatgcaaaaaccctatcagaaggtaatgcttattatagcaccattttatggatgagaaaattgattcaggctccctgagggctggaaccatgcctttgttgttctgagtggcaggcacattgattcattacatgaagttgttccttgataaatattacttgtgtgaatgatcagtgtagagtcaaaggcacatagctagtgaacagtagagccagaatttcaccgcatcttctgccccaaacccagtgtgttctttcagtatgccatttcacattacatatatctgtctttctaattctgtgaaatgagtttaccatttattaaaataaacaaagt

SEQ ID NO: 269719 - DNA, 483 bp, Homo sapiens
caggatctaggtctaattcatagtgaaatgttggtgcacacagtccctgattgcttcttctgaatttcgttactctggaaatcaaaatcaaccaaatgagtcacataagatcaagagaaactcagagaaaactgaactggtattagtgctaggcaatttcctttaattatgtttatttcttataatacagaaccaaatatcataagactttcatgattgatctaactacagaatattaaaattgccacctaggtttttgtgtttgaaaaacctaaatttgtaggtagaacagaatcaaatgtgaacattttaatagaaaaaatagtctgaaatcctggtctgcctactctgtattcagatctgtattcagaggtaagtttctatgacatttagtttacaaatcatgaaaaatattcttaaatgcaatggtatacattagttttgttctgtaagatttttatgccttacatttttgtttattac

SEQ ID NO: 269720 - DNA, 507 bp, Homo sapiens
cattgctccactcccttcctcagcaacaccctcagctcctttgcatctcctttggtccacaccaggagactcccagcagatccgtagccctcgatcagccacatggggtttaccacccctgctggagaaaatcacctgtcatcagactgcggtccccttcatggtccccagctgtgggaggccctcggagccacaccacagccttatttttctttctctctgtcccctcacacgctcattccatcctgtgtcctctttgctctctgcgggcacttcactgagaaagtagactcagcattcctgagtcggtctacagttttctgtcctcttaccccaagcctgacctcctcagagcccacctcctcctgtgctcagagtgtagtgtccttcctctgcctctcgtctgctctgcgtctaccctgcccctcttgtccctttgtcccatcggctggcctcttgcctggtatgttccatctcactctcagcctgtaaacccaaacccactca

SEQ ID NO: 269721 - DNA, 345 bp, Homo sapiens
aatgcatgcttatgtagaatcctctcacatgtaggaaagtggatactggaaataataccattcatcacagccattgagcacgaaagcatccctttcagaaattatcctcattaagagactcagtagagaaaaccacctgatagatagtgattgaataaggtgaactggacccttgacctcctacacctcatggctggtggtatctcagcactcagtgattcaggcaggtgcgagatgtcctttctcttcctgccctccacagagcaaacaagcaaaaggaatcagaaagaagtctgaacatactttagattcatgttgatctctctaaagtcatatagtaaaaaa

SEQ ID NO: 269722 - DNA, 421 bp, Homo sapiens
taggccttggcattggccctcattttgtctttggcctccccagctcccaatttagtaaagaacttactaaatttagttttagtaaagaatcctactaaatcataatcatcccccccaattcttaatatctgatcacccttgatatctgataaagttccttatcctccacctctgacatataattgcttagcctgcctttagtaagaatcctattaggtctttttatcaagaatcccccctacccttaatgtcttctattaagttttctatgcactgaccccctcattattcttcttggctataaatccccacttgtccctgttgtgtccagagttgagcccaatctctctttcctattataataattctattatattagaattaaaggaatcaccctgcaaaggtgatgataatagcaata

SEQ ID NO: 269723 - DNA, 1009 bp, Homo sapiens
agcctttatccttcagtgatatgtatagaatatgcccaagtggggaaacttgacaccagaacacatgtttttagttccttaggtacaaagcaaagaaacacacctgtccttaagactgaatctatgtcatgaccatctaaatgatgatagagagctttcctccaaatacagctggctattctccagggtcttagcctaatgattcctactctttgctattgatatttgcatggttcaagagctggtctgcttttagttatgcactcaacaaatattgagtgcccataatatgtacagcacgatgctagtgcttatgagaacaaatactccataaacccttattcatgtggttgcgagaacaggttacacacattggaacccaattaagagatactgtacaattggggtgattcggtggcacaggcagaaggtgccgcagatgctgaggagagtgtcacagtggactttggtctgtgccatcaaagaagcgacaaaatgtggataagaaaggatggcattttggaagttacacatgaaggtccaatgttacttcaagcatctatcttcaatgtgtgtttattttgcatgtatttatgtttcaggcatagataaggccactcttgctaggagatacacatcttcatcctagaatgtttactaaatcgcctttttttctagagttgacatctgcttcattaagattatttttcattcagcatttatggaatattcatcaagtgttattgatatgccagtatacctagtgacaagaatattttgggggcactagtaaatactcgtgagccgccttttgcgtagtaagccaccttttcgagtttttgctccggggagtatgtgtccgtttttcttcatactgtcttgagtgtctacgtttttttttcttggtagttgtaaacctgttacggatagcaacatagctagccagcttttggcctgtattgatttgagagggaatgagaaaagacttcaatactacagtgagtgaggc

SEQ ID NO: 269724 - DNA, 383 bp, Homo sapiens
gcttgtatatatgcttgtatgtatgttctgaaacttaaaatacagtaaatatagtattggtagtactttaatttgagtctatgaaataatttcccttttctgattccgatatgagaaaaattagaaaatttcaagattatttttatggtttaaatgccattgttcaaatattaacaagtatcacagtgaatgcttggttgtatgaaaataatgagacctcagtttcacttatttggcagactaagcaaaagtgtaaaattactaactagtgcctcttagctttctatttaaaatgataattttaggacgccaatgtgggtggatcacttgagttcaggagttccagaccagcctgggcaacacggcaaagccccatctctacc

SEQ ID NO: 269725 - DNA, 387 bp, Homo sapiens
aaaaatctctacttctttatttaccaaaaaattatccaaaatctaaatgcaagaggtctgaggtcattgtgcctgggcttacactatattgctctgccattatttagctgtgtaaccttaggcaatttacctaaccactctgagttttgttttcctcatttctgaaagtgaggcatgccagtttctttcattaaatattaacttccactaaaagaagttaactttaattaaaaatctgtactcataggaaaggaaagctgttggtgaattgagaaccctgccacaaaagctgttgatgcatgagaactagaacattacacagtcaacaaatagcatagggaagggcatggagctctgtaaagccgataggccaggattctggcattc

SEQ ID NO: 269726 - DNA, 389 bp, Homo sapiens
gatctgtgtttagttgatgaactgatccatgctattcttgcatcatgactttttcatcttcccttgattcttttccctatatgcatttaagcctgtctggttcttttctcaagcctttgctctctactcccctttcactcaaagcatttcatgtttcgcctttataaccctagtataagtatcaaacttctcacctgtgacttttgcctctctctacatctctcttctacttttaactttcatgtttacaataagctacctttctcttattttcagttcttaccttctcaaacttcagagaatccccactgcttagtgttcttgggagatgctagaggttacacaaaatgccacctcccagaaggtcgaggcattttttttctttaaaa

SEQ ID NO: 269727 - DNA, 417 bp, Homo sapiens
tgatgctcacatttcatgtagtcagaggaggccatctggtttgaatcaacatccggaagttacagggtgatgcttagagagggcttgtgcttccccagccacacatctccataaagatgtaagaggtaattatttcagctgggtgcggtggctcatacctgtaatcccagcactttgggaggccaaggcaggcagatcacctggtcgggagttcgagaccagcctgaccaacatggagaaacgccatctctactaaaaatacaatattagccgggcgtggtggtgaacgcctgtaatcccagctactcaggaggccgaggcaggagaattgtttgaacctgggaggcagaggctgcagtgagccaagatcgcaccattgcactctagcctgggcaacaagagtgaaacttcaactca

SEQ ID NO: 269728 - DNA, 475 bp, Homo sapiens
acaaattctttcttgtgtgagatccaagaacccactctttggatgtggatccagacccctttccggtaacatcttcctggtgaaccatgaagggatgatactgaggaggccatgacccgaaggaaatagaccgcaacactaattggctgactttgggtggatttgttttcctagttcttgaatctgtgctggctctgtgacttgttttgaccaaggaatatgatagaagtgactctgcccttcaaggctaagcatgagactgccatgtacaaacgttggtctagtctatggagggcaagatgccacataaaggggaactgaggcaccccagacaacaactagtatcaactgctagacatgaggccatcttggaccttctaccacagttcactgcagttgtatgagtgaaaccagcagaacttcccaaccaattcacagaacatacgaaataataataattgttgttttaaaaaaa

SEQ ID NO: 269729 - DNA, 468 bp, Homo sapiens
tgttttgttttggagagcctctaggaacttgaaaaatacatatgccacactcttaagacccggtggttcttaatcagggatgttcattaaaatgctggaaaactgtaaagacttccaggtcccatccaaggagattttgcttctgattgactggctagtggcctggccattggtattttgaaaaatccctccaagtgattcttttacatcccagctagaaaaccctaaattaaaggtgaaaaaccagacaccaagtggcatttaaataaatgtcaactttaactccacaaagcatctggttgcatgtggacagaaagagaaggaaagagggccctatatctggataacttggaaatgtgctccccctagcaagatatctaccaaaattaaaaccatatttgaggatgctggcactgtgagcaatatataaatgatgcatgtaacatcatttaatatgatcttattttt

SEQ ID NO: 269730 - DNA, 305 bp, Homo sapiens
ggaaataacatttaaaaagcggcagggtggaaataatttctgctgatgaggttgcatttctccagataaccggcagagtaaattaaagcaatatagtaaaacaatgcacatattgatggaatctcaggatcacaaggttgtggtgaaggaaatttgaagatgtccaggaaagaaagacaaatgagatgaatcttgcagctgcccttcaagggggcatgggccgggtggccatgattctccgtgatgttgcaggaattctggctgggtcctcaggagccttttttttcttgtccacattcaccttc

SEQ ID NO: 269731 - DNA, 310 bp, Homo sapiens
  misc_feature (215)..(215): n is a, c, g, or t
  misc_feature (226)..(226): n is a, c, g, or t
  misc_feature (231)..(231): n is a, c, g, or t
catcccagggagcctgggagtcagcgggcctggatgcacctcccagttctgcctcttattagccagctgtgtgttaacccctcatctggtttgctcaaggtaacatgaccatcacaaaagcaacagaaacagattatttactttcagattaacttgtgaaaatgacaagttgaatattgtcatttcagtattcaagttgaatactatcaattccntattcaagttngaatnattgtcacaagttgaaagattaacttgtgaaaatgacagttggttgaatattggtattttctgcctccaattgttgcat

SEQ ID NO: 269732 - DNA, 454 bp, Homo sapiens
tctcacagccctccctgcccagctcagtctccccagttccatttctctgacaagaggcaaccgcaactcacagtttagcatatttccttctggtctcgcccacccatcctagccccacacaaattttttaactacaaaaatttcaaacttaaagggaaagtacaagcataacacaatgaatacccttaaactctgcacctggatttgcatgattgttaacctttttctctgtttgcctctctctctctgtctctctgacacacacacacacacacacagagatagacacacatctatgtacatactttttttccgaaccattttgagtaaattacagccattgtacacttcacctctaaatactttagcaggtgtctcttaagaaccaggatgcttttttccataaccacaatacaattgtcattctcagaaaaattttaacattagtgtgaca

SEQ ID NO: 269733 - DNA, 469 bp, Homo sapiens
actaaatatcatagcctatgggtcagatggtctctgtcaactattcagctcagctgtttagtgcataagcatctataggcaatatgtgagtgaatggatgtagctgttttccaccaaaatttaattacaaagacaaatgcctggctctcaggccatagtttgctgaccccagatctcaggcccctcatcatacacatagtgaaaccaacactagaaagcttaagtcacttaatcaaggagaaataacaaaataacaaacctagatagtgccagaacctctaccaggcatttagttttgccatatgacaagtcttccaatatgcatgctaatgctctaagaacaacagcatgtttatcattatagtatttagccaaagaattctaactagttggttttccacatctattaatttcacttaaagttgttatttcccagaaaaccatattgtttttattttctatgcaaaaa

SEQ ID NO: 269734 - DNA, 647 bp, Homo sapiens
gtccctctgaaatctagcctaactcccttgtgctgtagcccagccccttttttgggattagtcctccatggaagcacagggtagtgcaattggcttgaaaatgcctccagaggctgggcacagtggctcacgcctgtgatcccaacactctgggaggctgaggcgggcggatcacgaggtcaggagttcgaaaccagcctggccaatatggtgaaaccccgtctctactgaaaatacaaaaattagctgggagtggtagcgtgtgcctgtagtcccagctacttgggaggctgaggcaggagaatcgcttgaacccaggaggcggaggttgcaatgagccgagattgtgccacagcactccagcctgggcgacagagcgagactccatctcaaaacaaaaagaaaagaaaattcctccagacgtgggagggagacttttaggcaacaacccttggccttcgcgcttctggctccatgttctgtcccctctaccctttgccatcttgtctctcctgttgtccttctgcttgtccatctctatatctgtctctctccgaggcttcgtcagtctcttatctctgtcttggactcttatctccttggctctttgattctctgtccctgtcttggtctgtcttggtcactct

SEQ ID NO: 269735 - DNA, 755 bp, Homo sapiens
actcatgttattaagtaaatgtttatttatttatttattttttatgatggaggctcgctctgtcgcccaggctggagtgcagtggcacgttctcggctcactgcaacctccgcctcccagcttcacgtcattctcctgcctcagcctcccgaatagcagggactacaggcgcccgccaccatgcccggctaattttttgtatttttagtagacacagattttcactgtgttagccaggatggtctcgatctcctgacctcgtgatccgcccgcctcagcctcctaaagtgctgggattacaggcgtgagacacggcgcccagccccagtaaatgtttatttcttaactttcatcttaacctatcgacaacacttgatacaattgatcactctattccttgagaaactttcttcatttgacttatggaatgccacactctcctggttttcttcttatttctatggcctctctttttctggttcctttcctggtttctcctcattttcctgacctctaaaccttggagtaccccaggactcagtccttgagcctcttttctgtctatacttctctcttcatagttttatccaggtcttggacgggtgcagtagctcatgcctgtaacctcagcactttgggaggctgaggtgagcagattgcttgagctcaggagtttgagaccagctggggcaacatggtgaaaccctgtctctaccaaaaatgcagaggtggaaggatcacttgccccggaggcg

SEQ ID NO: 269736 - DNA, 472 bp, Homo sapiens
ttccggatgccaaagaggcaaatgtggaatgatgttaggatatcacctgtcataatattatacggattcagctcaaagcagaacctttctgcaaacacgtagggatatgaggaccaaccttagtttgtgaaagagaattaagcttttccaaccttgaaagccttcagattactggatccccagatgctatggatggccagctccataaaaagaatttttatctcatttaaaaaaacttcattaagctttacctcaagttacagaaacatgataaagcacaatgcagtggaaacagcgtggagctggaggatgccagacgacattccagccctgattccactgctcatcaccaatgtcaccctgggcaaggtactccagccctgctgctcagtttgctccactgtaaaatatgaagataatatcttccatgtaagatagttgtgggattaaatgagatcatgtatggaaatta

SEQ ID NO: 269737 - DNA, 1555 bp, Homo sapiens
ttttttgattacggccattcttacaggagtaaggtggtatcatattgtgcttttgatttgcatttcccagatcacagctatttaaaacaaaacaaaaacctaaatttaaaggcctggaataaatcttaggcctaccattatcttcctcaaactagttcaagttctttagttcatttctatttcacaaagatgtttaccaacattactgactcaaacagactatggtcaatccagtcattttctcactctgccatctgtcaaaacaagttgatttttgctcactagagaacatattcataatgcagcaaaataaacttgtatgcagcttattttcggaagtttaaattttattactactttttaaacacagggctgcatttgacatgtttacactcattcccagtgatttccagcagtggacagtaaagtcatttagaaatttgactgcaagcaaattattaccatgccaaactattaaaacacattattgactgattgactgacaaggtctctgtcacccaagctggagcacagcagcacaatcatggctcactgcagccttgacctctcgggttcaggtgatcctcccacctcaacctcccaagtagctaggactataggtgcatgccatcacgtccagctaatttttgtatttttcggagagacagggtttcaccatgttgccccactagtcttggaactcctggactcaagtgatccacctaccttggcctcccagagtggtgggaacaggcatgagccaccacacagggccctaaaacacatttttttaaaacacatttggctatttagtttttattttcaccaaaatggacatgaggaaactatggatcagatataagaggactgccttaccaataggtcattattctttttgcatcaactgccttcccaaccactgaccaatataataaagactacagaactacctctcaataagaagcaggaacataaccttaaaccagtatcttccttgttacgttcttcctaactacttataaaatctccagttctcttcctactacataaccttcccacaatcaaaccaacagctcaaagacatctaaaattacaagatcatttcattacgtgctcctaaaagctgctcctacaacttagacaactacttagggaagaaagaataaaatgttaactaatctgatgctcccatttgctataaggaaacagcctattttgatgctaaaaaggaacttaatttaaaataattccaatcactttgtgctcaaattgagctagacaaaaaatctaatcatactaaagctcctcagaaacctaacaaaaagtatcagaaactatgctgattactctggaggaggatgccttctacctctcctcatcctcttatcccacctttttgcctcctacaagttatccacaaaatattaagtaactaatcttgtacttgcaaagtggcagagttccatatggacttaagaatgtctgatggaaattactttcattatattcaaattagtagcctagaaacaaaagctaaatattgtattaatttcct

SEQ ID NO: 269738 - DNA, 479 bp, Homo sapiens
ggaaatatagcttgtttatttcagctggactttatgcatgaatgtatgtaagaatgtataaaagtgctatgtattcacactacagtgtgatgtaaactatgtgaattactgtcggtcattgtcagaagagtttgtaagtcactggttaaattttcttctgaagaaagccctttttcttctttgaatcagtttttggcaattctttatagtgctaccctttgtccctctttgggcaaattttacactgcctagcttaagtaaattggctgattcatggttgtttacagccctagcatccacaggcccagtctgaacagtgtgtaggccactcactttgccatcaccgcattacatggttgtactccacttatgacagcagggaagtggaggctgtggccaggaatctcctaccgtgggaatagcatggcctatatccaaggctgctcccgctgggaaaacagtgaaagcacctgaggctc

SEQ ID NO: 269739 - DNA, 288 bp, Homo sapiens
tgaacatagatgcaaaattcctcaatgaaatactagccaaccaaattcgacaacacatcaaaaagagtatataccatgaccaagtgggatctttcatgggatgcaaaattgttttaacatgtgcaaaacaatcaatgtgatataccacgttaacagaatgaaagataatggctgggtgtggcatctcacacgtgtaatcccagaactttgcgaggctgaggtggaaggattgcttgagtccagaagtttgagaccagcttgggtaacacagtgagaccccatctctac

SEQ ID NO: 269740 - DNA, 480 bp, Homo sapiens
taattacacttttcattgtctgtatctttgctatacattgaacaaatggagcaggcagagtgttgttttgcacatgggtctgacagatttcctcccaatgggtcctgttctgattgggctgtgatgctcactgctttgggaagagtctgaactcttttcatagtagtgggtggtaggaaaggtcggttgttatctataaagattattattgactcctggctgggtgcggtggccacgcctgtaatcccagcactttgggaggccgaggtgggcagatcacgaggtcaggagatcaagaccatcctggccaacatggtgaaaccccatcactacttaaaacaaaaattagccagctactggggaggctgaggcaggagaattgcttgaacctgggaggcggaggctgcagtgagccgagatggcgccactgcactccagcctgggtgacagagtgagactccatctcaaaaaaaaataaac

SEQ ID NO: 269741 - DNA, 474 bp, Homo sapiens
actacatttgatattattttttcttattaatatgtcttttgttataggagtctcactcgttaaccttgtaatgggtgatgaaaatatattactttttcgttcctacagtttcaaataaatcacctttgtgtctgttgctgggtgggcccctcaggaagttcaccagaacactggatgtaatcaccaaagacatacaaactgtaaactaggaaaactcattagactgtcactaccttcctaacttcaccatctaaagataagctcaagtctaaacaatcttgactggctgatctctggactcagaagctgagtttacagtttattccaaatattaatctttgtttttcttttattttcgctaaactaagctcctctcattaaaagcctggcagctacaaccacctagcagttatcttctaccaagtcccaacaaatgttacagctgattcttaatgaacaaaacgcaactcatcg

SEQ ID NO: 269742 - DNA, 144 bp, Homo sapiens
gcctcatagagttaaccaaaataatgaataagctgagtctaaagagtcacagtaattatttcatgttaaagatgttagaagaaaaaaaaacactgaaaaaagttttgcattagaattaaatttaaaaggctaaattataactct

SEQ ID NO: 269743 - DNA, 725 bp, Homo sapiens
aatcacttccatttttccaagctgttcaaagtaatctcttaggtgatgttcttccgtgtcttctttaatgccaccaacaaatatctttttcacagttaagtgggcacctggtctttgagaatcttctcttgagacagttctctttggttccacaacttttccatccaccttgtgtggccttgcgttcgtggctgcatccacctcctccacagtggcgtatgtgacaaacccacagcccctggagcgcttggtgtttggatctctcattaccacacagtctgtgagcattccccatcactcataatggctcctcaggctctcgtcagttgtttcaaagctcaaatctccaatgaagagcttcctcagctgtttgagctctttaggagactctgacttagacaagatggaagggagaagagagactttaacgatgcttcttcagtggcgtacacgggcggaaaggcaatagctccctatctttaaggtcctcttgtctactagtccgctaatacagatccctggttatgatcttataatttcctctgactttagaaatgaaatgtgctattaacatatcccaggtatgtccttccaaaattactttttttctttctttctttctctctctttctctttctttctttctttctttctttctttctttcttttcttccttccttctttcttgctttcttcctgcgtctccttctttcttcctttttttg

SEQ ID NO: 269744 - DNA, 387 bp, Homo sapiens
tgaaaagctgtgcacagaccccatgaccttcttctgaagtggtgggtcatttagttttcccagagaggcaaagaagtttggtgatttggagcctagtaaatgaaaacaagagaaagaccatgatgttgcttttgtattaagaagagttgaaatttcaaggccagttctgaagaggcctataccccacttctagtaacttccatgagttctcaaatatgcctcaggttgggtccagcttttaattagagggacgtgttgaaatcacaagttagattcaaatcccagttctgccacctattaattgtgtgaacttggacaggtccctcagcccatctatacctcagtttcctcatctgttaaacagtgataataaaaacatttacctca

SEQ ID NO: 269745 - DNA, 510 bp, Homo sapiens
aaggcttgctgggtaagttaagggggtgcaaggtgggttggggctgagctaagtatgccaagttatttccccacaaatgccctttggacaagtcactcttcctccaaggtagggagagagttaagggtcagagagagactggaaaaatgtgtgccactggtacttggtcctctggagcatggactgggaattcattcccctctgtggagacaagagtaggatgaacatgttctctcctaacactgcatggtgaatctggacctgagctggttggcaccgcctgcagctggaggtaactgggacaggcaggacctgtcccacccaatcaagaggaatggtaggagccccacccaccttggactcagctgtagataccagacagccttggaggtttctcaaagctgttatccagactgagaggagatgttgactaagacattgatcatctggcccgcttatctctgtggcatatttaaataagaaaataaattgttaatttttctctaaaaa

SEQ ID NO: 269746 - DNA, 858 bp, Homo sapiens
ttcatttttttaaatactgacttaacaagtataaccccagataattgtatgactgactacaggtaaaagtccaaagctggagctctggacaatgtctttgagccaagtggggttttaaaaaattatttctttaaaaagtatgtttcatcaagactttggtgaggacctcaagctcatgttagaatggtgctatgataaactcatatcagaatgtcaatgctatttaattagaagctttttgcttcctaccatttaagaaaaaaatttcattttaaatctgtaccctaattatattaagcaattttaaaatgataaaattttaaagttgaaacaaaaacaaaacaaaacaaaaaaatcccttatgtatctaataagtcttcctgctaaaagtatctaaatgttttggtaatggcaacagcagaatcatttcagtgctttgttaaactaatggctcaggccttagaataaaatcagtattcatggagttttactaatcaaacatttcatcaggcagagtaactgatttgtgcttaacaacttatattcaaatattaagttattgtgccctgaagacacagctatcagttaaaatatgaacaaattcctaataggaatatagcaaaccaggcagtatccctggtgagcttttttgtgttttttaaaatttttatggatacataatagttgtacatattttccctggtgagcttttaagatcagaatctgtttctataaatgccaaaaaacattttaaaataactcctcaccgcaaatgaatgggtgctccataaatatttgataaccgtagcaaactcaacaaatacagctatcaaatagcagccattatagaaatcttta

SEQ ID NO: 269747 - DNA, 802 bp, Homo sapiens
atacccccaggaagtcatcagcagaagagagacgggtctttaggaacacctgtaagccaaggtgttatacaagactagagatgtgtggagcagaggtagaaatacccacagataggaaagaggacccttctgggatatggagagaaggaaaggtcagcctactcaaaagtatcctcgatcacttgacacaccctccacagggtcatcatcaaggagctgtaattcatccatgacaagaagcttccagctcaaatgcaaacattcctgagacagttcccacaggagctcagaaacgtcctccacgtacccctcatggggacatcttgctcctacagcagtaaacgtcttgcttccctccaacggtgcttccttacctgtccctacctgtgccacgaccacaggatgcctacaaaaaaaaaaagaaggacacctcactggcacctctctcctgattctcatctgcactttgttacctgggctctgaagcagccctgctcctgctcttgggccacacaaagtgctcacggatgtggcctttttatcttttgcctactctctccctagggttcaagcatcatccctgtgtcctaaccagggaacaagtggcatgttcccttttctcccaggaacctacacacaattgcttctccgatgaaagccacttccactgtgcacatcaatcaaggcagatgcatagcaggggccgggggaccctgggctgctcttccagcacttagccaaacactgaatctgtttatgctccactgggacacaaaggaatgtcacaggcactaaaatattc

SEQ ID NO: 269748 - DNA, 389 bp, Homo sapiens
ctggaaacattaatctggacatgctggaggatgcaggtggatttagagccagaataacatctgtaataacaagtccttgaacctctcgtcaaacctccttgatgaagattatacagaagcacttctgttgtttgatagggctgttgattggaaagaccttgcttctaaacagtagaagtctccttccctgcaactatcatccatggatccaagatctgctttgggaatcctacaacttgaatttttgctcccttccattatgaagccctaaggcaagtggcttggagtaacccaccagagaaccagggccctattcattcattttggtatacccatgcttggcatgatggctggtcaatggtggaagcttaataaatgtctgctaaaca

SEQ ID NO: 269749 - DNA, 443 bp, Homo sapiens
ttccaccccaatacctggtcttccttcccggcttaaggagtaccatgtacttagccacaggcagaatagctttcgatgaccccatagcactttgtttcttcaccttgatttgcactttacaatgtccccagcccctctgcagcccgtggctggcagggcgttcgatgtgcggttggcccccagcgcgccctccagagctgcggtgtctccctgcctcattccccacatcccactgagcatgggaccattgggagcagagctgatattaaagcatgtttagcttcgaagttttacttttttaaagctgagtagttaagaattccctgtaaaaacaaaaccctgtaaattgagcctcatgtctggtatatattttaccaaacagccttaaaatatatttggaagcaaaaatcagtacgaatgtatctccttgaaaaatgcaaaaa

SEQ ID NO: 269750 - DNA, 322 bp, Homo sapiens
acacacatacacacacacacacacacacacacacacacacacatattattctgcagggaacaggatgggaataatttatcagttccaatggctgggataaaccatcctctgactgaaaaaaaattagagggaatatcggaaaactatatttcttttttacattatgaaagaaaacacctaaagtgtcttaaacataaaagagtagtatgttggataagtataagtgaagactcacataaccaccacatgggacaagaaatagaacattgcaaatctcctgtatgttccttttcatacaccctaaaaataaatactacccaga

SEQ ID NO: 269751 - DNA, 432 bp, Homo sapiens
tcgatacgactttttttgaggacagagaccatgttttaatgacttcgatatctccagcagcgatcaccggccagggcacattgtagactgtccagaaacactgatggaatgcatttgaatgcattttcctctggttctatgttctgtccttctgttgttccccagcaggagagttctcatctgacatccagaagaggacggccccaccagcaggatggtggtgggactgggagatgctggcctgtttctgggaagtatgttagttgccaacgaaactaaataaccatgggaacagacgttaagctaattggttactacaaagcaggggtgaagggacgtggctgatgtcagggctgtgcagttagggtgaaaactccatgggatggctgggagaccggaggctggcaggaatgggcggtggtgggagggagc

SEQ ID NO: 269752 - DNA, 504 bp, Homo sapiens
gaggaaatgtagagcaactggtgaatgggtacaaaaagagttagataaaagacaagctgtattgcttgatagcacattacagtgactataattagcaacaatatattgtatatttcaatgtagctagaagagaggacaggaaatgttaccaacccatagaaatgatgaatactcaagaggatggataccccaaatactctgacattattatacattttatacgtgtaacaaatacatgtacccataaatatgtaaaatatcatgtatcagtaaaagaaaaaggctggatagagagaggtaaaaataggagaaatgagagcagtcagtgcacataagagtaatatgcttgttatactgtgtggctacactggttaaggaaattcctgctgcatataacccaaatttgccattagaggttaagaaaactttccacttaacaatttaaaaattatacaactaaaacatccattatttaaaaatcaacataaagaagcaaaaaaaaaa

SEQ ID NO: 269753 - DNA, 246 bp, Homo sapiens
agaaattttatgaggaatagtattttttaaagagcacatagtaaactttgtagctgtttataagggctgaagggagatggggatctggggagtttacctgtgagtggctttaacatcagctatttgaactcaagagattggtatttgctttttaggaacagcagtacctcttttgttaagagattgattgattgagagtttcgctgtctcccccaggctggagtgaagtggcacaatctcagctca

SEQ ID NO: 269754 - DNA, 443 bp, Homo sapiens
actgctttggaatattgattgctttgagccgaaagcatttgaaaaataacaaatgcagggaggggctttttgggactcctttgtctgcctaaagacaggtcctccaaagaaattcagctatcatccatgccttctcccacgccatcatcttaatgttatttaatttttcttgacaaatcaggcaggtatcacagttttttacttccatgactgacgtgcatcaagatcaagcaattcatttttactgcacattttcctcttaggttggatttatggttttatgatcttaaacatctagcagagccaacaccaatctgtctaaccagcaacccaggaaaaacttgagaattctgagaaactcccattttattttaccgacaatttaaaaactagctttatttaccacagacttatgtaaatcatgtgaacttattaaaaaaaaa

SEQ ID NO: 269755 - DNA, 282 bp, Homo sapiens
gggtacatgtacaatttattacttgggtatattgcatgatgctgaggtttggggtatgattgatactgtcacccaggtaatgagcatagtacccaataattactttttcaacccttattcccctcccccctctatcttctactagtccccagtgtctattgttgacatctttctgtcatttttttctttatcatatgtttttggtgctatatctaaaaccttattgccaaacccaaggtcaggtagacttttttttagacagagtctcactctgtcgcccta

SEQ ID NO: 269756 - DNA, 358 bp, Homo sapiens
acagagcccaaactccagataatagaggaagtgagacttgttgacattgtccttcatgcatagaaattccctccaaggctgggcatcgtggctcacacttgtaatcccagcactttgggaggccaaggtgggcagatcccttgagctcaagagttcaggaccaccctggccaacatgacaaaatcctgtctctacaaaaattagccaggtgcagtggtgtgtgcctgtagtcccagctacttgggaggctgacgtgggagaatcacttgagtttgggaggcagaggttgcagtgagctgagattgcgcccactgcagcctgcctgggctgtgggagtgaaaacctgtctcaaaaaaaa

SEQ ID NO: 269757 - DNA, 355 bp, Homo sapiens
ctccatctgacgtgcattcctccatctgacaatgtgtactcctccatctgacgtgcactactccatctgacgaaatgcactcctccatcagatgatgtgtactcctccatctgacatgcactcctccatctgacaacatgcactcctccatctgatgatgtgtactcctccatctgacatgcactcctccatctgacaacgtgcactcctccatttgacgtgaactcctccatctaacgacgtgtacccctccatctgacaacgtgcactcctccatctgacaacatgcactcctccatctgacaacgtgcactcctccatctgacatgtactcctccatctgacgatgtgcact

SEQ ID NO: 269758 - DNA, 473 bp, Homo sapiens
tttttgtattttttgtagagatgggtgtctccccatgttgctcaggctgttcttgaacttctgagctcaggtgatctatctgcctcggccttccaaagtgctgggattacaggcatgatgagccactgcacctggccaaaagtggcagaaattttgatatggtttataatcagttttattgtggggaagatgggccattttaatgaatgattatttctattggctaaactaccgagtcacgacatgacaaatacacatgaagctttaatcacatgcagttatatacttctcacaaatcatcaaattatttatctggtcttcacactaagggatttacttagataagccatcgatgatttcagttgttaaaagtgtggctttttaaacagcatttattcagtgcatcctgatttatttcaaaatgaaaaattgttacctttttttctgaataaataaagcttacttttagtggc

SEQ ID NO: 269759 - DNA, 593 bp, Homo sapiens
cggctcactgcaagctccgcctgccgggttcatgccattctcctgcctcagcctctcaagtaggtgggattacaggcgccggccaccacgcccggctaattttttgtatttttagtagagacgggatttcaccgtgttagccaggatggtctcgatctcctgacctcgtgatccgcccgcctcggcctcccaaagtgctggaattacaagcgtgagccaccacgcctggcccagaaaaatattattttattttggcaggcagtctcttagctgaatcaaacttctagtcctgtagcagtgccctctgtggtgtgtcacagctgcaatctctgctcagttattttgtctttagctgggtgacttggagtgtacgctacatgggcatattacaagggtgaaccagagatttgagcagaaatcattttcagaagttgaggctccacctctgtagctgtctcctttctagaatttttccttcactttctagctgctgtggtgaaccctcttttctctggttcttcaagcctgtaagattgcaaacgtctctcctagttttagttaactggcatggtgctgagcagagactgcactcc

SEQ ID NO: 269760 - DNA, 791 bp, Homo sapiens
gctcacgcctgtaatcccagcactttgggagtctgaggcagccagatcacctgaggtcaagagttcgagaccagcctggccaacatggtgaaatcctgtctctactaaaaatacaaaaattagccggccatggtggcatgtgcctgtaatcccagctacttgggaggctgaggcatgagcatcacttgaaccaaggaggcggaggttgcagtgtgctgagattgcaccactgcactccagcctgggtgacacagcaagactccgtctcaaaataaaataaaagtttggatcacttaccctgtaaaatgtcctactttctggatttatcagattatttcctcatgatattgtttagcttgttcctcgtgcctctgtatatcctataaactaatagttaaatcataaggtttgaatagactctgcttaaatatttttggtcagaatacttcatgggtgattctgcatacttacatcatatgacatcacatcagaaggtattcagtctctggtcatctcactactagtgatgtcaagactgaccagcgttcaaaatagtgacacctagataaagagtaacttttaaaaagaggccgtgaacctgggcaatatagtaagacaccatctttaccaaaacgtaaaaaaattagttgggcatggtggcgtgctcctgacgtcccagctactctagaggctgaggtgggaggatttcttgagcccgaggtcaaggctgcagtgagctatgatcgcaccactgcactgcagcctgggcaacagagtgagaccctgtgtca

SEQ ID NO: 269761 - DNA, 240 bp, Homo sapiens
aggttggggagtcagcttgcggggacgggactccgggaatctccgtctagacacaagcatcagcaagaggagggtcgcgggatttaggggagagctcgaagatcagaatgcaggaccaaggacctggggcgatggctcacgcctgtaatcccagcgcttttggagaccaaggcgggaggatggcttgagcccaggagtttgagaccggcctcggcaacaaattaagacccctcctctgcc

SEQ ID NO: 269762 - DNA, 395 bp, Homo sapiens
cactggcccatccaccatccggggaggctttccacgtgcaggatgcgccaccgagggcacggccgcctctcccacccgaggccttcactctgccctgtcttcccccggtacccctttctcccgtctctgcccagccaaatcctgtcatggtcagcggccggctgcagcgccacctcagtgaagccttgggggagaccatgccgtcccagcgaggggtacagtaaggatgccacagtcaccccaccctcggggccacctcatcccggcactggcactggcactgtcctctgtggctcccagcacttcacacatttgtatgctttgcttcagaacaacaaacactaaagttgcagaactttatttaaaaatgaaaataaaactgcctgatttataaa

SEQ ID NO: 269763 - DNA, 479 bp, Homo sapiens
ggactccgcttcctccaatgccaaaggaaaatgtctataatctcactcttcagcgggaagcgttggactccgcggtggtccttgactacacacaccgcagtgcccaccgggaacgtattccatatctctgagcgcctggtggggaatgtggactgtgaccctgactgaatgaaatgtatcatcagcatggattctgtgataaattacaagatacaaactcaaaaggaactgctttctatgtgcctcatattttaatgtttctcccctttgtgaatgcttaggtgagactgtagtcatgaaaactgagtaaagactttattacacacattactgaggcttctctccaatgtggacattctgaagttgaagacttgaggcctgaatgaagcacataccaccctcctcatacttccgtagtttctctcccgtgtggagcttctgaagcataataaaattcaagtgatccagaaaaaaaaaaa

SEQ ID NO: 269764 - DNA, 319 bp, Homo sapiens
ctctgaagctggagaggtgtttgtcagggctcaaatgtaagctgcttattaataatgaagtttcaatgggtatgtgctgtagggattcaagggtgtatttgtctacaaaaaagtcttgttttcattttatggaatgacttttttctccccgttctctctcctccttcttctctttccccttccctacctcccttgtttctttcatgcagcatttctaccaatgttgtttatgggtgtcctttggtttcattctaaccatgcatccttttgagttcttaaaataggactaagtccatatatcaatcttcattgttttctt

SEQ ID NO: 269765 - DNA, 428 bp, Homo sapiens
acattaaaaccccagtgggtttcttcttttggtgcattttatttttgttgtttgctgattcacgcagtgtcgcatgactccctggggtgtagttggggggaaggcttttcagtaaacactcaaatctaaacaggtatcccaagaatcaccagtgccactggaacccctgaatcttcagattagggccagtctgtcaccaatcctgggcacacactaactggtttgttgaccctatgcttttagttccacagtaaataccagaactgtgatcaatgtacaaaagaaataatggtcaacagaagtcattaacaacttgaactgccaggagaatcgcttgacctgggaggtggaggttgcggtgagccgagatcacatcactgcactccagcctggcgccaaatcaagaccccgtctccaaaaaaaaaaaa

SEQ ID NO: 269766 - DNA, 420 bp, Homo sapiens
acattaaaaccccagtgggtttcttcttttggtgcattttatttttgttgtttgctgattcacgcagtgtcgcatgactccctggggtgtagttggggggaaggcttttcagtaaacactcaaatctaaacaggtatcccaagaatcaccagtgccactggaacccctgaatcttcagattagggccagtctgtcaccaatcctgggcacacactaactggtttgttgaccctatgcttttagttccacagtaaataccagaactgtgatcaatgtacaaaagaaataatggtcaacagaagtcattaacaacttgaactgccgggttcaaatgattctcctgcctcaccctcctgagtagctgggattacaggtgcccgccaccacgcttaatttttgtatttttagtagagaccagtc

SEQ ID NO: 269767 - DNA, 387 bp, Homo sapiens
cattgtactccggtccgggcaacaagatttgaaactctgtctccaaaaaaaaaaaaaaaaggaaaaaaaattaaaaaaggaaaacaacaatgaagcaccagcaaatacctggtggagtagctaaaatccaaaacactgacacttccaaatgctggagacagtgaactctccttcactagggatgtgaatggaaaattctacagccaatttggaagacagtctgcggagctctgaagaaaataggcatggtcttactgattcagtagtctcattcctacatattgactcaaatgaactaaaaactgatgtccacacgaaagtcctcccacaaacgtttttagcagccttactcataactgccaaaaactagaatcaaacaaggtgagt

SEQ ID NO: 269768 - DNA, 265 bp, Homo sapiens
  misc_feature (1)..(1): n is a, c, g, or t
  misc_feature (12)..(12): n is a, c, g, or t
  misc_feature (28)..(28): n is a, c, g, or t
naggagaggggngagaagggggggaggnagagttgaaaaccgtggcaccctggactagatggcctggattctgccatgtaaatcaaagaagagagggcctaactcagctgcctagcctggatcacctggaacccattaggatacaggatcataaacacctctattttcccttcagagagagaccagaaccactggagttaagctacctgcataagagcttgggtcccagctccaaaatgtctcattatctgtatttgaatatccc

SEQ ID NO: 269769 - DNA, 529 bp, Homo sapiens
  misc_feature (475)..(477): n is a, c, g, or t
ggtccaagtaggctaaatccagtccagagtttgtggacgttcttagggaatataaagctaaggggcagcaaaattagtagcaccaaatctgtggagccagaagatgtggattcaaactcctgctgcacatcttgtatgctttttgattttgaaagagttttttttttcctttttgagccttggcttccatatatacaaaatgaagttactaataatatcaaccttataggagatggcctggattctgccatgtaaatcaaagaagagagggcctaactcagctgcctagcctggatcacctggaacccattaggatacaggatcataaacacctctattttcccttcagagagagaccagaaccactggagttaagctacctgcataagagttgagtgcgatcagctgtacttaatctttaaatgtccaacccactgataacctttggtttgctttgataactatgaaataaatnnngatgcggccggggatgcgttttttataaaatatataaaaaatagatttgcac

SEQ ID NO: 269770 - DNA, 354 bp, Homo sapiens
  misc_feature (300)..(302): n is a, c, g, or t
aaatatatacttccttcactataatgcgcccccgggcactacacgttattagaggagatggcctggattctgccatgtaaatcaaagaagagagggcctaactcagctgcctagcctggatcacctggaacccattaggatacaggatcataaacacctctattttcccttcagagagagaccagaaccactggagttaagctacctgcataagagttgagtgcgatcagctgtacttaatctttaaatgtccaacccactgataacctttggtttgctttgataactatgaaataaatnnngatgcggccggggatgcgttttttataaaatatataaaaaatagatttgcac

SEQ ID NO: 269771 - DNA, 387 bp, Homo sapiens
  misc_feature (333)..(335): n is a, c, g, or t
gagaaaaaaaaaaacaatgctaaaaagcctagagatgaccacatatgaaacgaccatgtgtgtaaaggattgctggaaaataaatcagagatggcctggattctgccatgtaaatcaaagaagagagggcctaactcagctgcctagcctggatcacctggaacccattaggatacaggatcataaacacctctattttcccttcagagagagaccagaaccactggagttaagctacctgcataagagttgagtgcgatcagctgtacttaatctttaaatgtccaacccactgataacctttggtttgctttgataactatgaaataaatnnngatgcggccggggatgcgttttttataaaatatataaaaaatagatttgcac

SEQ ID NO: 269772 - DNA, 1042 bp, Homo sapiens
gaagctcctagctggtgcagtgaggcaagacaaagaaaggaaatataggtgcactgggaaggaagaagaaacactgcctttattctttaggtgacatgattgtgtgcttttaaaataataaaggaatcaacagaaaagttgcttaacctaatgaatgagtttatcaaagtcacaagatacaaggtcagtatacaaaaatcagttggatttctacatggtagaaacaactgtacatggaaaaatgtttaatagtgtaagatatgtacattggaaactatgaaagagtgtaaaaaataaagaagtgaaataaatggagaagataccaccttgatggatggaagccttaaggtaaagatgctcattctccccacactgacctgtacattccccacaggcctaatcaaaacccccacaggcttctgtgtagaaattgacatgctgatcctgaaatttatatgaaaatgcaaagagtctggaataaccaaaataattttgtaaaagaacaaagaagacttctactacctggttataagacttctctgaagcacagaagtcaaggcagtgtggtggtggcataagtaatgtaaatcatccaggtgtggtggctcaagccagtcatccagcactttgggaggctgaggcaggagaatcgctagagcccaggagttggaaaccagcctgggcagcatagcaagactcatctctacaaaaaatacgaaacaattagctgggtgtctgtagcacatgcctgtagtcccagctgcgcgggaggctgagctgggaagatcactttagcctgggaagtcaggggagctgtgatcacaccactgcactccagcctgggcaacagagcaagaccccatctcaaaaacaaaacaaaacaaaaaacaaatcagatggaacagaatacagtgtccagaaattgatccatgtgtatataatcacctggtactcaacagaaaggccaaggtaatttaagagggaaggattgtattttcaaaaaatgatgcaagaacatttgaagagtcatgtggagaaaaaa

SEQ ID NO: 269773 - DNA, 514 bp, Homo sapiens
gagccctggcaggccctacagctcctgttggccattctattgactctgatggccctcccctaccaagcaaggaagaaaacctttctaagcgtccatgaagtgatggcagtagaaaactatgcgaaggacagcttgcagtggatcaccgaccagtataacaaggaaagtgatgacaagtaccacttcaggatcttccgagtccttaaagtccagaggcaggtcactgaccacctggagtatcacctgaatgtggaaatgcagtggaccacctgccaaaagccagagaccacgaactgtgtcccccaggaaagggagcttcacaagcaagtcaactgcttcttctcagtgtttgctgtaccctggtttgaacagtacaaaattttgaacaaaagctgcagcagtgactaggtgtcctggagtgtacaactgcggccactgcatgtgagagaatcctgcaatgggcaataatccttaatataggcaataaatgtttgtcaacatattctcttaaaat

SEQ ID NO: 269774 - DNA, 409 bp, Homo sapiens
gagccctggcaggccctacagctcctgttggccattctattgactctgatggccctcccctaccaagcaaggaagaaaacctttctaagcgtccatgaagtgatggcagtagaaaactatgcgaaggacagcttgcagtggatcaccgaccagtataacaaggaaagtgatgacaagtaccacttcaggatcttccgagtccttaaagtccagaggcagcaagtcaactgcttcttctcagtgtttgctgtaccctggtttgaacagtacaaaattttgaacaaaagctgcagcagtgactaggtgtcctggagtgtacaactgcggccactgcatgtgagagaatcctgcaatgggcaataatccttaatataggcaataaatgtttgtcaacatattctcttaaaat

SEQ ID NO: 269775 - DNA, 1605 bp, Homo sapiens
agtcgcacggccacctgagtcgccccttcctgctggagccagcgaggggtgcctgcagccgggacaccttcctctccgcgtctcctcgtctcccgcgcccgcgtcaggccgccagccttgcccaccgccccgagaagagcgcgccgggcgccgactgcccctcggggcgccgagcggcggccctggacgtgcgggggcctctctgggccggccgcggcgcctcggccctgccctctagctcccgcgttcgctcctaccctcttggctctcggggcacagcgcgcggcccggtccggagcagggcggacaggagcgccaggcagagcggcctggccgccgctaacggcgcacgcgcgcgtactcggctcggatctaccttccagtagcagcggagtggccaatgggaccgggaccagggctgggggccggggggccgccgccgcggggaggttcccggctcaggtgcccagcgctcaccagcccagcgcctcgggcggcgccgcggtggccccggcagccccgcgcagctgtttcctggggggcgtggcgtcgggggcccgcgcggcgcagtcctccttcagcatcccgaacagcagcagcggtccgcaggactcgcaggactcggtgcacagcagccctgaggatggcggcgacggcggccagcaccggccggtgggcgggagccccggcgggccgcgcctggtgatcggctccttaccagctcacctctcaccgcgcatgtttggagatgcgagtaaaatttggtgccatgactcggactgggggacctcccttaggagatcaatccctatcctcctgctctttgctccatgagaaagatcgacctacgacctcaggtcctcagactgaccagcccaaggaacatttcaccaattttaaatcggagacaaaggtgaagcgttttatctgtgaacccaaaactccggcgccggtcacagaatcaggaagagtcttcccttggtgtttaaccacatggggatgcctacatgattattcacccatgtttcagaggtgtctgaccacggagggatgcctgtcttggtccttcacccttagcggaccccactgaaaatcggactgttcaactcccctggcagccacttccagagcccctggaactctggcccaaggctctctgacaccttcccagaccttcttggcttagcagctgaagactgacactgcccgatcgcctcagaagcctataggaccttcacagatgctctgggtaaccctcacagtggagggcctggttgcagtatgcctgaaatttgggatgtagaagatcctgccaatgctgggaaaactcccttatgtaacctcttggtgaaggattccaaacctcacttcaccactgtattccagaacagtgtttacaaagtcctagaagttgtaaaagaatgactgctacatgacctgctgcctacggagaactacatctctaatggttttaatgttttgctaagtcatgtgttgttcatatcccaaaaacttttataggtaactgttttcaaatagaaaatgttttatttggtcaatttgaatgtcattctaattataaaaatgactcatacctttcatgcg

SEQ ID NO: 269776 - DNA, 208 bp, Homo sapiens
gactccatctcttctcattccagatttccagcgtgaagcaggcccaagctagggaaggtgagaagctttaaccttaaattttcgagttttggccaggcgcggtggctcacggctgtaatcccaacactttgggagtctgaggcgggcggatcatgaggtcaggagattaagaccagcttggccaacatggtgaaaccccgtctctact

SEQ ID NO: 269777 - DNA, 481 bp, Homo sapiens
ggtggccaggaggcatctgggaacacataggggactgaggctcagtggtgttagttcattactacctgactgcaaacctccgccgactcatgaaactcccctcgtgtcatgtcattttgccttttgtagcagggccgtggatttgtgatgatggacactgtggccctgtggctagaaaataggggcttagaccaggcacggtggctcacgcctgtaatcccagcactttgggaggccgaggcgggcagatcacaaagtcaagagatcgagaccatcctggccaacatggtgaaatcccatctctactaaaaatacaaaaataaattagccaggcctggtggcgtgcacctgtaattgcagctacccgggaggctgaggcaggagtgtcgcttgaatctgggaggcagaggttgcagtgagctgagattgcgtcactgcactctagcctggcgacagagcgagactccatctcaaaaaaaaa

SEQ ID NO: 269778 - DNA, 375 bp, Homo sapiens
tggcaggtgaaagggctttaaagtgcccacattgactcagtgcactatgttagaactttctgtatagacactggccttctcaggcctccctgcatccccaccaagagcaccaggcagtagtcacttgaatgagttgagaggatgttccagactctgaaggagaagagaaaaatggctagggtttttgcctcaagaaagggcatctgtctacagcataggaagatacctgtagatacaaaaatgactcccgggcagggccaagcgtggtggctcacacctgtaatcatagcactttgggagggcaaaacaggtgagaactgattaagctcaggagttcaaaaccagcctgggtaacacagtgagtgcttgtctcta

SEQ ID NO: 269779 - DNA, 1401 bp, Homo sapiens
caacacgatggataagtgagagggattcgggttgcgtgttcactgcccccaattcctaaagcaagttagaagtttttagcatttaaggtgtgaaatgctcctcaacacgatggataagtgagagagagtcaggttgcatgttcactgcccctaattcctaaagcaagttagaaatttttagcattttctttgaaacaattaagttcatgacaatggatgacacaagtttgaggtagtgtctagaattgttctcctgtttgtagctggatatttcaaagaaacattgcaggtattttataaaagttttaaaccttgaatgagagggtaacacctcaaacctatggattcattcacttgatattggcaaggtggcccacaatgagtgagtagtgatttttggatatttcaaaatagtctagaccagctagtgcttccacagtcaaagctggacatttttatgttgcattatatacacccatgatatttctaataatatatggttttaaacattaaagacaaatgtttttatacaaatgaattttctacaaaatttaaagctaccataatgcttttaattagttctaaattcaaccaaaaaatgttttactcttataaaaaggaaaactgagtaggaaatgaaatactagattagactagaaaataaggaataaatcgattttactttggtataggagcaaggttcacctttagattttgtattctcttttaattatgctccttggcaggtatgaaattgccctggttacattccattattgcttattagtatttcactccataacccttttttctgctaaaactactctttttatatttgtaaaataattggcagagtgagaagaaacataaaatcagataaggcaaatgtgtacctgtaaggaatttgtactttttcataatgcccagtgattagtgagtatttcccttttgccagttgacaagatttttccaccctcgagcagcgtgagagatgcctctttaacacttgaaattcatttctatctggatacagaggcagatttttcttcattgcttagttgagcagtttgttttgctgccaacctgtctccacccctgtatttcaagatcattgataagccctaaattcaaattcttaagatatggaccttttattgaaaatatcacaagttcagaatccctatacaatgtgaatatgtggaaataatttcccagcaggaagagcattatattctctttgtaccagcaaattaatttaactcaactcacatgagatttaaattctgtgggctgtagtatgccatcattgtgactgaatttgtgcaatggtttcttaatttttttactgttatttaaagatgttttacataattcaataaaatgaaatgacttaaaaaaaaa

SEQ ID NO: 269780 - DNA, 468 bp, Homo sapiens
ggaaagaataactccagatgggaggaaggaacaactccagacgtgccacctttatgaactttatgactgaataatattcaattgtatgtgtatgccacattttctttattcattcatccatcaatggacattaagattgcttcaagattatgttgtctaatttcgactttccaggtgtgcagcttcactcctgaagccagtgaggccatgaacctaccgggggggaacgaacaattccagacacgccacctttaagaactgtaacaccacaagggttcaagaacccaccaattccggacacaattatatattcaatattgagtgttatatacatgattcattttcaactttcatatcaggaatcatgtgggctcccacaggcttcctttgaagtggaaagatagaaactcttcaaagtaaccatttgttactactaaatattaaatagtaattggctgttaatccaaa

SEQ ID NO: 269781 - DNA, 493 bp, Homo sapiens
cagtaagccaagatcacaccactgaactctagcctgggggtgacagagcaagactctgtcccaaaaaaaaccaagaaaggtaactctattcagcattatactggagtttccagccagaggaattaggcaagaaaaaaataaaaaacatccatattgaaacagaagtaaaactatatttgcagatgagatgatcttgtatatatagaaaatcctaaagaaacaaacaaaaatctattggaataaatgagttcagcaaagttgcaagatacaacattaatatacaaaaatcaattgtatttctatacactagcaatgaataatctgaaaatgatagccaggtatggtggctcatgcctgtaagtcccagcgacctgggaggctgaggcaggagaattgcttgagcccaggaggcggaggttgcagtgagccaagatcctgccactgcacttcagcctgggtgacagagtgagactctgtctcggggaaaaaaaaa

SEQ ID NO: 269782 - DNA, 431 bp, Homo sapiens
gaatgccttgggaagatatggattaaatagaaaccaaatgtaattatcagatattctctcaagctcagtgcaaagctgaattccaaatctatggattttaaaagctgatattatctttctacactgtgtagaacaagtgtcacagcttaaaaaaaaaatagtggtgttgaaatttgggaagtgagcagttctctttcctgtgtttaattcaggaagtttaattttttttttctttaaattcatgccactcttgttaaatgtggtagcagaaacgcagaaattttcatttggaagtgatctttagcaggatcatgatcctttgtcagatgcttcaattttgcacagatttaatgcagaatttttgttttagtactgtaagacatacatgacagctgggcatttttataaagtgtttctttattttatgttca

SEQ ID NO: 269783 - DNA, 386 bp, Homo sapiens
cagggcaagaggtggccctccctgtttggggcctgcactggagggagacagaagcctgctgagacagcaaggatggagggaactgagaggactctgttctcagtgaaaggtgctggggagagataagggatgcccgaggaagatacacggttactggggcttaaaatagtgttggaggcatggaaaatgagattgccaagggacaaaaaggagaacacaggaaagcgatcaggcctcagagggagggaagggatgccgagaacacgattttaaagcagctgggacaatgagggggaggcacttggctgattcagctgtacagtcagccccaaagcgctcagcctgcatttttgtggatcaaatatgctaattaggcacaggtccct

SEQ ID NO: 269784 - DNA, 265 bp, Homo sapiens
aaacaaggttactccacataaagctcctaggacctggcatatcataagtgggtgctcaagaaaaggcaatgatggccgggtgtggtgacgcatacctgtaatcccagcactttgggaggctgaggcaggtggatcacttgaggccaggagtttgagaccagcctggccaacatggtgaaacaccgtctctactaaaaatacaaaaattagtcaggtgttgtggggcgtgcctgtaatcccagctactcagaaggctgaggcatga

SEQ ID NO: 269785 - DNA, 501 bp, Homo sapiens
aaacaaagctccaacctagctttccatccttctttctcttccccattgggtaccccttactctagtcacaccagtccccaattcactttatccgtctccttttctttctcaagctattctctatacctcaccttttctcccctgcctccattgttgcttattcaaccctagcagtgctttcaggctcagctcaaaccttatcacccatgttaaatgaaagaagccagacacaagaaggggacattctgaatgattccatttatatgaaggttaagaacaggcaaaactattgtggggaaaaaacagaactgtggttgcctttggggagtgaggattgattagaaggggttttgggggtatgaaaatgttcttgatcttcattccagtggtaatttcatgggtgaatacatttgccaaaattcactgaattgtacactaaagatctgcatttctctgtattgtcaatttaatctaaaaataaaaatcttaccacccagatct

SEQ ID NO: 269786 - DNA, 396 bp, Homo sapiens
gccccccacgagtgagtttgaggggcctctttagctcagtccagttgaggcagcagagcctttccataggggtgtggtgtgacctgaatgttgggcacgtggtcgtaactgagctttaaaagtgaatgagaggagccatgcgtgatggctcgagcctgtaatcccagcactttgggagatcaaagctgggggatcacctgaggtcaggagttcgagaccaacctgggcaacatggtgaaaccctgtctgtactaaaaatacaaaaatcagttgggtgtggtggtgggtgcctgtaatcccagctactcaggaggctgaggcaggagaatcgctccaacctgggaggcagagactgtaatgagccaagattgtgctgctctactctagcctgtctca

SEQ ID NO: 269787 - DNA, 363 bp, Homo sapiens
ataagggacttgagcatcctaggattttggtatctgccaggggctctggaaccaatcccctgaggatactgagcgatgactacatttgtttatgatttttttagctactattctttgtctacccacacatcagtttttcttaatttttcacacatttcaaataaataggagatcaggttatcacatttcatgtcaatgtgcatatcattaacactagttcaaaacttgtttcactttttttttttttctgagacagagtctccctatgctgcccagcttgtcttgaacttctgggctcaagcaatcatccctcctcagcctcctaagtagctgggactatagcaaaatttgtgaatatttaaa

SEQ ID NO: 269788 - DNA, 402 bp, Homo sapiens
agacggggtttcgccatattggccaggctggtctccacctccggtgatccgcctgcttctgcctcccaaagtgctgggattacaggcctgaggcaccgcgcctggcctgaagaatcttttcaaatgcaacagggagagggatagttgtatcagaatgttttcaactaaaaccaccacctggagtgccaaactgcaacggggacctagacagattcagattgtgccactggagccctggaattggattgctggatagactcactgtgttaatttatttaatcttggatcaagatgcccagcatggaagaagactgaaccatcacttagaggagagctgcttacccctcactgggttgtggcatgaacaataaatacacttttaagatactgaaatttgggagt

SEQ ID NO: 269789 - DNA, 421 bp, Homo sapiens
gggtccaaatatatgccattcacttcccatatttagtcctgttatctctctgaagactggcccaagagaggcctttctgatgagacatttagcacagcgattaatcactagataaacatgtgaatgggtccatttgcaaagtgaaagctccctaaacagaggcttgtcctttacaaaaagagcaggtccaattttccttaaaagttcatggttgcctatgtggtgtgatttgagaaatcctgaaccttctgttcccattactttccctgttgagctctacatttcatagtgtatcactcctgtggatgaaacctggcctctccagggcagtttctctaataaatggccatagtcctgggaaaggtcctgatgccttagtgtgcagtgtgcttgacaccataagatcctttcttctttgata

SEQ ID NO: 269790 - DNA, 660 bp, Homo sapiens
ggacgcttagccggcccttatattccagatttggaacttcgaaaagagtacgtactgattttccaaagggttttttttttttcatgtttaaacgttaataaggacttcggggatgattttgtgagcagaaaagtgggtgatttatcaaataggaatgtgaaatgggcatgtttcaagtaggtcgtctgggcccagtgaactataattgttgctttttgaactttgggggtgggggtgggtgatgtagcaattgttttgcgtagtttggcgtatatatgttagaatttgtttttaagttttacttttgggaaacagttaaaacaacccagtgatggtagatgtgtgtgtattgaaattgagctttcgatgttaaatcttccaagagttgtattttgtgcagttttttttccgatggcattaaggctctagaagtaaaatacttcaaaatacggttatggtttattttcttttggtagctaggcatgttttttctttagtgtaggagtatagtacactgtaatcgtattttaaacaagggaataagcctactaaacataaaaacaaattgtaaacccagtcacgtggtggtggtgtgattcggatgagggtcctgagaactggatccgtaattttcattgaagacagtacaaaagggaggag

SEQ ID NO: 269791 - DNA, 446 bp, Homo sapiens
gacaactgtgactctagcaccgagtggggctaggggaaccttctcctctgttgggaataaccaccacattcatcccctcccctgacccctggacaagagtggaggacacttggagtggagacaagcaggggtacctgtttaaatcaacagctgaggccagatgcagatgctcatgcctgcaatcccagcactttgggaggctgaggtgggaggatcacttgagccccaagagttgaagaccagcctgggcaacatggcaaaaccccatctctacaaacaataaaaaaaaaaacagctggacatggttgcatgcgcctgtagtggcagataactcaggaggctgaggtggggggatctgcttgagcccaggaggtgaaggctgcattgagctgtgattgcaccactgcactccagcctgggtgacagagcaagaccctgccaaaaaa

SEQ ID NO: 269792 - DNA, 348 bp, Homo sapiens
cagtaggtcaatgaagaaattaagaagaaaatttaaaaatttattgaaacaaataataatggaaacataacataccaaaacctgtaggatataggaaaagcagtactaagtggaaagttggtagctataagtgcctacatcaaaaaagtaggaaaacttcaaataaaaaaatgatttatcttaaagaactagaaaagcaagagcaaacgaaacccaaaattagtagggaaaatattaaaaaagataaaaacagaactaaataaaattgaaacaaagaatacaaaagatccacaaaatgtaaagttggtgttttgaaaagagaaagtcaaacctttagtcagacttaaa

SEQ ID NO: 269793 - DNA, 154 bp, Homo sapiens
aggaggggttcaggggccagaccctgcagggccaagggccatggccagggcactggccttgacctcaagggccatggggaaccaaggacaattgatcacaggagtggtgacatcagatttgtactttatttcattttgagatggagtctcactc

SEQ ID NO: 269794 - DNA, 372 bp, Homo sapiens
ttctagcaggacttccccagtatgtggatgggggcacagggactcttgggggggcctcaaggcatctgtgagctaggcctaaccaccgctactgaatgactgcgagatgagtcccagagctgggacgagagtgggcctggtaccctgccccagccctcccctgacaggagttagtaagggacaggttagcatgctaaagagatagcaagctggtcacagcctagggccaccacccttctgtcttacaagtcagaaacatgtcctgactttgggggagagggtatatgttaaacgggcccaccctgggagctgtagtggtcactgtggagctgagcactgggctgcactcctcgctgccccagagtgaccagg

SEQ ID NO: 269795 - DNA, 339 bp, Homo sapiens
agcactttaaccagattcacaaagtaattagtatgaccctaggaataatgctgtaagataaagcccagaactaataaaacatacccctttggggcccgaaggccagtccaattcgaggaagtacccatgccagcataggacacacctgttccaactcataattaaaatgaataagcaaaaagcaaaggatttcaacctcttctaggagcctcctgaactcagtagccttttagggttcctgctgcagccctcaggccttggggcttctgtctgagcctctgcctctagccagctgcttaaccaccctcgaattctttctcccaagctctggaccaagta

SEQ ID NO: 269796 - DNA, 452 bp, Homo sapiens
agtgtgtgaaggctccaatttctttacatccttgccaacatttattttatttctttcttcatttttttattttttaaagccttgctgtcttgcctagtctggtcttgaactcctgagctcaagcaatcctcttgcttcagcctctcaagtagctggaactttgattgattgattgattgattgattgagatagagtctcactctgtcacccaggctagagtgcactggcgctatctcagctcattggaacttttgcctcccgggttcaagtgattctcccacctcagcctcctgagtagctgagatcacaggcatggtggcgggcgcctatagtcccagctactcgagaggctgaggcaggagaatggtgtgaacctgggaggcggagcttgcattgagccgagatcgcaccactgcactccagcctgggagacagcccaagactctgtctc

SEQ ID NO: 269797 - DNA, 759 bp, Homo sapiens
tttatctaataataaaagatagaggaaataagatagtgggattcgaaataacgtaacacaaattaattattcatatcagtttctctactagaggaaatgcaatagttgattaaggatcagaggaaggaaaatccttcaatgaaacattgaaagaaagctgaagaatttgtagtgagagaaaacaattatcttaacaaacatttttatattataattctttttcccttctggacatcagatgcagataattgagttcgtgattcaattcgtgggtcattatcatcactggccgcagcaaggctttatttgtaaaaatttttttccattttatttccgttcctcattcccattccacctccccacaggtagctcttctaatatattaaatgtgtacctttctgtttgcatgtgttcttgcaaaatgcatatttttgtgtacatcaaatttacataaataatatcacatcataaaattcaatccattttagattttattttccttggaccatattttaagagccatgcatgttgctgtgtgtacatataatcccttgcctctaaccactacacaatgtgcacattttccctacatactctcccagtgatgttgaccaatattacctccagttatcgcaccccaaatgatgctgaaaccaatatacatgtacatgacccttatggaactgtgtgagaattactttgaactctatgtgcaagagcaaaattgctgttaataaagttaaaatacacttaaactat

SEQ ID NO: 269798 - DNA, 556 bp, Homo sapiens
tgcagtggcgcaatcatagcttactgcaaccttgaactcttgggctctagcgatcttcttgcatcaacctcccaagtagctaggaccacaggcatgagccactgcaacacaccaatcctcagaatttagacatcaatattacttatagactctatttagattttagttatctacatgtttaccaattaatttgctcatgattcctcctttcatcctcccacctgttgggattgctttccttctttctaaagtccaccatttaggagctccctgggtgttgtcctgctgttccataaattctctccatttgtttgaatgacagcaccttcattttgcgctcatttttgaactttagctttgctgagagcatgattttagatcgacattttcttttggcagatgttttattgtcttctggcttctactgttgctattgagaggtttactgccagtgtaatggtgccctcttgcttctaaaaagcaagactgctttgtaatggctgctctatcttagctctgcttttaagatctctttgtcttaagtattctccaattt

SEQ ID NO: 269799 - DNA, 92 bp, Homo sapiens
ggacaacttgatatcatcccccccacccccggtgtactgcaataagagggcacaatatcatttaagtagtattatagccagaaacacataaa

SEQ ID NO: 269800 - DNA, 455 bp, Homo sapiens
ctttgaattttaagtcttttttcttaaagatagagcagggtaaatgcgcctatgtcttccatgcatttccagggcagcatgccactcctcgttttaatgatttgctgtcttttgcaggagaggaagtggtagaattagggagactttgcaggaatgttctcacatgtgtgtctgcacatgcctacccacaagtccacccacaaacactcagctgccacctatgcaggcatgttacagtttgtcggtctaccaaatgaaagattcattttcatgtttacatctgcaaatcctggacaattaaacatgcatatgaggaaggccaatccatttgtatgtaaaatgttgaccatctaagaaatactcaggtatcttaactataaagcacattttgggctcaccttgtaagggtgaatctggattctttctgcaaataacaaccaaattgaagtgactca

SEQ ID NO: 269801 - DNA, 389 bp, Homo sapiens
agtttccacttaacatctgggcatttttcatttgtctatttgtcccatgatgcttttgagcaatggccagactcagacgagttttggtaattgtggtggacatctgttttggtctgaccaacatccctttccctgccattggaaaacagcagccagcttttcctttcggggaactaccctgactccactgcctgcagtcttgagggaactgtcaatcaaggagccttgggtaggtgagatctgagacccatggcaagccagtcagactcttcagggaatttgatcatgagtggaatgacatcagattggaaaaataattcaggtccaacaaagcatcattaattcctgttacgtcaagtagcacagtgatgagactgcaatgaactgaa

SEQ ID NO: 269802 - DNA, 462 bp, Homo sapiens
tgagaaagagcccagcacagccccgcagcagatcccgggcactcacgctcatttctatggggacaggtgccaggtagaacacaggatgcccaattccatttgaatttcagataaactgccaagaactgctgtgtaagtatgtcccatgcaatatttgaaacaaatttctatgggccgggcgcagtggctcacacctgcaatcccaccagtttgggaggccgaggtgggtggatcacttgaggtcaggagttggagaccagcctggccaacatggtgaaaccccgtctctactaaaaatacaaatattaatcgggcgtggtggtgggtgcctgtaatcccagctactcgggaggctgaggcaggagaaccgcttgaagctgggaggtggagattgcggtgagctgagatcacgctactgcactccagcctgggtgacagggcgagactctgtctcaaaaaata

SEQ ID NO: 269803 - DNA, 405 bp, Homo sapiens
tttttttaacttttgtagagacagggtcttgctatgttatattgcccagactgacctcaaatgataccccaccacagcctcccaaagtgttgggattacaggcataagccaccatgcccagcctccattcctgaagttaacctctttcttggtatcaacttcataagcaagatacatttattaaacatataattatatagggcccaaaagaggagtctgtaattacagaaaaaaaaaataccttgaagaaaggtatatatgcagtagcatcaaaatatgaaataaataataaggttataaacagatcagagataaatacagtaaaggactaactggctacgcgcctacttcaactcagaaaaatactgtgagaaaaattgataaagtaacttttttcaaaaaata

SEQ ID NO: 269804 - DNA, 469 bp, Homo sapiens
  misc_feature (263)..(263): n is a, c, g, or t
  misc_feature (331)..(331): n is a, c, g, or t
  misc_feature (457)..(457): n is a, c, g, or t
agaaatgcgattgcagctttcagaagagactctggaatagaggacccaacaaacggatgcctggactcctgacccaaacccacagtaatggaatcaggacgtgcttgcccctgaaggttaaagctgatgtttgccccccaaggaaacctctttccatcaaagcatctctcaccatcatccctggcctacagagggcatccgcttttcaagaatgccaactcctctctcaccaatgtgtgttttttctgaagtttgcttcccanggaatggccttactgttcaaattcagatgcactaggcaagttcagaagacaagagtgaagatgagacnccaacagcctcacactgaggacgattctttctccagctccccactgcacaagcaagcttggtattcatcaatatgacatggtctggaagttttcctgtatattcatcagcttgggttactaaacanagtacaaaataa

SEQ ID NO: 269805 - DNA, 582 bp, Homo sapiens
  misc_feature (376)..(376): n is a, c, g, or t
  misc_feature (444)..(444): n is a, c, g, or t
  misc_feature (570)..(570): n is a, c, g, or t
agaaatgcgattgcagctttcagaagagactctggaatagaggacccaacaaacggatgcctggactcctgacccaaacccacagtaatggaatcaggacgtgcttgcccctgaaggttaaagctgatgtttgccccccaaggaaacctctttccatcaaagcatctctcaccatcatccctggcctacagagggcatccgcttttcaagaatgccaactcctctctcaccaatgtgtgttttttctgaagggttccagaagcaacactttgttaggagatgctgcagaagccagaggattgcctgatgcctcccagctgaatcagcaaagctttcctctaatagcgttgcttgattaaggggttttgcttcccanggaatggccttactgttcaaattcagatgcactaggcaagttcagaagacaagagtgaagatgagacnccaacagcctcacactgaggacgattctttctccagctccccactgcacaagcaagcttggtattcatcaatatgacatggtctggaagttttcctgtatattcatcagcttgggttactaaacanagtacaaaataa

SEQ ID NO: 269806 - DNA, 603 bp, Homo sapiens
accaacctttgagaacaaattcccaccctctacaactacctcaaagaatagaagagagaaagctactcaactaatttttaagcataatcttgctattaatgtcactaacacacactaaataatgttagcaaatcaatttctcagtgcattttaaaagaattatataccagagtcagtgatttatcctggaatatttgatgatctaacgacagaaaaactgattgataaaatttattacattgatgaggaaaaaatgatcatcttactagatgtaataaaaaaatttacagtaaagtttaatatccattcatagtgtaaattcctagcaaattaggaatagaaagaaataatagtatcaagaaaaaggctacttatacaaattcacagtatatctaatacttgatgaaactttagatacatttgcattaaagtcagaaacatgattaagattccttctattgcccatattattcaacattgttctgaagatctcaacattaagacaaacaatgataatgaacacaagagaagagaaaatctgcagaaaaaactcacaaaaattggcatttggagaagatatgactacacagaaaatagcccaga

SEQ ID NO: 269807 - DNA, 396 bp, Homo sapiens
cctaaagattaaagaagcttaaggaatgccaaatagaataaactcaaagaagtctatactcttgacacattataatcaaaaattctaaacactgaaacaaagaaaaaatcttaaacaacacacgactaaagaacaatgggattcagaaaactgaatttttcattataaaccatgggggccagaaggaagtgaaataacatctttaaagttgtgagagaaatgagctgccaactgaggattctatatccagcaaaaatatactttaagaatgaaagtgaaataaggatattctcagatgaagaaaaactaagataattaattgctagtagaaacatcaggaatgaagaagaggaacagaaatgacaagtgtctgaataaatatcatagactattctt

SEQ ID NO: 269808 - DNA, 304 bp, Homo sapiens
tataggagattattttttggtggaaatcttgaatgaaaattcactagctacctgaagtttccactgagtcaaaattttagagcttttctttcttgcagcagtatttctttttaaattttctttcttctatgcagagtaacagtataataccaatgtaagtgatattttatcacaggtgttagtagtttgcttgtttttgtctttaatcttgtttttgaggtaggtggtgtggaagaggattaaaatacacgttcatataagtacataaaacttaaaggtagagtttaacaaataattttaaagc

SEQ ID NO: 269809 - DNA, 689 bp, Homo sapiens
ccatgcctagcctccagctccttatttttagtggattaccttaatttgtagtattcctttcatacatttttctcactttaataatcacagttttaaaatatgaatactttagtagcattgctaatactactttatataataatactttagtagtatcgctaataccactattacaaggataactactattgggaagcatttattgtgcaactactatatgtaaactctgttccaggtgtttcatgtgtattatttttcatccccacagcagccctgtgaggtgggtattgttcttcacattttagaagtgaggaaacaggcttagagtcgtagtgatgtgcctaagatgacacagctgataagcagtggagcaagaaaggagcctgagatgtggctcaacattcatcttttttccattgcccctttcacagacccatttatagacggggctgagggcctccctaaagaacctatagctagtcaaaggcagagctagacctaagcctagcttttctgacccttctcgtattagacctgcattgtatgtatttttttttaaagactggtcaagtgcagtagtgagaagggggaaggagcagaacaaggagtttgatctgtaaccgactgggacattaattgggtagggactactttggacccccactttttccgaggacccggcttttcgg

SEQ ID NO: 269810 - DNA, 423 bp, Homo sapiens
aggctcatggatcatgatgcgctgtccccaaaccaacttttcagcttcctttaacagcaggcagtggcagcaactgcccttacacaaggagccagcctttggccacagcatccagaagagaagcagacatagtatacaggttagctacagtggaatgtatgtcctctacaacatcccagtttgggtccgtgcggggaattgctccagtcgggatctggagtgtcgtctggattttcatcatgaaggtgctgtgcctcttcctttgcttcatttaaaaccagccatagctcatctgcagtgagcataatgtcccagagagcctgctcgtctgcccaggcctcccgagaagccaagcagatgccagcactgtgcttcctgtacagcctgcaataccaagagccaattaaacctcttctttgtaaa

SEQ ID NO: 269811 - DNA, 357 bp, Homo sapiens
tgcaaggagggggaagggatggggagagtaaggagcttcaccacatgcgtttctgcggttttgtttggtttcttaataagcaagcaatgcgggtgtaatgttcaaactgaacagagctgcctggtgggcgcatgatgtttgtgatttcccattctctgctgtgggcttcgaatatttgttttaaaaaatcgaggccgtgccaggggctggggggcggggcctcccgcggggcggggctgcgagcccacccctgcggtccccggcccgccccggcgcccgggaaactgtgtggcgctgcgggccgcgcgagagggacggcagggggcgggcgcggcgcggctgctgactcaccggcta

SEQ ID NO: 269812 - DNA, 997 bp, Homo sapiens
ctgttctttttttttaaggcaatggcactctttccatctcttcctcctgaccattccaccaaacatctcccacagatacaaaccatagagaatatcaggtattttcaactttgctaatcaactctttaaaatgatagtccattttagaacttgaacaaatatttactataccatttatcgaccccaagttgggctttcctcctcttaaagaagttcagtgaactacaagaatttgtggattaaaaaaaaaaaaatttaacccaaagactcctagtgacctttgctggagctaacacagcatctcttaatccagctctaaaggatgtgaagagctccaggcctgaggcaccatgctgtgcagcaatttacttcttcattgcaccaggctcatccctcatggcccacagcatccaggggtaaactcggaacaaaagattgcttacactttcataacttcaaaaattacatcacacatgcatgtccagtgttaaactacaactgattacatgtactgtctaacgaaattgttgaatacttgctctgcttttctccctgttggccttacaatccctgtttctaatttccttccatcctcgggtcataaaactttatacccagtggcctggcacaaaagtttcttttcttgtttccctagatatcgcttaaagcaggcattgcagtccactgtacttcttccttctatacaagctggaacaccctgagtcctaagctttactgtgcttaagaatgacccgtgggaggctgaggtgtgtggttcacgaggtcaggagttcaagaccagcctggccagtatggtgaaaccccatctctactaaaaatacaaaaacattagccaggcgtagtggcgggcgcctgcaaccccagctacttaggaggctgaggcagagaactgcctgaacctgggaggcggaggttgtagtgagccaagatcatgccactgcactccagcctgggcaacagagtaagactccatctc

SEQ ID NO: 269813 - DNA, 462 bp, Homo sapiens
caggaatttgagaccagcctgggcaacatgttgaaaccctatctctacaaaaatacaaaaagtaactgggtgtggtggcttgcacctgtagccccagctacatgggaagctgaggtgtgaagatcacttgggcctgggagttggaggctgcagtgagccatgattgcgccactgcacttcagcctggatgatagagtgagtccgtgtctcaaaaataaaacaaaacaaaaaaacaaaaaccaaaatagtataaactctatcttaaaatacagtgtaagaattattttagaattggaactatttgtttttttcaaacaaaatcttttgaggggctgggcatgatggctcacacctgtaatttcagcactttgggagcctgaggtgggaggactgctttggttcaggagttcaaaaccagcctagatgacatagcaagatcctcatcttgttaaaaaaaaaaaa

SEQ ID NO: 269814 - DNA, 315 bp, Homo sapiens
cctccgcacagctcccccagggctaaaggcaacccccactgccgccctgcactgacccttccagtaactgtttgtccagaagacttcagctgaactggcaaacagttccaggatgcggtcagaacacctgctaaccaaagctggcaaaaacatcaccaggatgcagtcaagacacctgcacccccaactcggttcacacaccccgacccagttcctcgccctgtaaagccctgctgcagtctgtaagcaaggctgcctcctctgcctgtcaaggaacagcctggcaggacaaataaaaattgcttgcctgtcatt

SEQ ID NO: 269815 - DNA, 435 bp, Homo sapiens
tctttgcctcaaggtctactgtctactttctggaggaattcaggctaagacacagaattacaagtaagtgaaatgtcaccgtacttattacaagggaaattatgcaatttgaagagggaggagactagtggctaaatgggaatacttgaatgtattcagttttcattatccaggctgcatctactttatgtggattcggagttgatgcatatgctttatgtaatctacctgatagggaaatggcactgagtcaacatacaaggtgaaggaatctgagcaggtgtttggacttcagcatcaggttaacacctcagaggccaggattgagtttgttggcacttgcagctgttagaaataaacgtgacattgcctgaataaatcattggttagctcttgtcaatgatacaggagaattttcacttcttccttccctca

SEQ ID NO: 269816 - DNA, 478 bp, Homo sapiens
tggagctgaagttaaaatctctctctcctctacaggctgttgaattgtatgtaaaggcttgggactctggtgtggcacttaagtactttttatcaaccttcaggctttagacagtctcattgccttagcccacaattcctggaatctgtgaaggcaatttattctgaaaattccacttaccgaaaagtaacttcatttttccattaaacgaattgaagtttcaaactccttgtttattgctggtctaacaaggccattaatacgtcctgtcctctctgctttagtgatagcaggcagcttgcggactcccagctgcactggccagataaccagtgacagagtgtgtcatggcaggtgctagagtttcagagttgaacccaactaatttttgaaactttaatgattataatgaggcagtttccatgttttccaatcattgtttactcaaaggcctcctacagactatagaaacataacc

SEQ ID NO: 269817 - DNA, 499 bp, Homo sapiens
tttttttagataccacttttcatagatatcttattttttttaatagtgcttgtcttttgtattacttatttacttgtctgccacccaaacctaactgtgagctccttgtagtatgggaatatgactttgtaaccctaggacctaacagggtatttaaaattgttaaaattcttagattttattttttaacgtggccacggtgtcttctacttttggtatagaaatgcttggtattttcttccctcactcaaccttttccaattaattccatctcatcctcttaagattcatctgaaatgttgtctccaggaagcttccctgaccttgccttctccctttccccttaaagtcttcttttaatgttcttgtcagtagcctatgtggtatctgttttatactttccacattgtatatatatttttatgaatatggaattcataaatgcattacttgtgcaccccggccagactcgctatcccttttcctctttatttttcca

SEQ ID NO: 269818 - DNA, 238 bp, Homo sapiens
gctcatcacaaacttgaaacaggcaaaatgtacctgtcagagcctaagtagaactggattgcatgatgtatggcagtgatcttccagagcgctctcaagtgtgtttgacacgagtgaactgtgttcgagttgattctccctatggcagtcccaaagcctaattatgaaaacacgataagatcattgcacagttagaccattgcaccattggcattcctaataaacagatcagcttagc

SEQ ID NO: 269819 - DNA, 451 bp, Homo sapiens
gcacttcccatgcaaggctctagttccagacatgcttccagaattctcgggaaaccccctcctctcccctgaaaaccccgcccttgcacattagatatcctggttttcctgttggggtcccattatggcatcatcagcagatggggcacagtctcctgaggcctggggggaatctgtcccagaaaccagggtgtggggacttctgactaaatcaagggaaggttttcatggagaaagtcaacaaaaagtgaacattctaatttcaaaaatagtctcctcattgcacttcaaattaagggacttggaaaaaggggagcagggagctgggtgtttaatgggttcagagtctgatactgggatgatgagaaagttcttgagatgaattggcggtgatggtgagaaaacaatgtgaataaacttaacgccaataaaccctgcactcaaaaatgat

SEQ ID NO: 269820 - DNA, 283 bp, Homo sapiens
gtttacagttaattaatgctactttgtcaacttggttccattatttgatcttcagattcaacaaagtagccgaattctcaactaatgacttaaaacttcaaattttaggattaaacagaatggatatccactccacctggaattctctttgctaaaacaatgaggtagttcagtgaggtaatacaatgacactacattgatttcccccctgtggcgccaaagacagttcttgatctctacacccagtgacaacagggtactcaaaagggaactagtggtaaga

SEQ ID NO: 269821 - DNA, 119 bp, Homo sapiens
cttgtaagggtttttcagatggtagtgaaacaacttggaagtcagcaattcctaaggattttccaaatcttctcagactaaaattctcccactttcctgctgccttgttcaaaccatgg

SEQ ID NO: 269822 - DNA, 387 bp, Homo sapiens
aaactaaattagctaatttatataaaatactttctagctgacattggtatcatttttattaacttcagtaaaattgataataaatatttttacatcccagattcagtcagaagactaaacatacctcagatttcaagtataatataatagattaagtcaacctaaattgaaaaaacttgggtaagtcatctttactaaaattagaggacttaaactgaccactttgaggcacaaaagtatcttcagggaacacagttcagtcagtagtagaaaataattcacaactacttcccagtcttttaagaagtgaacattttaactgaagtttgactgcgatgtgcaggtacaatgaatgcataaatagtaaaaatttttcaaggaaggttg

SEQ ID NO: 269823 - DNA, 470 bp, Homo sapiens
aaattgctaatttaagtactgtgagaatcagtgtactaagctaatcttgtgaaaagatggttttggatggagactcttcccagtaattattacggagttaaggcaccctttttaccatcttctctgtcaacctaactgacatgaatttctaacctggtaaagtgagaagagtgatcaggagaagataatttgcatagtatatatagatttctattccatttatataaaacccttgaatggtaccttagtagaaacaatataaaataaagctaatatgggttagatgataatgtggttaagtggatttttttttcctgtctgaacaaaagaactgacaatttaatcaatagacccctgtcagtctggagagatgcttctagtggtcagcacggcactctggtctttgtgtgtgcatatgggtgggggcagggcagggtgttgcattttcccattaatcatggtaaacatta

SEQ ID NO: 269824 - DNA, 445 bp, Homo sapiens
cagcacagacctcatgctatcactaattagccagagcattcccagccaaaaatcccagtgcctgtccttgacaaaaaagtctgttttttccacagtaagggtgaaaagcctgcctctctgtctagggacatctccataagacaagcaaaaatagggtggtggtgagctctcagatcagccagcgcaatgaaacagactgcagcctcttaggagacttactgtttgctgcctccctttctctgcaaagtgggatctccattagacgatgcctttgtactctgacaaaatacctaaccaccatgagacaagccacttctgcattattctgtacattgttcctatccattccccatttttggcttcagaagtcatcccctagccaacttccagccacttgcattaatgatgaatgcgattagcagcctatgctagtccattagggaaa

SEQ ID NO: 269825 - DNA, 790 bp, Homo sapiens
gaaactatagctaccaagcccattctttgtcctagattcaaatgaaaacactgtaatgtgacctcccacgggttttcctctataataaatttacagaacttctgaaaagattactaataattaattatttccttgtcccctcccaccccttgtcaaatgactctgaaatctaatttcttttccttctgacaaacagaaaaaggaaagctacgaaagctccctgtacaattccctcacctgtttacagcccattcttatttcaacaatcctaggaactggcagaaagagagggtgcagggaagaaagggtgttacttgtcacccagtgcaagcaaacaagatgttgtgaaagaaattatgtccttccaaaatttgtatgtcaaagggcctttaaagaggtaattaggtggccgggcacggtggctcacacctgtgatcccagcactttgggaggccgaggtgggaggatcacttgggcccaggaattcaagactgacttggacagcatagtgaaaccccacctctatttgtttttaattttttaaaaagaggtaattaggttgaatgaggtcattgggtggggccctaatgtaatctgactgatttccttgtaagaagagggagaggcaccaggggtccacacccgaagagggataactgtgtgaagaggcagcaggagagcagccatgtgcaagccaaggaaagagacctgaggggaatccaactctgctggcaccttgatcttggatgtccaccctccaggaccgcaagaaaatacatttctgttgttt

SEQ ID NO: 269826 - DNA, 373 bp, Homo sapiens
tggagtggggtcaggagcaggcaccctgatgtccttgttggcttatcttcatggatgtctttgaggccacctctctttctgtggccaccagcccttccttctcaaccttctcctgctcaaggccaaccccactttctctcttccaagaaatgcacctgttgaatcttcacattgatcggattggcacataaaatacaagacaccctatagaatctaaaataatttttggtatgagtgtgtcccatgtaataattgaggcatactgtatgaaaatattattcattgtttatctgagattcaactatggctgggcatcctataattttatttgctgaatctgacaaataaaattcagctaaattatttgctaaat

SEQ ID NO: 269827 - DNA, 423 bp, Homo sapiens
ataagctgatgtcacagggttggacggacctgttgccacaagatgctaatgctctggaaacctgccaaatgtattgcctgtttaaaatgtactccatagaactaccatttgatccagcaatcccactactgggtatctacccagaggaaaagaagtcattatacgaaaaagatacttgcagctgggagtggtggctcacacctgtaatcccaaagtgctgggattacatgtgtgagccactgtgcctggccgattactcagtctatggacgttttcagctcttctagaagcttccacgttcttcaacatctgcctctataactccagcctccaatttctctacttcacactaggggttcaccatacttatctgcccatctttcactgatttgccaagaaaaaaaacaaaaaacattcaaaaaa

SEQ ID NO: 269828 - DNA, 567 bp, Homo sapiens
gtcattcacacttcatgtatagcttcttattataagggcaaagttgagttgtaactgagatggaatgcctccctggagcctagtatgtttagtctcaccctttataggaagtttgccaacctatgggctagaatactgaggctgatgtacactcacatgtaaagggaataccttccataccacatgtagtgatatggaaaaaatctccatgacattgttactaagaggataaagcatggaagagtaccacacaatacctttctaattttagaaatagcaaatatgggccagacacagaggcttatacctgtaatcccagtactgtgggaggccaaggtggttgggtcacctgaggtcgagtgtgagaccagcctagccaacaagaggaaaacccatctctactaaaaatccaaaaattagccaggcatggtggtgcacgcctgtactcccacctacttgggaggctgaggcaggagaatcacttaaacccgggaggtggaggttggagtgagctgacattgtgtcattacattccagtctgggagacacagtctcaatctacaaaaa

SEQ ID NO: 269829 - DNA, 177 bp, Homo sapiens
tttttttgagatgaagtctcgttctgtcgcccaaactggagtccagtggcatgatctcggctcactgtaagtctgcctcccaggagaatcacttaaacccgggaggtggaggttggagtgagctgacattgtgtcattacattccagtctgggagacacagtctcaatctacaaaaa

SEQ ID NO: 269830 - DNA, 282 bp, Homo sapiens
ccaccagatggcaaagttgaggagtgagttgtgaacaatttctttacattattgactgtggcgggttgttgtaactatgcccatgtctcttctataggcaagatgaagacagcacatctaacaaggatccaaattaatggcattgtctcagcctaactagtgatgaaaggaaaataatagcagcttgtaattttttttaaaaaaaggttctcactcttgaccatttcttttacctcccaggaggacacctgaatagtttagagacagaaaaaagcatcaacc

SEQ ID NO: 269831 - DNA, 461 bp, Homo sapiens
ccttgctagtccagggccttggacgtatcacccaaggcctttctgtgaaagacactcaaatatttgttcaatgatttctaattgtatccattacttatttgtagcttcaaaaacaacgtttgaatcttaacttgtttcaccttgagttaattttgtttctatacctcttcaaagaaaaggaagattgaaggggtctttaacgcctccattaactcctgcaacgtgaatttgatatactctcttttgcatgaattcagctttgtgatttctgaaatggtatcacctgaaagccacttaaggccagaccaatgaaatgttacaggcaatatttgaacctaggactgactgtttttttttggctctgctcatgtctcttccaattctaaaattttatgatttaatgattttggaaatgtgtcaaagagagacttagtgtaattcaaaataaatttcaaatctga

SEQ ID NO: 269832 - DNA, 431 bp, Homo sapiens
tgctgagactagtagttgaaggagttgatttttctggcagctttgctcaactgggactctgcgtgggttacgccctgacaccctagtgttcggaaactaacttctctcctgtgcatctagaatggtatacatgaaataagacatgaaatccttgggaaaactgagaaaatggtctcttaaatcatttccataattcatatgaggaaccagggaggtcacggaactgtacaaaagggctgtcttcgactttgaaattgcagaggaccctgtagggtaccaaaaattggctacgcttagtatattctaatcctgcattggtgtgactctctgagaaaccaatttcttctgagaagagtgggcaaaatcaggagattactcgtgtattaaatgcactgttttattttcaaaacatttttttcagtctcccttac

SEQ ID NO: 269833 - DNA, 597 bp, Homo sapiens
ttcaggcaggacccctacttttaatttgtcttccctccaggtccagctgtcaccttcttgagagactctaaatatacaacccttactacgaacctttttctccctttcttgcatttttttttctcagttgccacaaaaaattcttctggtctttgttccagttttgagctgaaaatgatcccagctgtggttgagaagcataagaatgcctgtaattattccttctaacaaggaaaaggaaactcaatatatttagagtcaaatttaaatgatgtaacatcaattacaaaaacctttaaggggcctaaaagtcccctttggcatactttttcttgataaaacctgattttcctcaagctctactctttgggcagtaacttgctgaaaattatatcaatagtagtctttctctgtcttcttcatgtgataaggaagtaggagagagggttggaggcacgtacaggaaataggaggggaaaagccagaaaaacccttacttattgacaataccacaatttcctatatgtgccaaacaatattgcactatattcctaacacagaatatccggcaatatcagagtatctatatttctcttt

SEQ ID NO: 269834 - DNA, 668 bp, Homo sapiens
gattaacctttaactgttcaagcctaatacctaatatctccaggtattattttccctgtgctaggtttattgcattatctggcttggaaggaacagtcacttgcttttgtaggaggttccagccaccagatttctatgatgaaataaattcttccccagattcatagcataggtgcaaatcctttgagaaagggacagaggacatactgcatgacatacctgaacttaatgaatttgattgaattaatgtctttatcaagatgaaatgtatataacatgaatttaaccattttgaagtgtaaaagtcagtggcaattcatacattcatgatgttgtgcaaccaccagctccatttaattccaaaatttttccatcaccttgtacctattaagaggttgctccctcttctccaccccatgcaaacatcaatctgtgttctgcctccatggattttccaactctggatttgtcatgtaaatggactcatgcaatatgtatccttttatgaagcctcgtgtctggcttctttcacttagcataatttttccaagtttcatccacattcattccttttgagactggattaatttgtaaatgattacctaatctcaaacactttgacaactctaaaaatggactggcaatgccatttcgtgaaaggctgcaga

SEQ ID NO: 269835 - DNA, 395 bp, Homo sapiens
gtgatgggtatggaatggtgagctcaaaggaatcccagggaggatcctgcccagccttccccaactggattctacagaaccccagcactatgagatccctgcaggaaaaaagatccctgtcaaataagatcggaaactctgctctctctgactctcttttggagtttcacaaggcacagtaccagaagccctggaaacctcatttcctcatttgtaaaatagagatgatgatgatgaggaggaggaggaggatacctatttcagagggttgcttcaagtgataaatgtaatggtgcttgtaaaaggtttatcacacctggcaaatagcactcaaacagcattattattattattatataatgttatttttatatagtatttgttactataatttt

SEQ ID NO: 269836 - DNA, 638 bp, Homo sapiens
caaaggcatctgagtggtaagagcatccggagcccaggactgctgagtcaaccctctggaatgcccacaactccccacaggccagccggccttgggactcccgcacagccacgtgagccggtggagccgggtctgtttgctagtggaggctgttaacagcacgggaagtggtcaagggttcaacaagagatgagccatctggtcctccagaggtggaggaggcacgtgacccacatggtctggccactgatgactgaacaagctatggacaccggaccccggagagaccattcactcactggccacgaacatgagttcagatacatgccccaaaaggatgagcctgggtactggattccctccctcagaaacgtgaatcaagagacacaggatgttcctgttggtccagatacttgagctaaaaggtgatggatacctggatgtggggtggtcattctggggagtacgtccatatagaaagaggagcaggtgctgtgggattctggatcccagtgatagagctaagtggctggatcaagcttcacctgaaacccactctacttgtcttagtccattttgtgttgctataaaagaatacctgcaactgggtaatgtataaagaaaagagacttatttca

SEQ ID NO: 269837 - DNA, 455 bp, Homo sapiens
cagcactgccactcactagctggggggctttggccaactaccaaactctgatctccgtttcctcacctatagagtggagatgataaaactatattttattgattctaagatgcacagtttttcaattttaatctcttggaaatcagaatgtatcttaccgttggtgggtcccatataattgacagctgtttttctttctgagaggtatgtgcaataatgatacatcttataatcagtggtgtcttagagttgatgaattatggtatttgcctaaagaatttttataaggattaaaatgtattattcaagtgcttctctttcactatggcatataaagaggccagggcctggaaaatgctcaggtgcatttcagttttgagcttataaaactgggtagataacatgactagtgagcaaaaatggctttcactggtcaaccaaagtgactagctgta

SEQ ID NO: 269838 - DNA, 556 bp, Homo sapiens
gggaaccatacttgttttttactaacttctgaattaaataacatgccataaacatgtttaagaacagatctggtgaatggatagttaattagtgctgggtgtggagaacaaatgctggtttcatctaagtaaagcatttcagaaatacaaaatgtagaaagtctctcaattttaataatataaacctgctaagccttcatttggtccttgtgtattgtctgtgtactcagttgacttctcattaaaaacaaaactgctgtgctcctgacccagtggaagaagcactgttgggagttcaaagagctaaccaggttttagtcctagctctaaatggcattgagattttgggcaggtcatgaaacatctggaggactgcaaccactagagacagacaaccacccagtagctagacagctagcccctattctggctagaagcttgacttgcaaacaaatgtcctattggtatctaaagcactgtcatttgtggttgaacttgtaccaagtgggtagataggatcgcctgggagtttgttaaaactcgtgggccctacctc

SEQ ID NO: 269839 - DNA, 366 bp, Homo sapiens
tcattcacagtcatgatccttgttgtctctttggatggctgaaggtcccaagtgttgcagtgctataaaaatggatattgctggctgggcgcagtggctcatgcctgtaatcctagcacttggggaggctgaggccggcaggtcacctgaagtcaggagttcgagactagcctggccaacgtagcgaaattccttctctgctaaaaatacaaaaattagccgggtgtggtggcgggcgcctgtaatcctagctactcaggaggctgaggcaggagaaccacttgaacccgggaagtggaggctgcagtgagccgagatcactccattgcactccagcctgggcaacagagtgagactctgtctcaa

SEQ ID NO: 269840 - DNA, 835 bp, Homo sapiens
caaagctgggctgtctctgaaccctccttctgcacaccctcattttgcgagccagtaacatctcaactctcatgtaaaccaccctctgcgaggctgtgcatttgtactttaggctagtcgaattttcttgtcagatttttctttcttgtcagacttttaaagaaaatcagtttctagattttggtatgtctcttcttcagtgaagctgttttgaccagcaatagagggcaaatttccctttggaaatttttgtgcatttcctttgataagtccagtgtggatcaataggcttttcaagagctttagaaaagtgcatgatgaataaattaatgttaattaatcagctcctcccagtcaggaagctttaaggattaatttggaaatgagtgtgagctttgacctagctagttaaccaacttatctgcacttcagtaaaacagagataatacttactcatggggctattgggagcattaagtgggaactccacgtctagtccctattacaggcgtggttcatcttggtttccttccctttattctcttcatacaaaatgaagggtaattgttgcaaccagaaaacgtatgaataccaccttatgtatattggatgtttatggttactgaacacattcatatgtatgctaatgttatagggctgaaaaactaagtgtgtttttcataatactttacaaatctcccatccaagcaagatcaggggtcatatttggcttagaactaagtcaagaaagagtttgttgctgaataccaagatcttaatagaaaagctcttatgatgttgcataataaatatgggtattgcatataaatgtgat

SEQ ID NO: 269841 - DNA, 400 bp, Homo sapiens
gctgctctcctaactttggcgatggcttttaggcttcgccttcggaatgcaagacaaggactgtggagacgcagctcagcagccaccaaaagcagctcttgacatttcagacagtgacatgacctgctgctggatttggcaacagtgaaagagtcactcttagatacctgtgcctgaggccagccaaagggtacatgatggggtggcaagacagggtgagtcacccacagaagtgttctaggctggaagtcaagagattttggttctggtcttgcttcatttgttgttgttggtggtggtggtggtggtggtgtgtgtgtgtgtgtgtgtgctcttttatttcagcattttttttttgagacagtctcattctgtcaccaggctggagtgcagtggagat

SEQ ID NO: 269842 - DNA, 392 bp, Homo sapiens
caattatttcaagatcatcttctaagtgttcactaaaatggatgacatacatttcagagaagaattttttgtttgtggaacgaatgcatgaatgaggacaaggagaggcctggatcacaactttgtactggaatatcaggagttgtgtaaagcaaggaagcggagactctgcagaacaaagccccttcaagacaaggaaatgccgtttggagtagctactttgaggacaagagacaaaaagcctgaggagaaagtcaccatgaaggaaacagaaagactaaacagcatgcgtgatctttgattcagagtccccatctcaccctggactgccttcctttggaattcccttgtggaaaaaaaaattaaactcttatttggttaaatcattgtaa

SEQ ID NO: 269843 - DNA, 452 bp, Homo sapiens
gaagagaagaggcatgtccttgagggccagaagggagaaggaaggagcatattcctcaaaactagaaaagaggaacaaaatgattaggtctttctattaatggagacatatgtcctgttgggtggcagatcttctgtgaggtagcggaacctgaaaggtgatgaccacatgggggcaccaaaagaggctgaaccttggaccctgcaactccaagccccagcaaaggtgcctgtgccctaattgtgacacagaagcagcagagccatgggaacttgaagggactttgtgggctgcacacaaagggctgcagagctaaccagtatagatcagcaccttgagggcctctttgatgcactaggatcccgtaggggagccccaataatcacgactgggaatacatttcctgtggcccaatgtgatggtggcttcaatgccatacatacattcacttt

SEQ ID NO: 269844 - DNA, 425 bp, Homo sapiens
agctcagattttttttagtacatataaattggggtacccttatcacagctcaggggccacatactttttgagaactgttcctcttttcttcattgcaggccacctccttactacagtgatgttttaaaggtgaggtacctacccaagtgggccaatcacaatattccagctagtggacactgattaattctgatggaaactcttaaccctagtttggccaaactgtatcccattcctttgctcctacagtacttaagcagttatttcctttctttcctacataatcagcttttatttttccctctatgctgtttatttttttttccaataggaatggaaacatctatcatcctaagaaaatttgacctgtggcctctaatttcctctttagttataatacatttatctcctctttgctaaaaaaa

SEQ ID NO: 269845 - DNA, 320 bp, Homo sapiens
gctgggctaaataaatatgcacatggaaaaaaataaatcttaagccttatctcgtaccaaatgtaaaaattatttccaaatgggttgtagatataaatgttaaagattttaaaaagtgcttctgtaagataagatctttgagatcttgggggtaggcaaagatttctcaaacagaacacaaaatgtactaacagtaaagattgatacattgaactacattgcaataaagaacttattttcatgattaagaaagaaaaatacaataaagagagtagaagacatttgttaagaaataaagagctcctgtaaatcaatatgaa

SEQ ID NO: 269846 - DNA, 478 bp, Homo sapiens
tgagcccaggagtttattatacaaaataatgtgtatatacattttgtatttgtacaaaataatgtgtacatgtatacaaatataaatgatatatatacccaaatataagtgaaatatttacacacacacacaaatacaaatgaagttgttttatagtcaaaaccctgccctctagtgtttatggaaaatatgccgttatttcagaaatgtcagattaagtatattctctatgtcaccagtagagtgagtccttgtacagggaaacaacttctccacattttgagaaagttgaaatcttcagacttttattttcttcaaaatcaaattgatatattttatcaatatgcgacatcatacttttataaaaatatctttgtgacaggttatgtattttatcacctaaaataagcaataatattaatgtaagcatttttcctaattatataaaagtaattcagattctttattgaaaattcca

SEQ ID NO: 269847 - DNA, 819 bp, Homo sapiens
tgctgaggcgatctagaggatcccgacgctctctctgtgggacgaatctggtcatctccatatgttctcatagtgaaattcttctcgttttcctttcatttttcaggcctcgtctaatttaaaacaaaccacacagacacactggccaaagcagcgactgcctctgagaggaaggtgggcctgcagtactggctgggaccacctccacatctgaagatgctgtttgcctgtatttgcttcccagcgtccttcctccctgcctggttgcctgttgggcctaacatggagctctgcccacagtagtgtcgttactatggccactagcccataccaaggcatggcctttgcagtccccagcatacagctcccgacctcacaggcaagtccatctctattgctgtcaggaagtaaaagttcacacggggcgggcacaaagtcctgctcatcccaaggcaccaacgcacccccaccaggctttccccagaaggcaactcaaccactctaggattttttttttttttaaataaactgtattaggagcttgtcagaaatcccgaagttggagaccactgtgaaactcctgggtcccaccggggctgagctcgtaccagtagccctaaattcaaaaagaaccagggaaggttctatttacaagtgaactggactcatgatgctccaccaaggaggcaatccctgaaaacaggcaaggttcatcagcaactctaaccgctcagggtgtgctattactactttttgaaaacaatcgtctgattatacaaacatgtatatagtgcttaacagtttactctgtattctttc

SEQ ID NO: 269848 - DNA, 237 bp, Homo sapiens
aggcaaggatcagatcctgagtcccttggagaagcaggaaggcatcatgatgactaatgtcagaggcaggggaggacaggtagggatagacagggaagcagtgctgggaagatgctaaaatgctgcagtttgtgcttggaaagatcatggcctggttcttccattgtcatgatgggttgttctctttcttattgtttttctaatttgtcttgactaatggagaagatcaggagctca

SEQ ID NO: 269849 - DNA, 445 bp, Homo sapiens
aggcgtgagccactgcacttagcccccaagttatgcttttttaatcccaaagcactcagtttatttttccagctgatgaaatttttttttctaatccacctatttgctgatttgctaccttttagagcccagggtggttcaacaaccactcatctccttttaaagctctaggttcctgttatcggcagttgacacctcatggtacccagagcatctgcatgaacttctcattctggttttaatctctgaggatttcccttattttcttgtaagcttagctatgcaattagaatcgccctgccccaccccagcatttattttgttttatacaaaaagaatttcagactacctggttatctctattgctagaaatgaaaatcctatagattcgtttatgattttgaacatccgttagctgccccaccccccatggtaaaaaagaaaa

SEQ ID NO: 269850 - DNA, 271 bp, Homo sapiens
gccaggccctcaaacttttcggcctgcagaactgacagctgaaaaaaacgccttttcttcatgtggagcgttgtgggtgatctggtttgccatgctatcagagccccttgcttatggattgttagtttaaattactgagccaattcctgtccactcaactggtcagcaaacgctctctctttatttaaacccttttctgattatataatctatattccttgcacaaaaatggaatataggcaagtataaagacaaattctaaaaaattact

SEQ ID NO: 269851 - DNA, 471 bp, Homo sapiens
caggaaatgaaagtggtttatgccttataattgcagaccgtggtgctgtactactgcagggagcatttttcacattgggaagcaattatgtaacctatgcctatatatatatatttgtcattttggtaactattttgaacttccttgttgagatataacatacatacagaaaagtgcacatgtaacatattacacagatcagtaaactttcactaactgaacacgcccatgtaaccagcgcctatatcaagaagcaggattactagcatcccagaagcttcccttgcatctttagtcactaaccatttcccccaaggattaccactattctagcttctaacactatggactcatttatcctgtttctgaactttatacacatggaatggaacaacgtgctctcttttgtatttggcttcttccatcctatattgagataataagacttacgtatgttgcttcagcatgtag

SEQ ID NO: 269852 - DNA, 385 bp, Homo sapiens
aaacctttctttatgccacacatcttaagtacctgaacaccactctcccctggcctacagtataaaactggttagaaggtgaagaaatttaagggaaggcttacatatggaagagtaaaacattttacattcgttttgctttcagtgcccaatactggcagccaagtttatacccttcagaaagacaggtgagaaatccttctttggtagtatctaagcagtcctagaaggcttctccacaccagttccttctccacaaccagggccaactctccaggggaaaagactgccagaggcttatcccagtgaaggaagcacattatttctactctgagccaggctaactttccctagccttcccatttcctgactccaacagattcag

SEQ ID NO: 269853 - DNA, 471 bp, Homo sapiens
tgtccccttccccttagcatcgtgctctagaatttcccttatcccaccagtttgtcacaggctgaattcctgctctctggtagactgacaccctttttccatgaagaagtggtctgtcttccagatccctgttttgaatttttgtaaggaactccaaatggagttaaaagaaatccatagtatgtgtgagattgttgtgtcctctgcagtggagctgctgatgtagaggcttactctggttgtaatcagacagaaaaggcttcttacccctgaggacttagctggtgttatgccagaaatatgggaaaggggacaggctgaatgaccacagacaaggaatgtcagtagtctttcagttgcatgtaatgtccagtttctctcaaaatgcagaattttttcataatgtgggttttgttttttggttttgcatgctgattatgaagtaatatatgttcattgttaaaaaaaaaa

SEQ ID NO: 269854 - DNA, 470 bp, Homo sapiens
cagctaacgtttgttaaaagcccatatcctttggatgatctacatgacccgtcatgtaggagtccatcagttcctcttccttccctcatctcaccttttctactggagtccattctctaaggccactccctcagcacatgcctggttgctttgcttcaaacatgccaggtgtcttccccatggcctttgaactttctctgttacttttccctacacattagtgggctacctctctcagttacttcaggtgtctgttaaagtgctcttactggccaggcgtggtgtctcacacctgtaatcccagcactttgggaggccaaggcaggtggattacctgaggtcaggagttcaagaccagcctgaccaatatgaaaccgggtgttcactaatacaacttagcctagtgtggaggcgtgcacctgtaatcccagctacttgggaggccgagacaggagaattgcttgcctggg

SEQ ID NO: 269855 - DNA, 458 bp, Homo sapiens
gcaatcctcctgccacagccacctgagtagctggaactataggcatgtgccatcatgcccaactaattttatttttatttcagttgtagagatggagccttaccctgttgcccaggctggtctctgactcctggtctctagtgatcctcctgccttggcctcccaaagtgctaggattataggtgtgagccaacatgctgtccccattattgactgttaccctaaagtgtgtgttgcctttctagtttgagtagaaagtccagcattatctttttggataatatccaggttttgctgtttctttctttatttttcataatgagaacatttgctctcttgctgacattggagggcgtctgtttacctctcctgtaggcacacaaaattcccaacgtttatttgaagaaaaagacaattatttgagtaatttgaataaataaacattttaagtgattccc

SEQ ID NO: 269856 - DNA, 367 bp, Homo sapiens
gaaataaaacacatgaccatggtgaccagctcaaggatcacaaatgaagtgaactttattatttcttccccttatagggctcatttgattgaaaagcaatcagaaatcaacttttcttcctttttaagaaaacgagacaaatataaaaaaggagaagatagaagatgatggttttcataactaccatgcacacagatctatattggaaagcctaactgtgtgataaatgatcattcacatctgcctattccgttattaggaaaccaattcaaaacagcattcagtcagcttcccagagccttggggggtatttagaattgtgtttgatagatgagttcaataaataaagacttgtgaagtgctcata

SEQ ID NO: 269857 - DNA, 716 bp, Homo sapiens
gattttttttctttttttttttttttgctgtgttagttaggaaattatttattaatttacaagacaggttttatctcagccaaggagggaaatggcgtccctgtccctcccaaagcacagagcagagaaatgaggctgtttacatcgcaagtctctgcactggtgtttaagtcattaaaaagatatttgaaaaaaaaagtctctaaatacaggtttatggaataattcataacagctttaaggaactatcatggtacactgggaaagtcactcatattgcaggatagatttcttctgttggctggtgagcatttgttaatagtcggccttgactctaccacaattttagaagtagttcttttatttctttaaaagcaacattttgggacaaaatattgtgaacaaataaggaatacgactatatttgtgaaaccccttgttaatttccaagtgatattttaaatcttgaataagacatgtacgctcataaataaagagggaaaagaaataattaaatcaatgttcctaagagcttctcagaaaataagaaagagataagtgatagaactataatctacaatctaccctaacagtatatttgcatcacttcttaaactttgtttagtattttaacacgctgtttcttattatatgtgaagaatgctgtgaggtagcatgtcaatgttttgcagattaataaactgatgttaaaagag

SEQ ID NO: 269858 - DNA, 424 bp, Homo sapiens
ttgtttgttttaagttagggtctctgtcgcccaggctggagtgcagtggcacaaacatggctcacagcagcttcgacctcctgtgctcaagccatcctcccacctcagccttctgagtagcttggactacaggtgtaagccaccacgcccggctaattttttatttctttttggagatgggatctcactgtgttgcccaggccagtcttgaactcctggcctcaagcgatcctcccgcctcagcttcccaaagtgttgagatttcaggcgtgagccaccacgcccagccccagaccacactttgagaaccactattataggttcaaggagttcataaatgtggctacttataacagggcccggcacagatggaatggagtaagtattcaataaatgttacacttattgcataaaaatagaggga

SEQ ID NO: 269859 - DNA, 294 bp, Homo sapiens
gtctctcagggttgttagaaggcagtggttctcaaacttgagctgcattcgaatctcctggagagcttgatgaaaaacagactgtgggcccctccctccaaatttctgctcagcttcccaaagtgttgagatttcaggcgtgagccaccacgcccagccccagaccacactttgagaaccactattataggttcaaggagttcataaatgtggctacttataacagggcccggcacagatggaatggagtaagtattcaataaatgttacacttattgcataaaaatagaggga

SEQ ID NO: 269860 - DNA, 258 bp, Homo sapiens
gtgtaaaggaagaagcatgtgggttgctactggtgacagtatattgccatcataaaagaattcacggcacagctaatgcaaatgagagtgaggtagagaccctctcaaagtgggaactggaggcctgaagctcaatctagcttacaacttttcatttctatgactagtacaattttacattgtttatgcctttcgggttttgttaactgcaaatgaaagccttcaagctaatacatgaaattttatttttaatttaat

SEQ ID NO: 269861 - DNA, 425 bp, Homo sapiens
gaacaaccttattgtaggaaatgtacacacgtttcttcctttactcacttagcctatgtttattgatgtgatgacatttctctttcttcttcactgtcaccattcatgtttgattcgaaggcttcttggagttttatgattcctctgagctgattttgatccttgacaattgtgtactgcagtgctcagataggctgtttgcagtaatctgcctcttctggcctttttagtaatttagaattgactataacattacatattcctttaaacttctcttgaaggtctgctggaaatagagatagtcctttaagatgctcttttcattttttttttttatcatactttaagttctagggtaaatgtgcacaacgtgcaggtttgttacatatgtatacctgtgccatgttggtgtgctgcaaccatta

SEQ ID NO: 269862 - DNA, 302 bp, Homo sapiens
cgcggccgcgcgacacggctgcgagagacgacagagggagttaagcaattaacctatccattgccttccataattaactgtgtgtgtagtgagagtatctaaaatgtactttcttggcaaattttcaatatactatgcaaaattattaacacaaagtatacgttactttttgtttgtttgttttggctggctgcggtggcttatgcctaaaaacatgccctttgaggaggctgaggtgggaggatcacttgaggccaggagctagagaccagcctaggcaacatgtcaaaacccagtctctc

SEQ ID NO: 269863 - DNA, 387 bp, Homo sapiens
gtccccactctgtggattattcacaaagtggatagatgaatggatgaatgaataactgtaaacatattaattgtagttacacaggttgcaagcatttcagttttatttttagttttctttcgtataaataattaaaatctaacatttatgtatcttcagttctttgatgcattattaaagataaggagagccattgcatgcaaagtttgttaaaattttaaagtaaagcttaccataaaactctaagtcagcttgagggttgtgtgtaacacggtgctactgaagctttttgccacttcaggatttatatttgtattttcatcagtggcataaatatgtcagtcacagttggtagcagctgtccctttcttgggcatgtacaaagac

SEQ ID NO: 269864 - DNA, 200 bp, Homo sapiens
ctgctcattttgggaacctttgctcatttctttattataagtttaccattttataatataccattgaacatctgtaaaggtcttcacatttttaggtagctaaaattggatgttaatatttttttggaaacttgttgcctggtagtaataaggagaaagtgggactagaaactggaaatagctatttttaaattgttagc

SEQ ID NO: 269865 - DNA, 495 bp, Homo sapiens
ttactcatgcacctttctgataagaaaagtgaaaatgtgaagttgaaaactgaagacgcccagcaacttcctgaatccagccctccacgtcctgccctacgggacggacgactcccaaagaggaatcgttggtggaagtcccatgtttcgttgccgttggaagggggaactggtcaaggcaggttcggtttcaggatctcacctcacctgggagcggggaggtgacggtccccagcggggcagtcacgccgccctggccttgaggccggactccacactgcgcttggctagggtggtccgtccctctcttggccacctgtgtcgggcagcctgacgccgcatcttcctgagcagctgtcgcgttgccgtgtggcagccacgctgttgcaacatgagcggctgaggtttctgaggcccctccggccagaagctggcccaggtgctgtgggcaagacatgtgcgagagactgaattagacccccttggaaaaaaaaa

SEQ ID NO: 269866 - DNA, 249 bp, Homo sapiens
gcaaacaatatatgaggataccttctgcaccctcagccacactgaatatcatcagattttttcatctccggcaatctggtagatcagggatggtgaacattttctacaaagggccaagtaagaaacatactcagctttctgggccataagatatctgttgcagctcctcaactctgccattgtgcaaaagcagttgtagaggatatgtaagtgagtgtgattgtgtcccaataaaacttcagttacaaa

SEQ ID NO: 269867 - DNA, 546 bp, Homo sapiens
ggaattttctagaaacaaagaaagatatgaatcttcccatcaacaatgtatttcaaagaggagctatggataaaacaacatacttaagcatatcatagaaatgtgtttagaatatcaagtatggcaaaataaaacaaatattaacatgtcacagttataatatgcaaggctctgttctaagtgctttaaaacttaatcctcattacaaccctatgacacagatacaattttatatccattttgaacttgcccaaggtcacacagtaagtagtggtgacagaataaagaaaagaaatcttttaaaaaactaccagatccaagtttgccaagtttcacaagacaatgaaataatatactgaggttgctgatgggaggaaacctatcaaccaagaattccctatctagctgaaaaacaaagtaatgcataaaatatactttcacacaaaaactaaggacatttacaagccagcctcttactaaaaggattactaaaggatgtacttcagcaagaagaaaagtggactcagagaagatgcaaggaacaat

SEQ ID NO: 269868 - DNA, 411 bp, Homo sapiens
ctaggctgactctttttgaaacatacattaagttagtttctagctaagaatccctagtagctccgttcatacttagagcacgattcagactccttactctacctgctaggctctgcatgcctgcctgcaacagtatctctggccttctctgagggatctaccctcctactgtattctgtttctactgtgtgcggtcttcccactatatggaatgctctctccccgaggaccccatttctgctcctccttcagaactaagttcaagtgtcttttccttaaagaagccttccctgacccaggctaatgtcagaccacccaatcttacagggcctcatagtaccttgtacttctcttatgtacctcttcctgcaattgtaattaatgaattacgagactagttattagcccccc

SEQ ID NO: 269869 - DNA, 358 bp, Homo sapiens
ggaaacttaggttgttttcatattttggctgttgtgagtaaagctgcaatgaatatggaagtgcagagatctcttcaagatactgatttcatttcctttggatcgatatccggcagtgggactgctgaatcaaatgaaaacaggactgagaggggaaggcaatgtgaaaatggaggctgagactgaagtgctgccagtataagccaagggaggctaaggattgccaacagccagaagcttggagaaatgcatgaagcgaattctctcttggagccttcactaggagtcaaccctgctaatgccttgagaaacatttggcctccaggactctgagaaaataaattactgttgttttaag

SEQ ID NO: 269870 - DNA, 716 bp, Homo sapiens
aactattaggggtgaaaatatcaaagtgagagaactataaagggtttttaaaaaggaattaggtatgttgggttagtcgcattggagagtgcaaattcaccatcgacctgatacctgaaatttcctccttaccatctagaggcaagttgggaatgctgccaggctcctgtggtaaaggaagctcctctcttgactggtgctttatggctacacgttcctgctcagaatggatctcatttagtcttcaccaaaaaaaaaaatctcatgagatgatttaagtgttttatggacaagatgtctaaaactcagaaaaatttcacagtgtgcctagcttttatgtttatgttgaagttgggcattagaagttagaatgaatgggtttacttcagagaaaattaaatccatcacccactccttgtactatgaattccaaatacatattaaatacatataataaaatatttaatatatatgtaagtgccagaaggaaacataaatatgaatattttgtaatatcaagttgaagaaaagccaaaatctgacatcataaaagaaaactttcaagtaaaatatgttaatggctaccaggaaaatattgtgcaatgtctgattgccatgaagagggttaatatccttgctatatcactctgtgaagtcatctttaaaagactaagaaaaagatgaatctcttaataaaaacctggcccagaacatga

SEQ ID NO: 269871 - DNA, 609 bp, Homo sapiens
aaggattactttaaggacctcaaaaggagacaaaacagcagactgttaaaagcagccgtcaatatttatctaaacacaatgaagcaactgcttgtgctacgacaagcagtaataaaatgatgggactaccactgttggtcctattagtggaaacaattaatagaaaaatgggccaacatgaaactgttggtaactttgtaagggaaaatcacttccctaaaaaagggaacggcatcagcatcaccactcatgagagcaatgattgacacttcacatgcaccagcaaacctcatccagcccgcagccctctgaggaaagcactgctgacagctccatggtgcccaccagaaaatgcaggtgcagctgcttcaggagcttactcaagtcccacagctggtaagtgggacagctgggatttgcaccacattcctctgactctgatgaacgtgcttttgtccgtgatataatgccacaaatagagctctaaaatccaccttgagtaggcagtatactccaaagttgtgcagagtacagactagtaataggtacaattgctagtaatagctacaacgcttaaactgatgttgcatacatttaaaattaagtttg

SEQ ID NO: 269872 - DNA, 475 bp, Homo sapiens
accaaatattctggaccccttcaactcttaaaaaatgtcatgaaatacaaaaacaggctgggggaatgctgttctagattaaagaaattaaaagataggcccaccttactgtaatgtgtgaccttaattggttagccgggcatggtgacaggtgcctctaatcccagctacttgggaggctgagacaggagaactgcctgacccgggaggtggaggttgcagtgagccgagccgagatcatgccactgtactgcagtcttggcgacagagcgagactctgcctgaaaaaagaaaaaaaaaaaaaaagaaaagaaaagaaagaaagaaaaaggaaaaaaaagaaatacctgtgtcaaaaagtaaggaagtgctcaaagacaaatggggacacgggcaccagcgtcaggggttcttacaggccaatttggaacaatttgagcaacacagaggatgataacaggctaaagtactttgg

SEQ ID NO: 269873 - DNA, 554 bp, Homo sapiens
gcaaaaagtttttttttaattacaaagctaacggcattaattactagtactgtaaatgcatcagcgcacaaaagccgagtgggttccaaggagctgaggcagcaattggtgaacatttcaacaactggaaaaggcttagtcacaaaggagagacctttctatggtaacattatgaaagctgtcttcacactgattgagccactgtttaattgaaggtgacatagcctatggactagagacagcactattgcattacaggaaaaaggttattcacagagagtctctctggacttcttgctgagtctactgtcatatgggaaccaagaaatcgaattttgaaatatatgaaaacagctacaatagcatagcagtatgataggtataagtataatgtcaaacatccttctttttaccatccattcactttttgctgtactaatttagaagcaatctcatgtgctaaaaagctaaaactcaatactgaagccctaactaggaaggactgcccaacgttgagtatttctgagatcagaaaatttctgtactaatctatc

SEQ ID NO: 269874 - DNA, 470 bp, Homo sapiens
gggtttactaaaacaccaggaatattcctttcaaaaaggagtaaaacacagaggagctccagactatgcacaaggatataagtagggagagaagccaggctagtttattcctgtttctattcccaatacctcttccaaaggaagaggcagcagtgatcgaggtgtctgtctccaagcagaaacagtgctttgggcagagtcaaggtatggtagtaaaacccagaagacaggtggctgaggtacctttcctagctgttcatcttacctatttccctgcctaacgaaacagggagcagtaccactgtctttgcacctttcccatgtaagaatcagtgggcagttaagcagaaaatccccattataaaaatgcacttatagtaacccgccccccaaatcttttaggattactagaatcacaaaataagagagacaaattcgaaagacaacagcaaaataaaaacaaaaaccag

SEQ ID NO: 269875 - DNA, 413 bp, Homo sapiens
ttcaagaatgaatagaagtgctgctgttcttcttcagcaggtgctgttgatttctacagaaagggaaactactgagtgcttattatgagcatttcacctgggggctggcaatcaaaagaaatgatcaatgggagagccttggtcaaacactgttggtcttgctttgtggctgggcatctagaccagtatgtatgctgtgagggtggctacttttgaaagacaaactagaaccctccattaagactcccactgttggcaatttaagtttttcagtaaaacatgaagtctctggattttgttgttgttatctaaaaatctcagaaccttgacaaggcctcattgcatcaccagaactagaattgggacagcaacatttctctaacattcctgtgattaaagaagccatcatcaaa

SEQ ID NO: 269876 - DNA, 503 bp, Homo sapiens
gcactcaagcattataaacagtttatattgaccaatttccatgtctcagccactgttcttagcaccttacatccttgttccaactctacctgttttgcaatggaagaaactgtagtgcttataatttgcttagtcgtagagctagttggtgttagagccaggttttgaacgcaggcagtgtggctccagaatccgtactcttaaccacagtataattctgtgacttcaaattatctaacttctctttcctgtttacttcttcgtaaaatgaggataatagtacctaacatatagggttgttctgaaaagtcagtgagttaaaatatgtactatgctgcttagaatcatacatgaaaaatagtaagtactcaataaatgtcagctgttattatgttagcattattaaggcatcgaactcatgcatatctctgaattttaaccaaataggtggactaaaccttaagtatgaatttatatattaaaaggtagaaatactgtggtct

SEQ ID NO: 269877 - DNA, 1277 bp, Homo sapiens
acgacgatgcgctgcggcagctggaggccgagctgggcgccgggcggtctgacttgcgcgtcgtgcgggtgcccgcagacctgggcgccgaggctggcttgcagcccgctgcttggggccttgcgtcagctccccaggaccgaggagctgcagcaactgctcttcatcaacaacgcgggctctcctggggatgtgtccaaaggcttcgtggacctgggtgactccactcaagtgaacaaagactgggcgctgaacttgacctccatgctctctctgccggacttgcagcgtctcgaaggccttaccaaccagtcctggcctcaacagaactgtggttaacatctcaaccctctgtgccctgcagcccttcaaaggctgagcgctgtgctgtgcgggaaaggctgctggtaacattctgttgaggtcctggcgtcggaggaacctaatgtgagggtgccgaattaggccccaggtcctgtggacacagacgtgtcccggaggttagcccggtagacctccatggacccagacatgcgaaaaggctgcaggagctgaaggcaaagggagagctggtggattgcagggtgtcagccagaaacggctgagctcgctgcaaaagggggtgttcaagcctggagcccacgtggacttctactataaataagcccatgtctttggcttcctgaacctttctgcccccactttcagacacacccccagagccccgtggctccccacaccctgccatggtggcagtcctgccttacacagataaacactcatgtctactgtcctaccttcacacatagcctgctgtgatgagcttccaggtcgctggccttaccagttgtcgagagtctggatgtggcaccctggattatgaggaggcttaggagagaggttatgggtattcatgtctctatccccaggaatagaatttaagggatgggaagagcaggaaaagaagctgaaacacacaagagaagaggttgtgtctcctgctcatagctagtccatggggagagggaagagtgacctgagtcaaataggagaacgcatgcagattcgcagatggcctggtagggaggaagagcagagggtacaagtccccgctcacacagatgccccttgctgaggggagcagcagcttctgttgaactttgtgtcctcactctgatgtctacttcctccagaatccaccaccccttccccaggctgggagaaggggccgttgggtgtctatgtacatggccaaggcagatacaaataaaattaaa

SEQ ID NO: 269878 - DNA, 315 bp, Homo sapiens
ccctcgttatcaaaatagctaacaatccagtttaggggtacaatgagaaagaagtattggcactcactaatcctgactgtcttctgataaggttaaataatggtaatagcagagattttgttctagagagcattgggtgaataagtctgtacacatttgcagtaatagccagagggagaattcaattgttttgtgtaacctaggaagaagaacttcagatatactctggaattagaagagaagaaggcaagaaagataaactgtcagtgacattttagaaggaaaaataataaaacatgtgctatgaattttaaa

SEQ ID NO: 269879 - DNA, 829 bp, Homo sapiens
gccggacaagatggttcccgatcgtcagaattcctgtccgcgccttgcgtcagccccgccgaaaggatcgccccccctagtcaaaccgctcgcgccccagaggcctcatggagtcccgcctcaggctcgggccttggcccccaaagaaagccactccgacgtgtttgagatgggcttagttcccggacccgtcctactgcccccaggcgctggacagcctcagaaagaggacaagtctgcatggaaagataatcgcacaactgagccttctgggagatgtagttcggagctgggaaggcggttggaccctccgaaagtcatcttaattgctctcacagataagccggtgctgggctgccggcctgagtactgtgcgcccagagtgcgcaggcgcaaacatcctgggttgctgttttggcctctttgttcgggcgtgaattttgtttattgctccttagtgcagaggggttatgggaccagaggttgtgagactcagaagtggttggggacgcagaaggggtgtagaccaggaacctgcgacctgatggggggaggtcgaagggaaaggaatcgccaaacgtgggacaggtttggagaggcagaaagagaggagtctgaaattgcaaagggcaggtgttattctgacttctgtgtgctttgtgataaatgagtgggacaggaagtaagaggagtttcactttctccttctgcaattatttgtgtacttggactaagtgtatctcatggccagtatttgactgcttttgacctataaaggtattgtatacacagtcatgcatagtttaataataaggatatatgctctccc

SEQ ID NO: 269880 - DNA, 441 bp, Homo sapiens
tttttctagacagggtctcactctgtcgcccaggctggagtgcagtggcatgatcatggttcactgcaacctcaacctcctgacctcaagtgatccgcccatctcagcctcctgagtagctgggactacaagcatacatcaccacacccagctaatttttttttttttgtagacatgcggttttaccatgttgcccaggctggtctcaaacgcctgagctcaagtgatccacccacctcagcctctcaaagtgctgggattataggtgtgagccaccacacccagcctcttcttcttggatttattgatctgtcttcctcactagcctgtgagatcctaggaggtaaggaccaagtcttactcaagtttgtatcttgagaccaagcactatatcaggcacatgcattcaaaactcagagttctctctctcattcattcaca

SEQ ID NO: 269881 - DNA, 436 bp, Homo sapiens
caggaaatttacaagggaatagaacttgtcagttaatctgccaagtgggttaagtagagggcaattaagaaagcaactagatgtatacctaatacgttgtgttttaactattatatgtctataacttacggtgtttataagctaatagccctcctttcccatcacatctcttaaggcagatttctggtaagatctaaatattaatcctaaggatctgtttcatgcaaatctaagtactagtttttcttactaaacctttatttggtctctaaaactttaaggctgttatgtttcattctttgtcttctggtgtcagttcacttgcatgtgcccgaaaatgtattcttactcctctgtttctgttctccccatggctctatctttcataattattagccccttagaacactataaccattaaaaatggcaagcatga

SEQ ID NO: 269882 - DNA, 465 bp, Homo sapiens
caggaaatttacaagggaatagaacttgtcagttaatctgccaagtgggttaagtagagggcaattaagaaagcaactagatgtatacctaatacgttgtgttttaactattatatgtctataacttacggtgtttataagctaatagccctcctttcccatcacatctcttaaggcagatttctggtaagatctaaatattaatcctaaggatctgtttcatgcaaatctaagtactagtttttcttactaaacctttatttggtctctaaaactttaaggctgttatgtttcattctttgtcttctggtgtcagttcacttgcatgtgcccgaaaatgtattctagctccctcggctagcttccgccaagcttttataaactcaaagggatttttaaagtgtgcggaggcccaaaagcccaggaagagagccatgaaatgagtttctgagaaagactgtgaag

SEQ ID NO: 269883 - DNA, 464 bp, Homo sapiens
ttgtcctttcagtttcatccctcacaacagaagctagtgaaaggggataaaaagcttctcagtgtcctttgctataaagatttttgtttgtgattactttcctctggaaaggaaaaatcctacttggaagacatagagtactagcaaatgttaagcagagggcaacactcctgcagtcagaggaaggttctcttctggggagaggacctgctgttgcttggccacatggcagcatggagttacagcactggaagtggaatcccgaaaaactaggaaagctccagtgggcactcatctctcatcatttttggctgagccataggctcttttttcaaactcaggcctgagacaggcttacacaccaacctaaatgcatcttctccaaatccctttcaaaaactgccagtcatcaagttgaggttgatctctagtataaaaacaaaaacaaaaacaaaaaaaaaagg

SEQ ID NO: 269884 - DNA, 417 bp, Homo sapiens
caatgtttgtaagatgcagtgttcttattgaaacattactaagtaatgaaaaattaatcaaaggaaagaataattttaagatggatcaatgtcaagaaatagttttttgaaaagttttaagattcacaaaccattattatgaatctattcaagttcttaaatgatgttattaaaaagtatggatagtaagaaacatatcaactaactcctcactaaacttgagaaaatataaaataactaaggtaaaaatccataaattacgcaacaaaattgaaattgaggggggaaactgctatgcaatatttatattcatttaaccaaataatatatacatttagctttgacaaattttcaagttctggtacaagtgtttgttttgttgatttaagaaaggataattatcactaagaatttcta

SEQ ID NO: 269885 - DNA, 543 bp, Homo sapiens
agccagatagtctcaatctcctgtcctcgtgatccgcctgcctcggcttcccaaagtgctgggattacaggcgtgagccaccgtgcccagcctaagttaagcattttttaactccctgatttgcatttctgaaaattttatcagaaggtaaagagattgaagagttctgcccctgggtgtaataaagttattgacttttagaggctgttaggatcccaagagagaaagattgggtatagtcagatttaggaaatcattcattcatcacacacttgaaatattttacgagtgctggtaggagtcagaattgtgctaagtatcagggtggatacagagccgtgtaagacagacatgctctctatctttatggagtaaacaaggattgaattaggataataagtgctgtaaaggagtgaattagggtgtttaacagtggttctcaacctaccttgttaagaaattgggaggcaaggggttgtgaataggaagactcagaagaatgacatttaagctgaagcctgaagaataggtagaagttttcta

SEQ ID NO: 269886 - DNA, 461 bp, Homo sapiens
cctcattgctaatgaagatgtggtttaaggattttatgcacccagttcatttattaacaacttgtttaagctttattagctgggtctctactttataactgtgttctttaatttacaagacaataaaaattaaaatggtaaatgggaaacctatcttgcttttcaataaataatttattttaataacttcgtgggcatggtggccaaaacattttagctgtgaaaataatttcaattcatatttttttggaatcaatattaaaaggtgatatattctcaaatgaaaagtggacaaatgatcagttataggacatgattaagaaactaaccatgagccacgtgcagtggctcatgcctgtaatcccagcactctgggaggccgcggtgagcggattgcttgagcccaggagttcaagaccaggctgggcaacatggcaaaaacccggctctactaaaaatgc

SEQ ID NO: 269887 - DNA, 513 bp, Homo sapiens
caaagtgctttcctcccccacagactcatctaatggtgctacccacacttctaggctggtgtcatcactgatcacccagctgtgattttacagctgtgagattgcagtgcagggaggtgaagcacttggctgtgtttatccaatcattggtgagacttggattggactcccaaccacctttcccacttcctcgacctcatttcagcaaatgccagcctctgcggtaaggttttaccccagcagagtgaaacaaagtcagggttaggaacttgggctttcaagtcgacagggctgtgttgaaatcctggtctgtggggcggtgcagaggggtgggtgcattttaatacagccacatagaagcaacagtgtctgctttgtcactggccttggttccacaccagccctagcactccagtctcagccccacttccaggcaaggaggaattacttcctatatcatattatttgaagtgtttataaaactttctcaggaaaagtctcaaaaaaaaaaaa

SEQ ID NO: 269888 - DNA, 541 bp, Homo sapiens
ttccctggcacaattctcgtgaaaattgtgtagggatattaccttacatttatccagtcaaaattagcatctgtcaatcagatcctttccaagaaagggaatcagttatatcataaatacacaaatatataacatgtgttttttaccctccagggaaactttaagcaagtagtacaccatcattttttaatgaatggtcaagaaattgaaaacatatataagttgagttaagcagttaaagggaaagacaattagcaatgcctggtaagctaagtggtactccaaaggtttattttatagctacagaaattatctacatgtagagggggtggatacaaactagcttagactggggtgagaatcctggtttgacatttaacattttagaataagagatatagaaagattcctctgtagttgaaggatcctgttttgtcctactcataagcaaatccatggggtagcaaggtgctttctggtaagcctttgatatgatatgaagctcaagttgataaaacagattaattgaaggaaaaaaaaa

SEQ ID NO: 269889 - DNA, 377 bp, Homo sapiens
gtgaaacattttaaaaatctctactaaggaaaaaccatcttgggaattctgcaatttattatttattaatggaaactttcataagactaaataaatgtttttatctttcaagtaagcatttaatggattactttaaaagaaagacatgtttttatttctcataagtgagtttagaacaataactctagatttcaattacattctcagagttatctggcacaaactgatgtctcacaaaagcaatgaaacaaacaaacaacaaaaccatgtttttctgactggattgttggctagctgtcacggctatgttccaaccacaataattatagtccatctacatatttctttcctatgatccagctggattagcctgtaat

SEQ ID NO: 269890 - DNA, 619 bp, Homo sapiens
cgtgtggaagcggatggggggcagaggttgtggtgagtgagagatgaggtcagaggaaacagtgtagagaaaggctgtgcagagcatacagagccttgaaggtctctctaaggactttggctgagtaaaatgggaagccactaggtgattatgaggagaggaatgccatgatcttatactttaaagaattgatcactcaggctgctatgttgagcactgaataggtaagatcatattataaagaaaatgagagtccagacctgagccctaaggaactctaacattttgaggtgtggtagagaaagagcagtaggaaggaaaaaaaggatggagaggtaggaggaccaggagagtgtagtgtcacaaaagaaagtgaggaatgtttcggggaggagggtgtaatggacagtgttgaacgctgtcaaagtgtagacgaggttagaagtgtcatttgaccttggcgatgccgatgtcatgggtggttttggcaagccattttagaggagtgggggcagaagttagagtgtagtaagttggagaggaaaaatgggatgtgaagaagtggagagaatatgtgtagatgaatactcttgaaagtgaaataggatagaagctggga

SEQ ID NO: 269891 - DNA, 287 bp, Homo sapiens
tctaaatctgacaaccctgagatggtaaaggcaataataaccaggagttaaaatacccacgcccactgcccgaactcctccccacaactgcgagatgtcaagcaggtgacctcacctcttggttcttctgttccattctctatgaaatgggacatcacctgccataccttgcagggttgacatgtggagcacttccatgtgctccgtaccattctaagtgctgcagataagtaatgtaactctatcttcaccgctttgagatatttacgtcgatcattgctcccatt

SEQ ID NO: 269892 - DNA, 641 bp, Homo sapiens
cctgggagggagcgaggcaacctggggagacaatgtggggaatcatcacgttccattacagcgcccttctcttgctctcttggagcttctcaggccacgggtgtcggtcatattggttttagagattattagtaactacccaaacccaacaattttgttttcctgaaactagaaatgtcctgtttccaactttatattttcatcaacttctttttctatgatgtgtgagaaactagaatattcagtgtgctttcttgaataccagccttgtttcaactctttaatgagtggactattctctgaagctggccctcagtcttactctgggttcatcaaccaaggtcaagatctgtccacatgcacgtaacaggagcacttttccgagaattgtaaaggagccacggtgcaaagccttctggacctgggtctcatgtgaaaactcagcaatgagcctcctggcctgagatgagcctgcggagcaccttgttacagcacgcatatgatgtatataaaaaatgaacacatgtattccaattacactgatttgatctttacaaactatatggatgtattaaattgtcacatgtaccctcaaaatatgtacatctattatgtatcaataaaataattaacatattttt

SEQ ID NO: 269893 - DNA, 965 bp, Homo sapiens
ggaggcagaggttgcagtgagccgagactgtgccattgcactccagcctgggtggcaagagtgagactgtttaaaaaaaataataataacttctatttctaaagctgtgatacatagaaaacaagttatctgtttctgagatgcaatggtgggacaggtgaagaagcattcccattccaaaagagataaattggaaggagaaaaggggtttaaagcaggtttgtaagtctgcaggacaaattccattcagttctgagacttgaaaatagttctctgtggcttgatattccgttctctaggtgcattgacacggccttaccccttggtcctggattggcagcctgcccattttttttttttcttatgactgcttagttcctattttttgttttttttatttctacctttttaatcttaagtacagatgcttcttgagttatgatgagcttacattctgataaggcaggagtattatttgagtccaggagtttgaggctttagagtgtgattattgcacctgtgaacagccacttcactgcagcctaggcaacatagtgagaccccatctctttaaaaaaaaaaaaaaaagaaagaaatataccttatttatttaacatcttggcttagcctagtctaccttaaacatgcttagaacacttacatagcctacagttgggaaaaatcatctgtctacacagttcactggacaagcaagcattggttgtttagtctcatgatggcgtggctgactgggagttgtggcttgctgccgctgcccagcatcacaagagaatattgtactgatgtgtatcaggtttgcatcatggtggtaaagttgaaaaactgtaagtagaatgattttaagttggataccatctatagatactttctagtatgccattttcatttcttttatttttcattgttattttattttatatatttttttgagatagggtcttgct

SEQ ID NO: 269894 - DNA, 527 bp, Homo sapiens
tgttagaattaggcatctggagtccagggaatgagtatagagatgtttcagttgttcgaaggggcacatgtaggtaaggtaagagcaccaagatgaggtgggggtggggggcagcaagaggaaacttgaatcagggctacgatagctgccttgctgactgttacaccaactcttgcacctcttaggagcattcactggaaaaattttccagatctcttgacgtcacagcgttgccatttgcctactgctgcttggatacagaatgcagcacttaacccttgtcctgcggggagggagtgattgagttgggtgctgtagttctggattacacaaccttttctttcttccttatctttgcttctgtctttgcttttttccttgttatttgcttttgatagaggagaaaaaggattatgattaagcattttgctgtggttttgtgtgttttgcttgttttaacagctctgtagcctgatttcctttaactgtttagtgcctgataggaaagttgggcttttaaatgtatg

SEQ ID NO: 269895 - DNA, 185 bp, Homo sapiens
taggaaacagttgctagtctagtccatacagtggcaactcattagaaaggagtgagccagcattgaaattctcataagaacagaaaagtggaattgagatggtctgagtactctaaatgaggatgggaaaggtaagtcaggtgatgtattaaggggcatgtagttctttggggataaaaaaagaa

SEQ ID NO: 269896 - DNA, 487 bp, Homo sapiens
gaaatttcttttttctcctcttccataaataggaggaaagtcatgattctcaagccattacagattctctgacacttgttaacggaaaattctgatgaggcatgatgagaacttctgcctataaaaatctcactaaagttctgagtcacaaattgttcacatacttcacagtaagcaggcaatccaatgtcaggacagttgtacacctttcttaggttgcctcccctaattggggctgtatttgacatgaggggccagttttgacactttttaaaaccatacacaaggatgcagcactaagtttttgcacataggcaagaatttatcttgtgattagaagttagttatatgttcattaagaaacatgacgaaatctgcagcaaaaattgaatttcataggccattcagtgttctctgcgataattctaattcagaaaaaaattgaatcttggtttaaaaaaattgtaataaaactttaccactggta

SEQ ID NO: 269897 - DNA, 500 bp, Homo sapiens
gctcccactaaatttattgaagcagtcccctgttggtagacatgttgtttccattttcagcataactaataatgtagcaatgaacttgtgcacgcagcctggctcactcagcaaggaaatctgtagtaaattcctagcggtcaaagtgctgagccaaagagtatgtgcattttcttttaggctattgctaaattgccctccaaaaaggtgtacacgaagcttcgctgtcccaacagcatgaggaggtttgatttatttcagggcatctgctgactgcaggagtttagctgggaacagacgtgccctcagaaccacaaccaacataaacgcatttccttcccaattttagcctttcccagggccaaaagatgggctgggataccttgtcacagtgtcaacttcgccccaaagagctctgagaggtaaatggctgtggtctaaatgttgcctttccgctatttgtttgggaataaaggctgtttttgttttgctctacaatc

SEQ ID NO: 269898 - DNA, 360 bp, Homo sapiens
gggctagtcattcttccaacattctgtgacagattcattagtttgtcttctgaactacatgccagcagggagtctgtaaaagaggttttgtaacaatggtacacttccaaaccagtcagtttggaagctcttggccctctgaagtttccctgaaaatcagtgatatgaggcagattgattaccaggaaaaaaggcatacaatttgatttaacgtgtatacacaggagtcttcagaatgaagacccagctccccaactccccaataaggtacagaagcttcttttttttttttttagatggagtttcgctttgaacccgggaggtggaggttgcagtgagcagagaccgtgccgtctcaaa

SEQ ID NO: 269899 - DNA, 489 bp, Homo sapiens
tgtgtggctctgggaaagctgtaagataaatgaagagaagagaatttgtgcatgaataaaattgaagacataaggaaatcatataattttttagcttgctgactatgcagtaggagattggattaagttgatttattacaatttttgttgttggagtttttttaaagattcacatcttcttttgttatatctctataagacatttgaatgtactgttatgtgttttaaactatctgagaatttataacagtaatagatttaaagctgttgatccaagaacttacaaaagttttggactacatatttgcttagagtaagctcagtaagtgttgcttataaatgatgttaatttatatgcatagaaccaagctatagtttgtataaagtttataattcaggtgttaaaggaaacaaagtgagtacaatagctgtgcttgaaacaccagaaaattattactgaaagtaaaaaaaatcttgtatttgaagcat

SEQ ID NO: 269900 - DNA, 323 bp, Homo sapiens
gaaaggtgtttctctgattattgcacaaggtccctgaatttaaagtagttttcctcttttttaaaaaccactttgttgaggtatgattgatatatttaaaaactgtacatattcagtctatacaacttgataaatttggggataaatatacacccatgaaaccatcaccaccatcaaggccataaacatatctatcacctcccaaagttttctttttatttgcccaaattaatttaactaatattcataagatatcttttgtattacgtaggaatttgggatggcatataagaccatgttgatttatgattttatgtgttaac

SEQ ID NO: 269901 - DNA, 387 bp, Homo sapiens
agccaattgcctgtgtccatccctctgtgcctgccatccctagtgcacctcttccagacacgacacccagagttaggcagcagagcctggcatacttcaagattcacccagaggtgtgctgatctcttgaaagcctccctcttctcatgataccacaggtaggggactgggtcagtggtaaattatagaatgagtatccacctgagactctcagctaactgtctcctctactttaaggattttcctccctttgacaagccctgcacttggatttctcccgagtgaaatacttggtgagggtttcactgacaggcttcttcccaggccccaggatgatcttaagattcctggaaataaactaagaagtaaatttaaggcagcatcttg

SEQ ID NO: 269902 - DNA, 360 bp, Homo sapiens
tgtggtgatgcaagtacctttatggccatcaccacggaactgtgctgggtcaagcctgaagccaacatggcactgggccttgcccaaggccctttccttcatggtggcgagttcccccagatcctgggtgtgtccagagatggtgtctagaagccagggaatggagtaaaaaaccctagcaatttacctgatgttcagttttactgtggctaagctgacactcaaatcacaatacaaaagccttcctgctcttcactcctctttccacaggcagaggaccctctccctgtggccattactaccaccatctctggtccacatggggttctgccagccactgctgatatttactgaaagccc

SEQ ID NO: 269903 - DNA, 181 bp, Homo sapiens
cttgaagtcagtcctgtccttctcctcctgatgtcccccagctgcctcctctggcccccagcttcataagggtggccccaggttgcttctctctcacacacacaggcgcatgtatgtacacgagcactggaccatgaagtctcagcgtgtgctcacagcctctcacacaggagtgggctgt

SEQ ID NO: 269904 - DNA, 251 bp, Homo sapiens
  misc_feature (16)..(16): n is a, c, g, or t
  misc_feature (25)..(25): n is a, c, g, or t
  misc_feature (45)..(45): n is a, c, g, or t
  misc_feature (51)..(51): n is a, c, g, or t
  misc_feature (144)..(144): n is a, c, g, or t
  misc_feature (232)..(232): n is a, c, g, or t
tattccagtgttaggntgagaacanaaattgtatggatcttaacntcaccntgttccagttttagctgggagagaatctatgtgcccactggtgtcagaactgtcatcttctgtttgaatgaagaaccttacagtgagaaattntcaaatggagtgctactgacatctgccacaggacaattctttgtcatgtgcaactgccccactttgaagagtgttaatgtctctgttncccataaccagtaacagcc

SEQ ID NO: 269905 - DNA, 383 bp, Homo sapiens
aaagtactgttatgtatactctgaaggccccaaagttagtggtatttgctataagggggatggggtgtgacaaagtttggccattgcagaaaatggcttctgcgagtcatagggaggaatttataatatgtcagttatgtcagagaagctatcccaaacagtatctttagttcataggctgcggatttattatgtgattatctcttgtattagtaaaatggaatatttattaaataccttgagcacactggatttttaaacatgacaagtttaaaagagatcactactcttaaggaaccttatcaacaaaagtgaatatgtaaaaggaggttcgggagtccgttttatttgtagggggaggaataggaagtggaaaaggaaat

SEQ ID NO: 269906 - DNA, 468 bp, Homo sapiens
aaggcaccgggcaccagctgttcatgctgaacatgcccctcgacccagcgacgccatcctgggcagatcccacaaagaagggcacagtcaggttcaccagcagaaacgcgctcactagaacatccggcagctctgttctgctggcgtctggaaaaggcattccatggtgctggccgtgtgctgcttcttgacctgaggggtgatttcttgggtatgttcgctttgtaaaaactgtcataccatacacacatatacgtgcttttctgcaggcatgttatactccaataacacgtttgcttttaaaacatggctggcagggggatgcagggtgatgagaagtttggtctgagtaaccctgaacccctagctctaatttgtttctctgtgactctacaattctacctgctcccctcagtaaataaacacagatctggattaaacatccaaaataaattttaaaatgagaaa

SEQ ID NO: 269907 - DNA, 295 bp, Homo sapiens
gcttgagcaagccagtgtaaaaattacaacagcttactgagccctgtgcagaagctgatattgagagcatggaggcttcctgctaaaggccagcatcagcttgtcagccacacaggtgaggctgggagaggatcctcagtcctgatcaagacttcagatgagatcacagccctggctgacatctgactgcaacttcatgagagaccctgagccacagcccccagcccagccactcctgaatttctggtccacagaaactgtaagagatgtaaataaattattattgctgctttta

SEQ ID NO: 269908 - DNA, 615 bp, Homo sapiens
agataaagcagtgcctgggtacaaagcaatgtctttgcccttgtagtacttacagtctattggggacaacagataaaaataagttaatgtataaaatatcaggtaggaatgagtgttgtaagaaaaggtagagagagagtgatggggttggaggagactattttagatagggtgattggaaaagcccctataatgaggtggcgactgaacagagacctgaatgaagtggaggagtgagctatatagctctctagggaaagagtgttccaggtggcgggaacaagaagtacaaaggtcctggggtgggaatatgttacattttattttatttttattttgagacatgatcttgctctgtcacccaagctggagtgcagtggtacgatcttggctcactacaacctctgtctcctgggttcaagtgattctccagcctcagcctcccaagtagtcgggattacaggtgcctgccaccatgcccagctaatttttgtatttttagtagaaatggggtttcaccctgttggccaggctagtctctaatcctgaccttgggtgatccgcccaccttagcctcccaaagtgctgggattacaggtgtgagccactgcaccc

SEQ ID NO: 269909 - DNA, 254 bp, Homo sapiens
gacacgagtttacttatataacacacctgcacatgtacccttcaatctaaaatcaaaaaaattaaaaagtgacaatatgacttactatgtaagaaggtcaactagcagtctgccataatctgctgcatgttttataatatatccgtgtatcatccatctttacgtagaatacagtcaactctcctcaagggaggtagattagttttctagggatgtcataataaactagcataagctggatggctaaaacaaca

SEQ ID NO: 269910 - DNA, 453 bp, Homo sapiens
ttcattcaataatcgttttatcagctgcatgttattctaatgttaaaaaaacataattactcaggaatggaaaaccaaacatcgtatgttctccctcataagtgggagctaaactatgaggatgcaaaggcataagaatgactttggcgactcagggaaggggtgagaagggggcgagggatgaaagactacaaattaggttcagtgtatactgcttgggtggtaggtacaccaaaacctcacaaatcaccactaaagaacttacttgtgtgaccaaataccacctgttacccaaaaacctatgaaactaaaaagaaattttaataaaaatttttaaaaaccaaacttagccagtctcttattgattttaatttttttgatgttagactatgatatgatgaatcctcttgcatggtcattaaaatacggtttttttctctgcattttatggtt

SEQ ID NO: 269911 - DNA, 457 bp, Homo sapiens
ggagggtgtgccgctgagtcactgcctgggcatctgggcctggaacctcggccacagatccatgatgtgcagttctctggagcaggcgctggctgtgctggtcactaccttccacaagtactcctgccaagagggcgacaagttcaagctgagtaagggggaaatgaaggaacttctgcacaaggagctgcccagctttgtgggggagaaagtggatgaggaggggctgaagaagctgatgggcagcctggatgagaacagtgaccagcaggtggacttccaggagtatgctgttttcctggcactcatcactgtcatgtgcaatgacttcttccagggctgcccagaccgaccctgaagcagaactcttgacttcctgccatggatctcttgggcccaggactgttgatgcctttgagttttgtattcaataaactttttttgtctgttgataata

SEQ ID NO: 269912 - DNA, 1488 bp, Homo sapiens
acacattccccaccctctgggagctcctagtctgagagaggaaacactcctgcccaagggagcttccagttagatggcagagagagatgcctctggcttcaggagtcccgagtctaaggagggaaacgactccttcagggagcttcttgctcttaggctgtagccatggctcctgccagactgcacaggagcccccatctgccagccggtgcatgtggccttgctccccagagcttgcgcagatgccatcaaaatgggactctggtcaccctgtcatttcccttctggcagacactaaaatggggagccctgccctcaggggggtgtcccaagtgccatcagaggaggcttggtgactcccagacacaagggaagctttagcgtctgccctcagggtgagatggaggtatcgcctccggcctcagggaaccacagtctgagggggagatgcagcccctgccttcccattcagagaggggttttgtgaggtggcttgggggcatagggcagaagtggatcctacaggctgagctaaggccccaagagcctcagcagtgtacccatcacctaggcacctctgcagccacagatccatgatgtgcagttctctggagcaggcgctggctgtgctggtcactaccttccacaagtactcctgccaagagggcgacaagttcaagctgagtaagggggaaatgaaggaacttctgcacaaggagctgcccagctttgtgggggagaaagtggatgaggaggggctgaagaagctgatgggcagcctggatgagaacagtgaccagcaggtggacttccaggagtatgctgttttcctggcactcatcactgtcatgtgcaatgacttcttccagggctgcccagaccgaccctgaagcagaactcttgacttcctgccatggatctcttgggcccaggactgttgatgcctttgagttttgtattcaataaactttttttgtctgttgataataaaaaaaaaaaaaaaaaaaaaaaaaaaaaaaaaaaaaaaaaaaaaaaaaaaaaaaaaaaaaagaggggggggggcgcggccgcaaaaatgttcccgcggggagggacaacaacaagagaggcacacgccccagtgtgttagtatgaacaaagaggggcggcacccaataaggaggggggggtataataaacaggatgaaggaggagggaggggcgaaataaaacagaacagaggagaggggagaaaaaaggagacaggggggacacttgggagagagaaaccaaaaatagggggggggagagacaaaatgaggggacacacgctctcagagagagtatatagaaaggggcgggggggaaatataaaaaattggagaggtgtatagagggggtgtgtaaaaaaaagaggaagaattagagtgggaggtggaaaaagtgtgatggaagaggaggggatgaatgtagacagaatatatgaagggaggggagtataaataaagg

SEQ ID NO: 269913 - DNA, 765 bp, Homo sapiens
  misc_feature (465)..(465): n is a, c, g, or t
  misc_feature (469)..(470): n is a, c, g, or t
  misc_feature (472)..(472): n is a, c, g, or t
  misc_feature (474)..(474): n is a, c, g, or t
  misc_feature (479)..(479): n is a, c, g, or t
ggacgcgtgggtcgacccacgcgtccggggtctgtctctgccacctggtctgccacagatccatgatgtgcagttctctggagcaggcgctggctgtgctggtcactaccttccacaagtactcctgccaagagggcgacaagttcaagctgagtaagggggaaatgaaggaacttctgcacaaggagctgcccagctttgtgggggagaaagtggatgaggaggggctgaagaagctgatgggcagcctggatgagaacagtgaccagcaggtggacttccaggagtatgctgttttcctggcactcatcactgtcatgtgcaatgacttcttccagggctgcccagaccgaccctgaagcagaactcttgacttcctgccatggatctcttgggcccaggactgttgatgcctttgagttttgtattcaataaactttttttgtctgttgataataaaacaanacannananaacanacccaaaaatttttggggcgcctcctggcccctagaaaagatttttaaacccattggttggggggccggcccccgattgtatacgtcaccgtggcccaaggcggcgcccaagaggaaaacgtgccaagacacaggcgggttcccccaataaaaacgccggggaccagcaggctcgtgcacacaccgaaggcgtgcgagccgaggcactaacaggcgccagagctgataatagcggccccgtgcataacccacaccctgtgacacgaccatcgacacaacaacacac

SEQ ID NO: 269914 - DNA, 448 bp, Homo sapiens
accgttaccgcaggtgaagcttggagatgatattgaccttattgtccgttgtgagcacgatggcgtcatgactggagccaacggggaagtgtccttcatcaacatcaagacactcatgagtggattccggcacgttggcgttgactggcgtcagaagctggaacttctgcacaaggagctgcccagctttgtgggggagaaagtggatgaggaggggctgaagaagctgatgggcagcctggatgagaacagtgaccagcaggtggacttccaggagtatgctgttttcctggcactcatcactgtcatgtgcaatgacttcttccagggctgcccagaccgaccctgaagcagaactcttgacttcctgccatggatctcttgggcccaggactgttgatgcctttgagttttgtattcaataaactttttttgtctgttgataata

SEQ ID NO: 269915 - DNA, 1044 bp, Homo sapiens
  misc_feature (5)..(5): n is a, c, g, or t
  misc_feature (7)..(7): n is a, c, g, or t
ggcangnggctcccctcaccccggtccaggatgcccagtccccacgacacctcccacttcccactgtggcctgggtgggctcaggggctgcccttgacctggcctagagccctcccccagctggtggtggagctggcactctctgggagggagggggctgggagggaatgagtgggaatggcaagaggccagggtttggtgggatcaggttgaggcaggtttggtttccttaaaatgccaagttgggggccagtggggcccacatataaatcctcaccctgggagcctggctgccttgctctccttcctgggtctgtctctgccacctggtctggcgctggctgtgctggtcactaccttccacaagtactcctgccaagagggcgacaagttcaagctgagtaagggggaaatgaaggaacttctgcacaaggagctgcccagctttgtgggggagaaagtggatgaggaggggctgaagaagctgatgggcagcctggatgagaacagtgaccagcaggtggacttccaggagtatgctgttttcctggcactcatcactgtcatgtgcaatgacttcttccagggctgcccagaccgaccctgaagcagaactcttgacttcctgccatggatctcttgggcccaggactgttgatgcctttgagttttgtattcaataaactttttttgtctgttgataatagtaaaaaaaaaacacacaaagaaaaaaaaaaaaaattttgtggggggccctgggccccgaaaaaaggttttgcagaaaccattgctgttgggggcgcccgcgggccccagtatgggttaggtgggaaaacggtggctcaatcgagcggggctccccaaaggaaaaacccgtggcacgagacaaaggggtctggggttctccccacaatgaaaaaaaaggcccgggggagaaccggaggctcttgggaaacaatccagaagggtcgtccgggggcccatgagggggctccaccaccggggctccaagggagctaaaaaaaagcgccgcgggggtgggac

SEQ ID NO: 269916 - DNA, 351 bp, Homo sapiens
ctcctgccaaagcgtagtacccaactgcccagtggggagggagagctgggaaccaacctgaatgtgtgagggtctgggtgtttggtggagctggggttggggctggcttggtgatgagtgtatttcctgtcactttcaggagaaagtggatgaggaggggctgaagaagctgatgggcagcctggatgagaacagtgaccagcaggtggacttccaggagtatgctgttttcctggcactcatcactgtcatgtgcaatgacttcttccagggctgcccagaccgaccctgaagcagaactcttgacttcctgccatggatctcttgggtactacgttggtagcgggatcc

SEQ ID NO: 269917 - DNA, 469 bp, Homo sapiens
ccgcctactactactaaatgcgcggtcttgtcgaccctgggtctgtctctgccacctggtctgccacagatccatgatgtgcagttctctggagcaggcgctggctgtgctggtcactaccttccacaagtactcctgccaagagggcgacaagttcaagctgagtaagggggaaatgaaggaacttctgcacaaggagctgcccagctttgtgggggagaaagtggatgaggaggggctgaagaagctgatgggcagcctggatgagaacagtgaccagcaggtggacttccaggagtatgctgttttcctggcactcatcactgtcatgtgcaatgacttcttccagggctgcccagaccgaccctgaagcagaactcttgacttcctgccatggatctcttgggcccaggactgttgatgcctttgagttttgtattcaataaactttttttgtctgttgataata

SEQ ID NO: 269918 - DNA, 984 bp, Homo sapiens
  misc_feature (5)..(5): n is a, c, g, or t
  misc_feature (7)..(7): n is a, c, g, or t
ggcangnggctcccctcaccccggtccaggatgcccagtccccacgacacctcccacttcccactgtggcctgggtgggctcaggggctgcccttgacctggcctagagccctcccccagctggtggtggagctggcactctctgggagggagggggctgggagggaatgagtgggaatggcaagaggccagggtttggtgggatcaggttgaggcaggtttggtttccttaaaatgccaagttgggggccagtggggcccacatataaatcctcaccctgggagcctggctgccttgctctccttcctgggtctgtctctgccacctggtctgccacagatccatgatgtgcagttctctggagcaggcgctggctgtgctggtcactaccttccacaagtactcctgccaagagggcgacaagttcaagctgagtaagggggaaatgaaggaacttctgcacaaggagctgcccagctttgtgggggagaaagtggatgaggaggggctgaagaagctgatgggcagcctggatgagaacagtgaccagcaggtggacttccaggagtatgctgttttcctggcactcatcactgtcatgtgcaatgacttcttccagggctgcccagaccgaccctgaagcagaactcttgacttcctgccatggatctcttgggcccaggactgttgatgcctttgagttttgtattcaataaactttttttgtctgttgataataatattttaattgctcagtgatgttccataacccggctggctcagctggagtgctgggagatgagggcctcctggatcctgctcccttctgggctctgactctcctggaaatctctccaaggccagagctatgctttaggtctcaattttggaatttcaaacaccagcaaaaaattggaaatcgagataggttgctgacttttattttgtcaaataaagatattaaaaaaggcaaataccatcca

SEQ ID NO: 269919 - DNA, 1111 bp, Homo sapiens
acacattccccaccctctgggagctcctagtctgagagaggaaacactcctgcccaagggagcttccagttagatggcagagagagatgcctctggcttcaggagtcccgagtctaaggagggaaacgactccttcagggagcttcttgctcttaggctgtagccatggctcctgccagactgcacaggagcccccatctgccagccggtgcatgtggccttgctccccagagcttgcgcagatgccatcaaaatgggactctggtcaccctgtcatttcccttctggcagacactaaaatggggagccctgccctcaggggggtgtcccaagtgccatcagaggaggcttggtgactcccagacacaagggaagctttagcgtctgccctcagggtgagatggaggtatcgcctccggcctcagggaaccacagtctgagggggagatgcagcccctgccttcccattcagagaggggttttgtgaggtggcttgggggcatagggcagaagtggatcctacaggctgagctaaggccccaagagcctcagcagtgtacccatcacctaggcacctctgcagccacagatccatgatgtgcagttctctggagcaggcgctggctgtgctggtcactaccttccacaagtactcctgccaagagggcgacaagttcaagctgagtaagggggaaatgaaggaacttctgcacaaggagctgcccagctttgtggggcattccagagaaccatgtgctgtgagggccttccgagtccatctgtttaatcctgtcattggagacttgagaaaccagagcccagaagggaaaagtgattgtcccaagatcacacagcactggagaaagtggatgaggaggggctgaagaagctgatgggcagcctggatgagaacagtgaccagcaggtggacttccaggagtatgctgttttcctggcactcatcactgtcatgtgcaatgacttcttccagggctgcccagaccgaccctgaagcagaactcttgacttcctgccatggatctcttgggcccaggactgttgatgcctttgagttttgtattcaataaactttttttgtctgttgataata

SEQ ID NO: 269920 - DNA, 580 bp, Homo sapiens
  misc_feature (5)..(5): n is a, c, g, or t
  misc_feature (7)..(7): n is a, c, g, or t
ggcangnggctcccctcaccccggtccaggatgcccagtccccacgacacctcccacttcccactgtggcctgggtgggctcaggggctgcccttgacctggcctagagccctcccccagctggtggtggagctggcactctctgggagggagggggctgggagggaatgagtgggaatggcaagaggccagggtttggtgggatcaggttgaggcaggtttggtttccttaaaatgccaagttgggggccagtggggcccacatataaatcctcaccctgggagcctggctgccttgctctccttcctgggtctgtctctgccacctggtctgccacagatccatgatgtgcagttctctggagcaggcgctggctgtgctggtcactaccttccacaagtactcctgccaagagggcgacaagttcaagctgagtaagggggaaatgaaggaacttctgcacaaggagctgcccagctttgtgggggagaaagtggatgaggaggggctgaagaagctgatgggcagcctggatgagaacagtgaccagcagtgggtggtatagccgatcctctagga

SEQ ID NO: 269921 - DNA, 453 bp, Homo sapiens
gtgagctcaccatgtgggggtgaggctgagagaaaacaagtacacagccacagatccatgatgtgcagttctctggagcaggcgctggctgtgctggtcactaccttccacaagtactcctgccaagagggcgacaagttcaagctgagtaagggggaaatgaaggaacttctgcacaaggagctgcccagctttgtgggggagaaagtggatgaggaggggctgaagaagctgatgggcagcctggatgagaacagtgaccagcaggtggacttccaggagtatgctgttttcctggcactcatcactgtcatgtgcaatgacttcttccagggctgcccagaccgaccctgaagcagaactcttgacttcctgccatggatctcttgggcccaggactgttgatgcctttgagttttgtattcaataaactttttttgtctgttgataata

SEQ ID NO: 269922 - DNA, 650 bp, Homo sapiens
  misc_feature (460)..(460): n is a, c, g, or t
  misc_feature (467)..(467): n is a, c, g, or t
ggagggtgtgccgctgagtcactgcctgggcatctgggcctggaacctcggccacagatccatgatgtgcagttctctggagcaggcgctggctgtgctggtcactaccttccacaagtactcctgccaagagggcgacaagttcaagctgagtaagggggaaatgaaggaacttctgcacaaggagctgcccagctttgtgggggagaaagtggatgaggaggggctgaagaagctgatgggcagcctggatgagaacagtgaccagcaggtggacttccaggagtatgctgttttcctggcactcatcactgtcatgtgcaatgacttcttccagggctgcccagaccgaccctgaagcagaactcttgacttcctgccatggatctcttgggcccaggactgttgatgcctttgagttttgtattcaataaactttttttgtctgttgataataaanaaaaaanaaaaaactcgcagggccagagctcctagaactgagctgcctctaccacagcctcctgcccaccagctggcctcacctcctgaaggcccgggtcaggaccctgctctcctggcgcagttcccagctatctcccctgctcctctgctggtggtgggctaataaagctgactttctggttgatgca

SEQ ID NO: 269923 - DNA, 989 bp, Homo sapiens
acacattccccaccctctgggagctcctagtctgagagaggaaacactcctgcccaagggagcttccagttagatggcagagagagatgcctctggcttcaggagtcccgagtctaaggagggaaacgactccttcagggagcttcttgctcttaggctgtagccatggctcctgccagactgcacaggagcccccatctgccagccggtgcatgtggccttgctccccagagcttgcgcagatgccatcaaaatgggactctggtcaccctgtcatttcccttctggcagacactaaaatggggagccctgccctcaggggggtgtcccaagtgccatcagaggaggcttggtgactcccagacacaagggaagctttagcgtctgccctcagggtgagatggaggtatcgcctccggcctcagggaaccacagtctgagggggagatgcagcccctgccttcccattcagagaggggttttgtgaggtggcttgggggcatagggcagaagtggatcctacaggctgagctaaggccccaagagcctcagcagtgtacccatcacctaggcacctctgcagccacagatccatgatgtgcagttctctggagcaggcgctggctgtgctggtcactaccttccacaagtactcctgccaagagggcgacaagttcaagctgagtaagggggaaatgaaggaacttctgcacaaggagctgcccagctttgtgggggagaaagtggatgaggaggggctgaagaagctgatgggcagcctggatgagaacagtgaccagcaggtggacttccaggagtatgctgttttcctggcactcatcactgtcatgtgcaatgacttcttccagggctgcccagaccgaccctgaagcagaactcttgacttcctgccatggatctcttgggcccaggactgttgatgcctttgagttttgtattcaataaactttttttgtctgttgataata

SEQ ID NO: 269924 - DNA, 456 bp, Homo sapiens
gtcgacagcgcctgctccagagaactgcacatcatggatctgtggcagaccaggtggcagagacagacccaggaaggagagcaagcgctggctgtgctggtcactaccttccacaagtactcctgccaagagggcgacaagttcaagctgagtaagggggaaatgaaggaacttctgcacaaggagctgcccagctttgtgggggagaaagtggatgaggaggggctgaagaagctgatgggcagcctggatgagaacagtgaccagcaggtggacttccaggagtatgctgttttcctggcactcatcactgtcatgtgcaatgacttcttccagggctgcccagaccgaccctgaagcagaactcttgacttcctgccatggatctcttgggcccaggactgttgatgcctttgagttttgtattcaataaactttttttgtctgttgataata

SEQ ID NO: 269925 - DNA, 1133 bp, Homo sapiens
acacattccccaccctctgggagctcctagtctgagagaggaaacactcctgcccaagggagcttccagttagatggcagagagagatgcctctggcttcaggagtcccgagtctaaggagggaaacgactccttcagggagcttcttgctcttaggctgtagccatggctcctgccagactgcacaggagcccccatctgccagccggtgcatgtggccttgctccccagagcttgcgcagatgccatcaaaatgggactctggtcaccctgtcatttcccttctggcagacactaaaatggggagccctgccctcaggggggtgtcccaagtgccatcagaggaggcttggtgactcccagacacaagggaagctttagcgtctgccctcagggtgagatggaggtatcgcctccggcctcagggaaccacagtctgagggggagatgcagcccctgccttcccattcagagaggggttttgtgaggtggcttgggggcatagggcagaagtggatcctacaggctgagctaaggccccaagagcctcagcagtgtacccatcacctaggcacctctgcagccacagatccatgatgtgcagttctctggagcaggcgctggctgtgctggtcactaccttccacaagtactcgggctgaagaagctgatgggcagcctggatgagaacagtgaccagcaggtggacttccaggagtatgctgttttcctggcactcatcactgtcatgtgcaatgacttcttccagggctgcccagaccgaccctgaagcagaactcttgacttcctgccatggatctcttgggcccaggactgttgatgcctttgagttttgtattcaataaactttttttgtctgttgataataatattttaattgctcagtgatgttccataacccggctggctcagctggagtgctgggagatgagggcctcctggatcctgctcccttctgggctctgactctcctggaaatctctccaaggccagagctatgctttaggtctcaattttggaatttcaaacaccagcaaaaaattggaaatcgagataggttgctgacttttattttgtcaaataaagatattaaaaaaggcaaataccatcca

SEQ ID NO: 269926 - DNA, 933 bp, Homo sapiens
  misc_feature (5)..(5): n is a, c, g, or t
  misc_feature (7)..(7): n is a, c, g, or t
  misc_feature (743)..(743): n is a, c, g, or t
  misc_feature (750)..(750): n is a, c, g, or t
ggcangnggctcccctcaccccggtccaggatgcccagtccccacgacacctcccacttcccactgtggcctgggtgggctcaggggctgcccttgacctggcctagagccctcccccagctggtggtggagctggcactctctgggagggagggggctgggagggaatgagtgggaatggcaagaggccagggtttggtgggatcaggttgaggcaggtttggtttccttaaaatgccaagttgggggccagtggggcccacatataaatcctcaccctgggagcctggctgccttgctctccttcctgggtctgtctctgccacctggtctgccacagatccatgatgtgcagttctctggagcaggcgctggctgtgctggtcactaccttccacaagtactcctgccaagagggcgacaagttcaagctgagtaagggggaaatgaaggaacttctgcacaaggagctgcccagctttgtgggggagaaagtggatgaggaggggctgaagaagctgatgggcagcctggatgagaacagtgaccagcaggtggacttccaggagtatgctgttttcctggcactcatcactgtcatgtgcaatgacttcttccagggctgcccagaccgaccctgaagcagaactcttgacttcctgccatggatctcttgggcccaggactgttgatgcctttgagttttgtattcaataaactttttttgtctgttgataataaanaaaaaanaaaaaactcgcagggccagagctcctagaactgagctgcctctaccacagcctcctgcccaccagctggcctcacctcctgaaggcccgggtcaggaccctgctctcctggcgcagttcccagctatctcccctgctcctctgctggtggtgggctaataaagctgactttctggttgatgca

SEQ ID NO: 269927 - DNA, 1239 bp, Homo sapiens
  misc_feature (5)..(5): n is a, c, g, or t
  misc_feature (7)..(7): n is a, c, g, or t
ggcangnggctcccctcaccccggtccaggatgcccagtccccacgacacctcccacttcccactgtggcctgggtgggctcaggggctgcccttgacctggcctagagccctcccccagctggtggtggagctggcactctctgggagggagggggctgggagggaatgagtgggaatggcaagaggccagggtttggtgggatcaggttgaggcaggtttggtttccttaaaatgccaagttgggggccagtggggcccacatataaatcctcaccctgggagcctggctgccttgctctccttcctgggtctgtctctgccacctggtctgccacagatccatgatgtgcagttctctggagcaggcgctggctgtgctggtcactaccttccacaagtactcctgccaagagggcgacaagttcaagctgagtaagggggaaatgaaggaacttctgcacaaggagctgcccagctttgtgggggagaaagtggatgaggaggggctgaagaagctgatgggcagcctggatgagaacagtgaccagcaggtggacttccaggagtatgctgttttcctggcactcatcactgtcatgtgcaatgacttcttccagggctgcccagaccgaccctgaagcagaactcttgacttcctgccatggatctcttgggcccaggactgttgatgcctttgagttttgtattcaataaactttttttgtctgttgataataaaaaaaaaaaaaaaaaaaaaaaaaaaaaaaaaaaaaaaaaaaaaaaaaaaaaaaaaaaaaagaggggggggggcgcggccgcaaaaatgttcccgcggggagggacaacaacaagagaggcacacgccccagtgtgttagtatgaacaaagaggggcggcacccaataaggaggggggggtataataaacaggatgaaggaggagggaggggcgaaataaaacagaacagaggagaggggagaaaaaaggagacaggggggacacttgggagagagaaaccaaaaatagggggggggagagacaaaatgaggggacacacgctctcagagagagtatatagaaaggggcgggggggaaatataaaaaattggagaggtgtatagagggggtgtgtaaaaaaaagaggaagaattagagtgggaggtggaaaaagtgtgatggaagaggaggggatgaatgtagacagaatatatgaagggaggggagtataaataaagg

SEQ ID NO: 269928 - DNA, 740 bp, Homo sapiens
  misc_feature (5)..(5): n is a, c, g, or t
  misc_feature (7)..(7): n is a, c, g, or t
ggcangnggctcccctcaccccggtccaggatgcccagtccccacgacacctcccacttcccactgtggcctgggtgggctcaggggctgcccttgacctggcctagagccctcccccagctggtggtggagctggcactctctgggagggagggggctgggagggaatgagtgggaatggcaagaggccagggtttggtgggatcaggttgaggcaggtttggtttccttaaaatgccaagttgggggccagtggggcccacatataaatcctcaccctgggagcctggctgccttgctctccttcctgggtctgtctctgccacctggtctgccacagatccatgatgtgcagttctctggagcaggcgctggctgtgctggtcactaccttccacaagtactcctgccaagagggcgacaagttcaagctgagtaagggggaaatgaaggaacttctgcacaaggagctgcccagctttgtgggggagaaagtggatgaggaggggctgaagaagctgatgggcagcctggatgagaacagtgaccagcaggtggacttccaggagtatgctgttttcctggcactcatcactgtcatgtgcaatgacttcttccagggctgcccagaccgaccctgaagcagaactcttgacttcctgccatggatctcttgggcccaggactgttgatgcctttgagttttgtattcaataaactttttttgtctgttgataata

SEQ ID NO: 269929 - DNA, 470 bp, Homo sapiens
agtaaaaaggcctagataggggatgtgccgtgtgtgatgctagggtagaatccgagtatgtaggagaaataaaatgtgcatagtggggattttattataagtatgtagagttaggtagatatagaggtctagggctgttagaacgtcctaggcaagtgacagcgagggctgtgagttataggtagacgggggacttgtggtggggaagtggggatggttaattggtacaaaaaatagaaagaatgaacaaggtctggtatttgatagaacagcagagtgactaaataatagtttaattctatgtttttaaacacctgaaagagtataattgggttttaacacaaaagataatgcttgaggtgatggatgccccatttaccctggtgtgattattacacgttgtatgcctgtatcagaatatctcctgtacctcataaatatatacacctaccatgtacccacaaaaatta

SEQ ID NO: 269930 - DNA, 328 bp, Homo sapiens
aataaagtatagcagtatagccagagtgagattgcccacattttgtaacactgggaattctgacctccaaaaagaagtctctcacctctgcattaaatctgaattaggcagagacataccacaaaggctatatatttatagctctttacctctgtcaggactcagcaaggatcttcggatgtttttaaggtttctgcactccagttattaccacatacagacagaatatcaaaatgcaggcttcctagagggacatttagtaagcagaaatttcttggtctcttccctcaaaaattctcttgcttatagcccactgatgttttggcag

SEQ ID NO: 269931 - DNA, 333 bp, Homo sapiens
ggtaaagcaacctgcccaagatcataaaattgtttagtggcaagaaaaatcggagtccaagtctccctgacttaaagaaccgtgctcctaacatctcagggcaatgacacatcctcatccaactccacccttccccattttggctttacatgccctctcttggacaattcaaattttatggacaaaacccatgtcttcttgggtgactgtggcctggttgccttccgagcttttctatatatacctggtaactatggcaggttctaacattttcctaagatacgttacccaaccagttatttcaaatcaaaaataaattcaaatatctctaga

SEQ ID NO: 269932 - DNA, 561 bp, Homo sapiens
tgagactccatctcaaaaaaaaaaaaaaaaaaagaaaaaaaaaaagaaacttcagcatccccaagatacacagtatagtgaaaacacaaatggattggcagtcaatgagaaaagaatcccagttctaatcatgctaccatctgtgaatgcttattaacctgggtttttttgttttgtattattttcaaatgaagcatttggattacagcagcatttcctaatctaaactatcctgcatatcaagcaaagtatttcaatttctccaccatgagccaggcacagtggcttacacctataatcctagcactttgggaggctgagggaggaggacagcttgagcccaagagtttgagaccagcctgggcaacatggagagagccctgtctctacaaaaaataaaaaatgacaaaatcagttgggcatggtgacatgcacctgtagtcctagctacttgggaggctgaggcaggagcatctcttgagcccaggaggtcgaggctgcagtgagccatgattgcgccactgtactccagcctgggcaatggagcaaaaccttgtctct

SEQ ID NO: 269933 - DNA, 473 bp, Homo sapiens
aaggaaatgacatgggaagaatgtcgatgcacatgttcgtccactgttcctcccacctccggtcctcatcacgcagagcggaccctgtggtccacgactggcatctgggctctgctttcccattgcagagacccctgtgagcacccgccacgcccaggccctgtgcagcactctgatgtgtaacaggaaaggcaggcagagtccctgctctcaaggactcacctttaaggactgcatgggagacagacaacaaaattaaaaatagagaacaaaatagatggcagagtgcaacgtgctgtgatgtccatgagcagagggaaggagaggcacagagagaaagggacagccgcttcgtcacaggcgaccagaagcattcgtgtgatgttccacagtttcttcaatcccatttcattttctttttcttccatcatatttaagcaaaattaaatttattatgttgtagttgaaaatgt

SEQ ID NO: 269934 - DNA, 356 bp, Homo sapiens
tgctttaacagacaaagagaacttttctaaaatctatttgaagcatgtgactggtgaaatgctgggttgctattactctcttttgaaaagtctactacaatgctattttagttggctatatatgaaattgattattaaaaatatccttggcccgggtgcccaaggatatatgaatatggtcagactcagatgttagacattttgtcaataaggagcttaccaattcataaacagatctttaagactacaagtgacaccatacttaaaaagaacacattttaaagcaaacatttcacaaaaatcatataacttgcttttatttctagacaattataaaaatatagcagtcatataaa

SEQ ID NO: 269935 - DNA, 146 bp, Homo sapiens
aagactgcatggcctctttatattataactgaaatttaaatataagcaatttgaatataggaaatttaaatataggagatctgtggtttgaaatcaggttatacatttatttatatgattactcaaatgcaaaaaaaaattgttct

SEQ ID NO: 269936 - DNA, 189 bp, Homo sapiens
tggcaaagggcaacatagatagggtttgggaattacatagtttgttttagtttcttacatacccaagagtactgatagctgctgctttgaacacaaagtgatcagtgtttttcagtgacctgagtaaatgggaaactatctttgtcattgtgtaattggcctgtatactttatccagaaattgaaaata

SEQ ID NO: 269937 - DNA, 473 bp, Homo sapiens
ctgctgttgagccctgagtggctaggggaaataggaagaggattgccatggcctggccatcttgttgctgcttggagagatcatatagctaatgaattaggcaggggagctattttttgaagatgatgaactaaatgttgaagacaagtttgagatctgtaaaatgtgattttttacttctgcttataatactcatgattggggaggattgtggaaatttaattatgatgaaaaacctctatcttttttgtaatgttggcatacttggggaatttagtggaaaatacattccccagcaggccttttgttggttgcactaactgcaaggttgctgggaagtagagtccatttggttgatgagctttgactgcggttttggaaccttacctctcctccttagcccaatatgctgtctcgggtcctattcttgttctccagctctcagtccaaataaagttatttctcctggttaa

SEQ ID NO: 269938 - DNA, 452 bp, Homo sapiens
ctgctgttgagccctgagtggctaggggaaataggaagaggattgccatggcctggccatcttgttgctgcttggagagatcatatagctaatgaattaggcaggggagctattttttgaagatgatgaactaaatgttgaagacaagtttgagatctgtaaaatgtgattttttacttctgcttataatactcatgattggggaggattgtggaaatttaattatgatgaaaaacctctatcttttttgtaatgttggcatacttggggaatttagtggaaaatacattccccagcaggccttttgttggttgcactaactgcaaggttgctgggaagtagagtccatttggttgatgagctttgactgcggttttggaaccttacctctcctccttagcccaatatgctgtctcgggtcctattcaaataaagttatttctcctggtcta

SEQ ID NO: 269939 - DNA, 313 bp, Homo sapiens
gtccatatacacacatgtagacataggcacagaccagggacaagatccaccaaatcgagttccagacagttcatgacctgcccctgtgcatctcaccaggcgtccagcagggccgtctaaagacagaccccaggagacccatggccaccatgccctgccccaaatggccatttaagcttcacaacaaaaagccaagttacaaaaggaactggcattaacactgctgttgtagtgagactctgaacccatccagtctgtaacttccagaatttctggtctacgttaagacaagtaatgtaagttgtttcaagct

SEQ ID NO: 269940 - DNA, 438 bp, Homo sapiens
cataaaagcataaacatctctttgatatcttatgattaataaaataattattgtcaagtataggtctaagtgttaatgatcaccggagattattattattaatttttgagacagagtctagctctgtcgcccaggctggagtgcagtggcccaacctcggcccactgcaacctccccctcttgggttgaaacgattctcctgcctcagcctcccgaacagctgggactagaggcgcccaccaccaggcccagctaattttttttgtatttttagtagaaatgaggtttcgccacgctggccatggtggcgcatgcctgtagtcccagctcgggaggctgaagcaggagaatggcgtgaacccgggaggtggaggctgcagtgagccgagatcgcaccaccgcactccagcctaggcgacagagcaagactctgtccca

SEQ ID NO: 269941 - DNA, 470 bp, Homo sapiens
cataaaagcataaacatctctttgatatcttatgattaataaaataattattgtcaagtataggtctaagtgttaatgatcaccggagattattattattaatttttgagacagagtctagctctgtcgcccaggctggagtgcagtggcccaacctcggcccactgcaacctccccctcttgggttgaaacgattctcctgcctcagcctcccgaacagctgggactagaggcgcccaccaccaggcccagctaattttttttgtatttttagtagaaatgaggtttcgccacgctggccaggctggtcctcaatgcctggcctcaactgttagtcaggatggtctcgatctcctgacctcgtgatccgcccgctttggcctccgaaagtgctaggattacaggaatgagccaccacgaccgaccgagactatgcatttaaaagattaatgttataaaaacattttgat

SEQ ID NO: 269942 - DNA, 519 bp, Homo sapiens
atactgtcagttgtccttgaagtaactggccctctttgttcatttctgagaaaatgtctgacatataaccagagcttagtaactatagcttatctctcagtcattcctgaaagttttaatgtgctccacgagggcaagcagctacttcagctgtaaattccaacacttgcccaagtactgcctcctgatgtggccactgtgcctatgcctgcctcggcctcccagtgctgggattacaggcgtgagccaccgcgcctggccaaaatatataaccttaagtgtaagtttactaactttggaaagtacatacaccagcataaaccaaccccctttcaagatctacattattttatttatttatttatttttttgagacagtttctcccttgttgctgaggctggagtgcaatggggcaatatcagtcaccgcaacctctgcttcccaggcaggagaatggcatgaacccaggaggcggagcttgcagtgagccgagattgcgccactgcactccatcctgg

SEQ ID NO: 269943 - DNA, 996 bp, Homo sapiens
aacatagactgtcatgatattgtggctttcttggggactttactgggggaaaaagacacatgaaacagttatatattgttctacttggagtgcttaagtgacttagaaaaatacatccctatacaatttcaggaatagcaaagattaggccagagtaattagggaaggcatcttggagaaggtaaaatctgagactgcccctaaaggatgtataggctttagataggtagaaaggtgactgtaggtattcagggtcatgagaaatagtatgaacaaagacaagaaggcagaaatgagaatggtgtgctgaggacacagataaggacattgacctgagaggaatgtaggcattgtattgcaagtagtagatgagattacctgtatggaattggatggagtggaaaactgtgaaatccaagccaagttattaaacctgtttatataaatattgaaagatttctagtaaaatgggtggtagtaatttttctaacattttattatgaaaaattttaacatacagcaaaactgagaattttacaatgaacacccataaacccaccacctagatatgtattcatctattcatatctattcatttatgtgttcatttatcattcatctatcagttcatttttttgtatgaattttgaagtacactccttaaatacttcaacttgtatgtcattaacagttcagtgtttgtttttcttttgttctaaaatgtgcatataattaaatacatttttttcttgctgccactgaagacagaagatacacacatcttaagtgtacttttgttgagttttaacaaatacatgtatctccataatccaaacgcctttcaagatatcaaatgttactacaccccagaaagttcccttatgttccttctcatcagtttttgttcccactgcccaaaggcagtgttccaatttctccctccatagattagttttacctgttttagagtcttaataaatgcattcttaaaaactc

SEQ ID NO: 269944 - DNA, 412 bp, Homo sapiens
ttctgtctagtgtcctaggcttcacacctagcctatgcttgttgtcctgttttgatcctcttcaaaaggtggtttataatcaactgtaagactttgacagttgctctcaacattcttctaaatgaaggaaggaaaagaaaggaaggaaggaaaagaatgaaaggaagaaagaaagaaagaaagaagaaagaaagaaaggaaggaagaaagaaagaaagaaagaggagcctggaaaatccagtttgtatgaccagggagaagaatggattagagcagccactagtcagtctcttccaagcaagaaggaccacccctgagctgttttccagctggacatgcctggacctgtattccactcctctctaaaatgcaccttatttttcttcattaaattctgttacttaacccttgc

SEQ ID NO: 269945 - DNA, 474 bp, Homo sapiens
ttctgtctagtgtcctaggcttcacacctagcctatgcttgttgtcctgttttgatcctcttcaaaaggtggtttataatcaactgtaagactttgacagttgctctcaacattcttctaaatgaaggaaggaaaagaaaggaaggaaggaaaagaatgaaaggaagaaagaaagaaagaaagaagaaagaaagaaaggaaggaagaaagaaagaaagaaagaggcaatgtcattcctgttctccccagaattggtgaaatcagcaacagaactattcatttcattgagcctggaaaatccagtttgtatgaccagggagaagaatggattagagcagccactagtcagtctcttccaagcaagaaggaccacccctgagctgttttccagctggacatgcctggacctgtattccactcctctctaaaatgcaccttatttttcttcattaaattctgttacttaacccttgc

SEQ ID NO: 269946 - DNA, 279 bp, Homo sapiens
atatcggtaaagtctaggagagacccagtcctagagagaggatctctcaaataaagcagaagatttccaagcccatttaaaagttcacaaaaaatgtcacatgcaaaagcataaacctaaacatcctgaaaggaggggaaatccggtgtttccactacctactacttcccaggtgaatatctctatagttttccattacaagaaagaattgcggtcaaaatgacccccttgcagtagatctattcaaataaaagagcatttaatttttgtatttacagc

SEQ ID NO: 269947 - DNA, 270 bp, Homo sapiens
caaaatgagtgaactgtggaccctgcctttaactagctcatgatcttgtgagagatgcacataaaatgcagatagattatgcacaatgacataaagataaacactaataagccagacttgtaaggaagcaggaggccaactatagaagaaggttcaaggaatatcctagggaaaggtcacacctaagctgactcttaaaaacaagtaagctttgacaaaaagaagttggttggccgtatgaggaaggagaattttaaaggagaccataaa

SEQ ID NO: 269948 - DNA, 464 bp, Homo sapiens
catctatacactgtgttctagaagtatgttaatttggcttaaagaaaaactataaattctttgtcttcattcagaaatcagtaattctcaaaagggaaggtagtttataacccctaggaagatcagtgattctcaaaaggtggtacggtttataacctctaggggtcacatccgaatctcctgaggaaaatgctgaactatgcaatcccttctcaactttcccctagagacagattctaacaacattgtctcctatgaaagatttcatgattactgtcatgaatcactattattgatgggagaaaaagtttatatcaggtatattgagatgcaaaaggaaaagaatcactgttataagctgaaattgttgatggaagtgcacaggaaacaaaacagcagcaagatattacacaattagctgacatgtatagtgacatttttgccagattacacacaaaaaaata

SEQ ID NO: 269949 - DNA, 485 bp, Homo sapiens
agaaaaagtagaaactgtaccaagaacaggaaggacggattggcaccagtgaattcaaacaataaccaggtctcaagcagtagccacctccagtctgatacaaaggattactccctccccagtgccagctggagccccatcatggtgaggctctacaatgagttcatggagaagactgtggatgggtcatggacaagacttccaggttgttggtgctctgtgcaattccttaaagaagcagaccttactaagattgctaaagctgtccctgccatcttcttacaaatgaagtgacgcagatgcaaggtgctgcaaggcccacctcctcctgctctgacaggcagacaggaaaccaaagcccctatctgagcagcctctgtctctcccattcacctccagcttcccatgtggacctttgccttttccttcttggatggtggaaactcctccagatgtcaagacttgctgtgaataaagttttaaga

SEQ ID NO: 269950 - DNA, 368 bp, Homo sapiens
gaggatgtaggggtgcagggggcagggatgaggcctgagctctgggagtagctatagggatgggttcaaggagatagtcaagacaaactgtagggctgaagagtcggggctgcttccctcaggcagttgggtggctcagaagagttcacagcagagttaggggcagaggaaggcacaggtgaggcttctggtacctgtgttactggtggagggtcttgactaggaattttccaggtccttggcgttttgaacaaagtagcagaggggcagacgtggtaatccccacactttgggaggcctggatgggcagatcacttgaggtcagtccgagaccggcctggccaacgtggtgaaacccgtctctacta

SEQ ID NO: 269951 - DNA, 388 bp, Homo sapiens
ccttcaggtcgccaacactcctcctaatttcaaagaaattaccagcaggtaatttcaaagaaaagggaatagaggccctgaaaggtgaggagacttaaataatactatgtcagattcaggacagagcaagagttggatacgaagaaatgggcttcctctattgcgggaaagataagagagttcagttacacagcaggaaatctgaccccagagactgaccagaatagagaactaagggcatgacaccctcagccctgtaaagttgtagaaataagatgataatgatgatgataatggttattaccaaatgttgagcaactgttcaataacagcactaattgtgtgttcattggctaattgttaattaaactgtgttaactgttttgca

SEQ ID NO: 269952 - DNA, 448 bp, Homo sapiens
ctcatgcctgtaatcccagcactttgggaggccaaggtgggcggatcactggaggtccggagttagagaccagcctggcccacatagtggaaccccgtctctacttaaaatatcaaaaattagcccggcatggtggcgtgtgcctgtagtcccagctacttgggaggctgaggcaggagaatctcttgaacctgggaggcagaggttgcagtgagccaaaattgcaccactgcactccagcctgggcaacagagtgagactctgtctccaaaaaaaaaaaaaagaaaaaaaatggttttattttggcttacagttcaacaggttatatacgaaacatagtactgatatctgcttctggtgagggcctcaggaagcttacaatcatggcagaaagcaaggggagctgtatatcacatgacaagaggagaagcaagatacagaaggggga

SEQ ID NO: 269953 - DNA, 467 bp, Homo sapiens
ctcacagagtgtacttacactaacctagatagtagcatccagtaaacacctgggctatatggtctagcctattgctcctaggctacaaacctgtatagcatgttactgtactgaatatgtaggcacttgtaacacaatggtaagtgtttttgtatctaaacatatctaaacataggagaggtaatgcattgtgctacagcattacaatggctatgacagacactaggcaataggaattttccagctccattataatcttaagggaccaccatggcacatgcagtccattgttgaccaaaagttgttatgtggtgaatgactataattggcttttcagagcaaccactcacaagggggtgtagtatagcttactagacaaaactgcagccgctgctctgttttttgctcttagaaaactgagtacctgatttggacaaaatcataataaaatttagatagagccaaca

SEQ ID NO: 269954 - DNA, 345 bp, Homo sapiens
gagtttggtaacatttttgtgggtgattgatgtggcttgggggaccatgtcttgcttagattggtggggcttgtggggaccatgtcttgcttaaatacatttagaatcatatctctttgaaagcactgtgctttcaaaggttaaaggtatgttgacacacttccgagaatgcttaggactgtctaggttttatgcctggtaccctcatgtaattactatagcattccttttcattctcaaaagtattctcttttagataaagaaaatggtcaatgtatttatggatgaaataaattggctatgcattgaaaattattaacgttcaaaaataaatatgaggatgta

SEQ ID NO: 269955 - DNA, 232 bp, Homo sapiens
tgaaggccggactacaaggccctcaagaacaggagactttgggtcctcgctaacggccttgggagaccacgcaagactggtcagaaaagccaggtagaaaggcttttcatgggccgcgcgcggtggctcacgcctgtaatcccagcactttgagagggcgaggcgagcggatcacttgaggtcaggaagttcgagaccaacctgggcaacatggtgaaacccccgtctctac

SEQ ID NO: 269956 - DNA, 554 bp, Homo sapiens
cttccttgtgtgtatcatttaatttgttcctctatctcatgtgtttcttgtaaactgaaagttaggtgtagagattgagtctaaatatttttggcaagtatatgtcgtaggtaacatttgtgctttatactgcatcatattgggagataaataatattatattgccatctctgttagtgcagccattagaaagacattgtgcctatgtctgtctctttgctgtgtttggtatctgttgagagccatatttttataaaaatcttaaagcattgtcctctgtgaagaaaatatattagaaaaattacacttgacagtataagaattgttgatttgaataaatacatgatttttagaagacatatgtatgaccagcaggaatagtagcctaataggcctttgtttgggacagaatacacttcagatcatccagaaatctaaaatcaggcctgtgtgcctttgactggtatcttccatgtggtgttgaagagtttgagaatttaaaagaaaatgaattaatactaagcaagacacacttttttctttgttccttaaaa

SEQ ID NO: 269957 - DNA, 417 bp, Homo sapiens
gatgtgggaacagtctgatcaggggtcagcaaactctcgctcgccgcctgtttttcacggacccccagctgaaaatttaaatatatatatattttttacatggttaaaagaaactatcggccgggcgcggtggctcacgcctgtaatcccagcactttgggaggctaaggcgggtggatcacggagtcaggagatcgagaccatcctgactaacacggtgaaaccccgtctctactaaaaatacaaaaattagccgggcgtggtggcaggcgcctgtagtcccagctacttgggaggctgaggcaggagaatggtgcgaacctgggaggcggacttgcagtgagccgagatcgcaccactgcactccagcctgggcgacagagcgagactccgtcccaaaaaaaaaaaaaagaaaga

SEQ ID NO: 269958 - DNA, 371 bp, Homo sapiens
gaattctttctggcaactagattgtcctgagatcagaacaatctaatccatacatgtcctaactttgccttctgctgtatcagtatctgcaactaggaaggacagagaggagacctggcctcccctggatgtttatgagctgcagatcttcagggaacaaaggctgtggacatgccattgatttgggaccagtgtttttgagtatccttaatttttggtatcatctgtggcagataggctgctctccttaagtcatggcttcccggttgaaacaagacatgagattaacccacttttttcatttctaaccaaagagaaggaaactttgtaaagtcttaatagattaataaaaacaaaagcttctgtggaaa

SEQ ID NO: 269959 - DNA, 809 bp, Homo sapiens
gagtggtgactgaaaccacacgccatgttgggagacttccaaacaagtctagagagttggcacttagggatgaagaaatcatcttctgggtacacttggtctttcctgatgacgcttttaagagaaaggcagagttgaccctgggctttcaaaaaactgttctttcaggcaaaacctcagagagaactggctgctagtgatcctctgcagagaccttgaagagcacggcaattatgaaacttcaacaagaaaagatttaagctgatcttttaaaaaaatatatactgtcaggaattttgtagaaatgactttaatgtaataactgcttctttgacttatgttttgtcttgtggtgaaaagaaaaatatttataaaagcatgcctgtgtcctaaaattggggacacaaacttaaatgactgaaggcacttgaggagtggaggcaaggatggtgaaaccaggccctgtaccaagcaggagagcgtgaacctgctaaagagagtgactgcttctcatttccagtcaatgcgactggtgtcgcattccagtcaaatggagttgcgacaccatttcagccacagcgattgatctggattttctgtaaaattccctgatttttacatattgccaattaattaattaattaaaaagaaatgtagatgttcaaaaaaaataaaaaaaaaaaaattgtggggggggggccaaaagtttacacaaattggggggggcgcaaggagtgaagtggtaggggcaaaaacgggtaaagggggtcacaaaaaacggggcgggtgaacaggggggaagggaaggg

SEQ ID NO: 269960 - DNA, 453 bp, Homo sapiens
gaaaatttattatcttactggaccttttcatttttgaagcagattaatttggaaacttttacaaattgatgagcaaaattatttgtttccatttgaattgatttaataactgaaaaagttatttttcatgtttttatcacttataaaccttctataaatttatctttaatttctcttttccacttttctgtttcagcctcctggtatttttaaggaaatgtaagagtgtgaatcaggtactgatggttttgacttcattatgatcagcatctttggcttccatcagagtagacactgaacgttttcatccaaccggatgatgagtgcattagtgagtatttatttagttcataatacatgttcctgccacactccactgtaatttgtttcagactgactaatgtaatgagaaatcttaccaaatataaatggcactgcagatcaaaacccact

SEQ ID NO: 269961 - DNA, 473 bp, Homo sapiens
cagttcatcattatctccactcgtattacagctttctaactggtctccaattgtatacccaattttgtccccttcaggccattcttctcatttaggcagtagtgatctttgtcaaatacaaagatgactgggtgtggaagattgggaagaagaaggaattggggggcagctcgcagatttttttcttagatacctgaatgaattcatatcagagaaaacaggagaggaatccggtttttaggagaagattttttttttttcctactgggctagcaggactagatgaagaccttcagaaaccctgggcactgagaagatcataaggtctcttcccaaatataattaaaaataaaatactaaggtgaaatatattttaattattatttttgaacttattttttccaaatgttttccctcgagtctgtgcatgtgtgccctaaatacatgtttcatcggctagttggataatcctg

SEQ ID NO: 269962 - DNA, 416 bp, Homo sapiens
ggtctgcaaatggagagctccctcaagagtgccctttccagagagaagccctcacctctgccctgtgtgatgtctcagaagccactaccagatagccacggtttctgcagtcaaagacgtgctggaggggacagaggtgggcctctggagccagaccccctggggctgactcctgcttccactttagtcggcccttgaacaacaggggtttggactgcatgagtctacttacatgtggatttttttcaacaaaagttacactaaatttgcctgcctctcctgcctccccttcaacttctgctacccttgaaacaacaagatcaacccctcttcttcctccacctcctcctcttcctcagcctactcaatatggagacaaggctgaagacctttacaatgatccacttcaacttagt

SEQ ID NO: 269963 - DNA, 501 bp, Homo sapiens
tgagacggagtctccctctgtcgcccaggctggagtgcagtggcgtgatctcggctcactgcaagctctgcctccctggttcacgccattctcctgcctcagcctccccagtagctgggactacaggcgcctgccacaaggcccggctaatttttttgttatttttagtagagacgcagtttcaccgtatttgccaggatggtcttgatctcctgacctcatgatctgcctgcctcggcctcccaaagtgctgggattacaggcgggagccactaggcccggccatagcagcatttttaaagatgtaccagaaaaactcaaatgtccatcaactgactaaagaataaacaaaatgtagtaaccataaaatgaaagaagtactgatacatggtacaacacggatgaaccatgaaaatattctaagcagacaaagccagtcacaagacacacattgtacgattccatttatatgaatgcctaaaataggcaaatccgtacagg

SEQ ID NO: 269964 - DNA, 402 bp, Homo sapiens
tggctgcaattgatactcctttttcttgaaagcctcttctactttgattttctggatacttcagtgttctaattttctcctttctgtgtcctcttttcctcttatgtacgtatagatagatgttttacatgttttagtcagtgtccctcctttttctctagggtacctcttcaaatgctttcatggattcctataactcatcagctctctagtcatagtctgacctcacatcctagtatccattttatttctcaactacctactaacatctactcagatgtcctgccagcttctcaaacccagtatgtcttagcacagactttctctccctcccttcttatagttccttttagtttttctatttctattatgagcatcacagttctactagtggcctaagtt

SEQ ID NO: 269965 - DNA, 296 bp, Homo sapiens
ccccagtgagcacccagaccacatgcacctgggggttctcagaagcaggccttgtggaacaaggcagctcactcaagtcattagaagtgacatttgaagatggtcaagattcaaaacaacacacacacacgcatccacccatgcatgcctgtatgcacacagcacacacgtgatactgctgttaataactagaagcccaggatccaccctggataatgaagatcaaccactgagccaaggatgaaaagggagagactggcaaatcaagaaaagcagatcaatacagagggaaacat

SEQ ID NO: 269966 - DNA, 280 bp, Homo sapiens
tctagggtcaagttttataggaagttatccattgaggcatgctgggctagagttcattgttcctcagcaaggctcttctgttttgtttttgtttttgttttacggggagatggagtcttactctgtcactcagggtgaggtgcagtggtctcagctcactgcagccactgcctcccaggagaatcacttgaacccgggaggcagaggttgcagtgagccaagatcgcgccactgcactccaacctgggtaacagcgagattccgtctcaaaaaaaaaaga

SEQ ID NO: 269967 - DNA, 499 bp, Homo sapiens
ccacttccttgctatgtgacatcattggcaggtcaatttatctgagccttaatttcttcatctgtaacataagagggttatacaaaatcactgctaagggctatggtatatgtgcctataatcatcattttttttttaactatatgggtatgttcaacctttttgtacttctgctttactttctaccaccctgaaaccaagaaaatggtagagatagaggaaggattcagtgtggttagaaatcttaacaaaatggtatacacccccttccccccagtgctttgattttaatacagttcttcagagcaaatatttgctgatttacctaatggcagtgttagtattgctttttgtttactacctttctttgaatgacatcaggcttttggtagccaaatgttgtgctgggctaagaatgcatccacacgagcactgagctcccttatatgtttgctcttttttctttgtaagtcttcttccataaagaaatataatatca

SEQ ID NO: 269968 - DNA, 431 bp, Homo sapiens
aaaggggccagatgaacagagcaggggaggtgcaagagggagcagggctgtcctgttggccatccagaacattcccttgccctggctccagtgactggctcaggcctaggtgctggacctcagtcatgtgaatgagccatcattggacttccagaatgattgggaaagagctgccatctttctgaaagaatgtaaaggaacaggcctaagagcgaagccagcacagaaggaagtggcccagaagacagaaaggttccgaaaacaaacatcatttagctgctgtgtccagctgtgcccaaagctaatccacacttagcttttcgctgcgtaaactaatacattttcttttttctcaagccaaggcaaactgatttcctttgacttgcaacctaaaagtcttcaccaaatatagcaatattgaaaatttttta

SEQ ID NO: 269969 - DNA, 379 bp, Homo sapiens
gaaacccaagtgtttgattccactctactaagcagcctccaccccgagagattacagttgtaggttgctgccctttctcccttttgcaatccttggagcatgaccagtttccatgatataaatctaggaaagttacatcttaggcagctttcttgtttatccaggccaggattgagaatttcctttatttaggtataataaacatgtatctgtgatatgtattgagatgaatagctttatttttccttagatattaaaacctatactaaagtttattacaacccattttgaagatattaaaacagatcctaatcccttacacaacaaacttttacagttttttttttttaattaaaaggagtgctttttcttgctctta

SEQ ID NO: 269970 - DNA, 551 bp, Homo sapiens
aaaaaagttaccagcttatgtcattttaaagaacactcgccctgaaaacttctgagaggttggccatttgaaaccctggttttagtgtctgtattattagtgaactaccgtgttcccatgtggctacacaaccacaattatgtactatctggctctttaccaaagtttgcagacctctaatctagagtgcgacatttcccctcattaactcttaggtcccttggctctaaaagggtatattcatcttggccctatacagggaaagggggaatgggattaatgatgtgctttgtaagaagaaccaattttaattttcacaaaggcttgacgtagctgtgagagaaagggtaagaagaagcaggcttcttcttagaagtctgagatggcctaaagtggtgggggaagaagggagagtggggagaaagagaaacaagaaaagctgagagtgaattccccagagaggtagccactgattctgccctactctttgctggaattctggaaaacacctgggcttctaaaagatagggagctcatgcatcatggtaggg

SEQ ID NO: 269971 - DNA, 479 bp, Homo sapiens
tgtgttatatgtagacgtgcttaatgaggcaaaagataatggattccttttaggcacagaaaagctgctaaaggaaatgtaattgggctggaaagttgggatttattggacttttctccttcccaaatcagaactatatcatccttatgaaaatattagcaatgtggctaagaaaaatgagacaaagtaattactgcattatttaataaccttgctctatttagagaaaattctcctatgaaacctgtagaactctacacatgaatctatcacagcatctgtaatcctgggacctcaaaagtacaatggctgaattatgaggccttgtcttgtctgtgaaatgaaaggatggttttattgtattttatgtatcataaatcctaaaactactttaaaaaagtaattgtatagggaaatctgtcatttcctcctctctgttgtctattcccctttattctggtaataaaatcttgatattc

SEQ ID NO: 269972 - DNA, 471 bp, Homo sapiens
tgaaggtagttcaaactagggggcaggcttttctagttttggctagaatactccctccccaagtgcagcagaggttgttctatacccctgaggacagacggggtctggggagaggggatgtgttgctgtggagcctggtgaactaatgtggtggtgttactcccaatctaaggataaattgccagcgccatggctcacgcctagagccccagcactttgggaagctgaggtgggaggattgctttaggccaggagtttgagaccaggctgggcaacatagtgagaccctgtctctaaaaaaatatattttttgattagttgggcctggtggcaggcacctataatcccagctacttgagagtctgaggcgggaggattgcctgagcctaggagtctgaggctgcagtgagctatgattgtgccactgcactccagcctgagtgacagagcaaacaagaccctgttcttaaa

SEQ ID NO: 269973 - DNA, 272 bp, Homo sapiens
tgaaggtagttcaaactagggggcaggcttttctagttttggctagaatactccctccccaagtgcagcagaggttgttctataccccctgtctctaaaaaaatatattttttgattagttgggcctggtggcaggcacctataatcccagctacttgagagtctgaggcgggaggattgcctgagcctaggagtctgaggctgcagtgagctatgattgtgccactgcactccagcctgagtgacagagcaaacaagaccctgttcttaaa

SEQ ID NO: 269974 - DNA, 623 bp, Homo sapiens
gcggccgctaagaggagaccaagaggcgggggctgcacttgacaaccagcatgccgagatgtcagaagaggcagaagtggatgtgagagaaagagagacacagagagacagagagccaaagagggcaagagacttgactttaagagactcctgtactgacaactccatgcagttcggaaccagaacgactacggctgaaccagggttcatggggacatggcaaaacgctgatactaacctcttattcagaatgtcccaacaggccatccgttgcacactggtaaactgcacatgtgaatgttttcagccagggaagattaacctgaggacttgtgatcagtgtaaacatggctgggtggcacatgccttggataagctcagcacgcagcacctgtaccaccccacccaagtggagattgtgcagtccaacgtcgtgtttgacatcagcagcctgatgctctatgggacacaagcagtgcctgtgcggctaaagatcctgctggaccgtctcttcagcgtcctgaagcaagaggaggtactgcacatactgcacggccttggctggactctgcgggactatgtccgaggatacatccttcaggatgctgctggcaaggtgctgg

SEQ ID NO: 269975 - DNA, 435 bp, Homo sapiens
tcaaaaaatccaccttcacttttcagtcagaagaggcagaagtggatgtgagagaaagagagacacagagagacagagagccaaagagggcaagagacttgactttaagagactcctgtactgacaactccatgcagttcggaaccagaacgactacggctgaaccagggttcatggggacatggcaaaacgctgatactaacctcttattcagaatgtcccaacaggtaagttactttctttcttgattttttttttcttttttttaagaaaccttgaattgttatgggcacttttgtttctggtgtttttctttctaaatactttttaaaatgtggtcacttcctagttaggctcttgttttgtcataactgtgttactggaatgtgcagggttacttcatggtttccctaagggcgtcttaaaagaaaaagg

SEQ ID NO: 269976 - DNA, 452 bp, Homo sapiens
cctctagccttggagttggcagtgggatgacagcacccactctttttgcccctagcattacaactaattgcttcattccctctctctgcacagaaaccctgaaatcgtgtctccaatgacttctgctcagaggtgaaacacagcattctttccggctgccttatactgtgcagtgtcctgggtgtggggcaatgaggaagtgacttgggttttctagtgtgtaattttcctctgaaatgcatggaacagcaacaaaactaccaagatacattgcccagaatggtttcatggtagcactgaatgcattctacctgtcattatgtcaataaaaaaatttttaatatctgctgctaaaaaataaccaaatgccaaaatcatgtattctctctaaaacagatttttagaaatttgttgacctcctttcttgaataaattatccttgttaacagcaa

SEQ ID NO: 269977 - DNA, 852 bp, Homo sapiens
gcggccgctaagaggagaccaagaggcgggggctgcacttgacaaccagcatgccgagatggcacaccttgggcccaccccacctccacatagccttaattacaaatcagaggacaggcttagtgagcaagactggccagcatatttcaaggtcccatgttgtggggttgatacatctcaaattgagtcagaagaggcagaagtggatgtgagagaaagagagacacagagagacagagagccaaagagggcaagagacttgactttaagagactcctgtactgacaactccatgcagttcggaaccagaacgactacggctgaaccagggttcatggggacatggcaaaacgctgatactaacctcttattcagaatgtcccaacaggccatccgttgcacactggtaaactgcacatgtgaatgttttcagccagggaagattaacctgaggacttgtgatcagtgtaaacatggctgggtggcacatgaaaccctgaaatcgtgtctccaatgacttctgctcagaggtgaaacacagcattctttccggctgccttatactgtgcagtgtcctgggtgtggggcaatgaggaagtgacttgggttttctagtgtgtaattttcctctgaaatgcatggaacagcaacaaaactaccaagatacattgcccagaatggtttcatggtagcactgaatgcattctacctgtcattatgtcaataaaaaaatttttaatatctgctgctaaaaaataaccaaatgccaaaatcatgtattctctctaaaacagatttttagaaatttgttgacctcctttcttgaataaattatccttgttaacagcaatt

SEQ ID NO: 269978 - DNA, 467 bp, Homo sapiens
ctgtggctgcttgaggggcgagctggtagttgtgttttcagggatcttttttagagaagggagttttaacagggaaacgcggtggaaggcgtggcatataaactcttaattatagggacgtgaagttttcaacatgtgggaccaaaacaaatccttgctttcagtaagaactgcggagagcaatagaaaaagaacttgatttcaaagtccaagtttggtattttgagaaagcaattgcgggaggaaaaagatacttttaagaagtgaaagaatagaattctgatttttgtttatttcctatttcaaaccctgtctttttcctatgtggagattttgtgtgcccaggtcactaactgggtgtgattgactttctcgagggggcggggaaattgactccatacaccgattcaggaccctctcatcagtgctttaaggctctcttctggagcaggaaggaaaaaaaaaaa

SEQ ID NO: 269979 - DNA, 1249 bp, Homo sapiens
gccttcagtctgtgtcggaacctgccttcttcctggttctgcacattatcaccactgccctccccatttctctggccaggccccatgtatttacaggtaacttgggtagcctccatggtgcttggagaaggctgtgactttctgagtgataccccatttcagccatttagcccctcttcatcagagaaccttgttcatgattggatgcagagatcaagatcatctgcctcctcaagtggtccagcctccctgcagtaggcccagagcaaagaagcaggtaagccaaggaactgcttatccagcttcttgaccaacttgctggttttcacagtgatgctgtgaagatgggggcctgcccaagcatttccaccagggtccactgtacagagctggtcccaagtgtccaaagtccatttggcctcaatactgcagccaatatttcccccagaatcagcaaccctttgacccttccctttgtcagagcactggggctccaggcaacagtcctgtgaccatagattacttcctggatcctgatgaacttgtttggttagaagggatttctccaagttccctctgtgagctggagggatttctgccccaaagcgcgacaggttcagaatggtccccagcttgaggcctgcctcttcctccagcctttccaggcactgcatgcattaactgatttcagaattcactctttgtttacttccatcccattgcgaggccaggtctcgccagcctgttgtgagaggacatgttaggtgaggccattacaccttctggaaaccttgaccaagaggcggggtatcacatctatctattcatttatttatttaactgatatttattgagtacccactatgtagcactcagtgtactgggtgttgaaaataaagcatgagcaaaacaaagattcctgcccccatggaatttatgttccagtgagaaaggtagactagacacaacaaatataaaaacatatatatcaggctgggcacggtggctcacacctgtaatcccagcactttgggaggtggaggtgggaggatcacttgaggccaggaatttgagagcagccttggcaacatcacgaaaccccatctaattttttttaaaaagctggatgtggtggtgtgcacctgtagtcccagctattcagaagcctggggtggaaggatcatgtgagtccaggagtttaaggcacaccagcctgcgtgagagagtgagacccaatcttgttaaaaaa

SEQ ID NO: 269980 - DNA, 666 bp, Homo sapiens
actttcactttaataaatcttgccactgcacactctttgggtctgtgtgtttctctaatcgagctgtaacactcatcactgcagtccacagcttcatttcttgaagcctgtgagaccacgaacccttcaatcgagaaaaaccttcgataaggagaagacttctcatctcatttctggggtctggtccgggatttctccaaagcgaatagaatccatgaagctgcaaatggttctacaaatggagccccaagtgaccaccactagcacctactatcaagcacccctagacccacccaccaacctgttctcacaccacgacaccaaagactcccctcctgaggaaacctcaactgcagtgccccttctaccccccagttcagcaggaagtagctagaacaatcgtcatccaacttcccaacagcacttgggctttcctgttgaaaggggggactgagggactaagtggctaaattggctggacttcctgggtcaatagggacttccctaaagtgactttcccctaagccaaaatgagtcatagctgcaagctaagagattaaaacttcaaccaatcaaaggggattttcccctaagccaaaattagtcatagctgcaagctaaagggattgaaacttcaaccaatcaaaggggactttcccctaagcc

SEQ ID NO: 269981 - DNA, 493 bp, Homo sapiens
gttagccctctttcttttatttctggccacagcacacttgaacatacccacaccaagatttagattcagaaaagggatgtaggtggcctcatctggctcatagcctcagccacttggtccaactcaacttcttaacatagactctatgttagaatatcatatttgtacagctgttaataaagctgcaatttggtactaatatttcctctgaataacagccctcaaggaaacccccaaaagaagatgaactgattgaccaggcagaatttaagctttgccagggctatctgaacatcaaaatacagtcataagcctatctttgccctaaaagtatattctggggttgctgcctgcaggtattaaatgagttactgcatgtaaaatgcttagctttgtgcctgtggcactcataaaatgttagcttaaatattgctaaggagagttcggtagccttgataggcagaagtcatcacgagcttaacccaaggggagt

SEQ ID NO: 269982 - DNA, 188 bp, Homo sapiens
gaaaattttcaggtctctgtctggcttagaaggatcactgcaatgcgatgccactgtcttccttcaggatgcacccatgtgctgagggatgtgtgcattcacccacttaggaggctataatcaaagctggcggtcagagctggtgttggaccttcctactgccaagtatgagttgattaatagcgtga

SEQ ID NO: 269983 - DNA, 579 bp, Homo sapiens
cacagaacacagcaccatgctagtacaatacgctgtagattctccctccctccccctctctctcatatactcatatattttatgttgaaccaatatgaggcattgctcaaatttaagtcatattaaagttctaggctagttttgaaaacagaaactgattggaagcagaggttttcaaatagcccacatacgctactagaaggctgtacatttaagagagggccatctaggaagcaataataggcattaaaacaacaacaaaacaacaaaacaaaacagaaacaaaaacaacttgggaaacggccctcctttcacgttttttctatcccatcgacaaaggcgcgctgtccttagctgcgatgattttgtctcgcctccaaaaagacgcccacgcactatgttgagcacccaagtgaggctacggttcctgcggtcacagagggcagggaggctcaagcacctccaaaaccccgagccctggacagctccccaggcccttcccgcggcgcgaggacaagaggtctccggggccctcgggggagcggcgcctcctcctggttccagcagctctgcggccgc

SEQ ID NO: 269984 - DNA, 473 bp, Homo sapiens
gtttaaatatgaagatgcatatagatttagaataagtgagtacagaaaggtataccatactaacacttatcaaaagaaagagacgtagctaaattaatttcagacacagcagacttcagagcaaggttaaagaagagcattgcataatgataaaggagtcaatactccaagaaagaaatcataaaaatccttagtgtgcatgtgcctaacaacaaaccatcaaaatacattaggcagagcctgataaaacagcaaggagaaacagatgaatgcactattacacttggggacttcaacacccctctttcagaactggacagatccagcaggcagaaaatcgttaagaacacagctgaacttaacagcaccatcaatcaactgatatcagtagactacttcattcaacagattacacattcatctccaattcccaagacattcacgaagatagacgcaattcttagtcataacac

SEQ ID NO: 269985 - DNA, 252 bp, Homo sapiens
ctctatagggttttaaaactgatttaataataaataaaaatttccaagaaaacagcactgaaggaaagccacaggaccttgtgaaatttaaaaaagtagacagagacaatgcagtgtccatagaagctgtgaagttgacagattgggtttgaatcctgcatctgtcacatacggagtttcggttgcctcatttataaaatgggcctgataatagtaccatataggatggctgtgaaaaagcaaaagaagaaa

SEQ ID NO: 269986 - DNA, 350 bp, Homo sapiens
tctttcagttatgcccgctgacttatgaggatttttagaaatcctctctgtaccggaaaaaacttgagcggtgctggtgttcccagcaggggggacaaaggttgtttttaaagatttactaaatttgcattgaccccgcccacttctaggacttaactttggagcttaattatcccctagctctggttgcctcagccaaaaccaatgtttgaaccactttgacctctgatttcctttctagcttcaaaattgtataaaatgtacacaccgtcagtctcctacatttgcctgccttcttcctaccactcccttattatccaaaccaggaaaacaagttcagactccaaaga

SEQ ID NO: 269987 - DNA, 209 bp, Homo sapiens
gcacatcgtgtgtgtgtgtgtgttgtgtgtgtgtgtgtgtgtgtgtgtatcttactaatgttcacagagacacattcttcctgagttcttgggaagcatgtcaatcttacccccaaaaacatcctacaattatcaactaataattcgttttctagaacttgacaggtagccaagtgctttgtcatattttatttatttgcgtacccatt

SEQ ID NO: 269988 - DNA, 478 bp, Homo sapiens
agctgctacccatgactttaaaaaataaacagatactgattatttatggtttttgagcagcgttctgcgtacaaaggcagaatagctgtggctaaataaggggacatggttgtggcttcccacttctagttattacataaaatgtaaatctgacataatcattatcaaacagcataattgagtaactgttaagtcagactaagtaaaagctaagatgacacagtctttcattttagggaaaacataaaggtattttatttttgccctagaagatgcaaacttttttaagagttcttgtttttgttttttgttttgagacagggtttcactctgttgccagtggctcaatcatggctcactgcatccttgaccttcctgggaggagcacttgagcctgggcagtggaggttgcagtgagccgcaatggtacgactgcactccagcctggaggacagaatgagaccctctttcagaaaaa

SEQ ID NO: 269989 - DNA, 482 bp, Homo sapiens
acactttctcccaggcctgtgtttcaaacttctcaattaaagaggctgttgagatgtgcgtggggacatgggtgtgagttcttccctctctggcttgttgagcttctggagaactggtgtcctgggctcagctcggagcccttcctgtcccctccttcggcctgccacaccccctccccacgagcccttcactcctttgtggccaactgaggctacccctcagacagcatttgcattttaataagacccaaagtcaaaagataaaacagctattcccaaacacagggaacactaacaattgtctcttccagcaggagtttcatctttgtccaaaaaatgaggagaacacaggaaacttgaaagtattatccttgattatattatccttttatgattcaatgtttgcggcaggtggtagtacttgctatttttaatgtcctatttgacaaaataaaatattggcaaccctgaaaaaaaaaaaa

SEQ ID NO: 269990 - DNA, 411 bp, Homo sapiens
tgaatctggagactgtgaaggcaggagtaagtgcacagcccgtgacttggctcagtgtgtgctgagagaatccgtccccggcaccatggacatgctagaggtgtgaggctgcagaacaccgctggaggacggacttgtgcctatttatgtgaaagaagatgcttggcaggcaatgcgctactcactcgtgacctttatttctcacattgtgcattttcaaggatatgtttgtgtggatatctgcttagtgttaccacatggtattctcagcatgttaccttcacactgttgtgcgatgaaactgcttttagctgaggatatgctctggaaattcctgctcagtttcactgcagccctaatatgtacatatactgcaggagctacatataaagctcttatttactgtatatt

SEQ ID NO: 269991 - DNA, 511 bp, Homo sapiens
tgagattttaagatgaatatgctctcaaaaagctctgtgctggtcttcttaaattaattacggaaatttatagaggaaatcaagcaaataattctaatgaaaagaatcaaaagagtattttctaattttgcgatctatattcctggaatttttttttcaaagttctgaaacccatttcttaagcatgaacaaccacttttttaaaaaggttaggctgggcgcggtggctcacacctgaaatcccagcacttcaggaggccgagccgggcagatcatgagatcgagagatagagaccatcctggccaacatgatgaaacccgtgtctctactaaaaatacaaaaattagctgtgtgtggtggcatgcgcctgtagtcccagctactcgggaggctgaggcaggagaatcgcttgaacccgggaggcggaggttgcagtgaaccaggattgcgccactgcactccagcctggcaacagagcaagactccatctcaaataaataaataaaaatt

SEQ ID NO: 269992 - DNA, 337 bp, Homo sapiens
attaaaaatcaaaacctcttacaatgtcattaagagcgaatcaatactttaagaaaaccttgttccaacataggggaccaatctttagaaagacttataaataatttccttttaattatagccaacttaaacacacacaaaatttctttcttaaattctcttttcatgaacctgatacagaccatttatgacatgcttactttatcctacacttcctttttcttaaataccaagtcattttactttaggacaaaaaattattattcaagattttttctcacacaaaattattttttctttaaccttacttaataaaaatatatatttatgtccacaa

SEQ ID NO: 269993 - DNA, 777 bp, Homo sapiens
gtatagtccctatcttcatgtcctgtacattccctatcttcatatgctatacagtcgctattttcatatcctatatggctcctatattcatatcccatacattccctatcctatacattccctaccttcatgtcatatatggtcctatcttcagaccttttatggtccccatcttcataccctatacattccttatcttcatgtcctgaacagtctccatcttcatatcctatacattccctatcttcatttcttaacagtccccatcttcatatcctatatagtccccatcttcatgtcctgtacattccctatcttcatatcttcctatcctatacattccctatcatcatgtcctaaatggtcgctgtcttcatatgctgtacattgtctatcttcatgtccaatacattccctatcttcatgtcctatacggtccctatcttcatgtcataaacggtccctatcttcgcatcatatgcattccctatcttcgtgtcctatacattttttccctttatattctattcatttctgtgtgttaggaggtgaaggcattttataggagtctggaaagaagcctgagaagttgtattttcccctcacacctgcctttaccagacccctgttggagaatgacagtagagcttaatcagagtgtgacctctgacttttcaaactgaagacctcaaatctccaatttttatctgaaaaaatattagaatagtttcactctctttatgaacatggagacgtttttggattgctacggaagta

SEQ ID NO: 269994 - DNA, 225 bp, Homo sapiens
ccgctgatgaaggctccttagagtgccctgttccttagagatataggcgctactccatgaatttcaagctgtctaaacaactataatataatccttctcacaacaggaatctccattgccccaactcttgtcttcctcctcccataatgctgtcacctctctacccctccccaggacaaaggggcatctcatttggccagccacagaaataccccaacgtaccta

SEQ ID NO: 269995 - DNA, 399 bp, Homo sapiens
taataatttaaatgcctatcaatggaaaacaaatgaaattggttacagtaaaattgctactatgggaggcagctgagatctagaattgttttcaaaatataattttaagtgtaaaagtcaatgtcctgcaacacacacatacacatacatatatgcagaatgtgttgatatcgtatacagtatcctagaaaaatacagaaaatgctggcaatgctggttgcctctggagtaagagatgggaatgttaagaaatcccacttttcattgtaaactctgttgtatctttttaaatttgaacctgttaagaaattttaatcaatttttttaaaacagaaaattaaatagtagagagtaattaatctgattaatattgtgaaaatacctttctggcaaaaaaaa

SEQ ID NO: 269996 - DNA, 452 bp, Homo sapiens
taaaagaggcagcattgaaatatacatttagactttaaaaattataatggggttccagctgaagactgttatgagccaatgcctttacttccaaatgaccatggaaatgactggatcagagcagggacttgacggagccagcatcgacaacctgaatttcaaagctcttctgggaagtacatggaagtgctaacagaataccctaatatttccaacttcaagtgtctaaagtagccccagagaagggacttctagttctagcatccagagctgtgtccagcctgcttctggtgatgacatcctggtgtgcggagcaagctaaggaacccaaggcataggctctgagtcataggggactcgcccaaccagatagtaaaatagattatacagttgtaaaggtaatgatactataattaaagaaaaaataaataaacagagtataaagtccagaa

SEQ ID NO: 269997 - DNA, 387 bp, Homo sapiens
ttcactgttatgaagctctgggagttatttaaatctctcagcatgcttcctctgacggtgctgggatggggcactgcctcgttactgcctggtgaggatggagatccaggtttcctcctgtcgctgtcctcgggacctctgctgaggcctttctgctggaagtaggaggagcaccctaatggcaccgtgggatagggagcaggccatgttaggctggatggtgaaagttttcagcctgtgacgttgtctggtgtgggtgggtcccctttttttgtgtgtggtattttgctagagtaaggtagttatttcctaaaacttatctgtcctgttagttttccttcttaagtacctaacaaatataaagacaatgaactttaagcaataaaa

SEQ ID NO: 269998 - DNA, 211 bp, Homo sapiens
taaactactgatatttcctacttgggaaaaacaaaacaaaacagaacaaaaacctgtatttcaaaattagctacttcaatcattgaaggctggattgaggctgctttatagtccatgaaaaccacctctctttataaattctaaacatttaaaaaatctttgctcgtgctggaatgtcattttctagtattttggccacttcaccatgact

SEQ ID NO: 269999 - DNA, 517 bp, Homo sapiens
ctagaatggacagagatgacattcatgccaaagaccatgttgacttgctatctctacatttgctctaagtttagaaaaaaaaaatcccttcaatttatcctccaacagtcttcttagaaccttaccatggatgccttgtataacacatttcacctttctggtaaaaaaaaaaaaaaaaaaaaaaaaaaaaaagtacccctcttcctttcattaaatcttgcttttcccaaagccagtgattttaatctcttcaaaatactgccttctaatttattagaatataggctctgttaaggaaaaggccttgcctatatctgttaataatttttaccttgtaatcacagtgaagagcattgaatttgccacatggtaagtattcagtaaataaatagatataaggtgaaataaagtagtccacccatcccttttttattcggttgtttactgtgttcttggatatttttaaaaatgtgtcttcacagatgtaatttagagacattgtatctagtccaccaaa

SEQ ID NO: 270000 - DNA, 686 bp, Homo sapiens
tgggttgagtatatagttcatctcttaagctattacgcaaagtgcacattagatctgctgtagtcagtctgatatttttgtttaattttctgaagttttctgggaaagcagtctatatttgcattcattaatctacttgtttaaactttttgaattaaaatttattttcgcaattcattttatcctagaggacaaatacaattaaatatagtgggtgttttcatctctcattttttgcattttaccaaatgcccaaaagtcaacaggaagagatacctctttggtcaggaatgtaaaaacaggaaggaggaagtctattgcaaatctgtgctggctgattatgaattcaggtttcaccatggaggatgttcattaatgatcatcagtgtgctgtgctgttattcaaaattacagtgagtattaatgtcagtaatacagaatgtcaacactagttataggaggcaatgttaactaacacacgacactagacttttttctgtgcgtggaaacaggatactatttgtgagaacaagtcaagtaaaattcaacatcagaaatatacagtaatcctttaagatatgaatgtatcttttaagaaacatattaaagtatatcaattctgtcattacaaattctttgacagaatctcttcaaataaattagaggaagcatctgggcattatttt

SEQ ID NO: 270001 - DNA, 569 bp, Homo sapiens
gtggcgggcacctgtaatcccagctacttgggaggctgaggtgagaggatcgcttgaacctaggaggcagaggttgcagtgagccaagatcacaccactgcattccagcctaggcgacagaggaacagtctgtctcaaaaaaaaaaaatgtggataactgtttaatctgggtgaggtgtatgtagtgtcattatagtttccctttttgtgtgtatatttgaaatatttttataataataatttctaaaactcataattacataaaaaatgcttatgaaaaatattaagtgaaaaggcagaatataagcttgtccattcaacattactatgaccattaactagtgatgcattaacgtgttgatgccgagttgcaagtcatctgttaagatgttcaaatttgcaatgattttacttatattttagtgaagagctaaaatacagtttgatgctagaaaatgtttatgggactattttaagcatgtttaagtgtgacaggaaaaagaaagtgtgagaatcactgtaacaaacacatacacctatccatacacacccatataccattaaaaaaa

SEQ ID NO: 270002 - DNA, 253 bp, Homo sapiens
cgagactctgtctcagtataacaaagtatacctatcaaattattttgaccttttctaaatgtctccctttaatagaagtttcaataaagctataaagtggcaaaagacaaaatacctaacaaaatgtagattggattgtacattttaaaataactaaatgagtataattggattgtaacacaaaggataaaagcttaaggggatggataccccatcatccatgtgatcattacgcactacacgcctgtatcaa

SEQ ID NO: 270003 - DNA, 402 bp, Homo sapiens
ctgtatttgtcaaaaaatgtcaaagtcatgagacacagaagctgaggagacattccacatttgaggaggctgaaacagctggacagggcccagctgatcctgtgccgggaaggatgctgccaggctcgttgacaaaatgaagtgtggggacatcaaggccactgtcctgaagcagtagctgcacagcagccgcgtgagagctgctgtccccgggaggcaggcggctgtggagaagggaagacatcatgtgtgcgcctgtgtgtgtagggggcaaagcagattgggggagtgttgtcggctaggagctgggatggaaggcaggttggtttccctggtgatgttctagtcttgcaactgttcaagtctgaaattatttccaaatgaagagtttgttgtgtgttt

SEQ ID NO: 270004 - DNA, 413 bp, Homo sapiens
tctcaaaaaccctcacctctcagattctgccttcactcacgtatgcattttactatttcaccatcaacttaaaatttgcctcttttctatcaacttaaatttctttttaacttgtttcagatgtggagaatccatttaaagccaaagggttaactcctaagctgcatgtttttcgaaaagaacaatctagaaatatgaaaatggtaagactaacatgggtgattcctggtttttttcatggtagaatgccctacatgagaaaagccacaaggactggccttgttggccaggcacagtggctcatgcctttaatcccagcaccttgggaagctgaggcagttggatcatgaggtcaggagttggagaccagcctggccaatacggtgaaaccccatctctactaaaaatacaaa

SEQ ID NO: 270005 - DNA, 295 bp, Homo sapiens
gcatttcagttttaagtggttgaaaaatcttataaattgacagttcacttctcacaaaagttaagtccattttataacagactttctgaactgaggctaattttatacaaaagcagtaatacattctgtattatattctgagaaccttttattgggggatctcaaattatttacacaaggccagtgcagtggctcatacctgtaatcccagaactttgggaggcagaggtggggggatagcttgaggccaggagttagagaccagcctagccaacatggcaaaaccctgtctcta

SEQ ID NO: 270006 - DNA, 366 bp, Homo sapiens
gtgagcaggtagcctgtaagtgtatttcagtttgtgccagcattcccaaagtgtgtcccatacactgttccctggaaccttaataggtatttctattttaaaaaaaaagtatttcttggtcaaacaaacagaagaactactgagttaaagttaaataggtcaatctacaacagaatatttcacagcatttaatatgctattatttattatctgtttccagaaaaggtatatgaaagtgtttttgggccaggcacagtggtgcacacttataatcccagcactttgggaggccgaggcaggaggatcacttgaacccaggagttcaagaccaccctgggcaacagcgagtcctcgtctcctaaaaaa

SEQ ID NO: 270007 - DNA, 420 bp, Homo sapiens
gctcactgcaaactcagcttccctcaaacaatcctcccacctcagcatcccaagttagctgggaccacagccatgctccaccatgcccagccatccttgcttctttactacatttcttttttcaacaaatatttatcaagtaatattgtcaagtaatatttatgagcttcccctcagataggcatttagcatcatgatggcaccatcctctaacaataatgggaaggctattttccactgttattaatcattaattctccaaatcattttagtattattattaattctaataagtacagagattaataaatgcattcaaaccacatgtgaatatttgctataggtttatctgtgcctactgtatgttcagatttttctttatatctgaactttgttataaataaatgacagtaaaaatgg

SEQ ID NO: 270008 - DNA, 403 bp, Homo sapiens
aggttcagactgccattcagaagaggagaaaaaaggcagtggtcccaccttcccctttctagacgcctgtgaacactcctgggaatgaatgcgattgttctggagagcaagggagagagctggttagcagaattttattagagcaactggctcgtgactgtcacattaaaatgattcaagctgaatggtatttaatgatttatggggtgaggccacctgtccctgtgaaagcttcatattaaccatggcctggagtcatgggatttttacatgggaaaatgtaaaaggttgatattactagggttgagtctctggggattacatggggaagttaggagaaccaaggaggaggagggagggaagacgaattagtgagtcaaatattattcttcagaaaaccagc

SEQ ID NO: 270009 - DNA, 384 bp, Homo sapiens
gaaagaagaccatctacaagccagagagcagccttcacgagacactggatttctagagccttgattttgaacctcccagctttcagaactgcttcttcttcagttgacctcttgaagtctcggaggaatggccatttgtcggggtatgtggggaagcaggcttattcttttggacctgtgaggaatggttcctgctgacaactccatgcaaaggaagattggtagcaagtcactgatagacagtttttcacatggcctggctcctttcaatctgccaggtgtaccaggatcattcctatgaacttgtcaacagatacattcacgtattgatttacgatgtcaccaatacctaaaacaacattccttaaaacatttgaagtaagt

SEQ ID NO: 270010 - DNA, 352 bp, Homo sapiens
accaaagcctcccaggagcttattgtcctgcaggagtgcgtgcagaccaacatcaaagaagatggttctaactcctcccacctcccaccttctcctctcattaagaaatgtagccccaccgcgacagtcttggagaagaagccgggaacgggacgcggcaaggatctctgtgacttaaatctggcctttctggcccagtctcccatttggcacttcttcctggatgcgcatggtagtggcattgtgctgtatcctgcctgggctgtggcctctgctctgtactccctcttgctctatctgccataggagcctagaggcttggtctggcttaaagtcttcaacaaagaacact

SEQ ID NO: 270011 - DNA, 356 bp, Homo sapiens
ttaatagattttgtacagctggcccccacagtctgttctagaactgtttgaaaacttcttggaacaacagaaaaaaaatatgaaaaaataattgctgatgttaagcaactctctccctgtaggatgttttttagtgtcggagcttgagactaaagtcttggagtcttggtcacaaaactgcatggagtgttgtttatttcttggagaaccgtgattgagtcagtaagtagttaagtgcttcctaggcagtagctagtgccaggtgctgaggacgccaaggcagtggtgtttggaaatgcctttggaagagctctggatgcgagaggagctgggctggctttatcatgcagtcgagg

SEQ ID NO: 270012 - DNA, 540 bp, Homo sapiens
tttcttcctactgcagctcgttattttacccccactttgaccacaacattgctaggacgttggggaaacagaagtgtgtaagacaccacctctgccctcagaaaaatgtatcatctttcaggagagaaaggcacccccttgcgttgcagagctgagtagagcagggcactttacgctgcgtgtaaaatgaatggtgtagaagttaagttctggaagaaggagtggagacactgctgggaagaactagtcagggaacactgaagagaaacctggacttgaccttctctgtcttaaagggatggtaaggtttccataaagctgggatgaaagagaaatccagatggggaaatctgtgtgtgagtacaagagaaggcccaaggcaagttcagcttagtgtccaactggaacaataggactcccctatttctctctgctgtattaatgtggcttgtattatttaatggtacagtaaagtaattagtggctttcaaactctttagactgccacccacagcaaaaaatacattttacatcatgata

SEQ ID NO: 270013 - DNA, 509 bp, Homo sapiens
tcagatccagagcccagagcgtccaggctggagtttaggacgttcatcagagtcccgagacgcgcgagtgggtggaaccgcgtggggcgggagaagagggggagattaggcagcaagaaaatggtccccgtgggcagttcagcctaaacctggagctggggaagggcctctggagagaagccttaaatcgttactcatctttcacagtcttttataatcgtgaatgagccctccgttgtagactgttaatgcgtgtccaggatgcccgagagtgggggtaaaacaataaaagactcctcctgttgtgattaaaattatatttgctttttgtatcctcctaagttccatgatattgaaaatgtgtcttgttatatttcataaatgagcttttaaaaaacttctgagatatcttccaaaaagtatcactcaccagggaagaaaagaagaggaaacctagtggcttttctgttgacgccaaaggttactccctctgcctcaccataaaaaaa

SEQ ID NO: 270014 - DNA, 1076 bp, Homo sapiens
tgagcatggccatgtttcaataaaactttatttataaaaataggaagtgggccacatttgccaacccctgtgttaaactgtcacccagagtagattattaggatctgcacagctgttgcctgccgcataacaacctagaagccagattattgtcatcttcatcattgagacattcaatgtgctttttcctgttctctcgatcaacatcaaaagcaatcaacacagacagaagatgctgtgaccacatgtggagggagacttctctccaccactaagcaaacaatgagctctgcagcagacaccagccaggtgcccgccaattcaattccattgctatctatgtggagatagcatcagatcccacaggctaggggctcagtccccaagacttgcccacttcagacaccagtcacaagtccaggactctggaacttctgacggacaggcttcaagttggggttcccatgacccttctgtggatttgattaatttgctagagcagctcacagaagtcagagtaacacatttactgattggttgtttataaaagatattataaaggatacaggccgggcactgtggctcacgcctgtaatctcagcactttgggaggctgaggtgggtggatcacctgaggtcaggagttcaagactaacctggccaacatggtgaaaccccatctctactaaaaatacaaaaattagccagggatggtggcgggtgcctgtaatcccagctactcgggaggctcaggcaagagaatctcttgaactcgggaggcggaggttgcagtgcgccaagatcgcgcaccactgcattccagcctggacgacaagagcaagactccgtctcaaaaaaaaataaaataaaatgaaggatgcagataaaggaatgcataggacaaggtatgggggaaggggcagagcttccacaccctccctggcacaccaccctccaggaacctccacctgctcagctgtccggaagctcctgaaccctgtcctctcaggcctgttatggaaacttcattggataagcatgattggagcatggacaactgtgtcaaaatgggattg

SEQ ID NO: 270015 - DNA, 357 bp, Homo sapiens
gcagtcctcccacctcagccccctgagtagctgggactacaggcatgactacgcccggctaatttttttttcttcagtattgttaagtgaggtagggtctcactattttgtccaggctggtctcaaactcctgggttcaaaggatcctcctttctcagccacccaaagtgctggttttacaggcgtcagccaccatgcccggctggaactatcttttcaaataactcctgctaaggattgtagcttagtgtgggtgctttagtactgaacctccttggaacttttgcattatttatctaaagcattatagcagtgagtctagagccagaaagagtgcctcttttatgatatgcataa

SEQ ID NO: 270016 - DNA, 397 bp, Homo sapiens
tgctgctctccacacactgcctagagggtggccttgctcggtaggagcagtcatggggctgtaaaactgcatcctcaataaagctgtatcttctaccacatgctcaggaaagaaccatgagccttattgggctaatcgccaatttgggtgttcacctgccctgcatcagttgtgcctgtgaaaaactactgcactccagctgtgaccggttgagggtaattgtccaggttcttggtgttttgcacaaagaattcgacaaaacacacaaacaaagcaaggcaatgaaagcagagattttttttgtttgtttttttaattaccgtgcccgcgagacggagtcttgctgtgtcgcccaggctggagtgcagtggcacgatctcggctcctgggttcaagc

SEQ ID NO: 270017 - DNA, 456 bp, Homo sapiens
acactttcttacaacaacagccactgtgttggctggagagggatggggtgggcccaacggagacacaaggaggtagaggagctaacccctctactccactttcaaaactacattttaaagggaatgtgtatgtgaagagcactaccaacatcgcttttgttttaagttttcctttttgcttgtttttaaagccaaaacaaaaaacaaccaagcactcttccatatataaatctggctgtattcagtagcaatacaaaagatatgtagaaagactctttggttcacattccaatattaaaatagtgacacgaactggcaaagtggttttaaaagctttcacatgggataaatgattttctttctttcttttctttcttcgtatggtcttgtcagaataaactactatcttgaataaaacaacatccaacccaggtcattgaaatgaaattggccagt

SEQ ID NO: 270018 - DNA, 303 bp, Homo sapiens
ctgttgctatttgccgtgtggtcttgggcaagttacatagcctctctgggcctaaatttggctcttgtaaaaagacccagtcccccagtccccctgtcttccctcactcttgtgcgatcttggccattttggccacttgcccttaccaactgtaattttatttactatttgccttccaattaactcacttattaatttaatttgatttagaaaggagttttatatcacactgtaagtggaaaattagacttgccaggaccacattaccataaaaatgaatataattaaaattataatgttgtt

SEQ ID NO: 270019 - DNA, 490 bp, Homo sapiens
ctagaattctagttctatctcgattttactacaaaagtagttattttgtatagtcagtgtttatgtagatttacctagaagtttgctattttattatccttgaaagttagctaggtatacgattataggttgacagctgttttctcaaataatattctactgtcttcttgcttccattgctgcttctgaaatgacagttgtcagtctgatcagtatttgtagctaatctgccttctttctcaggtcatatttaagatctttatctttggtgttctacagtcaaatgtggccatgctacagtatgtttagctgtatatttcttttcattgtcctgttgggattgattgagattcctgaatctgagaattggtacttttcataaattctgaaaaattcccagctactgtctctttgaatattgtatctccctcattctctctattctctcctttaggaaataaaattaagacttctgttttatgatctcact

SEQ ID NO: 270020 - DNA, 469 bp, Homo sapiens
tggtctcaaactcctgacctcaggtgatccacccgcctcggcctcccgaagtgctgggattacaggcgtgagcacctggcctagtttttgcttttatgctgtgaacatttataacaagtcttgggtggacttacattttcatttttcttggataagtaccaatgggtggaattgctgggtcaatagatgcatggttaatttaatttaatttttttaattaattttttttttttgagatggagtttcgcctttgttgcccaggctggagtgcagtggcaccatctcggctcactacaacctccacctcccgggttcaagcagttctcctgcctcagcctcttgagtagctgggattacaggcatgcgccaccactcccagctaggtttgtatttttagtagagacagggtttcgccatgttggtcaggcgggtttccacctccggacctcaggtgatccgcccacctcgg

SEQ ID NO: 270021 - DNA, 225 bp, Homo sapiens
gtgtattttgtcatttcttaggacaagagcatgggaacaaccatctcctggaatggcccttccacaggaagagaggaggacacatggcacagaggaaggatggggcacctggattcaaaatctgcttacaccatccatggagcctgggatgttgaagaattagttttttctcttggaacttgctttccttacttgcaaaataaagttaatcctacaaacacaaaa

SEQ ID NO: 270022 - DNA, 475 bp, Homo sapiens
gagatggagtcttgctcttgttgcccaggctggagtacaatggcatgatctcggctcactgcaacctctgcctcccaagttcaagcagttctcctgcctcaccattccaagtagctgggattacaggcatgagccactgtgcccggcctaagtatcaatttttgaaatgcatgctctagctggagcttaaatagtttgtgaaaacattggtaagtactttatttatgattaaactagaaactcaacaattctatgtaacttacaatccttagattttggaaaacttccaatttcaatgtacaatcaatatgttataaaaatatatttcaatatatctgtttgtcaattgaggtataaaagcatgtctaataatagaggcagcattgataaggtcctgataagttcttggttcagaaaaaaaaaagccactagaataaacttttgttacgaaaattaagataacaattaggcttaa

SEQ ID NO: 270023 - DNA, 379 bp, Homo sapiens
agccctatggactaatttgactggtatatggtttatacctgatgacatacgaataggaactggctttatttttttcccatccttgactttagccctgccatattggatcttcctttcttgactcttggcaagattttacacttaactataagaacaagcttgttttagtctgagaccagcctgaccaacatggagaaaccctgtctctacaaaaaaaatacaaaattagctgggcttggtggcacatgcctgtaatcccagctactcgggaggctgaggcaggagaattgcttgaacccaggaggtagaggtcgcggtgagctgagatcctgccattgcattccagcctgggcaacaaaagcgaaactcttgtctccag

SEQ ID NO: 270024 - DNA, 338 bp, Homo sapiens
agaactgctcgcttgcttgctgtgtgaggatagacccacacacatttggtcacagaagacttctgtggtcacacagacttctgttcatcacagaagtcttctgcgatgattgttgtggtgtgaaagcagaggagaaacacagtttgaatttttctactttcacactgtgtttactgaaggttgctcaatgtaggcttgggatggttggtccggggtatgtaatagaaggtgcttaaaagtgctcctcaacagttttgaagcgtgtgggacaaaaaaaaaagtgctcctcaaagggtaggcaggatagtgtaatgcttaaatatatggaatctggatcc

SEQ ID NO: 270025 - DNA, 1266 bp, Homo sapiens
gtaggaaaaccaaatggcctttgaaggggaagtgggcttggactgctgccttggcattttatttcaaccatatccagaagctggctgaactctaaatgtggttcactcaaaagcaagataaagaatttttatcctgcttggctaatccctgtcaaggccctgtcaagggatcttaaaatttagtcaaaaaagtattttgaaaacattagtcatttgctatatcactaattcgtaaaaggctgttaggctgtgctataaattctgattttgtaagtgaaaaatataatttgtacttattattacgggctgaggtaatgttaattttcaccatgctataaatgcaatgaggtaatttgtatgtctccaggaatcttcttctttgttttaaatcttgtgtttatttggtgtcagttgaaagatataaaccttgttctgtggtctttagacattgtactttagtcttaaaggactcaccagtgaactagaagatctcattgcctctctccaggataacagtatgacccttttgatgaaaggctgaaacagtttcttaaaatcgtaacttcccagagcaattcagatttataaacctgatggacacttaaaaggattttgcttaaaggataattcagggttgtgagagcttgatggctttgcctacagcctgtttttctttcaagctccatcggcctttctggaatcagtgtttgattcatgattgagtcaggcctccaaccctctaagccacaggtgaaacaatctttgatgtctggaaagttttaatttattagagtgttggtgtttcagagatcctccttagctgtagacagaaagccgtagttaaacagaacagcttggccccaaagttgggtactcactgggcaggggaaaagagcatttaccatggaaaaactatcttgttctgggtaaaaacaaaaattaacactccttgagagaaggttgagggccacctgtggctgacaggttaaatgagagatttgtcatcacatgatccagagccttgttttgttttgtttttattaccttcctctttctctatttaatcacatagctgtctttttacctctttacaaccaagtatttaggcaaatactaacagaaaacgactcagagtcatttataccctggagctgcactgtggaattcagtagtgactggccacagtgagcacttggaaagtggctactgaaactgacaagctaaattttaagtttttaaaaaatatttagttgtgttaaaaaaaaa

SEQ ID NO: 270026 - DNA, 640 bp, Homo sapiens
ggggaatagataatgagtggagcggcaaactacagaggacagaaaatgattcgtaaaggactttcaggaaaagatggctgcctccacacacatatcagatactcctctctctgaaatgcactaccagatgtctcacgtacttttttgccaaaatcagaacttgcaagatagggcagttctcgtgccgaattcggcacgagacagaaagccgtagttaaacagaacagcttggccccaaagttgggtactcactgggcaggggaaaagagcatttaccatggaaaaactatcttgttctgggtaaaaacaaaaattaacactccttgagagaaggttgagggccacctgtggctgacaggttaaatgagagatttgtcatcacatgatccagagccttgttttgttttgtttttattaccttcctctttctctatttaatcacatagctgtctttttacctctttacaaccaagtatttaggcaaatactaacagaaaacgactcagagtcatttataccctggagctgcactgtggaattcagtagtgactggccacagtgagcacttggaaagtggctactgaaactgacaagctaaattttaagtttttaaaaaatatttagttgtgttaaaaaaaaa

SEQ ID NO: 270027 - DNA, 409 bp, Homo sapiens
tcctaagagtcatgtattcccgtggtatgctcataaccttgaacacactcttcctgtgtctgattaaattccagtactttttcatcaaacttgacttccaggttatctaagtgggcttctcataaggagaagcagtcactgcagatttttctttgcttttttggtaactggcttaagagacaagattttataattctcatgctgtctttattaggtttttgattgcaaaatctgaaatgtaaaagggtcaaggtttttacatccgtattaccttctgtattgcctttaaagtcttttgattatcacttttgttaagtaagtaactattattttacaatgacctgtgcttctgtttggatcagatgttttgagccttttaacatctttaataaacgtcctcaaaatcaaa

SEQ ID NO: 270028 - DNA, 326 bp, Homo sapiens
gaaagaactgacatacctgttcctcaaaatagaaattatcagtaatcgttcagtatgcttcaacacagtaacctttagaactttgtcaagaaaagtatgaacatacagatgttcatacatgaaccattattaaaaaaaaaaaagcagaccgttaaatactatgtacacagtggttaaaacacacctgtaggcaaactgaataaaatttcaaattatatatagtagacttttaaacctaatttaagtaggttttagaaaaagtaaataattgcaagaaactaaaatatgaaatattaaaacattaaatataaaactttactcattgg

SEQ ID NO: 270029 - DNA, 508 bp, Homo sapiens
aatcaaggaccagataaaacaaattaaaataaaataaaatgcaaagttccctctaaacacctgtcatgtttaaccataagctttctgatgtgaaggagaaaggaggttcctgggaatgtatccacaattagtaacaggatgacccttaaacccccaagtgtgaatgaacccacatgtatacattactgtgtacacacacacacacacacacacacctgtcaatgtccctccatttgcaatatagacagcatttaatacgcatgaagagatttttaaaaagggcattctttaacgtatttcaactggcagcaggtgatcagaaaaaaataagataaataaaatattgtttagctatcaaagaacaactctgcactgttagatacttaaggtcctgatttgcacctgagtttagaaagctacctcatacatatgcacttaaaatggaaatttctcatcagattccacatctaatgcaatgcagaacccaactctagctgtgccccatctt

SEQ ID NO: 270030 - DNA, 591 bp, Homo sapiens
ttttaaagactacagtattttaaatatttagacaaagaaggatgttttgagatttttttctttgctgactgataaaacgaaattattctattagactcatagacgattattatctccaaagacagaaaatgtaaatttttatgttttttctttacaagtaaacctaatgcttatagaagtataaatgttgaagatattatttcataaatactgcattgccttgatactaaaataatactgatttaaagacaaacgtagatcatgacatgatatttgggaaaaacaaaaacaaaataactcccccaaacattgccttaataaatgtatgcatcaattataagatatatcccagattcatatatgttgagatgtaagaaaatgtgctttttcagattgaagaaatacggttatagtaacaacaataatagtaagttaacattgaacacttactgtgtgctagcaaatgtgctagcaaatttttttacatgtatactctcatttaatcttctttttctttctttctttttttttttttttttttgagacagtcttgctctgtcatcaggctggagtgcagtggcgccatctcgg

SEQ ID NO: 270031 - DNA, 466 bp, Homo sapiens
tctcagagtggctactttccagacaccagacacacaaatgctttaaagacaaaagcaggttgttacatttgtcagggtgaataaaaagcctagagcaggactctcaagtctctctttctgtgctaaggaatgtcttcccaattttttgcagccttgaggaccgggagatgactgggaaattgctgacagggcagggaaagggctatactctacatgctggcattcacagacaaacaccgaggggcagcaacagcaaagaggagtcttggtgctcttcctggagttcccaggctttactggccatggatcctgttattcaatcaaatacttattgtgtgcctactacatattgggcactattctaggccctgtggatgtattagtgaactaagcaggaaaaaaaatcacctactcatgtgaaggttatgttgcaatagactttggggacagagacagacaataaatt

SEQ ID NO: 270032 - DNA, 571 bp, Homo sapiens
ggggtgctactagtatccactaggtagaggccagggatgctgctgaacatcctacagtgcacagaacacgtctcacagcaaggaattatctggcccaaaatgtcattaacaccaagattgagaaacccgggactggagcattgcagcacagaatcacagcacattagaggtgggagtgattttagaagtactctcatccaattctcccatttcacagccgagggcactgagatccagagaggagagggaagcagccaggatcacactgcaagcaagtgacagagctggtctgcaattcagatctgctctctcctgagaccgttttacccagattcccccagagttgttgtgaaaattaaatgtgagctgtgaaaacaaaaataaatagaaaattatagagactatattaatatttctattattaagaattgggagtttgtatagttgtatttctggctatgccactgactcattgtgcaatattggacaaatcattctcccacccccatgcctctctatgagtgtgtgtgtgtgtgtgtgtgtgtgtggtggagaggtggtcttagagcaa

SEQ ID NO: 270033 - DNA, 560 bp, Homo sapiens
accgagatgttgatgcctaagaaccggattgccatttatgaactcctttttaaggagggagtcatggtggccaagaaggatgtccacatgcctaagcaccgggagctggcagacaaggatgtgcccaatcttcatgtcatgaaggccatgcagcctctcaagtcccgaggctacgtgaaggaacagtttgcctggagacatttccactggtacgttaccaatgagggcatccagtatctccgtgattaccttcatctgccccggagattgtgcctgccactctatgctgcagccgtccagagactggaagtcctcagcctaaaggtctgaagggtgagcgacctgcaagactcacaagagggaaagcggacagagataacctacagacggagtgctgtgccgcctggtgccgacagcaaagctgaggctggggctgggtcagcaaccgaattccagtttagaggtggatttggttgaggatgtggtcagccacctcagtaaaattggagaggattattttgcattgaataaacttacagcaaaaaaacttaaaaaaaaaa

SEQ ID NO: 270034 - DNA, 523 bp, Homo sapiens
atgtaactgggagcataaactggtaaagcctttttggtagacatcttggcaatatctatcaacataccaaatatatataatgtttgacccagtaattctacctctaagaatctcttccatagaaatattcagatataagtacaaaaatatactattaaatgttcatggtagcattgcttagaatagcaagaaactaagaatgatcatcattaccacataacaccattcaggtgtttaaaaatactgactttgaaaggcatattgctaactgaattaaaggcaagtcacagaaaaatattaaatcatgcccctgccaatctctacgctgacacacattttatctatgcaaatacatggagggaaatctgggaagactgtaccaaatagtcaacaatcattaaatgtagtcaaaagactaaaactcctaagttctattccatatacttttactaggaaaatatatactcctatacactttcttaaagagaaaaacatattgaagaatacacattaattaccagca

SEQ ID NO: 270035 - DNA, 395 bp, Homo sapiens
tcaagtagctgggaccacaggcgcacatcatcacactcggctactttttgtattttttgtagagatgaggtttcatcatattggcaaggctggtcttgaactcgtgagctcaagcgatttacctgcctcagcctcccaaagtgctgggattataaatgtaagccatcatgcttggcctgaaccaattttaacttttaaaaatcaccttttctttgttatacattcaagaagacactgagatgggcattagactaacatcaagctaagttgcatataatttcataaactctgagctttcttgaatatattttttaatttgtgggaattccttgtacacctgagccccaaagacacagcaaactccagtcatagcttggcaattaaatgaagcaatg

SEQ ID NO: 270036 - DNA, 480 bp, Homo sapiens
attttaaaacaaacattatatgtctgaatctttgcctggagtttcatattttgtgaaaagcattttgtaagtagaggactcataagtgctataagtcacctagtacactacaatggcatagatgtgacagatactcaatgaaatgattataacttctgatgtatgttatttttgttgttcatttattaatctagtgaaagccagccaatagatggaatgacattcacctgtaaaacttccaagatcccatccaagcttagtgtcctctgaagttctccataattgattgtctgttcccaccaacatttagcataagctctagaagcttatattgttaatcatccttctatgtttatgtgctgacttgcaaataaatgcgcctatgtggcctttatcttcacagccctaataatatctacataatgtaataaatttgttataaacctgatgtttcataaaattatgtcttatcacctaaaa

SEQ ID NO: 270037 - DNA, 543 bp, Homo sapiens
tcactctccctctgccctagagattggctgaactcaagcagcagccagatggcaagataaccagagtaacagagtcgctaaagctcagcctcctgggagcagaaaccagagtggagaagggcagaaagcggttctagacaggcaaaacaaaaatatccagcacaccggccaaaccaccagccggttctgagtatgaaggaaaaacatttcagaaatatgaaagctcacctctcatgtaccaagaacttcagcagaattagttaatatgataaagaatacatggaatccaaccaaggggctcaaactaagaaagcaagtgagggaaccttcaggacgacaactgtgtctcttgcctagagagcaattcatccagattttagaagaaggatggaaggtgagaaagcaaagctccaagttgaataaatgaactgacagatgatcatatgcactgaagtactggtaaaatttggtaggcatttgacaaatattttgcagtatttggaaagaaatagcaatgaatacatagaaaactaaaatgagaaa

SEQ ID NO: 270038 - DNA, 850 bp, Homo sapiens
  misc_feature (430)..(430): n is a, c, g, or t
attccaaggattgagaagttttgcagtggtcaactggtatagacatcccattaccactacttccttcattggactgcaaggtatttctgtttggaaaagtaatggagtccagtcaacttcattgatcgccaaggactgtcaaaattataaaacttgctgtggagctctgacatgccagaagccgctagaaaaagaagtttgacattcagaaacttatcaagaggttctactctttggatagagaccaaaatcatactttgaaaaagcctgacaggtttcttcggaaaagtggccatccatggaatgaatgaaatgttctctttctattccagggattgcagtggcaaagctaggctaggtcttggaggctggtgtaaggcgatgtgggtgaaggcaggaggctgatggaaagactggggggaagaaaagncgaaatggattcacggtgccttggatgaaggacgagaggggaactgcaagctccttcaactggttctgtccggtgagaagtgatcaagcttgggctgacagaggctcagggagccctcacgttctttcgcttttttacctgccaatcaaactgtacaagacaacacctgatctggcatggacatcgcgggtccaagcctgtaggcccaaatcggataatctctggagctgataaacaagcaaaaagagaaagccaggacaacagacaatattaaagaagaagacaatccaactctgagattccaacttagaaactaactggttccttcaagataaaggtcggggttagagaatgtgaaccgggttgcttcattctaagacttctcatacgggctggtttcaaaaacccagggggactcct

SEQ ID NO: 270039 - DNA, 997 bp, Homo sapiens
  misc_feature (577)..(577): n is a, c, g, or t
cgcagagagaagaagctgcccaagaatggaaaggaagaaatatatcacatcatctgtctgtccacaggctttccttggggcttatgaagtgaatgaaggagggaagaaaggagagacagagaaaatatggatttcctcatggttgtgattcctcttcactcttttgaatttggaaggatggcatacacatctgaaaaataccactacttccttcattggactgcaaggtatttctgtttggaaaagtaatggagtccagtcaacttcattgatcgccaaggactgtcaaaattataaaacttgctgtggagctctgacatgccagaagccgctagaaaaagaagtttgacattcagaaacttatcaagaggttctactctttggatagagaccaaaatcatactttgaaaaagcctgacaggtttcttcggaaaagtggccatccatggaatgaatgaaatgttctctttctattccagggattgcagtggcaaagctaggctaggtcttggaggctggtgtaaggcgatgtgggtgaaggcaggaggctgatggaaagactggggggaagaaaagncgaaatggattcacggtgccttggatgaaggacgagaggggaactgcaagctccttcaactggttctgtccggtgagaagtgatcaagcttgggctgacagaggctcagggagccctcacgttctttcgcttttttacctgccaatcaaactgtacaagacaacacctgatctggcatggacatcgcgggtccaagcctgtaggcccaaatcggataatctctggagctgataaacaagcaaaaagagaaagccaggacaacagacaatattaaagaagaagacaatccaactctgagattccaacttagaaactaactggttccttcaagataaaggtcggggttagagaatgtgaaccgggttgcttcattctaagacttctcatacgggctggtttcaaaaacccagggggactcct

SEQ ID NO: 270040 - DNA, 782 bp, Homo sapiens
ggacgcggaggagaaggaaagtcgctcaagcagtggacagagcggagaaagcgacttcgggtctgctggagtttgctggaggtgcactccagactctgtttgcctgcctatcaccaacagaggctgcagaacagcaaagattgctgtctgtaacttcctctggaagcttcatcccagaggggcacctgccagatgccagccggagctctcctctatgagtgaatgaaggagggaagaaaggagagacagagaaaatatggatttcctcatggttgtgattcctcttcactcttttgaatttggaaggatggcatacacatctgaaaaataccactacttccttcattggactgcaaggtatttctgtttggaaaagtaatggagtccagtcaacttcattgatcgccaaggactgtcaaaattataaaacttgctgtggagctctgacatgccagaagccgctagaaaaagaagtttgacattcagaaacttatcaagaggttctactctttggatagagaccaaaatcatactttgaaaaaatgagaagagatggaagccaaggaagggtgtgtggaatcaagtagcagttctcaaaacagcatatatcaagacctcagcacatatcaagacctcagcacatatcaagacagtggcacaaaagcatcgtagtgttgtcattcaccactatgcaggagggaaagccaatttcatttcagaatgtcctcaattaatctgtagaaattattaattttattaaatcccaacccttgaaaaaaaaa

SEQ ID NO: 270041 - DNA, 503 bp, Homo sapiens
ggacgcggaggagaaggaaagtcgctcaagcagtggacagagcggagaaagcgacttcgggtctgctggagtttgctggaggtgcactccagactctgtttgcctgcctatcaccaacagaggctgcagaacagcaaagattgctgtctgtaacttcctctggaagcttcatcccagaggggcacctgccagatgccagccggagctctcctctatgagtgaatgaaggagggaagaaaggagagacagagaaaatatggatttcctcatggttgtgattcctcttcactcttttgaatttggaaggatggcatacacatctgaaaaatagtaagtaatgtgtgatttatttttcaattactgttactaattgtaataaagctgaaatttgattactggaggagtttgaaatcatcatgcatgccttgaaggaaaatgggttttgtgaaacatttgcattatttggtgtgaattacctttggtgtgatttaactgtttatcac

SEQ ID NO: 270042 - DNA, 402 bp, Homo sapiens
ttcaagtcaaggactcacaatgtcagctgcagcactgtctgcctgagcaaaatgaagaggcttgctgagagccaactgcccgacaacgactcattcccaggctctctgtagtttggtagaaagaacctgctaaagtagtaatattgatcatattgatcatgacaatggcagctaacatttatcatgtgcttactatgtgccacccactgttctaagggctttatccttcaatgcaggcactaatatcatgatccccattttacaggtgaagaaaccgaggcaatgaacaaagtaatatacccaagatcacattgccagtgaatgggagagctgacgtttcaatctacacagaacctgtgctcttagctatctaaccgctttacttggaagtgatgtgagatt

SEQ ID NO: 270043 - DNA, 372 bp, Homo sapiens
ctgctcactccagaaatattgaatcaaaacgtggagcaggagacaggcaaggccagtgaaggagtgtggctccgataggattgacaactactaccttagatgatgaatcaagctcagaagggatccctctggatttccctgcgccatgtaagaagtgcctgctttccctttgccttctgctatgattgtttcctgaggcctccccagtcatgttacctgtacagcctgcagaactgtgaagaaaccgaggcaatgaacaaagtaatatacccaagatcacattgccagtgaatgggagagctgacgtttcaatctacacagaacctgtgctcttagctatctaaccgctttacttggaagtgatgtgagatt

SEQ ID NO: 270044 - DNA, 229 bp, Homo sapiens
tgctgtcaagtggctgggggccaggatgcctgggttggccgtgagaggacattgctgaggagagtggaggccaggctggggtggggtgtggcaggaggacaggaatgcagtggaaccagtgggtcaggctcctgagggccccaggctccagcctcagggctggcctgttccctcctaagctgccatcttcatatcttcaggacccacccctctactcctcaccctcagc

SEQ ID NO: 270045 - DNA, 525 bp, Homo sapiens
tgagacagagtcccgctctgattcccagggtggagtgcagtggtcattttgtcagctctgtcagcttgtccttcttggagactgtgccaggtaccaggcccccacacagtcaacagggctgtttctcctcaggctcaccagcccctggtttccacctattttgatttttgtccatctgaaaggcaaaaactaaacaaaacaaaggaatttgggtgtagttagagtttgcgtttctcttacgatgcgtgaggctggtcaccttttcatttgcttaagagccacatgtgtttctttttggtgaatgaactgcagaatttctgcagaggtggtgccgggcagctttggagaggggggcctggagggaggccagactagaggcagaggccacttctggggacagttagcgtagaagggagagaaaatttggtcctgaagagtggtgtgagagctggagatggagatgatgaagttgaaaggctgagattaggtgataggttagcccccatggagggccatggaggaaga

SEQ ID NO: 270046 - DNA, 938 bp, Homo sapiens
aagtagagttccaaagtactgcaggccctggtggtagctggcggagggccgtcctgctcgggactgtgagaagccctttcattgagcctctgctgttcatgctgtttgacaccttgcgttttccagttaacgttatattttggagaccactctacatcaatacatagagtgtgtcctcattttcacagctgcacggtattccagcacaaggatgtatggtaatttacagatgcacttcttggcagagggaccttcaggttgcttccagccctttctcaagacaggccgtgccgcaagacagggtcctgctctgtcacccaggctggagtacaatgtacaatggtgtcatcatagctgactgcagcctcgacctcctgggcttaagccatcctcccgccttggcctcctgcgtggctgggactacaggcacgcaccaccgtgcccagcttgcagtggtcattttgtcagctctgtcagcttgtccttcttggagactgtgccaggtaccaggcccccacacagtcaacagggctgtttctcctcaggctcaccagcccctggtttccacctattttgatttttgtccatctgaaaggcaaaaactaaacaaaacaaaggaatttgggtgtagttagagtttgcgtttctcttacgatgcgtgaggctggtcaccttttcatttgcttaagagccacatgtgtttctttttggtgaatgaactgcagaatttctgcagaggtggtgccgggcagctttggagaggggggcctggagggaggccagactagaggcagaggccacttctggggacagttagcgtagaagggagagaaaatttggtcctgaagagtggtgtgagagctggagatggagatgatgaagttgaaaggctgagattaggtgataggttagcccccatggagggccatggaggaaga

SEQ ID NO: 270047 - DNA, 397 bp, Homo sapiens
agagaaaagggaagatttgtttactatccaatataataaagataatgtctccctccatagcaaaatcagacaagtttgctgcccggtataaaagatttgggttccctttgctggacacggtggctcacacctgtaatcccaggacgttgggaggccaaggcaggtggatcacgaggtcaggagttcaagaccagcctggccaacatagtgaaaccctgtctctactaaaaatacaaaaaattagccggacatggtggcaggcgcctgtaatcccagctacttgggaggctgaggcaggagaatcgcttgaacccaggaggtggaggttgccgtgagccgagatcaagccattgcaccccaacccgggcaacagtgtgagactccatctcaaaaaaaa

SEQ ID NO: 270048 - DNA, 485 bp, Homo sapiens
ataaaccatacttgtcaataatggtttgttcttttaatatgagactggattttatttgctaaaattttatttaatatttttgcatcaaaaaatgaaaagatatcttggattagcttcggaataatccataatccattgctggagagggactgaatggtggtatagataaaacaaaattagatgtgagttcgtcattcttgaagtcacatgatgaatatgtggaatttgagtatactgttcttttgcttgaaatttttcatagtagaaagttaaaaaatttttttgcctatacatttataagagaaattggtctcttaagtttttttcaagtgattatacttgaaaatcaccaggttaaaaaaatagaataatgtagcatcccagaagccctcatcttctctctcctctccaaaggtaattattatcttaaaaacatcatagatgtgcttggttgtcatctttatataaatgaaatcctaaggtac

SEQ ID NO: 270049 - DNA, 430 bp, Homo sapiens
gtcttctcttatgaagccaatgaatatttactgacaagcagtatagtaggacatgcccttgaatagcatagaatctaaagagaggagcagatgtgtaaactaaaaataccaattcagtgaagcaagttcagcaaaaatgtctgtgcagggtgctagagatttgcagaagagttacatcacactgctatgagaaactacgggtggttttaaaggaaaatggtaatatcagagctaagtaaaggagcatacataggagttaactagttaaaaaaataatgaggaactgctatgaggaattatggatggcttcaaaggaaaaaggtaatatcagagctgagtaaagaagcatacatacgagttaaccaattaaaaaaataatgaaagtcagtgggagaatgtttaaggcaaaggacagaacaccaggaaagac

SEQ ID NO: 270050 - DNA, 397 bp, Homo sapiens
  misc_feature (342)..(342): n is a, c, g, or t
ccgaatctataaaatgttttacatatttgccagggaaacagaaaagatatttgtacagctgtaagaattggaattaatttcattttactgacttttccttaacctaattctgaacacttttgccataggtttgagaataagttgttataaaatgactactattcttcactaatagtattggcatttcaattcctaaattctgttttttgattcttgaacatttctgaatttactttttttgtcttagttcttctacagaatcattttcttcttttttctttttttatttttattttttatttttgagacagagtcttgctctgttgcccaggctggagtganccgagattgtgccacatcactccagcttgggcgacagagtgactccatctcaaaa

SEQ ID NO: 270051 - DNA, 803 bp, Homo sapiens
ggctgcttggcgtggcagtgatcgcttggcttggcatttctggcttagcggtcctcctttcgcagattggaaaccgcgggctatcctgctgggaggttgtggccgaggcagtagctcgctactgatggcctcctggggtggagaaaagcggggaggggctggggggtctccgaagccggcagtctacgccacgaggaagacccctagtgttgggagccaggaggaccagtggtacttggactacccgggggaccagtggtccttgggcttctcctacagctggtggaagaacagcgtcggcagcgagagcaagcacggtgagggcgccttagaccagctccagcacgatgtccgcctggaagatcttggcgagctccacagagctgcccggtcgggcgacgtccctggggtggagcacgtcttggctcctggagacactggcgtggacaagagggataggaagaagagcattcagcaactagttcctgaatataaggaaaaacagacacctgaaagtcttcctcaaaataacaatccagctgctccaagccaggctgaaggaggagaaggaggagtcgcctgtggtacggtggagcagatgacgtggctctgcagcttgcctcatgcagttggtggtggagatggagaccacagctcgactggagcggtaggagggcacccacgggggcctggagagtattgtcatctgcatgagcaaagggttcatcaccacatctttgcaagaggaaaaagaaaggggaagaatcatgtgtctaatgttgtaaggtaaacattcacaacca

SEQ ID NO: 270052 - DNA, 515 bp, Homo sapiens
gtggcttgcctaagctttattttaaaggctgttttcaatattatttgaagattgggcagtacatgatgcaatcaaacaaaacacaggtttcaggtatgtataaatacttatgctttatttcatatataatgctgtgtgttccttgacacacacagttctatgtattccaagtggtcactgtagtttatcacaggaaaatgttaatgccctagaaattttcatctgaggtatctaagcccataataggtcatcattaaatagtctctgaattattgttgtgtattatatattgtgtgtattttgtgtattatatattgtgtattataagttacaccacaaatactacaatatgttcgctcactctggaaattaaaaagtgggagatacactttaataagtataatggattgacccatagatgactttatattacataaactacttaagacatattctttgtgctgctttttctaaaatagaatatgttaatataaacatatttgaaattcaaaaag

SEQ ID NO: 270053 - DNA, 213 bp, Homo sapiens
acacagagtactccatttaaaaattaactatgacataatatttcacgatttagacattccttagtttgaatttcacaattaataagcacttaggttttccttaatattttgcttttacaaatcaaactattcataatcatgccccttgtatacatgagagtgttcctctagagtggacactgagcaggaaattactgggtaatgtataggtga

SEQ ID NO: 270054 - DNA, 524 bp, Homo sapiens
agaccagatcagtctctttacacttatctgacagtgacttacaatgatgcattttatgtgagcattcagaacctgtctgtaggtatccactccgatatctgcacacagacattcacacacatctgtagctgaaacaaacgtttcataaaacagtatttatcctcctacttaaaatgtactctggtattttctgttcaagtctggtctgttctcaccaaaaagctggtcctggcccattaaatcgatttcacaactctcggccgcacaccgtctgaaaaatatcagactagacagtgtctgaaattcctaccaacttggaacttctcttattctcttctgatgtgtgagatgaaaaggaagcaaagagagcgagagttttggaaagaaaaactgatgggccatgacaggccggcctgagtctgtgaggacactttgaggaaggacttctgattcctggttcaacagagatgcttaaaagttaagaatgggtactaaagataccagcctaaccattttaaaggaaa

SEQ ID NO: 270055 - DNA, 596 bp, Homo sapiens
tcaccatgttgcccaggctggtcttgaactcctgggatcaaggaatcctcctgcctcagcctcccaaagtgctagaattagagacgtgaggcaccacaccacctacctttatatttaagcaacagtttgactgcatacaaaattcctgggtcacatctctttgctggaggattttattgtgattgccttcttgtgtgtttggtaatccagtttgtgagttgatggcttcatcataatctgtgggagtcctctgtaccaaacttggaaagttctcctccagacaagactttgccttcaggtgaatcaactgacaccagcttgaacagtgaccgtgactgcaacaaaggaactgactcaaccggtcctctgaccactcccctgcaggaaatgactcagcacatgaagacagtttcaacactcctatgatttcatcccccaaccaatccacaacatctgtttcctaatgccctacctgccaaatcatccttaaaaaccttagcctctgaattcttggtgaggtggatctgggaaatgtatcccgtcctcctcactctatgccttgcaataatcaaactctttctctgctgcaaaaaaaa

SEQ ID NO: 270056 - DNA, 923 bp, Homo sapiens
ttctacttctaggaaattccactcattgataaagctcggcttcgacgcccctgctcacaatgaaataccttccttgccaaccacattgctttatgatcgtgcccctttaccacattgtacttgaaatgccttgtcatttaagaaaccataaaaacgacgtctttaaaaatgggttcatcatttagctggagatggcttctgtgcctggaaccagaagcctgtcctctcggtggtatgcctccacaaaaggaagcgagctaccacaaaggacagcatcatgtgttgccttcattgctattgaatcgggaagttggtgcccagtttcaacatggatgacaaagtagtgggaatctgaaatgcctacagtagaagctatttttgaacgagaaggactttggctcaaatcaacagtttggtttcttactgtttacatctatgagtcaaagtagcttgctcccaggatcccccaccaaaccgaatgaaaataaattcaatgtgtgcccactgagcctggcctgggagttcttgagatcaactcagaatcatggtctttctgtcactcccaaaacaatcctacctaattctacttgttcctaagtattgccttaggatactgacagtcttttctcctacttacagcttttgaatgaaattaaagctaatcctctctggcttggtcgggtcttgtgtaagaattcccacaccccacaatcaaggccttgcaatgtggtgttagaagagatagccaagttaccacacctgtatcacgattcggataaggatagtattttttgccttccatgagacagctttgaaaacctgagtcacagaagctgcttcatgcaaatccttccactttcctcctcactgccagtacattggcacctccttcttaaaatgagaagagaagcataaacaagacc

SEQ ID NO: 270057 - DNA, 1003 bp, Homo sapiens
ttctacttctaggaaattccactcattgataaagctcggcttcgacgcccctgctcacaatgaaataccttccttgccaaccacattgctttatgatcgtgcccctttaccacattgtacttgaaatgccttgtcatttaagaaaccataaaaacgacgtctttaaaaatgggttcatcatttagctggagatggcttctgtgcctggaaccagaagcctgtcctctcggtggtatgcctccacaaaaggaagcgagctaccacaaaggacagcatcatgtgttgccttcattgctattgaatcgggaagttggtgcccagtttcaacatggatgacaaagtagtgggaatctgaaatgcctacagtagaagtaagggtgtctttatattgggaatatcctcgatcccagggcccatttctaattcccccttctctctttccctgatacaggctatttttgaacgagaaggactttggctcaaatcaacagtttggtttcttactgtttacatctatgagtcaaagtagcttgctcccaggatcccccaccaaaccgaatgaaaataaattcaatgtgtgcccactgagcctggcctgggagttcttgagatcaactcagaatcatggtctttctgtcactcccaaaacaatcctacctaattctacttgttcctaagtattgccttaggatactgacagtcttttctcctacttacagcttttgaatgaaattaaagctaatcctctctggcttggtcgggtcttgtgtaagaattcccacaccccacaatcaaggccttgcaatgtggtgttagaagagatagccaagttaccacacctgtatcacgattcggataaggatagtattttttgccttccatgagacagctttgaaaacctgagtcacagaagctgcttcatgcaaatccttccactttcctcctcactgccagtacattggcacctccttcttaaaatgagaagagaagcataaacaagacc

SEQ ID NO: 270058 - DNA, 857 bp, Homo sapiens
ttctacttctaggaaattccactcattgataaagctcggcttcgacgcccctgctcacaatgaaataccttccttgccaaccacattgctttatgatcgtgcccctttaccacattgtacttgaaatgccttgtcatttaagaaaccataaaaacgacgtctttaaaaatgggttcatcatttagctggagatggcttctgtgcctggaaccagaagcctgtcctctcggtggtatgcctccacaaaaggaagcgagctaccacaaaggacagcatcatgtgttgccttcattgctattgaatcggctatttttgaacgagaaggactttggctcaaatcaacagtttggtttcttactgtttacatctatgagtcaaagtagcttgctcccaggatcccccaccaaaccgaatgaaaataaattcaatgtgtgcccactgagcctggcctgggagttcttgagatcaactcagaatcatggtctttctgtcactcccaaaacaatcctacctaattctacttgttcctaagtattgccttaggatactgacagtcttttctcctacttacagcttttgaatgaaattaaagctaatcctctctggcttggtcgggtcttgtgtaagaattcccacaccccacaatcaaggccttgcaatgtggtgttagaagagatagccaagttaccacacctgtatcacgattcggataaggatagtattttttgccttccatgagacagctttgaaaacctgagtcacagaagctgcttcatgcaaatccttccactttcctcctcactgccagtacattggcacctccttcttaaaatgagaagagaagcataaacaagacc

SEQ ID NO: 270059 - DNA, 389 bp, Homo sapiens
cccactttggtcaaggccctcttcaacacaagttgggactctcgggacactttcccaacaactttcctgcttgcatggtatctctaattctaatatgatgctctcaggttcccattcccaaagcacactttacagagcaaacaggccctactcagaattcttatgtggttcttcagctctcccaggaaaacgcccctggaatagggtggtagtggtggtgggtaacgcctaaccttcccaaacttaatgttcatgccttccctgtgagctccagctaccacgggcagctgatctttctccaaaagatgctacacataccaccagaaaaccaataccttgacatttaccccatccttcccacgctcttctccagctgagggtctactttc

SEQ ID NO: 270060 - DNA, 437 bp, Homo sapiens
gcccatccggcaggggctgggccgaccacagcttcccggggttgcggccctgcctcctaggcttctgcggagattttgttgttgtttggggttttgtttccttccagaggctccaggcgctgggagttaggaaagaggctgccaagctgagaaagcgacgctcgtcctcacacagcaaaacaaaactaaaagtaaccttgtattgtttacaaagcgcccagtaatatgtaaacagtgaacttgaatctgtcttgctaggcggacgaacgggcaaagcccacattataagtacctgttgtaatgtgaatgtttactcttcatttctggccaggtttagaaagggagggaagtggggatgggaaagttaattgggatgttaactttccgatgacttagagacctttttagctatttattttattgttgggaaaaaaaaa

SEQ ID NO: 270061 - DNA, 312 bp, Homo sapiens
atgataagtcccacagcctggacggcttcaacagctggaatgtattgtcttaaggatctgggggctggaggtccaaggtggaggtgtggcgggttcaggttagtgtcttggaggcctgtctccttggctcataggtgaccgtcttctctctacatgtctgtgtcctaatctcttattataacggcaacagtcacgttggattcgggccactatggcttcattttaactcatttgtgtctttgaaggctctgtctccaaatacagttccgtcctgagctactgggggctgggacctcagcgtatggattcgga

SEQ ID NO: 270062 - DNA, 423 bp, Homo sapiens
ggtaggtatacaagaatctttttttctttgctgttctatttgtattgaaagtgggacagaagatatggcacctatttcattaagattcagaatttcagactggaactggaagaaagtataattgattatgtaatacttattggtgtctacaagaccaaaagtgaaatggacattagttaatcactaggtatttgttgatccttcatttttgttggagaattgctcaagcagaagacgttctctcccttgaaaagtttaccctgtgcagaacaggggccaattctaggaagttgtttttctccccacattatcttgtggtaatccatgatgcttaagtgcatttttataatgttattaatatgagtaaggtttcagtgggcatatattgattactaagcaactaagtgtagaagaatccagaat

SEQ ID NO: 270063 - DNA, 460 bp, Homo sapiens
cgtctgaaatcttgcatttcagaatggatgctttcttaagtcacagcacttaacaatccctggattgttttggccattcaaaaccaaagtgaatggatccaggttttattactctttgaaaggaaacctgtcaagcacaatgcctgctgtgggagccaccttctccaactgacaccgcctgaccccagcttccagctcactccccgctctgtgaaggaagcagctccagcatttgtccctggagggtctctgaaagtccaggtcagcccctgggctggtccccacagtaagaagagaactgtgatgggcaacaccccagaaaagaagacttgcagcctcacttcaggtcaatttgcaagaactgacatcacacagcagcttggtttcttcagaccgtccagcttgctgcgtcttgcccagtcacgtggagctaataaagatacgctgttccacacctctg

SEQ ID NO: 270064 - DNA, 688 bp, Homo sapiens
cttatctgttgtgtgcaccctctttgctgggcacagttagacagccggcttgctacccgaatcaacatgagctaaggagctaggattcactggcttcccattccagctccagttcccattgccctccttacccttccaagtccttaccctccagctgtgccaaatcccctgccttggattcttcatgtccttcaataagtccagacacttgcaccagcagccccttcaacctggagtgtcctcctcatcccttcacttcttctgcagcccattcccagcgttctctgctcattttaaatgacccattttgagcatcacctcccacgagaaggcctctctaatcccttagcatcactatccgcttttgatgtcacagagtcccccaaatgcactgctgtgacagcatgtatcacactgggtcatcagagttaacacacaagcccatttcccccaggtagaccctgcacttttccagggcaggacagtaaatttaccacacaacctcttacatctaaaagaaacgttgttactcattgttgaatgaaagagaatgaatgacaactttcagtacttagatctacagagagaataaaagaattttccctctggtggggagatcttttgggaacgggagaccttcccacagccgtgttgtgatgaaggtatctccttacttcgtcgaagcacg

SEQ ID NO: 270065 - DNA, 242 bp, Homo sapiens
aattacatcccaatatccctgataaacacagactcaaaaatcttcaataaaatactatcaaataaaattcaacagcccattaaaaagttcatatatcctaaccaagtgggatttatccctgggatgcaagtatggttctgtatacacagatcaatcaatgtgatacaccatgtgttttctatttattatcaaaatgaatagaaaaaaacacatgaacacctcaatagatacagaaaaaacat

SEQ ID NO: 270066 - DNA, 828 bp, Homo sapiens
cccttctgttgggcgtttctgcggagaggcgggaggcgctgagagtctgcgcggaggtccgtgcacagactgctttgcctgttgttgctcttcggaggcggcgatccccgaaggcgagctgaaatacggctgcaggctacaatttgcagccgacgattaaggaagacgacgagcgggagaggtggcccaccctcatggagcgcttgtgctcggatggcttcgcatttccccattactacattaaaccgtatcatctgaagaggatccacagagctgtcttacgtggtaatctggagaaactgaagtaccttctgctcacgtattatgacgccaataagagagacaggaaggaaaggactgccctacatttggcctgtgccactggccaaccggaaatggtacatctcctggtgtccagaagatgtgagcttaacctctgcgaccgtgaagacaggacacctctgatcaaggctgtacaactgaggcaggaggcttgtgcaactcttctgctgcaaaatggcgccgatccaaatattacggatgtctttggaaggactgctctgcactacgctgtgtataatgaagatacatccatgatagaaaaacttctttcacatggtacaaatattgaagaatgcagcaagtgtctccctcagaaacaacgagctggagaaggctacaagtgaccgacacaagatcttgtttcaaatatagccacagaacttaacggagggacctatatcttgggaacaaggtgtccttctccagaaaagccacccagttgagaaggctaccaacgaggactggaggaaaggatcctgtttcaaa

SEQ ID NO: 270067 - DNA, 1078 bp, Homo sapiens
cccttctgttgggcgtttctgcggagaggcgggaggcgctgagagtctgcgcggaggtccgtgcacagactgctttgcctgttgttgctcttcggaggcggcgatccccgaaggcgagctgaaatacggctgcaggctacaatttgcagccgacgattaaggaagacgacgagcgggagaggtggcccaccctcatggagcgcttgtgctcggatggcttcgcatttccccattactacattaaaccgtatcatctgaagaggatccacagagctgtcttacgtggtaatctggagaaactgaagtaccttctgctcacgtattatgacgccaataagagagacaggaaggaaaggactgccctacatttggcctgtgccactggccaaccggaaatggtacatctcctggtgtccagaagatgtgagcttaacctctgcgaccgtgaagacaggacacctctgatcaaggctgtacaactgaggcaggaggcttgtgcaactcttctgctgcaaaatggcgccgatccaaatattacggatgtctttggaaggactgctctgcactacgctgtgtataatgaagatacatccatgatagaaaaacttctttcacatggtacaaatattgaagaatgcagcaaggtataggtcaaccaatgttattttcaaactatctgaaatgcatttattttaacattgacacatgtaagggtcaatttttcatatttggaagctcaaacattccttgaatgaaaatattttgaaatgccttaactgtctaagattttactttaaatattggaacttttaaagaagcattatagggaacagccttttttcatgcacttatggtaaataactataaaaacaaatgaattacaataaatttataattcatgacaactgaatttgggaaaggtaatagttaagtgtttttccactaaattactttttttctaatcagtgtgaagtgacacaggaaagtaaaattgtcccttataaataggctttattttaaatgtcaaagaaaattaaagaatttcacaataaatgtacatgttgttgctgttgaaaag

SEQ ID NO: 270068 - DNA, 751 bp, Homo sapiens
cccttctgttgggcgtttctgcggagaggcgggaggcgctgagagtctgcgcggaggtccgtgcacagactgctttgcctgttgttgctcttcggaggcggcgatccccgaaggcgagctgaaatacggctgcaggctacaatttgcagccgacgattaaggaagacgacgagcgggagaggtggcccaccctcatggagcgcttgtgctcggatggcttcgcatttccccattactacattaaaccgtatcatctgaagaggatccacagagctgtcttacgtggtaatctggagaaactgaagtaccttctgctcacgtattatgacgccaataagagagacaggaaggaaaggactgccctacatttggcctgtgccactggccaaccggaaatggtacatctcctggtgtccagaagatgtgagcttaacctctgcgaccgtgaagacaggacacctctgatcaaggctgtacaactgaggcaggaggcttgtgcaactcttctgctgcaaaatggcgccgatccaaatattacggatgtctttggaaggactgctctgcactacgctgtgtataatgaagatacatccatgatagaaaaacttctttcacatggtacaaatattgaagaatgcagcaagaatgaatatcagccactgttacttgctgtgagtcgaagaaaagtgaaaatggtggaatttttattaaagaaaaaagcaaatgtaaatgccattgattatcttggcag

SEQ ID NO: 270069 - DNA, 405 bp, Homo sapiens
cttatgtttagaaagggttccttattcaatccatggtactgggagaactggcaggacgtgtgcagaaactggacccctttcttccaccatatgccaaaattaattcaagatgcattgaagactttaaaacccaaaactataaaaatcccagaagaaaacctaggcagtaccattctggacatgggaactggcaaagatttcatgacagagacaccaaaagcaatggcaacaaaagcaaaaattgacaaatgggatttaattaaactaaggagcttctgcacaacaaaagaaactagcatcagagcaaacaggcaacctacagaatgggagaaaatttttgcaaattatgcatcccacaaaggtctaatatctggcatctatgaggaatttaaacacatttgtaag

SEQ ID NO: 270070 - DNA, 406 bp, Homo sapiens
  misc_feature (14)..(15): n is a, c, g, or t
ctggccaaggtttnnattattgtaattcctgtggcagaagaggatcagagctgtgaataagtcataagtccctatagatgaggtcatacagctaaggtgatgaggccaatattcaaactcaagcatctggattgcaggctgcacttttgatcgccatgtctagcctcctctatacacctgctctgaccgatttggtattcaccacgcccaagaggctactgaacacctgaaatatggctggctggagttgtgatgtactctaagtataaactacacaccctatttggaagacagtatgcaaaaaagaatataaaaagtctctttggcaattctttatatcaattacatgttgaaatgataatttggatatattgggattaaaaattattaaatttaatttcactat

SEQ ID NO: 270071 - DNA, 452 bp, Homo sapiens
gctaacatttattaagcacaatatttgccagaattcttgcaaaaagccttacaaggactattttattttatcctcataccaacggcttaaggatggtattacttaagtattcttgttttacagatgaggtcatacagctaaggtgatgaggccaatattcaaactcaagcatctggattgcaggctgcacttttgatcgccatgtctagcctcctctatacacctgctctgaccgatttggtattcaccacgcccaagaggctactgaacacctgaaatatggctggctggagttgtgatgtactctaagtataaactacacaccctatttggaagacagtatgcaaaaaagaatataaaaagtctctttggcaattctttatatcaattacatgttgaaatgataatttggatatattgggattaaaaattattaaatttaatttcactat

SEQ ID NO: 270072 - DNA, 493 bp, Homo sapiens
ttttctggtttggggtttttttttttatttgtttgtttaagtctcgtttctgacactttctgaaagatgcaacatggagataggccaggagggaaactagttttagggtgttctcattacattcattttatgtcattttttattattaggtttacattattgtaattcctgtggcagaagaggatcagagctgtgaataagtcataagtccctataggtaaaatcaagtactatttgtctctgatcaaaattgccctttccattgataggagaaatgactgggcctccttgtcatccagagttcattttgtttttcgtggcagtttcactgtctttgggaattgagctttttgaaatgttaaagcacgagaagcatgaacaccttggcagggtttgcagtatctccttctagtgcaggatggagggctccagagctggcaatttgaggaatggctggtggcttctgatgtcacctgccactcatgtgtccctc

SEQ ID NO: 270073 - DNA, 330 bp, Homo sapiens
attgaagtgattctcctgcctcagcctcccgagtagctgtgattacaggcgtccgccaccacgcctggctaatttttgtatttttagtagagatggggttttaccgtgttggccaggctggtcttgaactcccacccttcagtgatccgcccacctcggcttcccaaagtgctgggattacaggactgagcttctgtgcctggactgaactagtaacttttacacccaggaattccaaagcagtttaaaaatactttgcttagcccccaggcagaggcttaacctccaggtggaggctccatgaaggagcctgtagggcttgtggctttt

SEQ ID NO: 270074 - DNA, 1153 bp, Homo sapiens
gtatcacctcccacttcttgctcttcctcctactccagctatgcaggatgtgcctgcttccccttctctttctgccatgattgtaagtttcctgaggcctccccagtgatgcttcttgtacagcctgtggaacttgccttgaacagtacctgccactcaataggatgtctgatttgaaagtgatcttggcttgggaaaagtccatcaggtgtgacacaaggctcaaggaaagtatgagaaaaggtgactattctccatcttcttgggtgtccagagagtgttggagtggctccagcatagctacaagggcaggctcggaggtggtatctgcccccaaaaatcatttctgtgttgcatgagcatcatttgagaagacctgctgcatcatccctatcaataaggctgtctccatttattgaagctcagataccattgcttcaaggtgcgagctggtataactgaaagcaaagaagacattgctaagttgaacattttaactagttttaaaaaaattgttaaaacagcattgcagaaacaatagtctggtaagcaaggctttcatttgcaagaactttacaagagaaaaaggatatgcatgacttaaatagcccaaacttgaagtacagagtctttagtataagccagtacttctgaaggtatactctgtggacctctggatactggcatcaaatgccctcgtagtcattgtattcttcatcaccaaggaattacgttttttttaaaaaaatagcttcagaatgtccttgctgaagcagtaaaaaattaattttattaaattttgatccttgagcgcacatatttttcaatattctgcgtggtgaaatgggaaatatatagagagcacttctgctatgtacaaaagttccgtagttgaacaactgtatggcaataaactaggtaacttagataaaatgaaaaatttctagaaagacccaaactacctgaactgattcaagaaagaccaaaaaatccgaatagacttataacatgtaaagcgattcaaattgtaataccaacattcccatgaaggaaagcccaggaccaggtgacttcactggtaaatgctgtcaaatatttatgtaattaataccaattattcacaaactcctccaataaataaagatcagagaac

SEQ ID NO: 270075 - DNA, 1083 bp, Homo sapiens
ttgtattgaatcttcaggtgactattctccatcttcttgggtgtccagagagtgttggagtggctccagcatagctacaagggcaggctcggaggtggtatctgcccccaaaaatcatttctgtgttgcatgagcatcatttgagaagacctgctgcatcatccctatcaataaggcttagagacgggttttcaccgtgttagccaggatggtctcgatctcctgacctcgtgatctgcccagtcggcctcccaaagtgctgggattacaggcgtgagccaccgcacctggccactcttgcgtatcttaagatgacacaccatccatcagaaacgtctccatttattgaagctcagataccattgcttcaaggtgcgagctggtataactgaaagcaaagaagacattgctaagttgaacattttaactagttttaaaaaaattgttaaaacagcattgcagaaacaatagtctggtaagcaaggctttcatttgcaagaactttacaagagaaaaaggatatgcatgacttaaatagcccaaacttgaagtacagagtctttagtataagccagtacttctgaaggtatactctgtggacctctggatactggcatcaaatgccctcgtagtcattgtattcttcatcaccaaggaattacgttttttttaaaaaaatagcttcagaatgtccttgctgaagcagtaaaaaattaattttattaaattttgatccttgagcgcacatatttttcaatattctgcgtggtgaaatgggaaatatatagagagcacttctgctatgtacaaaagttccgtagttgaacaactgtatggcaataaactaggtaacttagataaaatgaaaaatttctagaaagacccaaactacctgaactgattcaagaaagaccaaaaaatccgaatagacttataacatgtaaagcgattcaaattgtaataccaacattcccatgaaggaaagcccaggaccaggtgacttcactggtaaatgctgtcaaatatttatgtaattaataccaattattcacaaactcctccaataaataaagatcagagaac

SEQ ID NO: 270076 - DNA, 547 bp, Homo sapiens
gtatcacctcccacttcttgctcttcctcctactccagctatgcaggatgtgcctgcttccccttctctttctgccatgattgtaagtttcctgaggcctccccagtgatgcttcttgtacagcctgtggaacttgccttgaacagtacctgccactcaataggatgtctgatttgaaagtgatcttggcttgggaaaagtccatcaggtgtgacacaaggctcaaggaaagtatgagaaaaggtgactattctccatcttcttgggtgtccagagagtgttggagtggctccagcatagctacaagggcaggctcggaggtggtatctgcccccaaaaatcatttctgtgttgcatgagcatcatttgagaagacctgctgcatcatccctatcaataaggctgtaagcacctgatttcctgtatcatgtcttttctagcttaaaatatagtgctttttccttctcagaatcttgactaaaaaaacagaaaggaaaggtgagaaaaagaaaaaaatggaataaagatgtctatgtcacaacaggaa

SEQ ID NO: 270077 - DNA, 491 bp, Homo sapiens
  misc_feature (176)..(176): n is a, c, g, or t
  misc_feature (203)..(203): n is a, c, g, or t
  misc_feature (221)..(221): n is a, c, g, or t
  misc_feature (238)..(238): n is a, c, g, or t
tgctcctttgtctgcttaacatctgccttcccctccccctccttcttcccaccacatgcctggggtatcccccacccaaacaaaaataaaaacacaactgtcaatgaaataagcagttctttccttccttgcacttgctctggacaggacctcaccaccctcccttcaggaagcanggtgggggaggaggggaggagtaggangtggagaggtggtattcntttcccccaggggaagngggctctgtttcttttttcttttctttttttttgagacggagtcttgctctgtcgcccaggctggagtgctgtggcgccatctcggctcactgcaagctccgcctcccgggttcacgccattctcctgcctcagcctcctgagtagctgggattacaggcgcccgccaccacgcccggctaatttttgtatttttagtggagatggggtttcactgtgttagccaggatggtctcgatctcctgacctcgtga

SEQ ID NO: 270078 - DNA, 439 bp, Homo sapiens
acctgaggactcagcctagcaagctcttgtgatagactttgaatagcagtatctgcgaagaacctgaggcctcagcctagcaaactcttctgatagactttgaataggaatgtctgggaagaacctgaggactcagcctagcaaactcttctgatagactttgaataggagtatctgggaagaacctgaggactcagcctagcaaactcttctgatagactttgaataggaatgtctgggaagaacctgaggactcagcctagcaaactcttctgatagactttgaataggagtatctgggaagaacctgaggactcagcctagcaaactcttctgatagactttgcactgcagatgcttcatttaaggctatagagtagatgttggcaatatataaaattcaaacttgagtgtccataaataactgttgttggaacat

SEQ ID NO: 270079 - DNA, 438 bp, Homo sapiens
atactcctataattttaaactaatataggtagtttctctccttaaatttttcatgttcaagacaaagatgctataaataaaagttgtagaagtatagtatcttatttaaaagtaatgatgagcctcttaaatgattccaaggccatttaattttgacattacattgtatttatgttgatggtttgagtgatcatttgatataaatttgttctgagaatcaataaaggaaatagaggaactaattattcaaacttaatagtatcattgcaaattatagtatgtacaaaattcttatttacctcttaatagtctgcttattttttctacaataaatgatgcggtaaaggaaaactataatcaattcactggataacatgaactcttctcttctttacagagtattttggggagaataaaatctacttaaaatatataatt

SEQ ID NO: 270080 - DNA, 788 bp, Homo sapiens
agttgattaggtcgacggtgcagtggctcacacctgtaatcccagctctttgggaggccaaggcatggatcacctgaggtcaggagttcaagaccagcctggccagcgtggcaaaaccccgtctctacaaaaaatataaaaatgagtcggttgtggcattgtgtgtctgtaatcctagctactcgggaggctgaggcaggagaatcgcttgaacccgggaggcggaggttgcagttaactgagattgcaccactgcactccagcctgggtgacagaatgagattccatctcaggaaattaaaaaaaaaaaaaaaaccagttgattaattagcatgaaccagaaatcacctctacagtcctggacatacaggtcaccttgccaccttcctgatggctggttctagattcagtgtggacgagagatagtgacagaggtgacctgcttgggcctagacacacccacccaggcaccacatgaattcaactgaatgtaattccaagagctcctggagaggcaaggcaggcggccaccagcaccgccctgggcggacggaactgccattagaaatatcctaaattggctgggcgcggtggctcatgcctgtaatcccagcactttgggaggccgaggcaggcagatcatctgaggtcaggagttcgataccagcctggccaacatgtgaaaccccatctctactcaaaacacaaaaattagccaggcatggtgggcacctgtaattccagctactcaggaggctgaggcaggagaatcgcttgaacccaggagg

SEQ ID NO: 270081 - DNA, 489 bp, Homo sapiens
tgatttaggggctggcatgataattgctaagtaaagatgtgctttctgtgataatctctttctgggttacatgggcgacacttggtagcacttgaacagacttgggccttcacaaagtgaaatttgagaccatttcagccttctgtagttgccttggctagcatttttgctagctggttagtaagacatttccaagtgcagttattttgagctcccagattattttagaatttgaaccaattgcaattttaaatagtacattatgtttagagttcccttgaggtgtatgtgattgccgttactcccagaattactgtcatattgaattttatctttttttattgcataatggagtattccagttttatatttcatcatattttctgatggactgaaagtttgtataaatgtgttatccataatgctaaaagcccaataaaagaagatgtgtgccattcatagcatacagtactcgtgtgtaaaaatgca

SEQ ID NO: 270082 - DNA, 431 bp, Homo sapiens
tggtcacagctcccaggggtggagagtgtgcagttcctggtggggcaggccattctgttctctccaccatctgctgatgctggagttaggcttgcacagttggggacatttaagggattgtcagagttgcaagaaaataagaacctcaaatggattgaatccacaggatctggggtaccagctgacttgcctggtcaagatggcaggagaacctagtctgtgtgcgagctggggctggcagcaagtttctgaacaagtagcacatggcatggggctaattcaaggtctgtgctattctaggacagcagattggcctagggtctaaatagaaaagaaagctttgtctcagaaagtctggagagccctacaggacgctgcatgtccttttcctgggtctggtgggaaaaacagggcagttgagtcttgcaaag

SEQ ID NO: 270083 - DNA, 421 bp, Homo sapiens
ggggagggaagagagtgaaaggcagaagcccaggactggctaggggtggggtgggctgcacagcattcggggagaaagggacggtgtgaggctgaaataggaactcactgacaatgtgaaatgcctggcactgggtctgtttgttcatataggcaccccgtaaaggtagggctctgcccacatctcatggtttaaaaccttatcaaaggggaagtttttcaaattacaaatgtgtggtcttattatgtaaaatactaagtattacttattcacaatactgatatgtataaaagttaaattctggccgggtgcggtggctcatgcctgtaatcccagcactttgggaggccaaggtgggtggattatatgaggtcaggagttcgaaaccacctggccaacatagtgaaaccccgtccctgcc

SEQ ID NO: 270084 - DNA, 471 bp, Homo sapiens
aaatgagtgtttttccaaacctcagtttgcccatctgttaaacagggattatagtacttgtctcacaaagtttctgtgagaattaaacaaggggatgtatcccaagcgctcagcatgtcgtgcacaccctgaacatggctgctggtattagagttttttctttgactgaatttggaaggaatgtctacatctgtttgctaatcgaggtcccatggtgacacggctgactttaagattcttttaacaccgggattctgccatcctattaaggatatacagaagcaaaaaagctgttagcacatgtccagcctctgagtcaaggagcagagaaatgtgagttggttgttgaagaaatgcaaagactgaatttgcttcatgaccccattttttggtttatcatttgagcagactgagactttccattaattttaaaaagtcatgaccaaaataaaaataaaattattcatgaaa

SEQ ID NO: 270085 - DNA, 433 bp, Homo sapiens
tttgcttttcagtgtgtaagctggtcagcttacagcagtacaaattggcagcgtggcaagaaagaaaactgaaattcaatccaacactgggattggaagctcttgagactcaaatgtcaccaacaccgggggcttctcctctaattatcctgtcaaacgagggttgaaaatgtcagcacagacttcagtctcagctcctccagcaaccaatgagagtgggcttgggtctggtttaaatgatgaagaacaaatttgaaaaacccttcagttgatttcaagacttcctgggacggcgatgtttaaaccacaatgttcttcttttggggcaaagttaagagccaatcacagttaaggtttctctgcatgttctgcccatatttggctgtaatcttgcttcatccaactaaatttataatatatgtgagtgaaaagc

SEQ ID NO: 270086 - DNA, 637 bp, Homo sapiens
tgaggtcacccaggaaagagtatgtgaggagagaaagggagcaagccctagcccccaccagcaaccagaggttgctcatttcagaagcagaggccctaactcagccccaaggggaagcctacatttctgtagactcgtatttgatggctatagcatatgcttgctaaccactgctcttctagggatccctggagaagcaggcaagtaagagcggggagtggagaagcccccataacctgtggggaaagaaaggagaggcttccagtgccaacatcagaaggcctctgacctctttgacttgcagctgtagccgtttggctccctctcctcaccccctaaagctgggtcggagacagccttgtccccagagtccccagcggctctttagcatgatgctgcattttgaatgcggttaccacagccccaagtgactgagccagctcacgtgctacctcttgtgtgggtaccagtgtatgcacacacagggcttggagccaggaacggaaagaaagtgctcactgcaataatgccacaggagccccacgagggtgggcactggatggcatcacaacccaggcccaggacactcccctcgctccagactagaggagacacagatgtctctctgccctgccct

SEQ ID NO: 270087 - DNA, 382 bp, Homo sapiens
gtgagagggataagaggctttatctagtctttttttgcatatgaatgttcagttgttttggcaccttctgtcagaaaggctgtcttttctccatggtattgcttttgttcctttgtcagatatcagttggctctatttgtatgagtctgggccctctattctgttccattgatctatttttctattcttttactaacaccacaccatcttgattactgtagctttatagtagccttccaactttgttcttttctttccatttttttttttttttggctattctgggtctttaggctctccacataaactttagaatcaggttttttgtttgtttgtttgtttgtttgtttgttgtttttgagacaagatctcactatgttgt

SEQ ID NO: 270088 - DNA, 207 bp, Homo sapiens
tgaaggactatacaaccaaaggatttgttttcttcaaagtgatcacatggaggcgcagtccaatgatgtcaaccttgctgagatgtttgaaatttcttttacaagtttccatgagaacctttgaagaaagccttctccaactatcctcaatgatggaaatgtactcattctttaaggatgggtttgattctgggagcaatctaaaat

SEQ ID NO: 270089 - DNA, 483 bp, Homo sapiens
gactatactcaaaattgctttaaaagttttttgtgaagactatgataacattattcctgtcaggaatttttaaaaattatgtacaattcatgacactgcagcctaaaatcgttctgtaatttcatgtagccttgaagattaagttctcagaagatgcttcttaatctgatccctgttgtctctccaacttcatcaccatccattccctaccacatactgtatgctctattcatgctgaaatgaagactatatttgtagtttcattactatatgtggtttgccaaatctctttgtctttgcacttgtgtttccttttacttaatagcactctccatccctcctcaccctcacgtcccacctccatccatttagctaaataaccagttacatagatgagttaatctaaacattccttctgggtagatccaccctatttaaccttgggcacattactgaacttttctgagctttggtttcttgatt

SEQ ID NO: 270090 - DNA, 400 bp, Homo sapiens
  misc_feature (399)..(399): n is a, c, g, or t
tcagctcctcccattaataggtggagtttcttttcctactactgggatctggactagtcttgtgacttgccttggctaatggaatgctacagaaacaatacctgccagtttcaagcctgaacttcaagagccttgcacatgtcccctagctctttcgtaaacttgatgagtgacaatgtacacagcctgctagagatcagaaacaacatggaagagtgccaagacactttagccaacaacgagccattcctagtcaacccagaaactgatcacagtcatgtaaattagcccagctgagaccagaagaaccacccagctcagcctagcccacattactgacccacagaatcatgaattaaataaatggttattattttgggtgaagtgaggaaaaagaana

SEQ ID NO: 270091 - DNA, 416 bp, Homo sapiens
tgaaaactttataaaaatatcctctcaaatgaaatggacaattataacagaaggaaaaattatggtgaggacttcaaaatccaggggtacggcagactaagataccgtaaatgacacacttatgataaaatttttttttgtggctaagacagggtcttgctctgttgcccaggctggagtgcagtggtgtggtctcagctcactgcaacctccgcctcctgggatcaagtgatcctcctacctcagcctccaaagtagctgggactacaggcatgtgacaccatgcctggctaatttttgtaaattttggtagccacagggtttcaccatgttgtccgggatggtctcgaacttctgagctcaagcaatccacctgcctcaaagctttgggattactggcgtgagccactgtgccc

SEQ ID NO: 270092 - DNA, 411 bp, Homo sapiens
gagataattgctttggtgacttcccgtaacctaaagcaacaagaaagtgacatagctgagaatagagtttagttctttgacttccaattcatgtttcctacaaagcataacttaacaatttggaaagaaattccatatgaattaaacatctttctttgaattgaaataagtttattttcaacatcaacaccttcactacagggtattctgtgaactgaaaagaaaggctctgtgctgaaactgtgtctcgctaacacttcagctgacatattaacttcttgttgaagagctatttaatttgaatagaatctgagccgttacagtggtaggaagattttatgtaacctcatttttctattgatgaaaactccactacctttaagatctaaaaagataagacatctgccatta

SEQ ID NO: 270093 - DNA, 322 bp, Homo sapiens
tcacttcaaaacaggcaaaatttataatagagtcaaatcaggactgaatgcatcaacaaaaactggagttcagcttatcaaatacagatcaaaagcaagaaatagactagagagcacacgggatatttcttccttaaatttctctattttttattgacactggaggaaaaaatagcacattaaaacctccttgctgaattactgtcctaaaccaatagatccgtggggcttgttcagctaaaagccacaacagactttgtaatgcaatgatgtaatcttggcatcttggctttgtgtcatttatattcaacctaaaaaaaaa

SEQ ID NO: 270094 - DNA, 409 bp, Homo sapiens
agaaatttattatgtaatgctatagtaaataagatttttttctctattttatcagatagtttgttttaagtgtatgaaactgtagctgggcgcagtttaagtgtatggaaccatagctgggggtggtctcccaaagtactagatcacgcctgtaatcctagcactttgggagaccaaagtgcatggatcacctgagatcaggagttcgagaccagcctgaccaacatagagaaaccctgtctctgctgaaattacaaaaattcactgggcatggtggcgcatgcctgtaatcccagcaactcgttaggctgagatgggagaatcgcttaaacctggaaggcagaggtttcagtgagccgagatcaccccattgcacttcaggctgggcaaaagagctagactcctactc

SEQ ID NO: 270095 - DNA, 335 bp, Homo sapiens
tgaatttgccttggggagaagactacgtaactgaaaaccagcatccaggccctcaagaagaaatataatctccaacagtctccttttcaatttctgtcaaatgtctggcttctcttgaagggatgttcacgagaagggacagccgccctcctccgagcctcctgtttcagctgatgcaccttcaagtacaaggtcctgttcttgggctctgttaaagtttccctcaagaaaaaaaccttacatttgccaatgcacttgatgtaaagttgttgaggatgttgactctcctttaaacatttattgaagctaggaataaacttaactggacctgtgta

SEQ ID NO: 270096 - DNA, 477 bp, Homo sapiens
tatactaaaaattatttatctgaaattcagatttaactagtgtcctgtattatttgtaaccctgtattatctggcaactctgtgatggggacccaacagctgggtgcagtttaaggtttagcatcaaatgttagcttagaaggaagatgagggccaaggcagtgagtttaggactgacacagcagatggccccagtatatcctgcttctgggtttgaatccaaactccaccacttaataaccatgtgaacttgagcaagttcctgaattttatttaacttatctttgttttggtttcttcttctctaaaatgggaataataataattatagcaataacttccctcaaagtgttgttaaaaagatgagttatttgtgaagtgcttaaaacagtagctcggttagttattatttttgttattccaataacatctaaaaataatgttattccaacaataaattcctgatatccccacccc

SEQ ID NO: 270097 - DNA, 495 bp, Homo sapiens
tgatgattttaatcaagagtaaagggaacatttattacatgaaatctgacttcagttgtgcaaaggtatgttaagacattaagacaattgctggaaggtttcaaatatgtgtacacacacatagagctacttttgtgtgtttatttatatgtatatttcacaaaggctaatgcccacagaggaaaatgattattttaacttctgggttatcatctgctggcagggtctgatcaggtctagagtatttaaggaaaagtctcctgtcttctatctccactagaagtactgcagcttgagagctgaaaggaacttgaaaaatgttatccagtcttcacttagcccatttttatcggcattaggaaatagggttcagcaatggttattgatttagcagtctggtcttatatgatctgctttctaattatctatctagtattcctatattatactggaacttcaataaattataacctatgtgaatatcataaaaaaatg

SEQ ID NO: 270098 - DNA, 446 bp, Homo sapiens
atctgagaagcagttttgtctagtgtcgtttcagtaaatgggactcatttagtcagtttgctttgctgtcagaatcatattccagatatcagaatgtgctatggcaggtacttgtttaaaacaagtaataatatccttgtaatgtttagcaatacagctgactggtctgtgttccattacttgtgtaaaaggaaatatgtaaagcttttaaaaataagtttaaatgatcaaaagagatgcctgaaaatatattttggcacaggaaattacaggaatttataaatgtgtcatgtggaaagataattacaaagtttattttaatcttttatctctgactgaatcttaagttaaaatattcttcccggcatcctgtctggtttttgccactgtccctgctttacgtgttacctttccatgttgatctgagttgcatttagttgaggaga

SEQ ID NO: 270099 - DNA, 1391 bp, Homo sapiens
atgatttggggtcctctgagactccctatgaactttaggatgtgtttttctatttctgcaaaaactgtcattggggttttgatggggttgcattgaatctgcagatcactctgggtggtattgtcatcttaaaaatattgaatccatcaggctgggcgctggggctcacgcctgtaatcccagtactttaggaggctgaggcaggtggatcacctgaggtcaggagtttgagaccatcctggccaacatggagaaaccccgtctctacaaaaatacaaaaattagccagccgtgatggcgggcaccggtagtcctagctactggggagactgaggcgggaaaatcggttgaacccagtggtggagattgtagtgagccaagatcgtgccactgcaatccagcctggcgacaatgctagactccgtctcaaaaaaaaaaaaagtggcgtatggatgtctcatgtcagctttatgtagtgggtggcactgtttgtgcgtggataattgtggtgtcttggcacattgacccttttatcaatgtataacatctttgtctcttaaaatagtttcagccacttcagctctcttttgcctgtttatatgaatacttttccataccttcactttcaacctgtttatgtctttaaatctgaagttagtctttcaggccgggcatagtggctcacgcctgtaatcccagcacttgggaggccaaggtggacggatcacttcaggtccacagttgcagaccagcctggccaacacagtgaaaccccgcctctgctgaagatacaaaaattagctgggcgtggtggcgggcacgtgggatcccggctgctcgggaggctggggcaggggaatcacttgaacccaggaggcggaggttgcagtgagccgagatcgcgccactgcatttcaccttgggtgacagagtgagactgtctccaaaagaaaaaaaagaatctaatgcctgatgagctgaggtggaacagtttcatccccaaaccacccatccccacccccggctggtagaaaaactgccttccatgaaaccagtccctggtgccaaaaagattggggaccactggtttaagtcctgtagctttacagaccatagctagaaaggcaactggtattaattcaccctgcacgaggacctccgtctgcctccgctgagctgctgtctgctcacttccccgggtggcacaccggcctgcatgtaaccaactcctgaagcttttatctgggaatgtcctcttttttggggggtggggaagacagggtcttgctctgtcacgcaggggaatcacttgaacccaggaggcggaggttgcagtgagccgggatcgcgccactgcatttcaccttgggtgacagagtgagactgtctcc

SEQ ID NO: 270100 - DNA, 1221 bp, Homo sapiens
ctgcctcggcctcccgaagtgctgggattcccggcttctctgcccatttttaacttgagtttattgttgggctgtagttctgtgttctggatgtgagtctcttacatacgtggtttgccagtgtttattttctcccattctgtgggttgtcttttcactcccttgatgggtttgtttttttttccatatagagtctaactctgtagcccagatcgtgccactgcaatccagcctggcgacaatgctagactccgtctcaaaaaaaaaaaaagtggcgtatggatgtctcatgtcagctttatgtagtgggtggcactgtttgtgcgtggataattgtggtgtcttggcacattgacccttttatcaatgtataacatctttgtctcttaaaatagtttcagccacttcagctctcttttgcctgtttatatgaatacttttccataccttcactttcaacctgtttatgtctttaaatctgaagttagtctttcaggccgggcatagtggctcacgcctgtaatcccagcacttgggaggccaaggtggacggatcacttcaggtccacagttgcagaccagcctggccaacacagtgaaaccccgcctctgctgaagatacaaaaattagctgggcgtggtggcgggcacgtgggatcccggctgctcgggaggctggggcaggggaatcacttgaacccaggaggcggaggttgcagtgagccgagatcgcgccactgcatttcaccttgggtgacagagtgagactgtctccaaaagaaaaaaaagaatctaatgcctgatgagctgaggtggaacagtttcatccccaaaccacccatccccacccccggctggtagaaaaactgccttccatgaaaccagtccctggtgccaaaaagattggggaccactggtttaagtcctgtagctttacagaccatagctagaaaggcaactggtattaattcaccctgcacgaggacctccgtctgcctccgctgagctgctgtctgctcacttccccgggtggcacaccggcctgcatgtaaccaactcctgaagcttttatctgggaatgtcctcttttttggggggtggggaagacagggtcttgctctgtcacgcaggggaatcacttgaacccaggaggcggaggttgcagtgagccgggatcgcgccactgcatttcaccttgggtgacagagtgagactgtctcc

SEQ ID NO: 270101 - DNA, 306 bp, Homo sapiens
tggtgccaaaaagattggggaccactggtttaagtcctgtagctttacagaccatagctagaaaggcaactggtattaattcaccctgcacgaggacctccgtctgcctccgctgagctgctgtctgctcacttccccgggtggcacaccggcctgcatgtaaccaactcctgaagcttttatctgggaatgtcctcttttttggggggtggggaagacagggtcttgctctgtcacgcaggctggagtgcagtggtacgatctcagctcactgcactctccacctcctgggttcaagagattctc

SEQ ID NO: 270102 - DNA, 405 bp, Homo sapiens
acttatttatattattcgatttattcaacattctcaaaatgataaaattatggagatggagaacatattagtggtttcctggggttgtagagaggaaagggagtgggtataactgtaaaaaggggtagcataagggatctttgtggcaatagaacagttctgtttcttgactgtggtagtgttaacacaaacctacacatatgataaaattgcatagaactaccacatacactcacatgcacaaatgaatgcatgtaaaactggtaaaatctcaatttctttatataagatgatataagattttattatgtaagatgttactattgggagaaactgggggaggggtgtacaggatctgtctctactaattttcatgacttcctatgaatctataattatttcaaa

SEQ ID NO: 270103 - DNA, 415 bp, Homo sapiens
gtaagacacttagtagaacagctggtgctctgtgggtgctagtttctttccctcctcaagaatgttgtcggttaaagtatctactataataattttgtgagtgccaaagaaacactattaaaagttgaaaatctcgtgaaaataagaatgggatagcagaaaagtctcagactctggagctagaaggcagaagttagatataactgcctgtttccagttgtgcctcatgtaaatgcaggtgacaaaattcattttattagctggttgtgagagttaagtgttagagacaggaaatagaattggcttagttttctaagcttcagacaaaaagtaagccaaacatttacaatagtgtttagtatacttctcttttataataacttttattgataaaaaaatttttgtaaactgcaaa

SEQ ID NO: 270104 - DNA, 351 bp, Homo sapiens
caaaggagtctcttcttttccctctgctccaggttccctaacatgccagggcagaaattcctgggtccagccaggcacggtggctcacgcttgtaatcccagtaacttgggaggccgaggcgggtggatcacctgaggtcaggagttcgacatcagcctggccaatatggcgaaaccccatctctagtacaaatacaaaaattagctgggcgtggtggtgcatgcctgtaatcccagctacttgggaggctgagtcaggagaatcacttgcacccgggaggcggaggtggcagtgagccgaggttgtgccactgcactccagcctgggtgacagagcaagaccctgtctca

SEQ ID NO: 270105 - DNA, 1292 bp, Homo sapiens
cgacctgccaaagtgctgggattataggtgtgaggcaccatgcccaacatataacaataaattatatcactatataaaataaattcctcacagcaaaaaaccaccataagcatagtctaaagaaaaatgacaaatttggaaaaaatattttcaaatcatatcatgcattgcttaatttataaagaacacctagaaatgaaaaagtccaatgatccaaaaagaaaaaggtacaaaattgtaaacagttttcacagaaaagaataaaatgattcaagccggaaaaaaagttcaactttattactaagagaagtataagacaaaactatactgagataccagttttttaacctattaatcaagaaagactttttagttttataaaacattgtaatattctagatattattggtaagaatggagggaacaagtatttttgctgatagaggggtaaactggaacaaccgctaaggatgacagtgaattctgaatttatttacccaatgtactcttcaagttgcagaggctgagaaattattaaactgttacccagaactttttatgcagatgggggggcagtctgaatgctaattaagttttctcaactatatgctctctcctcatgatttgaaaggcaaaagtgaagcagaggccaagttttgaagttcttgaatgttacgaggtagtgaaaaacgtttccatgcagcagtgatcaagtgtctatcgttcagcttcctgaatatggataggctgtggtggtggcagcagcttcttaatctgacattccaacccctagattgtggtgttacatcttctttctccagcttcccaggagtgaaaggttgtagtggctggcctctggttcccagcagggctccatggtgaccagaggttgtagttcccccagtgaatcatgtttgtgtcactgtgggattcattcccataggctcaacttagattcctaaaccctgctccttcaacccttccagtaactttataagcaccaaattccatttaaaaagtgccttcctgtttaaaatatctataatggcttctgtttcctgcattgaaagctgactgatctggagggcaattgggcaacagcaatcaaaattgtcttttcttttgacctagcagtttcacttcttggaatatatcctgtaaatatgcttatgtatgaaggaaatgagtttgtacaacgtttttcaatgcagtattgtttgtaaattgacaccagtaggggaatagtaaaatcaattactatgcatgcatataataaaattttaggtagctat

SEQ ID NO: 270106 - DNA, 391 bp, Homo sapiens
  misc_feature (390)..(391): n is a, c, g, or t
ttgcttgaggccaggagtttcagggtgccgtgagccacagtcacactgttgcactgtggcctgggcaacagagcaagacctacctctaaaaaagaaaggaatgaaagaaagaaagaaggaaagaaaaaaaaaaaaaaaagcggccgctcgaattcgcggccgcgttcgacacggctgcgagaagacgacagaaggggcggagagcttgctgtagcagacctgcagaggcttgcttgtggggttaacgaggccctcctgtctcctcctctttcccaccacgccacttcaccaggttctattcctggccatttcaggctcaagtcatccctggagggagtgggatctgggcagaatcacattctgctgtcacctcagcatcttgtagagaann

SEQ ID NO: 270107 - DNA, 481 bp, Homo sapiens
agaattaaaaattaacctgcacaatgtatttagactttaacctatctccatagtcatagttaataaatttcctcatgatattataggtttgtacctaaatcaaccggtagagaaagttattctcaataataatataagctaaatgtacattcataaattaggttcttacctttcatagagagtgacggcaagataaaacaattcatttattttttgttttatttttctcattcatttactttgaagtatttatttggtttgctttctttcatttgattctgtaggcattttagaataggaatgaaaaaagggtcgcgatgccaatagagcataggatcagcaacaaataagccaaagagagatgaggtggaaagacaaccagtatttttcgacaacattccattgggctttgcttgtcaagtgaaatgaatgcccgttgatgaggaagctgctgcctcatcaggagttccgctattcctgg

SEQ ID NO: 270108 - DNA, 535 bp, Homo sapiens
agaattaaaaattaacctgcacaatgtatttagactttaacctatctccatagtcatagttaataaatttcctcatgatattataggtttgtacctaaatcaaccggtagagaaagttattctcaataataatataagctaaatgtacattcataaattaggttcttacctttcatagagagtgacggcaagataaaacaattcatttattttttgttttatttttctcattcatttactttgaagtatttatttggtttgctttctttcatttgattctgtaggcattttagaataggaatgaaaaaagggtcgcgatgccaaaattgaatgttaatttaagcatgaaaggacaagtgagattcatataaggggaactagagcataggatcagcaacaaataagccaaagagagatgaggtggaaagacaaccagtatttttcgacaacattccattgggctttgcttgtcaagtgaaatgaatgcccgttgatgaggaagctgctgcctcatcaggagttccgctattcctgg

SEQ ID NO: 270109 - DNA, 414 bp, Homo sapiens
ccatttcgtagataagttttctaaaaaggccgaattcagagctagttctcggcaggggagaggtcgcgccccgggttcgtgcacgatgccactagcatctctcccctcactgcactgatgccatgaagccttagaggccagacggcccaggaaccctgttgacagtggccaaaccttaaacacgtacaactgcttattgttttcaaaagtgtgtctacttcgacaaacctcattctagtctcacattcctgatgggaggtaggtaggactgggatcattaaaaccagtggacaccttttctgagccaaagaagcaaaaagaatctattgagcaaaagcaaattacaaggagagttctcaccatccctcatttccaaacccagccaaaaatcctattgctttcagtgattcaaaa

SEQ ID NO: 270110 - DNA, 577 bp, Homo sapiens
tcaagagcgtctcccactccttcaggatggagacaaaaacccaactggtggccaagagtggtggcttacgcctggaatcccagcacattgggaggccaaagcaggaggatcacttgaggccaggagtttgagacgagcctgggcaacatagcaagaccctcgtctctattaaaaatataagaaatatgccagacacggtggctcatgcctgtaatcccagcactttagaaggctgaagcaggtggatcgcttgagaccaggagttggagaccagcctggtcaacacggagaaaccccatctctactaaaaatacaaaaatcagcctggtgcgatggcacacctgttaggcctagctactcaggaggctgaagcataagaattgtgtgaacccaggaggcggaggttgcagtgagttgagattgggccactccattccagcctgagaggcggagcaagactctgtctcaataaacaaacaaacaaacaaactgtccaggtgtggtggcacagccctgtagtcggagctaataaagaagctgaggtgggaggatcgcttgagcccaggatatggaggct

SEQ ID NO: 270111 - DNA, 292 bp, Homo sapiens
tgccccctctcttagagccttccactctggcccccacaatgccttacagagcaaatctgggtcagactggatgcaacctgtgattcccaacagagacaaacaaagcaaggttcaggatgctcagtactgcgatgaaatgccaagacacagaaaagccatgtgtcaagaaggcgggagttattctttagacacatcctggtatatgtttatcattaaagatcagtggcttttgtgagtctaaaaaattaagccttaaatgttttcatcaaattccagttaactacctatctag

SEQ ID NO: 270112 - DNA, 496 bp, Homo sapiens
gattacaggcatgagccaccacacccagcctacagtcttaaatttagaaggaatcattgaaataatctaatctattccaacctagagaccagtttaaggattccctacacgaatgtttctaactgatgacaaattgtttgtcttgaatattgtagatgaagtgaaggtcactattctatgttctattttcgaatctttaatttgtttttaatactttctacttattagccctagttctgtgctctggaacagtggaggagaaacctacttacttctttctgtgacagtctatcaactctttggaagaaacaattgtctcccatcctggtcttgtcttcacaaagttatcaaccctcaaggcttcatctatggctcttttagcttgaagatcctctctcatcaaggacaaactccttcagatacctcccctaagaggcttgacacccaccgttagaaactgcggaccaagtcagaataggaaaaaaggtaaatgaaa

SEQ ID NO: 270113 - DNA, 977 bp, Homo sapiens
gactcggctcccgctgcgagcggccgccctgcccgcgcaccgcgctcagcgcccaccgccgggcttcccgcgccggacccagtacctcggctccccggggccggaccgaggccgcaagcagcgccgcggggtgtggggcggacccaggagatgaaatgacaacgtcaaccctccagaaagccattgatctggtgacgaaagccacagaggaggacaaagccaagaactacgaggaggcgctgcggctgtaccagcatgcggtggagtacttcctccacgctatcaagtatgaggcccacagcgacaaggccaaggagagcattcgagccaagtgcgtgcagtacctagaccgggccgagaagctgaaggattatttacgaagcaaagagaaacacggcaagaagccagtcaaagagaaccagagtgagggcaagggcagtgacagtgacagtgaaggggataatccggagaaaaagaaactgcaagaacagctgatgggtgccgtcgtgatggagaagcccaacatacggtggaacgacgtggccgggctggagggggccaaggaggccctcaaagaagctgtcattttgccaatcaaattcccacacttgttcacaggcaagcgcaccccctggcgggggattcttgctgttcggaccccctggcacagggaaatcctacctggccaaagccgtggcaacagaggcaacaatccacctttcttctctgtgtcctcctcagatctgatgtccaagtggctggggggagagtgaaaaagctggtcaagaacctgtttgagctggccaggcagcacaagccctccatcatcttcatcgatgacggtggattccctctgcgggtccgaaatgaaaatgagagtgaggccgccggaggatcaaaacggagttcttggtccagatgcagggtggggaataacaatgatgggactctggttcttggagccacaaacatcccat

SEQ ID NO: 270114 - DNA, 637 bp, Homo sapiens
gactcggctcccgctgcgagcggccgccctgcccgcgcaccgcgctcagcgcccaccgccgggcttcccgcgccggacccagtacctcggctccccggggccggaccgaggccgcaagcagcgccgcggggtgtggggcggacccaggagatgaaatgacaacgtcaaccctccagaaagccattgatctggtgacgaaagccacagaggaggacaaagccaagaactacgaggaggcgctgcggctgtaccagcatgcggtggagtacttcctccacgctatcaagtatgaggcccacagcgacaaggccaaggagagcattcgagccaagtgcgtgcagtacctagaccgggccgagaagctgaaggattatttacgaagcaaagagaaacacggcaagctctgcctcaaagaccgagtgacataagccattcccaccctcctaggttcacatccagggctgtgtcttccttgggggaggagatggtgtcgtttagatcagggtaaggcagtcaggcgggtgttcaccactgccttttcttcctctgagcgtgagaacactgaacccagccactgcccctgggtccctgtcctggaaatggtctaataaatccttttcccttcttgagctaaaaa

SEQ ID NO: 270115 - DNA, 506 bp, Homo sapiens
cagttggcagaggtgtgacctgcctcctccgccaactgccgtgcggccctgggaagagctgctggcagccctgttgggcagttgttttcatcctgggaagccagtcgcagtcattctgcctacctgaggcaggatctgctgatgaaacccttttcttccttgattgactggatctcgggcaggacagacctggctggcccaggccccagagcccggtgcacagtcaggtgaaagtgacgagcggggccgcctggctccactgccgtgggtggggaagctgagggccagagccacgcagcccagaagctgccaggagcctcggctgcagcctccagggctggggtttgtgtgtctctaccatagcacagttaacaggaatttctggaacatcatggggggttccagtgtttgggctggactcaagctcagcttaattccattttggtcaaagggtctgatttgcccttgaaaccataataaagaagctctagaaaaacaaatcactt

SEQ ID NO: 270116 - DNA, 253 bp, Homo sapiens
aggcaaaaatttctgccctcgtgaaggccgtattccagtgttcctcatctacgtttttaaatcatttataaccattcatctgtatatgagtatatttttaaggggtgtaaaaagagttgacactcaggccgggtgtggtggctcatgcctgtaaccccagcactttgggaggccaaggcgggtggatcacgaggtcaggagttcaagaccagcttggccaacatggtgaaactccgtctccactaaaaataca

SEQ ID NO: 270117 - DNA, 189 bp, Homo sapiens
ccacaggtgtgctgaatcacggttcaaatgttaccaaaccacctgtgaatcagatccatgcaagagagtaattatttcaaccttcaactgctttttatgtgtgagatttagtaccaaattcctagaccctgttcatgtgtgagaatggtaatcatatcagcttggtgtacataaaagaatcacattctc

SEQ ID NO: 270118 - DNA, 693 bp, Homo sapiens
tggaagacttagaagccacacacttaagacagcaccatcacttttatggaaggagtccagttcctgaatgctaccatggagctaagcccaaacactgtatggaacatctacattttcggtcataaagcacgataaatgtcctgaaactcaaggaacttataatgtagaacatagctgaagcagtgcatctgtgttatagtactgtcttcttggaggaaacatctttagagtgagtcaggaagccctcaaagtgatgatggaatttgcggttgcaatcaagttcactgtttaaaaacctctcctagaaagccaagaaactaggatcaaatccttgctattccactaattaacttgtggagttgagagtaaacaattagacatttctaagtctagttttcctcatctgtgaacagccaattgttcattaagtaaaaggggctggccaatttaggtattcaatacatgtttgctttcaaccacccacccacccacctactggcacaaaggctccaaactctacttgtaaaatctaccaaaaagaaagttactgcattatatttgtgtataaatggtttttacaacatctatatgttggatttttttttttctgctctctctggaaaaaaattagtttaagccttgcttaagaaaaaagaagctaaagtaaataaatcctgaccaagaacgcatata

SEQ ID NO: 270119 - DNA, 353 bp, Homo sapiens
aatcacaattttgagcccttttccttcaaaggaattaacaaataggtaattgtcttttttagtactcattattcaggtttattggtcttatggttttataaattgagagtattctctccacttgagaaatgattttgtaaagtctgtttttaatttcattaggttacacttgagacttctttgtgaagagcttaacatttagctgttaaaacttgaggaggtggccgggcgcggtggctcacgccttgtaatcccagcactttgggaggccgaggtgggcggatcacgaggtcaggaggtcgagaccatcctggctagcacggtgaaaccacgtctctactgaaaataaaaaa

SEQ ID NO: 270120 - DNA, 1407 bp, Homo sapiens
gatagagacacgaaaaacccttcagaaaaatcaatgaatccaggagctggttttttgaaaagatcaacaaaatagatagaccactagctagactaataaagaagagaacagagaagaatcaaatagatgcaatagaaaatgataaaggggatatcaccactgatcccacagaaatacaaattaccttcaggggatactacaaacacctctatgcaaataaactaaagaatctagaagaaatgggtaagttcctggacacatacaccctcccaagactaaaccaggaagaagttgaatccctgaatagaccaataacaagttctgaaattgaggtagcaattattagcctaccaaccaaaaatgtccaggaccagatggattcacagctgaatcctaccagaggcataaagaggagctggtaccatttttgaaagaaaataaagtgggagaagaaagacaacataaaaagaatagggtataattaaattcattttctctctgaaaacatatttatatcttcatgcagcttttcaaccagccatgcgccgaaataagcaaatcgaaagctgcaaaagctgcagcagtggaagtgttatgtgttaggccgaaaggctgtgggtgtgaatttactagtatagccaaaagaaaaaaaggtattcagcagctgttgttcagttctggggggattatctgcttagtgccatgacaagagcaaattctgattgagaagcacaagtcataacagcagctttacctctggcccaccaacctttctttccgagggtaggacagaagttttcttcacctggtcatacacaaattatataaaattcagttgccttgcaatgcaacaacaataccgtcaaaggtggaagaggtatccccagagaatggaaatagtatcccaattgttaaagaaaaagtaagatatgccagaaagtagaattacccaatattaaaggtcaccataatacagtgcttatttattccactattcatttacaggggtaatagcatagagctaaaattgttcaagtactcccatggatattgtttagtttataaaaagttatttctttaaagtacacagaatgacatcaccattcccaaaaccaaccctgagaagatttctgaaaggtttctattaaaagatgtaagatatttcctggaaatggagactaattcaaatttacccagcctcatccaagagaggaccaagttactttttcaaagtagtcgagtatcttttattacttgcacagagtcaaaaagaaaacttctagaaaatacgcagttatagtttgcagatagggttaactgggtgaaatagcgacaaggcattttcttatggagttacagacttacagaattttagagttaacagggaccttaaagatcatctactcc

SEQ ID NO: 270121 - DNA, 431 bp, Homo sapiens
gcggaggttgcagtgagctgagatgctgctactgcactccagcccaggcgacagagtgagaccctatctcaaaaataaaaacaaaacaacaaaaaaagcaaagctgaagtgaactgctgatttagggcaaaataattctttctctttaaaaaacaaaagtatatactcagttgtttctttgacactgttgcccctagtttagtcttaaacactcatagtattataattacaacttttaatctaagtaactaatgtcttacaggaaaacaacaacaacaacaacacttgaggggtagatgattgagaactttcagtcatacacaagcattttaacagactgccagagctgcccatatctcttttatgttttagtaaaataggaaaagtgaacacatttgttaacataactcaattgccttttgatggcatac

SEQ ID NO: 270122 - DNA, 366 bp, Homo sapiens
tctctgacaccagctactttagacaactcacacggctatcaactggagagtggtccaattaagtttgcagcctttaaaagcatgttgccaaggaatttttaccaccttgctcacaaaacaagttactgagaatgtcgatacatatgtatatgcacacgcatcctctgtataatgttgatatatataggtatatacatatatataccatataatctcaattccttgtttaaaaatatagatatatctatgtccatatataaaatgataggatatctaccaaaataataacagtgatgatctctgagtaatttctattttcttctttataattctattttctaaattagaaaaagttaaaaaattaaa

SEQ ID NO: 270123 - DNA, 275 bp, Homo sapiens
gcatcacagatcactagggaatcggtattgtagggaactagctaaccattttggggaggaggaatttgaatcattcttatatactgtatatcagaatgaattccaaacacacataaatttaaatgcaaaaaaatcataagagagactggaattgatttatataatattgaggggagaaaggacttgaagtttatgtgtagaaaatcaaaagcacaaattattttctttaaaaagtggatatttgactacataaaaattaaaacttttatactaaa

SEQ ID NO: 270124 - DNA, 673 bp, Homo sapiens
caaagattgagtcctcactgtgtgccaggcaccatgctaaattttgtgctaggcacttgggatactctttcagacaagactttgtccctgctcacagagaaatctgataggttggcctatagtcactcttttctaaacttgacctatctacctgaattaaccgaaggagctggttagaaatacagattcctgggccaagaagaagaacctaaagtccaacttcctgtaaccatcaacacatttaaccctgtaagtttagagtttattgtaaccttctcatgccctttgctatactcagtgtgcaaatcatgaagactaaggtggatcctgttttggtggagattctgatgtgttaagtctgtgatgaaacctgggaatgtgagttcttgaaagctcccattattggaaatcactgagctagatagtttttagaattttttttctgaccggagaatcagtgctttttatagttgtctgacttgtagtcacttgtgactttctgaaagtttttctgtgtattttgccacatagaaaatattgctcaatttaactccatctgctagaaaagtaccttcagagaggctagatatcagggctggcttctctcttggtagcggcagtctcctgtctgttctccccaccatcagtgtcccctaaaccattgtactgtttt

SEQ ID NO: 270125 - DNA, 483 bp, Homo sapiens
ctactcatccttacagttatttcatactctctcaaatatgatattctgtaattacctttacctaaaaataactcagtattgttgtgttgtttggctttgtttttcactgtttctggatgcctcatcattctcagacgcctactgcatcaatacacaacttctttaggaaaaccacggatacttcattgttcctaggatatcactaatctaggtaagaaaaatgagttgatatgaagacttgttacccactattgcaaattcaactcccatgactcaggaactgggaagcagaaagtagtttttcccttgattatttgtactctggccagtacgtgggaagccatttctatcactagaaagttgctccaagtcatagtgtcacaataagaacaagtttgctaaattactgacaagtgtaatagcaaaagactaaaataaccttatgcattaacagcatttattttcactgttaacctttctaaa

SEQ ID NO: 270126 - DNA, 517 bp, Homo sapiens
caagttagctgatagtgtctttcaggtcttctgtattcttcctgatttctacttgttctgtcaattactgagagaggaatgttgaactctccacctgtatgtcttctgtcacctctgtcacttttttgctccacatgttttgaagcactgatactaggtttagtattgttatatcctcttgatgaattaagacgctttaccattatgtaatgtctctctttatctctagtaatattccttatattgaagtctacttcgtccaatacaaatgtattcactccaactttctttttattaaagtctgcatgctatatcttttttaaatcttttacttttaacctgtttgtttctttatgtttaaagtggatttcttatggatagcatgtggttggatctgacaatatgtgttttaactgggatgctgaaactattacatttaatgtaattattggtatggacaaaatttatatctcctcgcttgctattttttctctatgtatcccacctattttttgtt

SEQ ID NO: 270127 - DNA, 639 bp, Homo sapiens
gcatgcggggctaccctgagactcctgagcctcctcagcctgccctgccctgtcctgtccagacacagagaacacttgggctctgctgggcttgtggcccatgcccgctacactcacccaggaccatgcgatccgcaaccctgggtactgcttggtgacctccagcaaagactgcactgaatgaggccggccagcacgcacaacgcggcccgacctctgagctacccaaagggagagcagcaagttgcctgtgcgtggctggttcctgtgcgcccataggagcatgaaacgcccccaaagggcccactggccagatggtcactggggcaggcgggcagctgccattcactggactcctaattgtgttgattggatttttacctgggacatgtatttccttttcaaacacaatgtcaaagtcaggaaagcggctggatgcagtaggaggcccaggcgggtggatcacttgaagtcaggagttggagaccagcctggccaacacgatgaaacctgtctctactaaaaatacaaaaaattagctgggcgtggtggtgtgtgcttgtagtcccagctacttgggaggctgaggcgggagaatcacctgaacccggtaggtggaggttgcagtgagccgagatc

SEQ ID NO: 270128 - DNA, 426 bp, Homo sapiens
gcacagaggagttaactagagaactatccagccaataaagcagaatcaacacaaatggggatgtaatatccacttaatggatttactaaaaagtagaaacaacaaaattgggctaatgaacattgtcgtggcacttaatttgtttatgtaaaccatgaagcaatattttaaaaagctcaagtgtaaacatatgcccaagggtaacaactatgattatggtcctctggaactgtgctggacgaggctgagtaagcatggaagactgaagtgtgatctgtcagggtggtgggattgagcggattttccctttgtgaggacactggaggtggctggtctgaatgcagtttacaactaattgctcacaaccagttaccgatttctttgtcccttctccactcccgctgcttcacctgactagccttaatg

SEQ ID NO: 270129 - DNA, 509 bp, Homo sapiens
aaaacttatgaattgtttatttctggaactttccacttaatattttcagatcatggttgactgggtaactggcaccatggaaagccaaaccacacataaggggagactgctatactccgcatcctgagctctctccactttggctttactaaattcccagtttcatctcctctgttcagggaggtcaccatcatgtgcctgggtttcttctccctatgtcataacctaaaaactttcttcatacagtatgttgtaggagtttgtttgtttcccatcccccagggatcactgtccttcatgagtgatgcccagtgtcttgaaaactgttctttcatatattttgaacagtttttcagttgtttctgacaggaggttaaatctgatccctgatactccatcttgcctggaagcacaaatccattttcctgatatttttagcatcatctttttcttaacttttattttaagttcagggatataattgcaggtttgttacataggtaaacttg

SEQ ID NO: 270130 - DNA, 340 bp, Homo sapiens
caaaagtcaactcaaaaggtataaaagacttaaatgtaagacctgaaactatgaaactgctagaagaaaacataggagaaaagcttcttgacattggtcttggcaaagatttttttggccatgacaccaaagcacaggcaacacagcaaaaatagacaagtgggattccatcaaactaaaaagcttctgcacagcaaaaaaataaaaaataaaaaaataaactaaaaataaataaataacagagttaaaggcaacttaatgggagaaagtatttgcagaccatatatctgacaagagttaatactcaaaatatataaggaattcatacaactcaatagca

SEQ ID NO: 270131 - DNA, 394 bp, Homo sapiens
attggaaggcacaaagtaaagaaaatgaaaattagaaacttgtgaaaaggagcattacccattgcagttcttcaaacttcagacttccttctgtcttggaattacttgaaaactatcatgatttccactttgctctttgatgtttgtgttttcatattctccctttttaaagcaaattcccaaaatataaaagcatcatttgccagtttcctcctcgactattttagaacagctaaatttcatgtgttagaagtgcagaaatgaaaatgaaagaagaaaagagagacactttcaatgtttctagcacacaacacctgcctctcacatatctttgggtttctgtctatcatgaacctgcagaatcagaacctcataaaaagtctgaccaagcaaa

SEQ ID NO: 270132 - DNA, 379 bp, Homo sapiens
tcacaacacagtgcatggtacgtgcatggtagtccttttaagatggcttttatataccttatcacttctacctcagaccttttgaagtggtctttgctttcttgaaacctggtgttgcaggtccctcttgatttttccctgcccgaagacttggaatcagccactctacaaggagccctgttaaggtctaacctaaatctgggcaccagaatgttgacttgctgctgatggattggagggctgtccttgttgagccacttgtgtgacagagctggaaagagttgttttgtttgtttgtttttaatatcatgaagttacatagatattttcagtttaactctcactttcctgatcatttattttgttctttaaaaaaaaa

SEQ ID NO: 270133 - DNA, 375 bp, Homo sapiens
gagagggagccagggctgctaacacattgtcacctctcactgggattacagtgaagttctgcaacaacagaaaatgtgtgacaaaaatgccagaattattatagtctccctttagttcctgaatatcattaagaaaagaaaattaatctgctactcttagaagagttccagggctatgaataactattctatgaaaaaataatatcacagtgaatttacttcatttccctaaaacatctaagtatatagtaaaaagagagagtattccctccagacaaaggctttcaagcaaccacaggagaaaatgccctgtgtagggataatgaatattaatctaaaataattttttctaatatatggtttaattccatcgca

SEQ ID NO: 270134 - DNA, 500 bp, Homo sapiens
ttcctgccagtatcttaaacttaccaaaaacagaatccattgcctttatccccatatttctgtatttgtattctgtctgttggttagtggagacaccatatatctggtttctcaaatagaaatcttattgataatgccagcttccctcattccttgaggatgtttgctcctggcccacccacactctcagcaaaatgaccttgcttgtcatttcaccaccaagaaatataaacaaccagtaaagaactacaagtcagccacatctacccaactaccagcatctgtgcctatatgactgccttccttcctttgctgtggacacattttttctgttcctgttttgtgcctctttcctccacttgtactctggatcttgtctcctttcacctgcccagtcacaacttcagtggtctctctgtgctgcatcaacagttattttctttactgagtcatttccatcaatatggaaatgctgttatttctcccatccgaaaaaaaaa

SEQ ID NO: 270135 - DNA, 523 bp, Homo sapiens
gctcgacggaaataggaaatttaaaaataaaagaaatagagggggctgtgggagaacaggcattgcagaatacatctctgctttccttctgtattctaagcttcaatatttcatgactttctaatctacactcatttctcttcagaggttttgctttgcatcttctagctaactgtggaattaacatatccacctggttgtctctctgtcacctcaaagttagcgagtttaaaaatgaggccaggcgcagtgccttatgccggtaatcccaacactttgggaagccaaggctggcggatcacttgaggtcaggagttcaagaccagcctggcaaacaaggtaaaaccccatctttactaaaaatataaaaactagccaggtgtggtgtcgtgtgcctgtaatcccaactgcttgggaggctgaggcaggagaattgcttgaacctgggaagtggaggttgcagttagccgagatcgtgccacagcactccagccttggcgacagagcaaggcatcatctcaaa

SEQ ID NO: 270136 - DNA, 227 bp, Homo sapiens
aaacaaataaaatatgacagtagccaatacaagtgggccctgtttccagtttttaaaaatgaactcttgaaatgaaggtgggctggacatggtggctcatgcctgtaatcccagcactttgggaggccgaggcgggtggatcacctgcaatcgggagttcgagaccagcctgaccaacatgagaaaccccgtctctactaaaaaatacaaaattagccaggcgtagt

SEQ ID NO: 270137 - DNA, 415 bp, Homo sapiens
aatgtggcggggcggagggatcgagctttaattttcagcactataataatagctgactcttaattgtcaggcaccttacatcatctcatttaattctcacaacagactgatgaaatattttccccatgttgcagatgagaagacagaattcatttgacctaggtcgtacagctagtaaacggccaaggtggaatttgaagcctggtaacccaacgatatattgcatatgagtttaaccaaaatgctgcacggcccagcggggtgggcccaaggccgcttgggctctgcagcaggaaacgggctggaaaagctcagagagccagcaaagacgttttccgggaaggcatggtatctgagccaaaccctaggtgttgtgcagaagttgaccgagtaaagaagtgagcaaagtgaaaaa

SEQ ID NO: 270138 - DNA, 750 bp, Homo sapiens
aggcttccaattatacttcacatggtgaactgtgtaattagtttggaagacttatgcttagtcattggtttatcctaatcggctttggctttccccaacaacaaagtgagcttattttgctaagctgaaacgactctgcaccctttgttcctgccttttattgtctcattcctttcattctgtgttactgccaaagttctgtttcattaggcctacaagtcatttccaattcagtgggctgctacaatccggcctttatcacgggctgctctggttcccatgtcccttctgggccagtgcctgagtttgtggtttgacatgagggctttaaccccttcctgtgccagcccctcactgtggtggccgggaagaaaaggccttccaggaaccggcgtggaaagttacagctcttgaggtctcgtcaaagtgggagatcgctgtggaaaccaggtgaaagggtccttggagccctttgtgtcggattggggttgtgtgggggcccataaaagttaacttgagctctggagaatggtgtgtgaaagctttttaggggaagaaaaaaagaaaacaagagtgaattgttttttttaatgtaatgagaccttcccgtttatccggccagcgtgggcgattgtgggtgagtgaggcccgaagaagcgctgggtgcctgcgatctcccaacttcgggggttttctgtgcaggtgcgaagctgcattcatggcccccactcaaacaccccttttgatact

SEQ ID NO: 270139 - DNA, 498 bp, Homo sapiens
ctggatcccgggggagggaggcacagggaggcgtgaaggatgggaaccagcctcccctgggctgcttgggccggcttcccccttgccagttctgctgcccttaactgcggccttgggcagggggcgtaacctttgcaggtgacgcttgggtctccctgttggaagaccggcaagatgccgtgtacttactttaagaagcaaatgaaggttgggcgcggtggctcacgcctgtaatcctagcactttgggaggccgaggtgggcggattacttgaggtcaggagttcaagacctgcccaaccaacatggtgaaaccctgtctccactaaaaacacgaaaattagctggatgtggtagtaggctcctgtagtcgcagctactcgggaggctgaggcaggagaatcacttgaacccgtgggggcagaggttgcagtgagccaagatcgtgccactgcactccagcctggatgacagagtgatactccatctcaaaaaaaaa

SEQ ID NO: 270140 - DNA, 435 bp, Homo sapiens
caaatatttaagataatggatagcccagttacacagatttgatctttacaaattatatgaatgtattaaattatcatggctgggtgcagtggctcacacttgtaatcccagcacttttggaggctgaggtgggtggatcatctgcggtcaggagttccagaccagcctggcaaacacggcaaacatgtactaaaaatacaaaaaattagccaagtgtggtggcaggcacctgtaatcccagcaactcaggaggccgaggcgggagaattgcttgaacctgggaggcagagtgcttgcagtgagccgagaccgcaccactgctttgtagcctgggcaacagagtgagatgccatttcaataataataataaactatcacatgtaacccccaaatatgtacatcattgtgtatcaataaaaataaataaatgtgaaa

SEQ ID NO: 270141 - DNA, 290 bp, Homo sapiens
aatactgcactggcagcgagctgcactttccttcctaaatggaaaatgggttaaaaaagaaagagaagagtcgacagagaccaacaggagccccaaacatgtattcctcttcactattggcctggacatctccacataggcagtcatatagagacttgaaatatcattcaagggatttgggtatccagtagacttttagttacatatactacaaaactgactttgtactctcaagtagacctttcgtagaaagaaaatgtttctaataaaaatgtattagaactaatgac

SEQ ID NO: 270142 - DNA, 611 bp, Homo sapiens
ccactgcctggcctgggttttcatggtaagacgggagccactgggggcttgggtgacatgatctgaaggattaagaacagatgatggggtgattgtgtgagagtgtgtgtgtgattgtgtgaatgtgtacacaaatatttgtgtgtgtttattttgagtctctacagaaaaattaaaagaatggcataatactgtcctatatatccacctgctgaacttggcaattgttggcttttgggtttcttttgctttgtattttttctgggaccatttgaaagtaagttatagatctcaggacatttcatccctaaacatgtcagcacgtgtcttttaaaaataaagacattctgggctgggcacagtagcttatgcttataatctcagcactttgggaggctgaggcaggaggatcttttgagcccaggagttcaagaccaccctaggcaagaagacgaaaccccgtctctacaaaacatataaaaatgagcccggcatggtggcatgcgcctgtagtcccaggaggatcgactgaacctgagaggtcgaggctgcagtgagccatgattgcaccactccagcctgggtaacagggtgagaccttgctaaaaaaa

SEQ ID NO: 270143 - DNA, 410 bp, Homo sapiens
ccactgcctggcctgggttttcatggtaagacgggagccactgggggcttgggtgacatgatctgaaggattaagaacagatgatggggtgattgtgtgagagtgtgtgtgtgattgtgtgaatgtgtacacaaatatttgtgtgtgtttattttgagtctctacagaaaaattaaaagaatggcataatactgtcctatatatccacctgctgaacttggcaattgttggcttttgggtttcttttgctttgtattttttctgggaccatttgaaagtaagttatagatctcaggacatttcatccctaaacatgtcagcacgtgtcttttaaaaataaagacattctgggctgggattacaggcctgagccaccgtgcccggccaaatacccatattattaagagaaa

SEQ ID NO: 270144 - DNA, 456 bp, Homo sapiens
aaacactcctctccataaggatttgtttctgagttctatccatccatctttgaatgagcctttcctgtggaaactaacatttgggtatcctttctgaaaccctaattcctgacacacgccaaatgcctggagacgttcctgtttcattgttgattctcactttttaaaaaaaattctgggccaggctcatgcctgtaatcccagcactttgggaggctgcggcgtgtggatcacttgagctcaggagttcgagaccagcctgggcaacatggcgaaaccgcatctctacaaagaatacaaaaattagctgggtgtggtggtgggtgcctgtaatcccagctatttgggaggctgaggcgggagaatcgcttgaaccccggagtcggaggttgcagtgaaccaagattgtgccactgcactccagcctgggcaacagagcaagactctgccaaaaaa

SEQ ID NO: 270145 - DNA, 439 bp, Homo sapiens
gaggtcagggggcagaggatggagctaaaagttccaatcctctaatcacatggttggttcccctggcaaccagcccccatcctgaggctatctaggagcccaccaagagttgcctcattagaacaaaagatgcccctgtcactcaggaaattccaagggatttagaagctttttctcaggaaccagggcagagaccaaatatacattcctattctatcacaatgtcacaggcttcttttcctttacaatatagtgacatatggctgttgagtacttgcaatatggctattttaagttgagatatacattggatttgcagacagtgcaaaaacatgtaaagaatggaaatatcttaatttttaaaatattgatcacatgttgaaataatattctgtatattttcggttcatgcaacatattattaaagttattttttaaa

SEQ ID NO: 270146 - DNA, 359 bp, Homo sapiens
gtgatcactaacattgtacaccaaaggaacttaaagatcgtggccttgaagttttagactataaaacagcttttaggctgtagtgctctgtagtataaataaggcagtgaggcagcaactccaaagaaaattccctttcaagacttacattgtaacctacttgagtttatagttgtggagttttaattcatttgcattctaggccatgaccaagtgaccagaggactaaaatagtataaaagcatcctgtattgagtttccatagccaagggggtgtaagatcatgaaatttggagctgtttctcgtttttaaaaaatgagttgtaaaatacatattaaataaaatttaccaacttaaa

SEQ ID NO: 270147 - DNA, 589 bp, Homo sapiens
actctgtgctttgtgattgtgatgacgtctggtcaaatgtggacttatataagaggagaaccatatgtccaaagggaccctcacacaggacataaacattatatcagtaaatttagtcaggctcagtttgcagcagaaacattcattatttccctgtttaatatgtgtgttagcctgggaatggtgctgttagacaaggctgccacctctacgatgaacatcagaaagagaaagatgatgtgtctggctggtatgtgtcttgttgccatattcttcagtcggctgctttccctctttagatttaaagtacctgactatccatacagctttgtctgggattaaaaaggatcctacagacatagacaatgaagcaagaaatttgaaaaaaaaaatgtgaagcagaaaaatgcaaactcatagctttttaaagtaattgagatttcaccaaaagagaccataagtgctttaagtgctttcaaaatctgtcaagtattatggtatgtatcttctctgttcttaatttttctccccgagtgttatagattacctcaagtccaattattaaaatctttagagagtacaactttca

SEQ ID NO: 270148 - DNA, 503 bp, Homo sapiens
atgaagataccaaagttcagagatgattaggaattttccaagatctcacagctcagaagtgacggagccagactttaaacccaggcaaactgcttccgggtccctgctcttcctgctccggtactcccatgaacagtgctccttatctcattatgtgctggcttagaaattccaggggctaattttgaaacaaaccaggcttgcagatccagctatgaaatcagcttgcttagtgggcttacaaacaaggagaccaccaccaataggcagaagtcaagatgatgccaactggacctccaggtgcttgactactcaagaaagcctttggagcaagacctgcagacctgcaccttcctgcacccctcccacctgtttcctgtaccatgtctcccttctgaaaccatctcactcagcccagaaagttggactggtcttttaaaagcatgagtctggccattccccaattgctagcttccaattaataaaactgttttcctttcgct

SEQ ID NO: 270149 - DNA, 291 bp, Homo sapiens
  misc_feature (285)..(285): n is a, c, g, or t
gcagggacaggtggcccaagggagagcaattcaggcaatttgtgtgatccaggaaggccatgcctctggtctcccgagagcctgttcatcacccccatggggagtcaggcccctttcacagtggctggggaagacagagactgagcagtgagaaggttctgtctggttttctttttttcttttaatttaattatttttttccgagacagagtcttgctctgtcacctaggctagagtgcagtgagccaaggtcacgcctccagcctgggcaacagagtgagaccntgtctc

SEQ ID NO: 270150 - DNA, 311 bp, Homo sapiens
gaggaagaaggcaaaccgggcagccttcccagaagtggaggagtttgcgtaggccttcggtgcgttctcgcctgggtggaaggcggggacgtgcatttgttggagagcggtgtcctgcgccctaggctggaagcctggcctcgggcaggggcctggagcctcggggttggaggtggggggcggggcggggggcggcccctactgggcgggcttctgtctgcgcgcccgcgcccccgacaggcggcttatttgcatggagagcggcggcggccaatgggcgcgcgcggccgggcatgctgggatcgggctgg

SEQ ID NO: 270151 - DNA, 393 bp, Homo sapiens
gctccaccgtgtgtgtgtgtgtgtgtgtgtgtgtgtgtgtgtgtgtgtgtgtgtgtgtgtgtgtgtgtgtgagagacagacagacagtctcgccctgtcacccagtctggagtgtagtgccacaatcttagctcactgcagcctggacctcctgggctcaagtgatcctcttgcctcggccttccaaagtgcaggaattgcaggtgtgagtgaccacgcccggccttcttttttgttagcttttgcttgtaacaaaactgccgcctctgtccttctctgagataattgccctcttaaggtcccgagtatagacatctccccttccttctcctcagcccgcttgtgcaaggtctttgagtgagagattcatgatcagccccaggcccttgtcct

SEQ ID NO: 270152 - DNA, 343 bp, Homo sapiens
gaagctgcctgtgcattcaccaatctagcccccttaatgaccctttgaggcagacactttatccccatttcacagaggtggaaactaagcctcgtagaaggtgagtaactcaacccaggtcacacagctcgagctaaggttcaggccactcagctgactccagtactgtgtgccaccctgctcctcactgctttcctctgaaacctcagggattgtctggctcaatgtgtacctggggaagatgagaaaactgaggcctagagaggtgaaatggcttgcccaagaccactccaaatatcccacctatccttggcccctttccactccaccatgcagcatagcg

SEQ ID NO: 270153 - DNA, 294 bp, Homo sapiens
atcaccgtgctccagcctaggtgacagagccagaccctgtctcaaaaaaaaaaaaaaaaaaaaaaaaaaggaaggaaggaagaaaaggagggagacaggaaaggagcacaagcaagtttctggacatatggatgcaagtaagtttataggtgagcgccactccagcctgactggcagacggagaccctgtccgcccctcccctctaaaaacagtagagctctggtgagctgaacagtggtccttcaaagctaccaggccctaatctctgaaacctgtgaatgggccctctttgg

SEQ ID NO: 270154 - DNA, 456 bp, Homo sapiens
agaaaatccatgatcctgagactgcaggaggcttttcacaaagttctttgtcactcttaggagaagactgagtcagggaaaaggtgaaccctgcagactgtactagaagacaacgcgggagcacagaggagaccaggacccaattcccaggctgtgtgaccttggacacgttacagctcctctctgcatttcagggttttgttttttttttttttgatttttggtttgtttgtttgttttttgtctcgctctttcacccaggatgaagtgcagtggcatgatctcgactcactgcaacctctacctcctgggttcaagtgattctcctgcttcagcctcccagctactcgggaggctgagtcaggagaatggcgtgaacccaggaggcagagcttgcaatgagccgagatagcaccactgcaccccagcctgggccacagagtgagactccatctc

SEQ ID NO: 270155 - DNA, 457 bp, Homo sapiens
gagtaagaagcttcctgctggtgctaagctgtgttcctcactatcccgttcagcctttcatccttccattatctatgtaagcaattccttgtgttaaactcccactgttgaaagacctagagtagtttcttaattctgacacagagaagcagcaagacagcagtgagctaaccaagggtttacaaagtcatcaatgagaagttctgcatcaaccaatccattgctaaggtcatgtggctatgaaagtcacccaaggccaagacctcaacttttcccgcttgaaaacccttgaatatagaaggagctggaggaggaggagtaataaactattcctccaaaaatccaaatgtgttaatagtcccagccttggccctgcacctccccttctccctcctctcggcaattcctgacttgattagttaccaggactaatgcctttctgctggtttatcagaaa

SEQ ID NO: 270156 - DNA, 290 bp, Homo sapiens
gtaggtaaaataaagatagtggcccctaactttacttccttcttggctggtttttatcataaaatcaaacgatatgaacataggaaatacttgattcctaacaatatttgcttttggacagtccaagactcaaccagctctcctatgctttcaactcttgccctgttagaattgtgttcccttgtataggaagaatctccagagcctcccttctttccagagacttttgaatatgaatgttagagtacatctcagtagatcataagcagtggaatcacataactaaattt

SEQ ID NO: 270157 - DNA, 163 bp, Homo sapiens
aaattttttttctggtactataaaacttgcacagatattagcttcaatattgatgaaggaatggaataatcctaacatctgcaaataggattatttggcactccaaatcccaatttggatcatcaagatctgtggatgcttccttccctacccccctttattt

SEQ ID NO: 270158 - DNA, 126 bp, Homo sapiens
cggtcgtggggtaggttggaagagcacgtgagggaagccagattttcaccccaaagctgcattgctcccttaccattatgctaaatgtctgaggtaaaatctcagagggtaatttacactcgaatt

SEQ ID NO: 270159 - DNA, 561 bp, Homo sapiens
ctggaaactttttctgaaaatcaccagttatctcttaaatgaccaaattctttgactttttttttcttgcctcttctgctgttcgaattctctgcaggatctgatagtttttttaaaaaaacaatttcttgattttagtgatactccacttttctggtcattttcccacctgtttgtcctatctgcccactcatttagtcaaggcctttctcttcttttttgtattcttaattggcacttttgtgtgatccttgaagctccgggacaggtccttttaaacagtagtagaatcatacagtgctagagctaagagaaagcataatcatcatctaagttacccctccactttacagttaagggagttaggcccagaagattgaaagtgacttgttcagggtcaaataatgagtaaatggcagacctagtgctagaactcacttcctttgctactattcccttgattataccctattttacagagccctacatgtaatttagaggctctgtaagaatagtttgtaactctctaagtacatatatatgtgaaaataaatggcaaat

SEQ ID NO: 270160 - DNA, 484 bp, Homo sapiens
ctcaccctaatgtccacattgaaccttaattacttccttaacggacctgcctccaaatacagccacactgggggtcagaacctcaatcgatgaattgtcaggggacacagttcagcccactgcaccaggtaaactagaccctgccaattcttcgtccataaacctttaatataataaaatttatgttgttttaagccactacatttatggtaatgtcatgaagcaataaaaacctaacacaaaaatccaaagcaaatatgtgcttagacaggaaattaggaaatgatagagacgactgaaaacactaaggcacttcctttaaaactggggccactaaacaccgttattcagcaccactttggaggctccagctaacacaagaaagcaaataatagttagtataaatattggggaatcagaaaaaaggcatccttttagccaatgggctgattgtgcagctaagaaaccaaagagatatttttac

SEQ ID NO: 270161 - DNA, 453 bp, Homo sapiens
tttaaaaatctttaaagctaaagttgaacatttgtgacaactaggaatatttggatactttgtgtttctctccctctttttatgtctctctatctctctctgataaaagtatgtttgtggataatttattttaaaactagacttttggttatgccagattaatagttccagagatctcttataaagcacatttcttgtagttaacaatatggtgttgtgcacttcaaaatttgttaaataatagatttcatgttaagtattctaaaaacacacacacatacacactcggacacaaggcaactttggttgatattgaacacatccattaccttgattgtggtgatgatggtattacgggtgtttgcatatgtccaaactcattaaattgtacacattgaacatgtgaagttctttgcatatcaactatatctcaataaagctgttaaaattaaa

SEQ ID NO: 270162 - DNA, 468 bp, Homo sapiens
ccttctttcagaataatgtgaaatttcttttaaggacaagaaactttagtgtctagttggtaaatgacataggtttgaatctctttctaagagttgtaattgatgataagaatattctgtggttctttacagggataaattgtttagtttaatcagagtggtggctctcactatccataagtccatgggcaaaagtgttgactaatacgatcatacagtgtacaccagccaccttacaccatgcattgttgagagttcttgctctatatttgataacacttttcaaatatgccattttccgtgattataaaattgcttaaatatctatataatctttcaaaataattttcctacaaatgtctaaatttctctagaagtacaacatatacaatcagatttacttggaatggtcttccttagtcagtcgtgttttcctgcaaattaaaatggtttggacaacacaaaatt

SEQ ID NO: 270163 - DNA, 483 bp, Homo sapiens
gaacttgtgcattcatggattttggtatctgtggggttcctggaaccagttcgccatggatattgagggatgactgtgtatagaattgctgggttctgatacaacctgcaagtccatatactggcttagtcaaaattcttaggcatatggctgaattaaaactttctgcattgcttaaaatttatatacaggtataccttactctgttgtacttcttcactttgcagatgctgcattttttttttttaattgaaggtttgtggcaactgtactgagcaaatcaagtccgtcagcaccatttttccaatagtttgtgcttgcttcatgtctctatgtcatgttttggtaatccttcccatatttcagacgttttcattattattatatctgttatggtgatctgtgatcagtgatctttgatgttactgttgtaattgttttgaggtgccacgaactgcacctttgtaagatggtgaactaaat

SEQ ID NO: 270164 - DNA, 425 bp, Homo sapiens
aattttttttctagctcaaattttctgattttgagcattaaaataaacttttttgtacttaatgtaagcacttaatatgtgcttcaattaattgaaatacttttgttccaagttgtaaaaatattttaaatgaagggaataggccgggcgcagtggctcacaccagtaatctcagcactttgggagggcgaggcaggcggaccacgacgtcaggagattgagaccatcctggctaacacggtgaaaccccgtctctactaaaagtacaaaaaaattagctgggcgtggtggtgggcgcctgtagttccagctactcaggaggctgaggcaggagaatggcgtgaacctgggaggcagagcttgcagtgagcctgagattgtgccactgcactccagcctgggcgacagagcgaaactctgtctca

SEQ ID NO: 270165 - DNA, 515 bp, Homo sapiens
ctgctatgtcaaattgtagaaatatttctgtgatcatgtgttttatagttaggctattttcagcagagctattcctatcattgttaaacactcaattaaatcatctggctcaaatatgaagaagtctgttcttcattggaacaaatttttgacctgtagaaatattctgttttaaaaataagcttaagcataaatagacatgtttaaacatagctttctcaaaaactgcgattataggagactggacttatttatgtacattgagattcacttatggtgatagttgtcagtgtgttgctggaatgactgacatgcatctaaatcttacatttttcaggtcattcaggtgcttatatatgtaagcttgggattgccattatcaaacgcgactagaatatgaatagcttggattttctggtagaccaaagtactattagttattatttgtcctttgtttttccataatgaagagaaatgcatgtgattttgcagaattgttgcatcctttgagctct

SEQ ID NO: 270166 - DNA, 401 bp, Homo sapiens
gaggctgccaggaccccaattcattattcagaaaatggatcaataacagaaaataatgacaaatggatcttgctttttcttttcaaactatatttcaagatatcaaatacataatgatgaaaaattgatccctactaaagaattccaactactaaatgcagaaagaatgatggaattaaaaaatttccagtttgtgacttctagagaagtccattgcaaaaaccattacttaaggtaatgtatggctgatgaggaaccttataaatggtggaccaggtatacagctaaatcttctgaccaatcttaactcactgaagttgggacagacagatactatgtctctcccaatgagatatactggaaagtacatagcaccaactatacagcaatcttgcctagaa

SEQ ID NO: 270167 - DNA, 653 bp, Homo sapiens
acaaggcagcatatttgatgtgtgatgtgccatgtgaacaggacaaacacccactttagaaattcagcttctaatgaccagtgcagatctttagggactgttcacacgtacattgtaatatgtgtggatctctttgtgtccatgggtatcagcatagaggtaaatgtaggagatcaaggtagggacacaaggactagattgtcaaccaattatattcaaatccagagtcatctaaataaagaaagagattgggaagcccaccacaaaccagagaaatggttatatctacctatgttaaaatgcaaaacaggagtcactagtttgtattgacatatgctgtaaatgaaaaacacaccctgaatttcccagatttaatatgaaaaaaatgcaaaatatctcaatcatttctatactgactacatgttgaaatgatactattttggatatactgaactaaataaaacataattaaagttacttattttttaatgtggcttccagaacatttaaaattacatatatggcttatatgatatggctattggatggcactgggtttcctgctttggaactgtgcaaatcatttaactgctctgatattcatttttatcatctgtaaaatggggatgaaagtagtgctgttctcacagatt

SEQ ID NO: 270168 - DNA, 482 bp, Homo sapiens
cagagtgaaaggaagtacggtgacaaggggtgaatgccatgtttcaagtctgagatgtctgggttgaaaggagatgggatgattaggaaggaggcactgagttaggaatctggaaagcccagctctgttatgaaacgctcccttatcccatggctccgagaagttagtgccattccagagatgggacgctggaagaggtgcttgaagacccgtgagcttcctgccatggaggtgtgtggtagagcatctgcaacctcttgctggcagccatggggacaaagattcaagcttcaggctgtaacggtgtcatgtacctgtggtcccagctactcaggaggttgaggtgggagcatcacttgagcccaggagtttgaggttgcagtgagctgtgatggtgttactgcactccagcctgggcagcagagaaagaccctgtctctaaaataaaatgataaaataaaataaaaataaaattcaaaaat

SEQ ID NO: 270169 - DNA, 517 bp, Homo sapiens
agacacaactgtggcattccatattatcatacaggaatttgaaaatgaatagtggatggtgtatataatctactgacactttattaacctttttaaaccaccaaggtttgagacagctgtgcttcctagctcttccctgttaagagcagtccatgttctgtctttttatcttaggcagtgccttgtgttgccttaatgccttagtacaggaaaagctccagttggatgtcagactttttaaaaagtacatgaatcagtgctgcataatttctatatggcaagtttggaggcatctgctaaagaatcagtacacgtgctgcatttggtccagagagttagcagagtgcatgatggacagtgttttgtctcaaataccatgtggatgcttggatttgatatttgtaactggaaagaagtaaatggatgagccattgatagacattctggcaactattaggaacatgaatatcaagtgatagaatcccagggaaagaaaggaagcaaactgaatgtgggg

SEQ ID NO: 270170 - DNA, 647 bp, Homo sapiens
  misc_feature (6)..(6): n is a, c, g, or t
  misc_feature (14)..(14): n is a, c, g, or t
tattcnggcacganggctccgactgtccgtcagtgatgaatgaaggggattcaagccttgccaccgacttacaggaagatgtagaggaaaatcctagtccaactgtggaagagaataatgtggtagttaaaaaacaggggccaaatttacataattggagtggtgactggagcttttggaatgcactgttgtctggttcgatgaaatggaattaatctgcttcagtttccttgtgtgaaaactacaccacagaagtggattccacttacactgtagctcactgtattgtcaagagactaatgttatatagaaaccatatttctgaatgttactgagaagccagctattttatataattttgatttaaaaaattcattcctgtacgtaaagaaagtttagcagtgttcaacctatagtgtataatgactataagatggttttaaagttagaagctacatattctgtttccattgtgttcattcggttgtgtaatctggatgtgcttcaggtttccccactgtaaaatgagactactgcttgttgattaggcacattaagatcttagagtctttttggaagaaaaacacttctgtatgttacaaatgctaacatttattatattaaaggactcattctaaatctagcaa

SEQ ID NO: 270171 - DNA, 501 bp, Homo sapiens
gaatacacagctttctgggccagaaattgagcttctgactcttgagccttatatgagtactgcgttggtcatatttattttgtgaaactactctgtgggctgaaagggagagactctccttggtttgcagagcctgactagacaggaattctggcaactgctccagcagaactatggcactgagctaggtttaaatgctgaggagatggaaaacttgtcactgtcgattgaggatgtgcagccaagaagtccaggaagaagcagcttggatgactctggggagagagatgaaaaattatccaagtcaatcagttttaccagtgaatcaattagtcgggtttcagaaacagagtcattcgatggaaattcatcaaaaggaggattaggcaaagaggagtcccaaaatgagaaacagaccaaaaagagtctcttaccaactttggaaaagaagttaactagagtgccatcgtcactggacttgaatatgtatctttctctggc

SEQ ID NO: 270172 - DNA, 736 bp, Homo sapiens
agcctgtaactcgcgagcgcgcgctggaggtgggcgcggggcggtgcggtgcggtgcgcgcggggcggtgccgcggcggcggagggagccgcgatggagggcgctccgactgtccgtcaggtgatgaatgaaggggattcaagccttgccaccgacttacaggaagatgtagaggaaaatcctagtccaactgtggaagagaataatgtggtagttaaaaaacaggggccaaatttacataattggagtggtgactggagcttttggatttcaagttccacctataaagacaggaatgaggaatacagaagacagttcacacatctacctgatacagagaggctgatagcagattatgcttgtgctcttcagagggacattttgcttcagggacgactatacctttcagaaaactggctatgtttctatagcaacatcttcagatgggaaactacagtaagacattttgcatttgatttgttgatacaaataattgcatagagatatatacagttcttccaaaaactctactttagatgattccaaagtaaatttatatatatttgtgcatctaaattagtgtgcatgtaaatacaaacgtgttgtatatataagtgtataatatatttttctgatttaatacattgagctccagtatagttagagaaagatattttaattgaaaaaaagcttgaacatatatcttaatggctgccaaaaccatgtcttaagtgac

SEQ ID NO: 270173 - DNA, 1004 bp, Homo sapiens
agcctgtaactcgcgagcgcgcgctggaggtgggcgcggggcggtgcggtgcggtgcgcgcggggcggtgccgcggcggcggagggagccgcgatggagggcgctccgactgtccgtcaggtgatgaatgaaggggattcaagccttgccaccgacttacaggaagatgtagaggaaaatcctagtccaactgtggaagagaataatgtggtagttaaaaaacaggggccaaatttacataattggagtggtgactggagcttttggatttcaagttccacctataaagacaggaatgaggaatacagaagacagttcacacatctacctgatacagagaggctgatagcagattatgcttgtgctcttcagagggacattttgcttcagggacgactatacctttcagaaaactggctatgtttctatagcaacatcttcagatgggaaactacaatttctattgctttaaagaatataaccttcatgaccaaggaaaaaactgctcgactcatcccaaacgctatccagatagttacagaaagtgaaaagtttttcttcacatcttttggtgccagggatagaagttacctcagtatctttaggttgtggcagaatgtattattagataagagcctgactagacaggaattctggcaactgctccagcagaactatggcactgagctaggtttaaatgctgaggagatggaaaacttgtcactgtcgattgaggatgtgcagccaagaagtccaggaagaagcagcttggatgactctggggagagagatgaaaaattatccaagtcaatcagttttaccagtgaatcaattagtcgggtttcagaaacagagtcattcgatggaaattcatcaaaaggaggattaggcaaagaggagtcccaaaatgagaaacagaccaaaaagagtctcttaccaactttggaaaagaagttaactagagtgccatcgtcactggacttgaatatgtatctttctctggc

SEQ ID NO: 270174 - DNA, 440 bp, Homo sapiens
gcactgagctaggtttaaatgctgaggagatggaaaacttgtcactgtcgattgaggatgtgcagccaaggtacagcaaaatgttttgaaatgtcaaaatttatcaattattaatcaaagcagaattattttacattcgactaattctgaatttctagtaatttatctttggctgccatttgcccctttgttctttgtggtggaatggggtgaaaggtggggacagagaatagtttgctaaataggtaagcacatatgagatatataaggaaatgttggctatgtcacttagggtagacttaaagtctggttttagtaagcctgtttattaaggatctggagaagtacctagtgaaatctctgagtttatagatgacagtaaagtaaattatatggtaggtgttttgaaggatacaataatatgatttttcctcaggaat

SEQ ID NO: 270175 - DNA, 523 bp, Homo sapiens
ccattcaactagattatttggactgagcagaagatagatggatcttctagaatgacaatagagtactgtaaatttagccagatggtgactccaagtgcagtttctgtacccgatatcatttcattattgtggcaaattaatatgcctcctggtacctggttgctatgatttcaatgtcccctccagaactcatgttgaaacataacccagaagtggcagtgttgattcgtggtgcctttgggaggtgattagactatgaagggttttgcccccattaatatattaatccattcctggattaatgggctgtcatggaaactggtgactttataagaagaggaagagagacctgagctagcacacgcaatcacactcagcccctcgccatgtgatgtcctgcgccaccctgggacccttcagagagtctccaccagcaataagactctcaccagattcacctcgaactgacagcttcttagaccccataactgtgaaaaataaatttctttttctttacaaatta

SEQ ID NO: 270176 - DNA, 387 bp, Homo sapiens
ggatcattatgacacttaggagataggtatgtaatgctcacattatcctagtaacatataagcagtaagcactatgtatatgattgtgtaatttatttttctttagtaatacaactgatattaatccagactttaaagtgatattgccatgccccttccgtaatggaacacatgatttgaattgtttttcagtatgtgtgcttgtcttgattttgagttgctagggttgctaaggaaacccaactcaatctactgttaagcaaaattggaatttattggtttatgtagggatgaagtctgaggtcagggttgactggatccttaaggctcaaatgatgttgttaagatgctgtttctgagttactcagttctccacaccttgacttg

SEQ ID NO: 270177 - DNA, 302 bp, Homo sapiens
tacttcagaaagaccatagaactaaatgtgaaatattaaacaataaaaattccagaacattgcataacacacctcaaggtggactttaggatagcaatatacccttaagtaggacataaagagagcactgaatataaaagaaaaaaaatatatttccttaaaattaaaaacttgttttcatcaaaagaaaccattaacagataaaaagctatcaaacaaaacatttccacatgagattacagagatatctgtaatacatacatctgacaaaggagtcaaatttggaacgtataaagagatag

SEQ ID NO: 270178 - DNA, 805 bp, Homo sapiens
gtagcaacaaagcaatgaaaatgacctcattttgcttatgaagatacaccctatgttggactctatgatagagggattgggttatttccctgctgtgcccccagatctctaatggcccatccagacatctatttggctgcagcaaaggttcaagctaaggcatagatgacatcttcaaaagtcaaaaagtcaggtgtgatctggattttcataggaaattatcttcaaataatactgtcattctctgttttaagcaaattcttactctgtgtccttctcaaaaggacttgaactggtttttattaagttccaccattaaaaaaatgaaaacagacataaaattataaagcccattgggaaaatttaggttggaggtgtagggtggaaaagactaaggaaattaaggagaaatatagcaaatgagtatgtagttacaagctgagcttctagtaaggcaaagcaataaggaatatgggatcattttcatagcttatatctgtgtatcaagcacacttgaaggaaattattgcatgatactcacatttgtcattttttctagaccttttgcttaaaccattgccatggtttgaatatttgtgccccccaaaactcatgatgaaacttgtaaaccaaaaataaaatcctaaggccccatcccgccagccatctgaatggacttcctccttagccagggttcttttaaaatttaacctgagagactgtttcaggccatgataggaagtgggagtgggacatgcctcattatacctctctggtattaacatcaatacagactttaagtctg

SEQ ID NO: 270179 - DNA, 453 bp, Homo sapiens
cccctcaatgtcacatgggatttggccagtaaagaagcaagctcagaccttccccatcccgcagcatttcctgcagcggaggcttgctggctgccattagcgggcagctgaccctaatcctcccgctgacacaactccgacttgacacctggaacccaccactgtggagtctggacttccagaaccttaagtttaacatcaggctactacagtttctctccaaattccttagaaacatagtaacaccagtgaaatacattaagaaacaccttactacattttaatacattgtactttttattttatcctggactgtccgcttttgaatgactttatcacagcctcatttataaatttcttgtaacttttagacaaatgtgtgttcaatggctgcttttatttccagtactgtcctcaatcattttgccattagtgaaaatcacttactgagca

SEQ ID NO: 270180 - DNA, 303 bp, Homo sapiens
aaagactactcatttcagtccttgaaaatgggataccgtgagctttggaagtaaggtacgtgttggtgaacactgttgtcattgaacaggaaaaattaaattattaggtgagaagtttccacctagagattagtaacaagtagcctgaacaaattattttacctgtatagatgctaagacagatgtgttcttttaatttaagacctgagagcatgtttagagttgcacgtaatggcaataattctatgttgtagaaatagagaaatagtttttatttttcacttttggtgattgcatggatag

SEQ ID NO: 270181 - DNA, 399 bp, Homo sapiens
ggggaactttcatactgttttccacactggctgtactaatttaattcccaccaacagtgcacaagtgtttccctttctacacatcctctccaataaaagccacttcattttgagccattagtgaactgagagaaaacagcactatggagggagaaagtggattgtttccaagaagtaggtgggcaaggagcaatgaaggaaagataataccaaggcaaatacctggaggatgttaagccaagagcatcagaggagaaaaggaatcatcaagaggttggttagtgggtacaaacgtgcagttagaaggaataagtaatagtgttccacagcacagtagggtgactatagttaacaatatatgttttttttgagacagggtctcactctgtcacctaggtg

SEQ ID NO: 270182 - DNA, 338 bp, Homo sapiens
tttgttttcaggcctcaatcttttcctgactatggttagtaaaggggtaaggttgttttttcctgataagtggcttttttcattttgcctgcactaaaagcaagatatatcatgtctgacctttatcccattgaattgactgcctcctccacatatccaaagctgaattcatgatcttgcttcccaaatttggatcttcacaaatattctttcttacagggaaaggaagctccatccacaaagttcaagctagaaatctgggaattgaccttacaacttctcttttcccaacaccccataaccagcttattattaaatctggccaattttacttttat

SEQ ID NO: 270183 - DNA, 497 bp, Homo sapiens
tcagccaatctggagagggggccctggccaggtgttgggggagtagacaggtggcatggccttcagcttctccctcttctaaaagtataaacaggcatggttcaagttcccagaaaagtctcccatcttctgacagtcacattgtgtcaaagggccaggccccagatgagctgagaaaccatggctctatggccactcccaaccctgaagacaggggaggccatttgctggcctctaatttgctcaagagccagcccctagttatccctagcttgggtttcaccaagactgcctgactcagatggacccctcatgggtgactgccttttaggagatggtggtccctaccaggctgtttggcctgatctgtgtggtagcacccctcttttccaatccccccatctcctttctgctttggtctcttccaggtactcctaatgattggttgcatgtgctccagtgggcccagataaagtgttttttattccccttggaaa

SEQ ID NO: 270184 - DNA, 201 bp, Homo sapiens
atttttttcctattcccacagcatctgaggtaatttcctccactaaaatcttgaatacctcaaagttattcataagagttgaaatcaacttcttccaaattcttgttaatcttgatatttggacctcctcccataaatcacaagtgtttttattggtatctagaacagcaaattatttccagaaagtttttcatctttttc

SEQ ID NO: 270185 - DNA, 306 bp, Homo sapiens
cttcctgcctcctgcccagcccctgctgtcagagatacttggtgcttccagttctggagacttccttgagttctgtgactcaaaacaacttccttcccctgtgggcatcaacaatgagagatcttcagatgcgatcaggcactccagtccttccatctcccacaatgttggagacctgtgttccctgctgtagaaacctctgccattccctttatctctgaagacagatggacttgactgtcagcttagcttggtttcaggaggaaaggaagataaacccctgtgtttaagctgccgtgttaaatg

SEQ ID NO: 270186 - DNA, 433 bp, Homo sapiens
ggaagccagcagacacctgcagggatgggaactcctccagcaactccaggaacgtggggctgttggtgaacttccacttgctgtactctgaggactgaaagccaagggtgatgtgagcgactcagggcgcctgccctgctttggggaaaaggctgtcacaacccagtattcattcatttcttcactcactcaacaaacaagtccatgtgccaggcactgtccggggtgctgagactaccaagcttaagaagaaatagttcctgtcctggaggaactcagtccggtacacttatctaacttatgtgacttccactgtcagcaactcatgggctggggtcaaatctttgttgaatggcactttccccagctgtcgtgtcctaggcagtttgggtggtaggtgggcaaatcattaaaaacaaatcaaaatctcaaa

SEQ ID NO: 270187 - DNA, 380 bp, Homo sapiens
tttctttttttatcatctgcttcatttttcatttatctattttctctgtttagtaccagaagtcaacacttttgtcagcttctcggttagcactccccacccactgattccttgaatgctctgaagaccaatgaattccttattctatgagcctgacctttataggccaaaaaatagagagagaaataacaatgaaagtgaatttctactactgttatgtttaagtcacagtgcaggctgcttttgctttcctgagaaagtatgtcaagtgttttttaaattcttttttttaaaattcttttctttaaaaccttatttttttcttgttctttcttttctcttttttttttccttgccagcagaaagtgaaggaggcacac

SEQ ID NO: 270188 - DNA, 303 bp, Homo sapiens
gaccatgaactcagctaggagagcaatagaaagtcatttatggcttgttggaccaaaaggatcaaccttgtctcttgaacatctcttgtctttggatggacttttaagaggtacgagaaagggcagacggctggggaagcaccctctctgcttccctgctttgatttcactatgaagaggagccctttgtgggagcctgtgaaggctgattgcaccaggaggaagcctccttcccataggaaggatttagttttggcttagtgctccctgtgagtgcagcaacatcgggaagagtctctgggg

SEQ ID NO: 270189 - DNA, 253 bp, Homo sapiens
tggaaaagtatcttcagccatctcaaactccctgagaaggtgacgaaagttatccggagaatccagaagtgcgacgagaaacagatcacaagcttgattcagacgggtgtttaggaactaggaacacagtttaattgaattttctggtgagtgcatgattaacaggaaaccccttttttctgttgtattttgttgaaaaagatcttgctgaaattatacctattgtccttcttagtaagtagataaaaacaaa

SEQ ID NO: 270190 - DNA, 280 bp, Homo sapiens
gagaaagggaagaagggagaaaggaagggaagaggggagggaagagtctaaacctgggggtgctgaaccagtagaaggagatggtctctagggtctgctataagctaatagcttcagagctgtttgtgggaaggaaagcctcttgtcagtcaatatttactcaaggggagtcttgacctctgtgctgttcctcacgctgctttattatgagccacctttagccttcattttaaaacactcaaaatcaaacacactgctggccccagggctcctgcaaaca

SEQ ID NO: 270191 - DNA, 384 bp, Homo sapiens
cacggaccatgggctaaggatggggggaatttaagctttctgttgagatggctctcatttcagctgagggcagcgctctgaaaaaaaaaagatacagctgtgatcttattagcagccaacagtcattgcagctgggggagaggcacatgacctactaaagtggatttgaccagggcagcaatatttcctaccatctccaaatatatctcaccttgttgcccccaactccagtcattcaatttattagtctgttttcacactgctgtaaagaacctcctgagactatgtaatttataaacttacaattgtggtggaaggtgaaggagaagcaagcaccttcttcacaaggtggcaggagagagggaaaggggaagtggcactttt

SEQ ID NO: 270192 - DNA, 401 bp, Homo sapiens
cacccatatgaccccattttaacttcattacttctgtaaagacccgatcttcaaatacagccatttctgggtttctggggtgtaggctttaacatatcatcttttggggggaattcaggccataacactcatcttccataacttggtataagtaacattctcgggcttgggaggtggtgtgtgtgttgtgggggggtgtctacgttacattgtttagaaaacactatccagagggggctctcgcctttcagcctagacaataaactcacaaggctgggtcttctgcccccatgaagggccaggaacacatgtgatttccacattttctctcttttggtttccactcatccattttcttttcaatctcagaataaaagaattccacacagaacaaatctgta

SEQ ID NO: 270193 - DNA, 479 bp, Homo sapiens
agcgcatgtcctgggatcagatttaagaactatttagaaaaaatgtctgtattaacacttagctaaaatacgccactgatttgtaaagatattattattagcatttatacctttcttgtcctcagagtgatttgatgggatatgggcaatattctaaacaatattaaatcaggaaggctttagttttctaacatacaaactctcagagagctaaagactaaaaatttatttttctttgtataaccagtacctggcacaatactaggctattcatgctttgttgaactgagggctaaaactcagaaagttgatatcagagaattaggatgattggggcaagggctggcacacgccatctgcttgaggggttgtgttagtggctgtgcagaactttccattgcatcattacttttgttttttgtcaagaacgaaaggtatataataaaagttggctcaagagaagtgaaactaaagagaaa

SEQ ID NO: 270194 - DNA, 222 bp, Homo sapiens
gccgaaccacagcagagtgatgtcacctcactttcaggtctgctttcaaagcacatattaaagtttctgattctaccacagccacacattttctcagtcttcatcttccatccctgccttaagcatttcagtctatccagccaatctctctctgtctgtctttctctctctcgctcatacacacatgctcatatatacactcatactctcattcatcttata

SEQ ID NO: 270195 - DNA, 420 bp, Homo sapiens
agagagctaggatgctgttggaggagtaagtatgcatgaaacaatcataatttaactaatttgcccacaaatgttagcaggaaaatataccaaaaattagattttgttttccattcgttatttttcttaatttctaacataatttttaaacaaaactgagagatgtttgtcaaaacacctcccaagtgatgatttccattagaatatgaactagacacttttcctccagtgggataagagccagattttcctaatcacaaaaattagggcatggtcaggcaaaggagtttacatgaaaagttttgcaaaattagtattactttgaaaatttcaggctatttggccactgcaaccagggagtcacttaattcttggcataaactccagcacttttggaaattgacctaactctataaggca

SEQ ID NO: 270196 - DNA, 411 bp, Homo sapiens
tttttgagacggagtctcactctgtcgcccaggctggagtgcagtggcgcaatctcggctcactgcaagctccacctcccgggttcacgccattctcctgcctcagcctcccaagtagctgggactacaggcgcctgccaccacgcccggctaattttttgtatttttagtagagacggggttttaccgtgttagccaggatggtcttgatctcctgacctcatgatccgcccaccttggcctcccaaagtgctgagattacaggcgtgagccaccgcgcctggccttgttccaagtcttaagaggaatgccatttggtatcatgttggctgtgggtttgtcacagacagctcttattttgaggtatgttcctttgatgcttagtttgtggatggttttttactatgaagg

SEQ ID NO: 270197 - DNA, 1175 bp, Homo sapiens
ggtttccctaattattttggggaattgcgtgagggttgctttcaaacacaaggaatttgcacaaccacatggagtacatggttctctctggctctggctctgtctcccagcagaaatatctgctgccggtagctatggaaggcacctaagggctgctactgccacaggtgccgcctgcagctgacgctcactattgaagctatacttctttgggttgttggagtggtgacagtgctcttattctctctggaggtagaaaaatccttctcctcttgttgagatacagggatcccaaattagtgtgactggtgatcacaacatctcatcaatatttggtgaaacaggcctcacagctgttcatcagacaagtgaattaactgaccgattgttgtacttagaacctttgtccctctccaggactcaagcattatctgagtcccaagctcacttttcccagagaatgggcttcttgaaggggctgctttgtttctcagtacacatacaccattggccaacttgcctgtcaatcctacaggccactctagattctagagcaaacacactttaagtcccagcttggcttactcttctaagggaagaactcatgtccatcagatttatttgatgttattttctgaacaataaaagtgttcaaatagattataggaacattgcctaggataatatggtatagctgtggtttgtgatttatggtatatccatatgatcaggtacaatgtacaattttcaaatgatgattatgaaaattatgtagcaagatagtaacatggtcattacatacttttaagtagaaaaatcaggattcaaaattatgtgtgtattatgattaaaactagtattacttgtgattacaactattattacttatgattttacttacaaaggagtaattagagaacatagccatgttagggtgaggatcataagttatatcataatgaaagaatttatttttcagaatgtttattacacaaagtaataaaatatttactatgtgctaaaaattgttaccaaatattaagtattgcataatctttctgttttgtaaaacactgtccaagcaccagtattaaaggatcttttatctgtctgattactgcaagaacctggaatcaataaaatatggtattttttcttcatctcaaactttctct

SEQ ID NO: 270198 - DNA, 564 bp, Homo sapiens
gattagcctgtggtcaaggtttccagctctgtcactaggacaacttacctaactctctgtgcctcatttcttcaacaaccaaagggaacaatagtacatgcctcatggttgtttgtaggatttaatgagtttgcaacgtatttggaacaatgcttggcacataataaatgctgaataaatgtttgctgttattactccctgaagacagtcttggcaccctcaaggagccccagatgccagggaagccttcctaccagggggcctttcaaatgtccaggagtacctgctcatgtctcctcaaactcccagcttcacctgggctggatgagcaaactgtgagatgaggatcccacccggccctgcctcccaccaccatcaggcaaatgaccctgattcaagccttggtcaacctccacctgcccactgcccacctggacagccactggctgcagtttcaggaagctgcctcttcccctcaccctccccacggcccaggaatcaatgcaatcccctaaaagctcataacttggaggtaattataagaagcatcaattacccagcaat

SEQ ID NO: 270199 - DNA, 463 bp, Homo sapiens
taaaccaccccgaacttaatggcttgtaacagcaagcatatattccctgccatgtttccgcaggttgactaggctcagctgggcagttcttggctggtctcacttggggtctcttgggaggttgcaggcagaatgcgcctgggctggagtcctctggtcgctctcccagggtcccagaacagctgcctgtctacgtggtctcaaggccttcgctccctatatggcctttctatgcagtgtctccatgcagactttctggtgaagggagctgggggcttctcacatggaggctcggggctcctcaaagtgcagaaccagaagccttcttaacacttagccagaagctggcccagtgtcacttcttcctccttcctttggttgagctgttgtggccagctcaggtccagggtagggaagtaaattcttgatgggagaatgacaaggaattgtggccatcattaat

SEQ ID NO: 270200 - DNA, 492 bp, Homo sapiens
gcatgtactagtcaagtaatatctcatttttctgtaatctctataaaatattgtagtaacaagctaaccttaattgagcttttgttgctcaattatttttctaaacagctttacatgtattatctcacttgatctttaaaataaccatctgatgcaaatgtcattatcttcatgcacagataaaggaaccattgggggcaggtatcatagaatcacagtggtcaggtatagattgaagtagcagtttactgaactgattgtggctttaaaaggtggagttatcagcctagagatatgtggtccagggctgtgcaggagctctgcagggccatcatggacagacacctcaccctcctctactatgtagggcatgttcattttcttcctgatgtgttttgcctcatgcaaaatataagatggctgctgtagtttatttacttttcctggtcagctgtggaaggaagtgaagagcaagaaggcctttctttagtt

SEQ ID NO: 270201 - DNA, 1542 bp, Homo sapiens
agggtaaaatggaaaactggaatctatatttgaatgtgagattctcatctttttagctttaagattttttaagttttaccagttttcctcaaagagaagatgaagttacttcaagagaactgatttctgtcatgtgagtgtaggtaagaaaattcttaactactttgagatatttttcttcagattattaatgagttttttgcaccactagatagaatttccaagattttcctgcttacttttggaaacattgtctctaccattactgaatattaaataatagccatgtacccctccctcacaccatatacgaaaataaaattatttgtggcctaaatgtaagcgaaaaatctataaccttgtttaggtaatggtttattgatgacaccaaaagctcaagcagcaaaaccaaaaattgacaaattgggcatcattaaaatgaaaaatctttgtgcttcaaaaaatgccatcaagaaaataaaaagacggcccacagaacaggagaaattttttataaatcatatatctgataaaggatttgtatccaggatgtatacataacccttaaaacccaaccacaaaaagagcccaattagaaaataggcaaaggataaatatctatccaacgtggatacgcaaatggccaataagcatgtggaaagatgctcagcatcattagtccttagggaaatgcaaatcaaaaccacaagatactacttaacatctcctagaatgactgtaattcaaagatggacaataagatgtgttgggtaagatctgaagaaattagaatcctcattcactgctgagggaatgtaaaatagtacagtcactttggaaaaattttggcattttctcaaaaagttaaatacagaattatcatgtgacccagaaattctacttctagctacaaacccaagagaaatgaaaacatagatccacacaaaattttgtatgtgaatgttcatagcagcgttattcgtaataaccaaaaagtggaaacaatacaggtatccaagaaatgatgaatggataaacaaaatgtggcatattcatgaaatggaatactattcagctatcaaaagtaatgaagtatgaatacatattacatcatggatgagccttgaaaacatgctagagaaaggaaaccagatgcaataggccacatatagatgattcctataaattttcccatttatatgaaatgtccagaataggtaaatctgcagggacagaaagaagataaatcgttgccactggctatggagaagaaagaatggggagtgactgctaatggttttggggtgttttggtggggaggggaggttgaaaacgttttgaaattaggtattactagttatactaccttgtaaatatactaaaaagccactgaattgtacactttttacattacactatgtaaattgtacatcaataaagctgtaattttttaaaagtatggatagtgtcatgtacacccatgttaataatatggtactctgttattcctagatttctcttttgacagtaataaatttgatt

SEQ ID NO: 270202 - DNA, 324 bp, Homo sapiens
tccctgagacagtttggaagtggagggcaggagggttcaatgcgcctcacacccacccagtcagaaaaggttaaaaaggagcagcagcagcaacagagaaaactgagaaccaacaccctctccaagaagaatataggctttaaaaaatcatgacacctgcaaaacacgcaagcagctcttcctcacaggttccctctctgtggacctttttttgcgggggaagatggaatggagggcgaggaaagcagactagcacttaggggaggccggcctgtggatgcctggttggcggtgaaatgaatgctttattccacaaaggaaatg

SEQ ID NO: 270203 - DNA, 666 bp, Homo sapiens
cctgccaagctatcttttgccggggagattggcatctgtagagaatctgcattgaggcggccaggctttccctgaagctttctcttgtccttatctagaaaagattaacagagagcctgacaccttaaatatctgaaagatacatttaccatctattctccctgcaggctgctaaatgtgaggtttcatccatgtaacaagaccacttttgctagccaggtctcctcttggctctctctcccacaacctgtcttgccaccataacccgatttaccaccatcatctgtttttgtctatactctgagcccccattcttctgtaatcccaagatggtgtgtaagattctgtaccccactggggcatgggggcaatcactctgtggttctcacccatgcatgttaataaatttgtgtgccatttctcctcaaaaaaaaaaaaaaaaaaaaaaaaaaaaaccttgtttggggcccgccttgggcgcgtcgaaaaagttttctaaacaccacctgcgtggggccgccggggccccagacgggcaacggtgtaccacggggccacagcgtgccccacaggaacccccgggcccaagacgaaggcgcgggacttcccacccaataaaaaagccgccggggggcacccgcgcgttctggaccaccccagagggag

SEQ ID NO: 270204 - DNA, 583 bp, Homo sapiens
agatggcaggctgcgtgaacatgcgaacagacccagacggtaggaaacacctcccaaagtacccaaagtgatgggaatgatatgcactattaaaattacatcaacctgtgattccaagacctttcattatggaaccgaaacacagctgtaaacttcacacctcagttttcattctgcccttgaaaaggaacagaaagaaacaaatctcttttccaatttttccagctatttcctcaatagcttgaagatttagcattaacttctgcaggatgataccaggaaagctgagataaaccacaggccatttgaaggaactggattgccgctgcaggctccctgagatgctgaaaaactgtattgtattattttacaaattaaacatatgtggcaaccagcatcaagcaaactattggcaccgttttccaacagcgttggtatctccgtgtcacattttgtattgaagacatgctagaaactgtgcaactccctgtccacaaggaattcactgtcaagtaataagcacataattattccactacttgccatgtcttaaataaaactgtgttccagagtctgcccgtga

SEQ ID NO: 270205 - DNA, 366 bp, Homo sapiens
actctgttgcctgtcaggtaatgccattaggggttttaagtaagattgaggatgcactcttctaaggctatggaactgtccaacacagtagccactggccccagtgagatgtctaaatttaaattgtttgaaataaaacaaaatccataattcagttgttctattcccagctcagtgacttatttcggccggtcttatccatctgtggacctcaaaatcccaagtggtaaagaaggggctgacagaaggtctgcaagatctcttccagctcgggggtgttcttgattctgtggccagtcttggaaaaccgctcagaaggaatcatcttaaaatgatcaataaagcttgcatacctaaaaattcaaa

SEQ ID NO: 270206 - DNA, 802 bp, Homo sapiens
cgtgacatctccgccttacaatcttcgcttcaagagtcagtcttaaatcatgtaggttttgcttgaggtttgctcgagcaagatgaccttaggtttggtcttatttgcatttttaccataactaggcctacattctaaataagtaactaaatgccacctatgagtttcattaactgtggctgcttgccactttttagttctggttagggtggtgctattgttttcctcaggttcattagaaacatcttccgtgacagctctgacgcggcaccgatttctgagtgtccagtgttttccctaccattattttctttggtctgaagttgacacttaaactgtccagttttaaacctccgatccgtgttcccaaatgaaaacatgactttcattacgaattacacgtcaagggagcaaaccaaggcgctcggggcggcgagaaccgcgacacagcgcttcgcctggactggtaaacaaaccgccgcgcaggcgcaatggcaacaggacggtaacctgggtagccgccaatgggctttttcgtagagtgaaaagcggaaaagccaaacaaaacgctggttccaaggtgataaactggctgacttcctctatttttacttttttaaaaaattttgtttctgaagaagtagttgtgcggccttctgggcctcgcagagatcttcttcgtggaattcctcggccccagagaaatgccgctagcctgtcggctagttatattagcctaattttttgtcttgatctttttcatttgactgcagcactaatcctaatccactggggcagcaaa

SEQ ID NO: 270207 - DNA, 235 bp, Homo sapiens
tttccattaaaacagttcttttattatttctggcttcttactccataaggaattactaggtcttagattttattagtctttttgtgatgagtgcccatgaacttttgttgtttcccttgtgtataccagaggttatgcttgaaattactgtaactgttgaattatctgggagatagacacagccctgtccttgtggtctacgaacattgggaaacacaagtaacaatttcagtcg

SEQ ID NO: 270208 - DNA, 504 bp, Homo sapiens
gggctctgaaaagcccagactctaaaagctacatgtctaagattaaaaatcttagcttttcaaatctcaagctgtgtgatttaggtcaggttaacctctctgtgcttcaatttcttgaaaaaattgtgagaattaaataagtatagaaaaatgcttagaccagaaccaggcatggaataaccactatattaaaatgggtatataccatcatcatcattactgtctgtaatgggatgtaagggcggggtacagttcatcttcaagtgtagggtaacatgggtctgcacagagcagttaaggcaaagaaaagcagatgatgcttactgcatgtgcccagcctgcacccctcactcctctgaaaattctccccagttagtctctgttgggcacgtcatatgaattgtgggagaggggccatcttctaaaaatgcaagaagtaaagacagctgatttacaggaaaagaggatgaagctgatccacaaaccaaaacagagaggaaggca

SEQ ID NO: 270209 - DNA, 463 bp, Homo sapiens
aggtgtgatcatggaagatgccaccattgagttgggtcccctggttttactggagatgatgaggccaagtggcagcacttaattattaaagcaacactgagcagtgctggtttgaaggtctgcttcctcagggtgtgaatgcttacacaaggactatgtctggaaccaaaaggattttctcaggtgcctcttggtactttgtgtccagtaaaaaaaaaacataaagaaaactacaaaagcagcaacaacaaaacagcagaatgatgaataacttggattaagaatgaagatttgtgttgtaccgtcaggtaaagaagtcagtgaactgaggttctggctaagggcaagggaaatatggaagaagccacctgtgatgttataaccaataacagaaacaaagactgtatgagctttgtatgttttctctttgctagctatatgtatgtgttttgtacatgaaaat

SEQ ID NO: 270210 - DNA, 494 bp, Homo sapiens
agaagaaagaagtctacctatttgctagagtgttaaaattgttttgataaagctcaaaacttatctaaataagctctctctccctaagcatgttttcatttttataaaacagttacatatactttgcttaaaaatttaaaatacttttcacctcctctgacttcatttaaaattaaaataattaaagtgccaattttaagagatgttagctcccattattggttctttgccatattcttttgacaatctgctgtaattttctgccccctttaaagcctcaggctatagggcttctccaccaaaggaatgttaagaagtgataaggaccttctgtgagcagaagtggcttgtttgcaaagggactgcttatcttggccactcttgaacacaagatgggaccctctactgcaaagctctggcatgtttttttttcccctaagttatcctccatactactgacagtgattttccctaaataaaaaactgcttcaaac

SEQ ID NO: 270211 - DNA, 425 bp, Homo sapiens
cttgaaagctagataatcctagcttaaatgataaaatttgagtagagtttgaaaacactaaaatcagtttgccaaataaccagctctaatttctttataccaaagccaaacttcacctaaatcttacctaagaattgagttccttattgtaaccagataggagacacttttgtatattattccaaatattgcaaacctacaaggagtaaaaggtgttattattttaaagaagaaggaatgaggcctgagaggtattgattcacttggttgagggcttcaagtagcacaaggcaaaagcaggatttgttgacttccaaacctgttttcttccttcaccatgtggcctttgcatctttcccacacaaatattattccacaaatatttattgtcaccaactataataaaagaacagaactatgtatca

SEQ ID NO: 270212 - DNA, 283 bp, Homo sapiens
gtacgaaaaaatctagctatatgtgaaatgactgatgtgaaacagcttggaatagaaggaaaatactaatgaaatctgggatagttagagtcgagcctcatatttcttgagctataatttgatacacacatatacatgtatacataaacacacatacacacattcatttttttcctctaaggtattcttacagagaacacacatactttttggctggctgggattagacatgagtatgtcacttgatcttttcaaatataccaccactattgaaaaaattcga

SEQ ID NO: 270213 - DNA, 423 bp, Homo sapiens
ggcctcctccctgatgtggctttgttctgtcttctgcttaatgccacaggctttggttcctgccaccaaatgagccctcctattgttaaactctgagtctttttttaggctatgcctgcctcctctgcaccctttactcttattttcattttattgattgcctatgtggtttttctcccaaaaatctgaaagtggtatgggagtcagtctgcctagttctctcttcttccttgttttccccaagataaccgcaaagtcccttttggttttaagggtttactgttaataactacaaaaaagcccaaacctagcagtgacaataaatacagtgaagtcacaaacttaaaaaatccttcaaagtttctgtagcattggtctctaggctataattatggctccccttcaagatggtaactgaaaact

SEQ ID NO: 270214 - DNA, 986 bp, Homo sapiens
accatccttctgcctccaaaatctcctgaacttttttcctaggtgaataaccctgttattccccaagttgcccaaaccaaaaatccaagagtctctgttatttctactcccttaaatccacaaagtcgctatcatttctaggtcctaaataccttgtatctgtctcctcctccccagcctcctgctctgccctttaggcatgtattgtctctgtctggtagtattacagtcacttcccaactctttctcctgctccatttctgcctctgtcttctcttcaaaaacaaaaacaaaaaaacatggcttccagagtgagctttaaaaaatgtgcttctcctcacatcactcccctgatgaaaaccctcatcaaacaaggaaatacattgcagcttgagcctcttctaccttcctgggccaaagcagacattgctaatcaatcactgcattgcgtcctgcaaggcaggatttggactcagctttgctatgagttcattgggttgacaagagagatgagaactatttgacatctcaggatccttcctcatctgccctctgcctgccagccttgttcctgctgctcctcctcccttacctgcattgtagaattcacctcccagccgtcctgagctcaggggagttctgagtgactcataccaccatacctttgcacatgcagttgcctctgtgtggaatgcccttccccaagtgtgtctgcctggaaaacttttactttactcaggtgccatcctgtccatgaagtctcgagatttaggtatttttctccaagcccccattgccccatgaccaggtgttcattttagggagcacccccttgcactgacgttgttggttagcatgtctgagacagagataaggcttatgcgtcttcacacccctggtacctgccatggctccactgtgctcaggagctgtttgtaaacaatcaaatgggtgatggaataaatagcatctgtcttactgaatgc

SEQ ID NO: 270215 - DNA, 586 bp, Homo sapiens
ctaaaaatatgtattcatgagaagatggtttatagaaagggcattagttctagtgtaaatgttccatttgtaatcttcacaagaatgaactatcttagaattaatacaaatcaactttattctctacttctacaaatccttaaacatccgtatcaaaggtcttttaaacttccagcatagtcttaactttgttaaattatcaattctttcaggcaagttatccatcatcttataatttttgcaaatttgtatttgggtttgaatcccaacactccatactagatgtgctaccagagcaagttacaaatctttctaagtctcagtttttataatctctaaaatggacataatatgggaacctacctcttagtgttgatgtttaggttgaagtttaagaaaatgcacgaagaatgtgacaaatagtaagaacttactgcaagttattatccactgttgttttatattccttattataccaggaacgtgggcacacaaaaatgattttttgaagatgctaatgtagaattaatgtacaattgaaatgacaggcatactcaggatgttgtgagtgagattaagattggag

SEQ ID NO: 270216 - DNA, 446 bp, Homo sapiens
acattttttaaaaaataaaaagtaaattcctaataatcttatagggatattatctactactattattttgaatttcaaacaactgcctgatatacaagttcactcacttgtactggctctttttctaaatgactaaggcctgcatcatattcatatatatataaatatatatatatatactcaaataagtgagaaagttgtacatatttatccaaagtatagcagcaagaagttgtgaccagtctgaaggtgttgcttccatcctgcactgttcattacaataaggaaaaatgtgctttcgagcaaagtatttgtatgcctggcctctgtgaaaagggctttttctttcttttaaaagtttgagtgaaaatgattttaccacttttgagttatgtgaggatcccaaaataataaaaattgctcaaatcttctttggcttatgttac

SEQ ID NO: 270217 - DNA, 433 bp, Homo sapiens
ccatccacatttcaaatgacagcattgtcaggctttggctatcttccccttctgcaaatgggaaactgaggctgcaagaagggaagtgacttgctcaaagacaccttgcaatttggtggcagcctggagctcagaccccctgactcccatgcagggcctaccactccatccccctcaaaacccacaaagattccgttttgttctgtcctcagccaacgcggtggcccacccaccttgggcgaccagagccaagaggttgtttgtctgttttagacactctcgtcgctgtgtttcttctttatcttttaagggctcgagactcaggaaaaccaactcaacgtgcataatttggcaattatttcttgtgttcatcctcacggccgtggctgcatacagatattggaatttgcataaaacaatcttgctcccagta

SEQ ID NO: 270218 - DNA, 445 bp, Homo sapiens
tttatatatagccaggttttgttaattttttttttttttggaaacttgtcaaatctcttagttcccagtatcctgcagtttcacaatgacgtgccttgatgtgggcctgttttcatcaattgtgtcaggcattgggtgcaatcttttcttttagaaatccatggccttggccgggcacagtggctcatgcctataatcccagcactttgggaggctgaggccggtggatcacctggcagtttgagaccagcctggccagccttgccaacatggtgaaaccccgtctctactgaaaatacaaaaaattagctgggtgtaggggcgggcacctgtaatcccagctactcaggaggctgaggcaggagaatcgattgaacccgggaggcagaggttgcagtgagccgagattgtgtccaacctgggggacagagcaagattccgtctc

SEQ ID NO: 270219 - DNA, 242 bp, Homo sapiens
tgtatttacagataggtcaagaagaaagttgggactcttaagtcagaataagttaatatggctatacatttaaatgctaataattcaatcattttaaaaaggagagattgatcaggcatagtggctcatgcctgtaatcccagcactttgagagtttgaggcaggacagctgctggataccagtgagccgagatcgcgccactgtactccagcctgggcatcaacagtggaactccgtctca

SEQ ID NO: 270220 - DNA, 613 bp, Homo sapiens
agcctcactccgtgacttcctggaaggggagaggtactgaggttgagtctatccccaatggccaatgatgtcatcaatcatgcctaaataatgaagcctccataaaaactcaaaaggatgggatttggagaacttctggaatgctgagcatgtggaggtgcctggagagggcatggaagctccacatgcctgcccacatactttgcactgtgcatcccttccatctggctgttcatctgtatcctttgtaatatcctttataataaataggtattatggtttggatgtatgtgtccctccaaaattcatatgctggaacttaaactctaacgtaatagtgttaaaaggtgggatctttggtgaagtgattaagtcaagagggttgtacccttatgaatgggattaatgcccttataaaagaaaatgaagggagtgcccagccctttcagccccttctaccatgtgaggatgcagcaagaaaatgccatgttggaaggagagagtagccctcaccagacactgaatctgctggtgccttgatcttgaacttcccagtctctagaactgtaaaaaaaaaagtgtttattatttataaattacccaatctaaggta

SEQ ID NO: 270221 - DNA, 449 bp, Homo sapiens
agcctcactccgtgacttcctggaaggggagaggtactgaggttgagtctatccccaatggccaatgatgtcatcaatcatgcctaaataatgaagcctccataaaaactcaaaaggatgggatttggagaacttctggaatgctgagcatgtggaggtgcctggagagggcatggaagctccacatgcctgcccacatactttgcactgtgcatcccttccatctggctgttcatctgtatcctttcattgtgagaacaagctcattcttgtacctttcctccgtggatttggtgatcacaacaagggacttatccatcattggagtggccacaatctgaacaagttccacccactgcctgagagtcctgccctgaattttagactttgatcataaaaaaatggataatataatttaacagtgaataaattagatatcaatgaagttg

SEQ ID NO: 270222 - DNA, 420 bp, Homo sapiens
gctggcgacaggcgtaaataaaagttggatctgaagatttctgcctcggttaatgtggaagtctcacgcactcctgatttgatattttggctgaattcctagcttcaggagaaaaagcttttaattgattaggagaaaaagaaaggaggaatgatagtgaaaagatggattctcaaaaagatcttagaagcacataggaaatatttttgacgctggagaaaaaagtcaaatgcaaaagactgggcgtgaggtttgattttgtgtagcaattattatgcaaataacacacaaacagaagagattgtagttccattatgagaacacagccttgctgcttgtttataaaatgagaacgtcagggtaatatacagttttcttcaaatccacaaacgctccatattgagactgatttaagtgact

SEQ ID NO: 270223 - DNA, 567 bp, Homo sapiens
gacagagagggattgtcattatgtaggttttacatctggatatgatatgcagcttctcccacactggaaaatgagctgcgtgcataaccaattggaggcgtgtaaagagttaggagcaagatccctgcttttgtgcatttcactccatttgtagccacttgttgcactccatctggaaagaaagaagccgctgcagggcatgcgccagacctgcgctgggccgtcgcttccattgtacggaagatgaacaggcggcgttattttggatcacatagcagcttgttcaaaagcatcttgcattccccagctgttccacaacttcttcgcatatgggagagaacttgccagctgctggggcaactgtacttacatttgctgcctttgttcagtaaacaaggaaggtaaaaagacaggcgcctttgttaaactgtagtcattgtaaagagacttacttgtttctgttatgtcaatgttattccagatatagtctgtcaggggaggcggtttaaaaggaaatgtcagaattaacatttttttttaatccaaataaatgttattttagggtaa

SEQ ID NO: 270224 - DNA, 484 bp, Homo sapiens
agaagtcctcatatattgtttactcttatcattttctcaaaactgtgattattagacccattgctaggtcttaggtacagtttttacaggttgagtatgtcttagccaaagtgcttgggaccagaagtgtttcagatttctgaatatttcattatacttaccagttgagcatctctaatccaaaaacctgaaatccgaaaagctccagtgagtattttgtttcagcgtcatgtcagtgttcaaaaagttttggatttgggagtatttcagattctgtatttttagaatggggtgttcaacctatataaaaagggggttaaattactgtatcttacatttgatttttatattattttgaaaactgtctcataattaatttctttataaatccgtgtattttattatacacattaactgttgttctaagaaagtgttcgtaggcttcctcaggctgccataaagattgataatacaaaagagattt

SEQ ID NO: 270225 - DNA, 307 bp, Homo sapiens
gaccctggtcaggagacatcacagacaggctcccttctcccgccttcattcagggctctgctcaaacagcccatttgcaataggacttcctgcagtgtcctagttaaataccccaacccatgcccccatcgtacgctatcccttcccctgctttatgtttcttcatggtgctcagcaccctgacatatctatgtctgtatttgtttacttattgttgggtctgtttttgaatgaagtgctatgtctgtggtgtaaagtccaacatgtggcagattctaggtgctcaataaatatctattcagtgaat

SEQ ID NO: 270226 - DNA, 422 bp, Homo sapiens
  misc_feature (57)..(57): n is a, c, g, or t
  misc_feature (88)..(88): n is a, c, g, or t
cccccgaattggccaccggtgctcacagccccactgcattgttcgcctctgacgggntgcagatggtgcacagaaggccacccacttntgccacacatgctgggagatgtagttcttagaatatttaaacaccagcaaaaactacagttattaaagagaacagtgcctaagggactgagctgagcttgtaagaagagcacgcctgcttgctaatgattacagcggtagcagaattccatctagggctggataccaaggccagtaatgcctgtaatctcagcactttgagagaccaaagtgggaggatcacttgagcccaggaattcaagcccaccctgggcaacacagcaagaccctgccactccattattttttaaaataaaaaataaataaataaaaatttgtttttctatagcctaaag

SEQ ID NO: 270227 - DNA, 498 bp, Homo sapiens
gattcacaggccaagacgctgccttggcgcagcactccccgtgttgacgtggaaggtggtgatggcagtgagcaaaaaagtgatccatgcacagatgcatttgtgaacgccggatgaaacaaagttaaaataggacccagcggatgaagtggactgaaacactgaatctgaaacattgatgatcactacagcaaagggaagagctcggtaaattgtgcatatcgttcttagatcttccacccaaaagtaacacttccacttacatgtattggccacgagacaggattgtgccatgttgcccaggctggtctggaactcctggactcaagtgatccacccacctcgaacctcaacttcctaaagtgctgggattacaggcgcgaaccactgtgtctggcctccgggtggttttaagtgggaacttttatttctcacacattcttctgtatattctatattttctacaagaaatatatattacttttctaatcaggaaaa

SEQ ID NO: 270228 - DNA, 540 bp, Homo sapiens
atctactctgcaccaataggcatactgcatgcaccgtgtgcacatctccatgatcacccatgctggcaatgtgtgctaaacccgtgcatgcctgccgagcacacccacagagtgaacacacatgggcacacacatgcacatacataagaatgtcactatagtagctaacattaattgaatgtttactacatgctagggacttttctatgaaataccttctctagtcctcaccacaactcatgaaagaggtaggataatcatctccattttacagatgaggaaactgaggctcagaaaggttaagtaacttgcccaagatcacacagctagaaagtgacagagatgagaagactgaatgcagagaagctcaaggtcaaaagcaaggtcagcctgtactgagtatgagcacacacacatcccatgttctatttcttgtgctcagtctgcaaagctggaacatgttcctaattcccacgcactctggctgagtgctcacatggaatgcacgtgtgcccatgagctcacgtttacatctgagtg

SEQ ID NO: 270229 - DNA, 794 bp, Homo sapiens
tgaacgggctgtcatgtcccccagctaccacggattggctcagtgaagagaggctgtggtcacctctgcatggtttcctggtacaaacacaaatttcctttcctctggctgcattcctaaaattaattaaatcttggctcaagaaggcttcttcatgccagcaagatgagaagactgaatgcagagaagctcaaggtcaaaagcaaggatgtcagctccatgaggttggggaccttgcctgttgtattcacttctatctcctagaacagcggctggcacagagtctttccaactcaaatggttgcaaggagaaggaagaggaggtagagaagaggaacgctgtttctagtgcttaatgtgtcccagaccctattgtagaggcttcagacatctataatggcatcttcaagagacctgtgtgcaccttgtctgagttgaagtacacaccctgaagaggagccagttatgaaggaccaaatgcacatattaaaattaaacatcacacgattctcaaagtattggttattaatgcccagtggtctcacttgcgctgggatccacattatttctgtgcacatttggaagacacattatcatggcaaactgccaggctgagatgaactgtgggttcaaccaatcaccaaagggttcattcatttatccctgagacaatttcctcagagaggaaaaggcacttgcctaaggtcacactgctggtaagtggcaaagccgaggtgtaaactcaggcaacctgtctctaagcacctcacataggcggtgcttcagtctgtttg

SEQ ID NO: 270230 - DNA, 434 bp, Homo sapiens
tcttacatttcagtcatttatttgcagacatctataatggcatcttcaagagacctgtgtgcaccttgtctgagttgaagtacacaccctgaagaggagccagttatgaaggaccaaatgcacatattaaaattaaacatcacacgattctcaaagtattggttattaatgcccagtggtctcacttgcgctgggatccacattatttctgtgcacatttggaagacacattatcatggcaaactgccaggctgagatgaactgtgggttcaaccaatcaccaaagggttcattcatttatccctgagacaatttcctcagagaggaaaaggcacttgcctaaggtcacactgctggtaagtggcaaagccgaggtgtaaactcaggcaacctgtctctaagcacctcacataggcggtgcttcagtctgtttg

SEQ ID NO: 270231 - DNA, 367 bp, Homo sapiens
acaacaataataaaaagccaaacagtacatacacaatggtttgcaagccccattacattaggaatgaaggggagtgatctctgaaagatggggcgctctcagggaaagatgagtactaccatcactcagcttagtgtcctaagaaagttctcagactacagcccaacaagggggaacctaagcagagcccagcagattccctacaatggggagacagaactgagagtcccaggaaaccaaagcaggtcaaggtcacaagataaaagtactgaaaaagggaactccacacatggagactactctgggatcctgtgatgtgttcctctcaagtactgaactgggcactgatcagcataaacaagtgaaa

SEQ ID NO: 270232 - DNA, 537 bp, Homo sapiens
aaagtaaaatgtacccattttaagtgtacaatttgatgtttgacacatttatatatctgtgtaaccaccacaataatcaaggcataaaacattcccatcaccacaaaaagttctctcatgtgccttctgcatgacctttgaatagcccgttggatattcttgaaggtgaaaaacctgtttataaatatctgagcctagaaactaattacatatatataaacacaaaatatttttagcatagttttaatgtacacttgattttccagaaatgtaactgtgatgtaagttgagaacaaaatggtattttgttcagaattttgtcagaggtttgctattctggaaaaacatgtcagagacagcatcagcttcactattcatggcatttgagacaagaagtcaacattcctctatcagtctgcatttgtagctaccacatttatgtgattctacataaaggtgtaaacacctatttcattatatcttttatggtgttcatgtctgcacatttacatattaaaatatatattattataaaaa

SEQ ID NO: 270233 - DNA, 377 bp, Homo sapiens
aaccagatattgtcctaagcatatatatatataaaatatatataatttacatatataaaaatgtataaaatatgtataatttacatatataatatatataactcatatatatataatactcattcgatctttataacaaccctataaggtaggggtgctattcatatcctcatttcacatgggaggaaactgaggcacagcaaagcttagtaattcgcccaaggttatacagtagtggaaacaggatttggacccaagcaatttacttctggcattggggctcttaaccagcctagtatgtctcataaactgaaatcagatctattttttaaaagcttttttgggttccagtctcttggaagttacttcttaagaaa

SEQ ID NO: 270234 - DNA, 344 bp, Homo sapiens
aaggatcaaacctcaggacactcccattttaaaaggtcaagtacaaagaagatggagaggccaggtgtgatggctcacacctataatcccagcactctgggaggccgaggtaggtggactgcttgagctcaggagttcgagaccagcctgggcaatgtggtaaaaccccgtctctaccaaaaatacaaaaaaaaaatagccaggcatggtggtgtgcacctgtagacccagctacttgggaggctgaggtggaagaatcacttgagctgatgttgcagtgagcagagatcacactgctgtactctagcctgggtgacagagcaagacccatctcaaaaaaaaaa

SEQ ID NO: 270235 - DNA, 152 bp, Homo sapiens
aactagaaaccagtaacaaaaagagaagtagaaactcctcacgtgtctggaaattaaaacatacttttctgatgtgcccattggtcaggaaaaaagatcagaatggaaatgagaaagtaattcaaattaaatgattgtgaaattactaaaca

SEQ ID NO: 270236 - DNA, 531 bp, Homo sapiens
cacgagggtgtgccttctcttctcctgaccaccagccccagccttacttgatttgagggagcagaaactttgctctgccatcctaactttccttttggttactgtggcctacagcttcctcaagtctttgtttcagtcccattaaaggaaagaaagtggctttcagggtacctgtgggagaaaaggaggagtagaaataaaaaaaacaggatatatatagattctctacgttctttgaggaacaaaagcattaacacatttaaagtttctaatcacagtgtctggttcattacaaggacctaagtcatagtagctattatggtttgtgatagattcattgcaaacataggcccaattctctatattttcccacatccatgctcctttccaatgtgactttgtagctcctcctattaagcgggggagactactgcctcattccttggatctgggagaccttctgacttgctttggccaacaggatgtggggagatgccagtgatggaatgccagtgctgagcgaggccttca

SEQ ID NO: 270237 - DNA, 397 bp, Homo sapiens
ctcatgagatctgatggttttataagtgtttgacagttcctccttcacacgctcacactctctctcctgctgccttgtgaagaaggtgcctgcttccccttttgccatgattgtaagtttcctgaggcctccccagccacgcagaactttgagttatttaaacctcttccctttataaattacccagtctccggtatttctttatagccttgtcagaacaggctaatacagatggtatcaagagtacaccaggtgaaatccatggaaggcatgaaaagaaagaggaagactgactcacacggacattaggctgaataaccatgtgagatgtgcagggatagacagaatataatgtaaatctatgcttcttaaactttgatgtgccttgaatcacctt

SEQ ID NO: 270238 - DNA, 653 bp, Homo sapiens
ttacaaccccacgatcacaaattatgcagtcgaggtgccgatgaatagcgaggtctgagggaggtctcaccaatcagcatctcacctgtgccctctttgtcttctcttgtgtcagccaggggcagagaatcatggggtgtctctcaggagaagccggggggagggggctgagaagctcctacttggtgttttgagtgaagggcatgtcctccccagaggacggagctggatggagacttggttggtgagaggaagctaaggactctactcccctggggaaggaagctgagatggggatggctctctcctccccagcactccccctgctccccgcccatgtccctgctgtgtctctcactctcttgctcatctcccagttgtctgttcatgtttctttctactattaatgaatgctgagcccttataacaggagctggggtggagacatcacgaggggtcgggggacagcaaagggcaggaagcaggatgcagggctggcaggaggtgggcctgtggcatcagcaggcccagcgggcgagtgtggtccctgcagcagcttcccacctcctttgttcataaggagcttgtgttggcctcccacagtcctgtctgctggacgtttttcagagttgggttctctctctttgatgtct

SEQ ID NO: 270239 - DNA, 827 bp, Homo sapiens
tctatgaaatgaagtttcccgatctgtgtgtatactgaattccaagagcctgagctcctcaaggagatggggtctgaggaggggctcacctcacgcccaccccgaccacatggagatctggctgtgatctctgagaaaacatcaccttagatggcagcgcctcccaggctaagccaaggtggagactctctggtccttcttggccctcctacctcctcctcgtcttccctgagggaggtctcaccaatcagcatctcacctgtgccctctttgtcttctcttgtgtcagccaggggcagagaatcatggggtgtctctcaggagaagccggggggagggggctgagaagctcctacttggtgttttgagtgaagggcatgtcctccccagaggacggagctggatggagacttggttggtgagaggaagctaaggactctactcccctggggaaggaagctgagatggggatggctctctcctccccagcactccccctgctccccgcccatgtccctgctgtgtctctcactctcttgctcatctcccagttgtctgttcatgtttctttctactattaatgaatgctgagcccttataacaggagctggggtggagacatcacgaggggtcgggggacagcaaagggcaggaagcaggatgcagggctggcaggaggtgggcctgtggcatcagcaggcccagcgggcgagtgtggtccctgcagcagcttcccacctcctttgttcataaggagcttgtgttggcctcccacagtcctgtctgctggacgtttttcagagttgggttctctctctttgatgtct

SEQ ID NO: 270240 - DNA, 285 bp, Homo sapiens
tatatttttgatgctcaaatacttctacatttgtccattgaaagtcctctgactatagcttctgtttccttttgaccaatttccatcatcttttgagcacttcttggctttctggtacaatacgactggctggaatcttcaaagaagtcaacatcccaagagatgaaatgatggactcgctgcttgacattgcagggaatgaaagaatcatgtcaagccatgcagtgtggtcctagattggatgctaaattgaaaataaaagctctcactttggactgtatttta

SEQ ID NO: 270241 - DNA, 1338 bp, Homo sapiens
agcggcaggccttccggcggtcgttacgggacgccgctgccatctacagcactccgtgaagaatatgctggccgccttcatctcccgcgtgttgaggcgagttgcccagaaatcagctcgcagagtgctggtggcatcccgtaactcctcaaatgacgctacatttgaaattaagaaatgtgatctttatctgttggaagagggtccccctgtcactacagtgctcactagggcggaggggcttaaatactacaggatgatgctgactgttcgccgcatggaattgaaggcagatcagctgtacaaacagaaattcattcgcggtttctgtcacctgtgcgatggtcaggaagcttgttgcgtgggccttgaggccggcataaacccctcggatcacgtcattacatcctatagggctcatggtgtgtgctatactcggggactttctgtccgatccattctcgcagagctgacgggaagaagaggaggttgtgctaaaggaaaaggaggatcgatgcatatgtataccaagaacttctatgggggcaatggcatcgtcggtgcacagggccccctgggcgctggcattgctctggcctgtaaatataaaggaaacgatgagatctgtttgactttatatggggatggcgctgcgaatcaggggcagatagccgaagctttcaatatggcagctttatggaaattaccttgtgttttcatctgtgagaataacctatatggaatgggaacatctactgagagagcagcagccagccctgattactacaagaggggcaattttatccctgggctaaaggtcgatggaatggatgttctgtgtgttcgtgaggcaacaaaatttgcagctaactactgtagatctggaaaggggcccatactgatggagctgcaaacctaccgttatcatggacacagtatgagtgatcctggagtcagttatcgtacacgagaagaaattcaggaagtaagaagtaagagggatcctataataattctccaagatagaatggtaaacagcaagctcgccactgtggaagaattaaaggaaattggggctgaggtgaggaaagaaattgatgatgctgcccagtttgctaccactgatcctgagccacatttggaagaattaggccatcacatctacagcagtgattcatcttttgaagttcgtggtgcaaatccatggatcaagtttaagtccgtcagttaaagggaggctacgtgtgaatttatcatcagtctctcaatggaatgttcatggtcaaatttaagaaactgtgttctcaactcaaggaggaataaaactcataaaacaaa

SEQ ID NO: 270242 - DNA, 350 bp, Homo sapiens
cccagttggattacagagaggaaagaatggaaaaaacagaacaggacataacagatgtgatcaaaaggcctaatatatgtgtaattggagtcccaggagtgaagagtgaaaatgaggcagaaaaaaattcaagtgagaatggctaagaatttccccaaactgatgaaaggcatccacccacaaatcccaattttgtacttccaaccactgttataccacccccctcaacaatgcctataaatgtttgttgaaaatgagtgaatgaatgtactccaatcattttctcacttggatgttccctactttttgctcttcttagaaaataataaatggtacaataatatctccca

SEQ ID NO: 270243 - DNA, 525 bp, Homo sapiens
atgaatgagaatctcttgtctactatttgcaagaattgctgcgtattttctaggaagaagtccactgctttagtcctattctgaaaggcatttggtgttagacacaagagaacaggttccctggctgacattttcagaggcccgtgcccttcggtcttcaggtgaggctgggcttgagggaggctttgtggaacggtgagaagaacagcgtgactaaggcacagaaggctgagtgatgccctgcagtgcttttgtagggttggaggccagctgggaaagaaggaacccttgcgttagagaatgggaacatgccttaggatatagaaatggcaaatctgagatagtttgaagtgagaatactagaagtgttcccaccaaacaaggtgtgtcttggtgcctgctgtatcccaggctccgtgaggtgccggagtcagcactgaacaaacagagcttcctatgcttgcggaaatgcatttcgttgggggaagggatttttctgctgactctggctattaatagtaacaa

SEQ ID NO: 270244 - DNA, 498 bp, Homo sapiens
atgaatgagaatctcttgtctactatttgcaagaattgctgcgtattttctaggaagaagtccactgctttagtcctattctgaaaggcatttggtgttagacacaagagaacaggttccctggctgacattttcagaggcccgtgcccttcggtcttcaggtgaggctgggcttgagggaggctttgtggaacggtgagaagaacagcgtgactaaggcacagaaggctgagtgatgccctgcagtgcttttgtagggttggaggccagctgggaaagaaggaacccttgcgttagagaatgggaacatgccttaggatatagaaatggcaaatctgagatagtttgaagtgagaatactagaagtgttcccaccaaacaaggtgtgtcttggtgcctgctgtatcccaggctccgtgaggtgccggagtcagcactgaacaaacagagcttcctatgcttgcggaaatgccagtaaacaagatcctgctagagtca

SEQ ID NO: 270245 - DNA, 389 bp, Homo sapiens
tgcattgcaaggagcccagaggcaggtgaggctgggcttgagggaggctttgtggaacggtgagaagaacagcgtgactaaggcacagaaggctgagtgatgccctgcagtgcttttgtagggttggaggccagctgggaaagaaggaacccttgcgttagagaatgggaacatgccttaggatatagaaatggcaaatctgagatagtttgaagtgagaatactagaagtgttcccaccaaacaaggtgtgtcttggtgcctgctgtatcccaggctccgtgaggtgccggagtcagcactgaacaaacagagcttcctatgcttgcggaaatgcatttcgttgggggaagggatttttctgctgactctggctattaatagtaacaa

SEQ ID NO: 270246 - DNA, 318 bp, Homo sapiens
tgtttgttgatttaagttccttataggttctggatattagaactttgttcaatgcatagcttgtaaatacattctttcattgtttaggttgcctatttagtctcttgaatggttccttttcctatgcagaagctcctttgtttaactaggtcccaatttttctttctttttttttttctttaacaaaatttttacttaataaatggttaaaatcgcagtgccaaaaatacattcacatttagcaatttcactgaaaggaagaaactacagaatgcacggtttcagaaagctattttaagttatttacaaataaagtat

SEQ ID NO: 270247 - DNA, 458 bp, Homo sapiens
caaactgctgggagtttcaaattcaatttagttgctttctaccagtaatttttaagtagagtataacagaattaaaatgaaaatagaattgtatcacaagtagtaattttaaaggttatttttcattaaacctttgcagttttttttttaatttaaatatacacataagctctgtgtcataatgtatcaggaatttcttaatttttacttgggttgaagttaaacattttgaaagccaataataaagagttatcaattggctgaggaagagatcagtaaaagggaaaaaagtaacagaccactctaataggagaagaaagagaaaatgagggtgtgaatcaaagtaaaggaaataaaaaagaaatgtcagatccttttgggaggccaaatgcgagtggatcacttgaggtcaggcattcgagaccagccttgccaacatgtgaaaccctgactctact

SEQ ID NO: 270248 - DNA, 283 bp, Homo sapiens
attttttgttgttgttgaaaattgcatatttgaaactaataatgtagaagccctggaaatcagaccttttctcttccccaaggtttactgttaccgtttgtattttgtggggttattgttgccagtctctgtgctaagtattagctttttttgttaacttgtggtcttaagtattttctgagcctgcatgtttccctggttatgtgccatgactttctcatttcctctgttgttttcaaatgccctggttatcaaggtctgtctcccaaaatgagaaaaagta

SEQ ID NO: 270249 - DNA, 362 bp, Homo sapiens
cgcgctccttccgggctcagacgccctcccctcgcccctccgcctcaccgctgccaggggcggggtcgctgctcggcccgctccgttcctcggccttccaggcgaagggcaagagcgagccctggcggaccgtgcggaggggtgcagagacctggatgcggcctgcgatctccttccccgccccggcgttctccgcccacccggggtccttcccgccaaaacctctcacctacaagtacagcgcgtcctaaatttggcaccggcaaagaactgtggctgagcaatgcgttgctcacaggctcctttctttgtgtccttttctcttctcgttgctatatataataaaaccctccacgttttga

SEQ ID NO: 270250 - DNA, 480 bp, Homo sapiens
cattcaacacacaagaaggtcaggagactttaccataacaaagattaaaatgttcgttcataaggttgcagatcccctagttcaccttacttattagaaaaaaaaaaaaaaaacttagtttttgtgtaaaaaatcaaagaatattcatatcttttcagaaaagcaatcaaaatattcctccaactataaatctctgggagcctgaattttctttatatacttaaataaaaacaacatattgctaataattgaatgcagaaacatatataagacccagctacatcacaataaaccagaaactgaagagatttgtaaaaatgtaaaacagttaccctcatctaagttttgttgtaatttgcttctgtagtaaaatatcgtcttcatagatatacctacattataaatattttgttcattttaacatgtattttaatattcttattttaaataacataaataaatatatttttaattctcaaa

SEQ ID NO: 270251 - DNA, 407 bp, Homo sapiens
ttcagcttgcccgtggccaagtaactagcagaaggaggaggctggtgttcaaaggcagccacaaagggcttatgggcccacactcaagccccccaccactcgtctgccctgtacacgtgatcatatggccaccacctacatatttacataccacctacataatgtggacaacccgtctcagattcaaattgactctgtagctgcaacattcctgccttctcctcactggagtattaacaggctctggtagaagtggaatgatgacaatcagaggacagacatctctctgggagctgcttttccctaagaccagggatacaatttctgaacacattcttaattttatcccatgtatctagacattaatcctagtctgataaattcctggagtgccctcacgctacatt

SEQ ID NO: 270252 - DNA, 500 bp, Homo sapiens
gtgacctctctgcacctttcctcctctgtagcatgttcccacatgaacatagggtataggaaggttggtgtgtcaagtgattaacagcagtacctggcacatatttcatgcttagtaggtgatagctcctaatgttcttaggaaacaccaagtcatatcacttaactgtgccaacagtgttgagacagggttattactatactttatagatgagctgagaaaggttaagtcgcttgcccaactggcagcagagccatgtgctgacccccagtgtgcctgactcctacctaggccaggctctgcgaggggagtttacttgcaatcctggctctggcactaacttagcaggacactgcaggcaggccccgtcgctctctgggcttcaagcttcccataggcgggatgggggaccagcataactctttgtgcaggataagtctcacagaatgtgggggctgctctctttgctccaaccacagcagaaggctttgctttaaaaa

SEQ ID NO: 270253 - DNA, 440 bp, Homo sapiens
gcaggagaatcacttgaacctgggaggcggagtttgcagtgagccaagattgcaccactgcactccagcctgggcgacagagcaagattctgtcttgagggaaaaaaaagcccctaaggcatgatgccactgaaggccaagtcagccacgggccatatgtggccagaacaggtgagcagcatcagtctcattgctatggaggtggtgaacccagtgattgggctggtgggctgagggtcatccttgtcttttctcctctggtacagcgcccggggttcctccaggcttcaccctaacacgggctgagcagagaaaaaggaaaaggtggcaccgagattaggaaggagctagggaggggctggggagtctgggaagggtgagcaacagttgacaatggagggaggaaagtaggggatggggagaaccgaagaaacgaccca

SEQ ID NO: 270254 - DNA, 262 bp, Homo sapiens
agttttaaacgcttgctacagactagggaattctttgtgtcttaaacacaagggtgctaacatctattgaagaagtcacaccaatgttgtctggggttttaatttacactggcttatcttatgcctggagagccccttctggaaaagtttgcagtcaaagggaagccagagccctagttcaagggagggaggttgctgagaattagccaggtggtttaagcacccggcaagcctcagtaatggagcgtgatgtataaccctg

SEQ ID NO: 270255 - DNA, 474 bp, Homo sapiens
agcacttttaatcagggacttcatttttttctccattaataaaaattttaattttctactgatacataatggatgtacatattttggtagtacatgtgataatttaatgcattcatataatttgtaaaaatgaaactaatgtaattgagtatccaacaccttaaatatttgtctgtttcttatgctagaaacacctgaatgattatcttctaactattctgaactgtacagtagcttgttgtaaactattatttctgggcaaggccagctccacggctacacgatcagtgtggctgcagagacaggcacttggttttatgctctacttcaaagtcttagaattcttaataatttttgaacaaggtacctcacattttcatcgagccttgtaaacagtgtatccagttagtttccttgataatatcgaggtgtgatatttaatgtttctttcaataaacattaccagtgtgaata

SEQ ID NO: 270256 - DNA, 443 bp, Homo sapiens
gtcaacaaaagtgggaaggaaataattttgtatctcagtgacagcggcagtcaggaaaatttctaaaatgtcttaagtgccaagacatggcattgttgaaaaactcaggcaaaaagacaagtttcattgtctatatggaaacttgcaactcacaaatacctgggcatagcaatacttgtgaagaaagtaagtaacattatggaaactagacggaaaaaataattcaaattgacttagcaagattttagtaaaataaccagtgttaaagtgctgccaatttgaggccattgctttaaaaagccaaacattcccctaatgtttgctggatcaaagggatgtgatcacaaaataaaatgcattcaaaagcatacatggaaatgtaatggcaaaatagagatagctacaaataagattatttttggaaaaaacttcacactctatca

SEQ ID NO: 270257 - DNA, 437 bp, Homo sapiens
atttatttcctgttgcaaagagatggagcttcttgcagtccacgaaactgccatatacctctatgattttgtttttggattctgtaagataccatgtttagtagacctgtgttgttgtccacgagtctacaggaagatgttcatgttttgtttcagaaaatatttctgttgttttgtgcttttcttaactcatcaaatacaatgtgtggctcgcccttggcccttcatattgcttaccttaattgtgtagaccataaccagtttctactttgactaaagtttgacgtacacaagttacttgaatgtggggattctgtctatccctctacgccctagtgtacatagtactatatattatagtctctttaagtgttaaatgaaaaaccagtctaaaatgcaggatttatattaaaaatcgagttgcctgcttaaaaaaa

SEQ ID NO: 270258 - DNA, 704 bp, Homo sapiens
caagccttaacagacattggaattagcacttgcaagattttgattaattaggtgggtcagggcctaaaatcatttcctacaaacacccaagctgcgggtcttagatttttttcattcttacatccattaaactttttttttcccctcctttttaaattggcaactgaatataaatgttttacatttggcttaaccttgtagtgaaatccgtaagaaaaattgaacatcttttctcctgaagttagatgaaatgtgatcaaaatacatctcacaaatgcattctagttttaaataacaaaacacttatgtgagccaggtgcagtggtgcatgccagcagtcccagatactctgggggccgaggtgggaggatcccttaagcccaggagttcgaggtgagcctgggcaacatagcaagaccctgtctctaaaaagttaaaattaaaaatgcttaatgtttatctcaagcattcattccctcaatactaagcaagaaggagttttctttggcatttgaaactgtattgtttttggaatgtgagaaaatagaaaattgcttaaatgcataatatgatattgatgaaatacttatctgtagttaattactaatcatttatttgagagatctatttttgttgataattacttatttgagagatctatgttgattcaaaaggaattttaaaaagaaatattttcttaaaat

SEQ ID NO: 270259 - DNA, 392 bp, Homo sapiens
atgtattcccctatagccaaagtgtgactagtagtcagccagccaatagaaatgtcttattttttgtatacatttttctcagctatgattcattctatagaaaagactggggcatagctctgatacttttaaataacggaaaatttcatgtcttactagttcaactattggaaagagactatagagacctcatgtttcgccctgagcccaaactcttgggggaaggggcagattacccagctagattagcttgctgaccccccatgattaagcagctatgacgcagaatggatcacttcatattaccagtattaataaagtagtagaaggtggtggtagtgatagtagtaacagtgatagcaattaatatttattgagcactgatggaatag

SEQ ID NO: 270260 - DNA, 331 bp, Homo sapiens
agtcaggcatggcatgggatggaggggaacagagtgaggctacagtcagtgcccagtcttgaaaatgtcccttcgagtgtccctaggggccatccttgttttcagtgcttattacccctgctcccctctgcttgctcccagagagctgtctcctgcctcccagctctgcgtctcagatcctggctctgatcccacgctgctgttgcttacactcatgtacccattgctaatgtcatcattcccttcggcagctaagtgcaaagttaatttcccatttgaaaagcagtctgtactaataacaatcaactgggagacccaaaagagtgcagtt

SEQ ID NO: 270261 - DNA, 506 bp, Homo sapiens
aatctcaagcttctagaaatttggcacactcaccaaagaactgaatactcctttgcagtcagaccatgtgttccagacaacataactagaaagatgtgagaaggcacttcatgtgggagataagccttgttttacttaatccactgagatgtcagagttaattgttacagcagcagcctgttgtataggctgactaacacatggtaactaacagaacactttggattcttgacaaaataagagcaagaaagcagcagcagaagcagaaatcagaggggcgagaaaccaaaagcaacagagcaagatctactctctacacatcgacatcctgctctcttccagggagagtaacctacatgaaccataccagtggttcccatccaggacagttcccactcacctccccatggacatttggaaatatctagagacatttttgcatatcacaaaatgcaaaaaaaaaataaaatgtaccctgcaaagccacaagagcagagcagaccaag

SEQ ID NO: 270262 - DNA, 448 bp, Homo sapiens
cagatctgaaggccatagatggcagaaatgtgacccaaggcctagattcagtgtggagaagagaggacacataatctgctgtgtagccctaactaaagccacaatcatgtctagacttcatcagtgttatgcagtagctgctgtgcactgaattgtgttccctcaaaatttgtatgttgaagacctaacaccctacatgactgcatgggagatacggcctataagaagatgattaaggttaatgatgtcagaaggtggaaccctgattggagacaagtgtaagagacccaagagattctctctccgccatgtgatgacacagcatgaaggcagccatcggcaagccagaaagagaggcttcaccagaaaccaaacctttctggaaccttgatcttggactttccagcctccagaactgtgagaaaataaatttctattgtttaagcca

SEQ ID NO: 270263 - DNA, 434 bp, Homo sapiens
gatttgcccagagcccctttatgtcctgtgatatcaagcacaatgccctttgggatgagctggggcagaagcctcaaggttgggagtctgattgaaactttaaactcttgtgaatcacaagagttttctaatgcttcttggtactcttctgatccccaccccaaccctttccaaacctttcttctcatcctggtaaccctctcctttctgctatcagggaacctgtcctttatcaaagaaactaaatatagattaaaaattatagacaaaataaaatcaaactaaagtggtagtggctaccaggagcttagtttcttgtccttcccatggagatatttgtcatttaaaagcagatacttaggaaaggtaattctgatttcaaaggaatgaacctctaatatgagaatttacagaataaggtagcaaaagtggga

SEQ ID NO: 270264 - DNA, 194 bp, Homo sapiens
tggggtggtaagacaccctgcattttacatcattatatgcctcttttagtcctaaaacatgtagaaaaacttgacctgaagcatagtttcagtgtcttgatctttctaggctctcccatcccacaggccttgaaggccattgcacaggccagtggctagctcttccctgatctgagtcaccatcatcattacaa

SEQ ID NO: 270265 - DNA, 412 bp, Homo sapiens
cccaaaacaaataatgagtgacgctctctcaaatatatgtacaatcaaatgtgaaacggaggtaaagatggggaagatcttaggctcagagattgtattcaggcctttatggtggcaatcttgatataattacgcatttaaaaataaattgtcatcagatcagtctgaaatttatagaggcttttgttggtgagaaacgtagtttacataatttacccacaggaatgtttttgattaatgttatctattaaagactgcagttcacaatatttcccctgttaatagtacatatgtttttggagctgatctgggagatataattcaagttgagatttgagtggagacacagccaaaccatatcaagaacattatatgaaacatcctaaatgtcaataaacacattgtattaaaa

SEQ ID NO: 270266 - DNA, 470 bp, Homo sapiens
tcttgcatcagtgtgccttcaatattaatagttaatttatagagaaactgaactaattttatctctcaaaattggccgttacaatctcacacacccacctcttccatgatagtccctgggccttgaggaatttaatagttttaatttctggccttgtgccttatgaacacagtgtattttgattggtatcttctactgggtctgaagataaggctttaactgctgtcattgtttaagatttagcaagacttggtgttctttttatatccaggagtcaacgccctgtaacttaaaggcacaaggactttaaaagcaagaaagttacgtggatatagtaaccttgatttaaaagaaaaatttaacctcagtttttttctaagcaaattaaaacttaataacaatggcataggagttattttgataaaatgtaaaatttgttagaccagttaccaaaaggcaagaaaaaaaaa

SEQ ID NO: 270267 - DNA, 386 bp, Homo sapiens
cagtgagtcacaaatgtaaatgtattgagtgcccaatgtatggagccctttctccaagacctcactgccgtaaatacaaatataactgagaactggtgatttgaagatgattcttgggatagcgggctaggcggcacttcacactggcttttggggccacataggggtgtaatcatgttatcaccctgcacaaccccagagggtaccatacacaacccatttgaccaaacatggcagtcctgaaaggaatgatgattgaaagccaagactgagctttggcaaggaaaccacctctgaattaccaactcattgtctataatgtaatgatagcatctacctcttagtaattttgtgaacattaaatgaataaagcatgacaaaaggcc

SEQ ID NO: 270268 - DNA, 464 bp, Homo sapiens
cagaaagcagcctcaccaaaggccaaagataataaatttgttattataataaaaatgaaagaacttggagaaaggaagtaagacaggttggctggtggctcagtgctgatgcctgagctagagcagctggattctcgcttccttcacttcctcaccctgcctgccttttttgcagtctctgctttgctttcacaagcagcccctggctggcggctctttcctattaaaaaaaacagtgtgggaaggcctcaaacttcaggcatctcagagaaacaaagaaggtcaaaccaagtctccttattagttgttatagcaacaaagaaactattgcagcgacgttgaaaatgcctcctggaatcccacctctggagctgcaattacagcacatctccccttcctgtgtgttatcccaggtacggaatcgcgtctttacctgtgtgccagaattctgcatctcctgacaa

SEQ ID NO: 270269 - DNA, 1555 bp, Homo sapiens
tgagccgagatcgtcgtgccactgcactccagcctgggtgacagagtgagactccgtctcaaaaaagaaaaaaaaaaaaaagatatgtcatgaatttagagaatttaaagtatggagaaaatactcacttttaaagcatagtggctaggaactcaaagttgggttgccgtaataccaattttacgatcttgggtaacataaggtctctaatccttagttttctcacctatgagataagaagcccttatcttataaggtgattgtgaggtttcaatgaaattatatatgtaaaatacactgcttaacaaatgttagctaatagtttatattaggctttatagcagtgtacttttattgttgaactccttatgtattcttttacttgtttaatccttttactttgagaaagtggtaacttgtagagaggaaaagatactgataaatgtaaataatccattgcaaatggctgagtgaaaatcctggaaaatgttttaattgaactttattgatgtaatataaaactattcaaatatctgtcaataaagggtaggattgtatgaaggctcattttagaaacttgagactaagtgactgatctattattttagaagttaataagtggtatagatatatggctgtcaagctggaaacaacatgtactaactttccttgaacgttggtatggcctctgaggttttggcagtggattgtgaatagaagtcatgtgtgacacctttgtgttttgccttaaaaagcaatacatgagtactgccccctacctgtgtcctcttcttgtgtactgataattgatgaaaactcgagtccgcagaatttggacccagagattgaagtatgtgttgacctgcctcaccagctctacacagcttatttctagactattacttgagaaggaaatcattttctatcatatttaagccatgtattttaggatctctttgttacagggtcttagcctatatcctaactgataccttttaaagaacagccaaacagatttaaaaggaaccaaatagtacttctaaatatgaaaaagggaattgaaataaaaactcaatgggtaaatagggatgcctagagaaatggttggttggttccaggtctgggacaggaaaaacagaggatgatcctagaacactgtggtgcaagaaagtaaggaagtgcttaaaagaatattgcttggcaatttaaaaaaagggaagaactgatacatgtgatggtatggatgaacctcaaaaacattgtgctaaatgaaacagccagacacataagactgcatattgtatgaaatttctagaaaaggtaaaactaaagacacagaaagtaaatcaatgtttgcctgcagttgggtattggaaccgggattgactgcagatagacattatagaacttttggagtgatgaaagtattctaaaactggattgtgatgaacgttgcacagctaaatacatttgttaaaagttgtacacttaaaataggtgaattgtgtgtaaattatatttcagtaagactgtaaaaaattttgagagatactgt

SEQ ID NO: 270270 - DNA, 1342 bp, Homo sapiens
  misc_feature (32)..(32): n is a, c, g, or t
  misc_feature (570)..(570): n is a, c, g, or t
gtagaagtttatgcgtgcttccggtccgcganccctgagagctaacttggggtcttttcccaaggtggatgtagaagcgggctccggcgtcccactctcccttccatatgggcttagcgtctgggtcactgagaacgacgtctgaatagggccctgggtccttgccatggatgaatgtggttcccgcatccgccggcgggtgtctctccccaaaaggaaccgtccaagcttggggtgtatttttggcgctcccaccgcggccgagctcgagcccggagatgaggggaaagaggaggaggaaatggtggctgagaacaggaggcggaaaaccgcgggcgtactgccggttgaggtacagccccttctactctcagattccccggaatgtctcgtccttggaggtggtgatacaaacccggacctcctacgtcacatgcccactgacagaggggtgggagaccaggtacggaggacttggaacttgaaactgcaaacttttggcatccttcccagatgcaaagagttgaccagttttatcgccttcgtttacttctctcgtcttcgttaccnctgttaatcggcacttaggagcctaatgacagtgaagtggacatgtttggtgactatgatagctttactgaaaactcctttatagctcaagttgacgacctggaacaaaaatatatgcaactccctgaacataagaaacatgctacagactttgccactgaaaatctttgctcggaaagtatcaaaaacaaactcagcattactaccataggcaaccttactgaattacaaactgataagcacacagagaaccagagtggatatgaaggtgtcactattgaacctggagctgatcttttgtatgatgtaccttcctcacaggctatatactttgaaaatttgcagaactcttcaaatgatttgggtgatcattctatgaaagaaagggattggaagtcatcctctcacaacactgtgaatgaggaactgccccataattgcatagagcaaccccagcaaaatgatgagtcctcttccaaagtcagaactagttcagatatgaacaggagaaaaagtattaaagatcatctaaaaaatgccatgactggaaatgcgaaggcccagacaccaatattttctagaagtaaacagctcaaagacactctcctatctgaggaaattaatgttgctaagaaaacaattgagtcatcatcaaatgaccttggtcctttttattcattacccagcaaagtgagagacctttatgcccaattcaagggaattgaaaaattatatgaatggcaacatacttgtttaacattgaattctgtgc

SEQ ID NO: 270271 - DNA, 2547 bp, Homo sapiens
  misc_feature (32)..(32): n is a, c, g, or t
gtagaagtttatgcgtgcttccggtccgcganccctgagagctaacttggggtcttttcccaaggtggatgtagaagcgggctccggcgtcccactctcccttccatatgggcttagcgtctgggtcactgagaacgacgtctgaatagggccctgggtccttgccatggatgaatgtggttcccgcatccgccggcgggtgtctctccccaaaaggaaccgtccaagcttggggtgtatttttggcgctcccaccgcggccgagctcgagcccggagatgaggggaaagaggaggaggaaatggtggctgagaacaggaggcggaaaaccgcgggcgtactgccggttgaggtacagccccttctactctcagattccccggaatgtctcgtccttggaggtggtgatacaaacccggacctcctacgtcacatgcccactgacagaggggtgggagaccagcctaatgacagtgaagtggacatgtttggtgactatgatagctttactgaaaactcctttatagctcaagttgacgacctggaacaaaaatatatgcaactccctgaacataagaaacatgctacagactttgccactgaaaatctttgctcggaaagtatcaaaaacaaactcagcattactaccataggcaaccttactgaattacaaactgataagcacacagagaaccagagtggatatgaaggtgtcactattgaacctggagctgatcttttgtatgatgtaccttcctcacaggctatatactttgaaaatttgcagaactcttcaaatgatttgggtgatcattctatgaaagaaagggattggaagtcatcctctcacaacactgtgaatgaggaactgccccataattgcatagagcaaccccagcaaaatgatgagtcctcttccaaagtcagaactagttcagatatgaacaggagaaaaagtattaaagatcatctaaaaaatgccatgactggaaatgcgaaggcccagacaccaatattttctagaagtaaacagctcaaagacactctcctatctgaggaaattaatgttgctaagaaaacaattgagtcatcatcaaatgaccttggtcctttttattcattacccagcaaagtgagagacctttatgcccaattcaagggaattgaaaaattatatggtaatgctttttgctggaataaaaaaatttttttcctatcattaccataatattagtgcaagtaaatagaagcaaatgctttcatggtccatactgtttctcattttgaaaacaaaagatcagtgatctctcagccccttccattcctacctgtcctgctaccactgaacctctttccttccctcacagtcacacttatcaaaccagttatcctttctgtctgtttccttacctgacataattcctctaattcctcatctataagaaagggataataagttgttagcaagtcagattctggttcaaagacatgccaaattcaatgttggtaatgattttcaataattatattggtagcttctaagtaagaactttagtaaattaccccactctaattctgggttctgtgctctcattctctcacttaagatctgatgactgagacgtctaaacacagtgttacttttaatgtttaccttacctgacttctcaataacttacctgatgctattgactacacccttcttgaaattcttgtttctggatgtccttacaaccactcctgttttttgaccccgattgtctagtagagatcctcagctttcttagttgtatttccttggctggctctgtcttctctaccaaaacctagctgttgtggtatgtctttgacactcacatgtcttgagtgaaagaagtcagttattagtaatactgttgattaaaccaaacatctttccccccacaccagcagccgcagctacctctccccacgggtgcatccctgccaccacccagatgctctgccttgtgctgcctttcccaaagctagacatctttaaagacagctgcaattaagttttaagtcagggatgtccaatcttttggcttccttgggccactttggaaaaagtattgtcttgagccacaataaaatacagtaacacgatagctgatgagccaagaaaaaaaattgcaaaaaaaaaaatctcataatgttttaagaaagtttacaaatttgtgttgggccacattcaaagccattctgggcctcatgagggccgtgggttggacaaacttgttttaagtgcaaagaagcaataatattaagaaggtatcttgtaatgtttttcaaaaatccagggtccttgcatatatttcagatatgtgtcattttagaccaagaagggacagttgctgccatactggagggtcagccccatcaaccttccacttcgtaagttttctggaactcctgttaggatcttatgaatgatatgaaaacttgggttcttgcagagaagacaatcaggttggagaagcagaactacaggaaacaaagtctaataaaagactctacaagaaaaaa

SEQ ID NO: 270272 - DNA, 1257 bp, Homo sapiens
  misc_feature (32)..(32): n is a, c, g, or t
gtagaagtttatgcgtgcttccggtccgcganccctgagagctaacttggggtcttttcccaaggtggatgtagaagcgggctccggcgtcccactctcccttccatatgggcttagcgtctgggtcactgagaacgacgtctgaatagggccctgggtccttgccatggatgaatgtggttcccgcatccgccggcgggtgtctctccccaaaaggaaccgtccaagcttggggtgtatttttggcgctcccaccgcggccgagctcgagcccggagatgaggggaaagaggaggaggaaatggtggctgagaacaggaggcggaaaaccgcgggcgtactgccggttgaggtacagccccttctactctcagattccccggaatgtctcgtccttggaggtggtgatacaaacccggacctcctacgtcacatgcccactgacagaggggtgggagaccagcctaatgacagtgaagtggacatgtttggtgactatgatagctttactgaaaactcctttatagctcaagttgacgacctggaacaaaaatatatgcaactccctgaacataagaaacatgctacagactttgccactgaaaatctttgctcggaaagtatcaaaaacaaactcagcattactaccataggcaaccttactgaattacaaactgataagcacacagagaaccagagtggatatgaaggtgtcactattgaacctggagctgatcttttgtatgatgtaccttcctcacaggctatatactttgaaaatttgcagaactcttcaaatgatttgggtgatcattctatgaaagaaagggattggaagtcatcctctcacaacactgtgaatgaggaactgccccataattgcatagagcaaccccagcaaaatgatgagtcctcttccaaagtcagaactagttcagatatgaacaggagaaaaagtattaaagatcatctaaaaaatgccatgactggaaatgcgaaggcccagacaccaatattttctagaagtaaacagctcaaagacactctcctatctgaggaaattaatgttgctaagaaaacaattgagtcatcatcaaatgaccttggtcctttttattcattacccagcaaagtgagagacctttatgcccaattcaagggaattgaaaaattatatggtaatgctttttgctggaataaaaaaatttttttcctatcattaccataatattagtgcaagtaaatagaagcaaatgc

SEQ ID NO: 270273 - DNA, 454 bp, Homo sapiens
  misc_feature (298)..(298): n is a, c, g, or t
ccggagatgaggggaaagaggaggaggaaatggtggctgagaacaggaggcggaaaaccgcgggcgtactgccggttgaggtacagccccttctactctcagattccccggaatgtctcgtccttggaggtggtgatacaaacccggacctcctacgtcacatgcccactgacagaggggtgggagaccaggtacggaggacttggaacttgaaactgcaaacttttggcatccttcccagatgcaaagagttgaccagttttatcgccttcgtttacttctctcgtcttcgttaccnctgttaatcggcacttaggaggtattgattgccttgttatttacatttctatataaatatgaaatgtaaaccccgagacataaaagttgtgcacgcagcagttaagtggcatgactgagacacaaatctaggcttccagataactgcagctcctac

SEQ ID NO: 270274 - DNA, 318 bp, Homo sapiens
tcttttttttcatttttataatttgtcctttccaactgaatgtgaataatgagtaccttttcagtagttagtgtgccaggagctgtgatattgaatagggtcacagagatgagtaagacaagtctaaacactctcatgagggaggccacagatttctacttaaagcctttcagtatgtaaaagtcacttcccacatttttgttcgttcaaaaatgtcttctctcagaatcctggtatggtttcacaaaaagaagagagactgttcacatatttttgggggggactgaatctctattctcataattaaaattttttccc

SEQ ID NO: 270275 - DNA, 433 bp, Homo sapiens
acttggttcttctggcctcacatcccatctcgcctacacttcaggaaagcacgcagactttattcacttcagccacctaaacttgctatctgggtgatccagggaaagccacctgaaggtttttcacattcgcatgagcccatgcgggagtactgggggacttctctgagagatgaaagtttctagccgcaaggtgagaccagagaaatcccaacacatcgttgcttatgtggatgcctggctgtttgcttgggatcagcttctcagacccccatttccagtagttgcctgtggtccatgaataaagacgaaaatcagagctggctttgtggattctttctagaaaagctcagaagtgtagaacatcctagaaaagactcttctcaaaaacaaagtgaaaaataactttttatatttgtttaatttaaaaggg

SEQ ID NO: 270276 - DNA, 476 bp, Homo sapiens
cccaaggcagtactgggctcacatgtcagagcacactgttgcacacagtggtgcatgcatacatctataaaagatgcgctgcgtacacagtagtgttttagccaatgtgctagccaatgaattctgcatcagtggttatctcttgctacacaagaggtgaagaaccattccttcaagcgtcccagagctctaaggcgaagctgctatagaatgatttgcctagaactttgccttagggcaaacctcaagtactgcttttaggaatgaaatctaatggtggccttgtccctggtgcgggcatagtatgtactcagtgttaattgtttacaccaaaagcctggaagctgcattgtcttttggccttcagaaaccttgtatcttaactgttaagatctgaacattgggaatcattcacctctgacctgttgggctggttttattccgctctataaagtacacccaggtgctttaggaaa

SEQ ID NO: 270277 - DNA, 707 bp, Homo sapiens
ggtgcccgtctctagttccagctacttgggaggctgaggcatgagaattgcttgaactcgggaggtggagattgcagtgaaccaagatcacaacgctgcactccaggttgggcgacagagtgagactctgtctcaatcaatcaacaaaacaagtaatagccaaaaatagataagtcagtcagtcagcataagtgcctgactgacagggatatcagaggcctaggatgcactgacatattatcttcaaaagatttttgtaagaatcaaaatatcataatgcaaatattagaaaagtattcaagaaccatttttttgaaaaaaggtgcaaaaatcctttaaaaatattaccaaattgaatccagcaatgtacaaaatggaccaccatgacccagtggggtttatcccggaaatgcaatatttgtataacatacaaaaatcagtcagtgtaagccatcacattaaacagacaaaaaattaaaaaagtataatcatctcaacagatgcataaaaagcattagataatgttcaacactgattcataaaaaccaaacaaaaaacaaggaatagaaggaaataatctcacctaggtaaagggcactgacaaagatacctatagttaacattaaactaaatggggaaaggctgaccataatgccctcaagattgggaacaaagtaaggatgtctactctcactatatctatttaa

SEQ ID NO: 270278 - DNA, 434 bp, Homo sapiens
tacgaggttgactgatttactagattccagtggttagaaatacatgtagcctgtgctgtaaacctgattttctgacttgtagttcagctctcttctccatctccttgtacagccaagataccccagaaattatttgcgtttccgaagttgtaggatgaaaagacatgtctttgcttaactgagttagccccctagaacaatattgagatggagctggaatggtgaagaaatgcaagagtccaatcccttgggtatgtgcaattcccagttaccccttgaaacagtgcttcattataaatttagatgttagaggctgggcatggtggctcatgcctcgaatcccagtgctttgggaggccaaggcggtgggatcgcctgaggctaggagttcaagaccagcctgggccacagagtgagaccctgtctctaaaaaa

SEQ ID NO: 270279 - DNA, 658 bp, Homo sapiens
tttatttgtattattttttattgttgtgttattttgtattgggtttttttcccctgggtattttagatctacacttggctgaattcccaaatgtggaattcgtgtccccagagggcccactatattgtttcttcactacttactactactactactcacaattttagtcccagatacttgcttaaagaaggtatagaaaaagacaagcagtaacttgtagtatagaaagaagggaaatgtttaagaagctatatttacttctcagtaaacaatcaatctcatgcttctctcactgcaagtgaactagagccactgattttagagtttttaagagagtagatcagctctagcaagaactctagcattcttcataaaagtttctttagatgccacaaaatgagacctgcagattacaacattaagtatcctgaaaatcaaacaaaataatgaaaaagggtaatactcctcaattctctggtggtctcaaatagaaaggagcaccacaacctcacagtacacctcagctaatagaactatctttaaacactaaaagtaactttgtcttcccagagacaaatatcatttccttaaagatcccatgtgtaggaaaaaaataaataaataaataactctttcttatgcctggtatggttcaaac

SEQ ID NO: 270280 - DNA, 557 bp, Homo sapiens
ccagtgcatagcattgcacgctacagagaaatctttcgtgaaaggaagagtcaatcgatgcagcaagcttccctgttttcttattttaagatttcaacagatttctgaaggtcagccaggagggctgcgctgcgctgccacaccgttgaggagctgcagagaaggccagagacgctcagccacgaggtcaggaagggctctcggctcggagtcagaaggcattggctgagggctgaggttgaggcaggcatgctgctgaagagagaaacagtgactgaatcagcacttccatccctcaatccttatccaaaatggaaagcaagtaacagctgatatttccccagtgccaaaccccagaggttctcctccaagaaactgaaaggaatgttggggaaagctgatgctcctaacttggaaggtggcattccaaattaaaaatatttgttgttgttgttgttgttactatttgagggacttgcatctcacagctagctccttacccacttcctgtgaagaaagagtcctaagcagcgctgtgtgctgacctccatacacct

SEQ ID NO: 270281 - DNA, 388 bp, Homo sapiens
gaagacccagccaggctgtctgaagaaggggtgttcttgagtaggagggaaggtctgctccaatacgaaaaatctaacaatagcatagtccttaagagcttgagctttgaagagggagaacagacccatttaaggcacgaaaaataaaggaaactcttgagtccctccaaggaaaattccagccacctggctagcctcaagaagtagatgagcaccctgataagtaagaaggtaataatagcttaaaacaatagtcaagaaaattagagccacgaactaatcttaaatgacgagttaatgggtgcagcacaccaacatggtacatgtatacatacgtaacagacctgcacgttgtgcacatgtacctaaaacttaaagtataattaaa

SEQ ID NO: 270282 - DNA, 344 bp, Homo sapiens
tggttcaaatctttatgtcttacagcacagttttgtagttttctttcaatctataccctccacatttcttgttaatggttattctttatatataaacagatcatgttgctattaaagtggtgggatgtatatttttcataatattcatcatatttgatttattgttcatatatagcaaagttagtgatttgggtagtttattgtataaccagctccttagcaaatgttttgatgagttctgatagtttggcagttgatttactgaagtttgtacgtggattgtcattcggtaattcttacccctttctgatagatttacttatttatttttattgccttctccc

SEQ ID NO: 270283 - DNA, 420 bp, Homo sapiens
ttttgatcttagagcgaaagcctataatcactgcgcccgctcataaggggatggccatggctaggtttatagatagttgggtggttggtgtaaatgagtgaggcaggagtccgaggaggttagttgtggcaataaaaatgattaaggtaggataatggccaaataatatgaaaagatacaatattttgtagttagcaaaaaaaatttttctaaaatctacactcattttataaaaataaatggttataacctaaaaagtttggcatatgcgaaccaaatattagccatagttattatctgaatggtaaaattcttctttttccttccagtattattgttacaaaaaagcaaaacaattttattaaaataagaaaacaaaaaggttttattatactaagaaagccaaaagttagatttttg

SEQ ID NO: 270284 - DNA, 359 bp, Homo sapiens
catatctaattgtatgttcgcttaaaagttccagagactaaatcttgaaacaatataggcatctgtggaaatctccaccaggagattgattcaaggctacagttaatttataactcagcccagcccgagatgatgccagcccattcaccagatgggcagtaactcaagacaagtcatcagaactcgtcatgaagacctgcactgcctcaccccttgcataccctccatgccaaaacttcttaaagcctcgcattttgcttggaaatgtgaagcagctccattaaagcaaaagcctggatcgtttttccccactgctagctttggtttataataaagtcagtctccttctaccataccac

SEQ ID NO: 270285 - DNA, 297 bp, Homo sapiens
tcaggaacttttttgggttacctgggatttttgtttgtttgttatcctaaattttaaatgaattattgatgaatatcttggttgacaatagggttgcaatataagcataaggtaaccacagcttaaatacaggtggagatcaccttattccttttatctcaaaaagtagtatttaagtatttttcattagtacaacaattagtaatctattatatcaagataaatatttaagaattcattttagcataaattttctttttcctgcacaacttcaataaactaagctggtgtgttatg

SEQ ID NO: 270286 - DNA, 511 bp, Homo sapiens
aacctagattcttcagtctgaaaagacacatagagaatgtgacagaatctgtaaaataataaagaaaatggtggaggtaaacatcactgtcccatttgaaatttgaatatagtaatttccaggcacacaatacgcaatgagtagtaaaaggaacatgttatatcccataagctgtgatagaggctaaacatagaaattaatcaaagggtaattaaataattcttgattgaccgggcacagtggcttaggcttgtaatcccagcacttcggaaggccgaggcaggtggatcacttgcaatcaggaattcgagaccagcctggccaacatggtgaaaccccatctctactaaaaatacaaaaattggccaggcatgggggcgtgtgcctgtaatctcagctactgggaaggctgaggcaggagaatcgcttgaacccgggaggtggaagttacagtgagctgagattgtgccactgcactccagccttggcaccagagcgagactccatctca

SEQ ID NO: 270287 - DNA, 431 bp, Homo sapiens
gccagcatcactgatggtgacagagacacactgcttcacacacagctggctttcctttttttctgaggtaccaagtgtttgccaccaacagtgtatctaagacacaatgtctggctagtcttttgctattagaaaggtaagacgtttgcagaaatggtgacaacacaaagccatacattggtgaagacatttcacaccaagttcctttaaatattttgaatcaaaacataccatttttaaagatataattgggttaatattcaacaaggtggctttcatcccagctttgacggataatagaaaaaccttcgcaaagcagaaaaagtaaattgtgaacaaaaattaaggacaagaaattacaagttgtgccagtctttcgtaagtgattttgtctcaggcaccaagcacaagtagaaaaacatgaagacaaa

SEQ ID NO: 270288 - DNA, 486 bp, Homo sapiens
ggtccctggaatttgtccctaggctttcccatatcagagacctctgacttggtgagactcccctaaagtcctgccggctgtccttaagtgtgtttgaagtacaggaaagatatttactgtagcagtcaagtcattgagactcagtacataaaaacagtaggactcaaggttctagatttgtatttttgaaatgagaagtaactacagagccgtcttgatgtatctgaatgctcatgaattggaggggggtaccagttagctgtcctccatttccaatgacaataaaacctgaagaagtagctttctgttgcattaaaaatgatttgaggttaatgatcatagcaattaatttcagaaaaaaatacacagatatgatcaagaaatagagcatagaatagaaccgtggacctgaacaagatcataaaagatcatctggttcaggcctctaccttcagacagggtattttctccattctaatagatgag

SEQ ID NO: 270289 - DNA, 375 bp, Homo sapiens
aagttcagtgccatgcatgtggagtccttgtcaacccctctgctaccactgggcccagacagtggggagcagatagagccataaaaggcctcatgttatgaagaggatcgtggttctggctccaggtggagtccggcagactcaggtccttcgggcagcagcttgccttctgagggccgcgtccgttctcctccactcagagtgacaactgtggcagcgagccaggatctggagagtgctgtcccctgagcacaggaagccctctgatgacaaaggtctagcagtgacagcaacctattgtatcatcactgtaataacccagggctcatagcccagtgtctggcacatggtaggtgccaaggaaatgctaagaaa

SEQ ID NO: 270290 - DNA, 460 bp, Homo sapiens
gataaggcctggttcctgctgttaagaagctaatggagggatactaatgaacactatgtaaattttttaactcaatctgagtcatgatgtttcaagatccccacagtttgcttatcccaaaagacatccgcaacatgagctattctgctgattagtctggaacatcaagtttctataggaagtgtatagtgtgttttgaggaggccatgtagcatgatgaaaagacaggtatgtgtttatatggactcagatactcgttaattcactaattaatactctcaggtacctgggtaagtttgttcatttctttgaatctcagtttccttatttgtaaaatgtggagattaaaatactcacagagttattgtgatggttaaaagtgataagatatataacattcctggcacagtccctggcatagggtagataataaatggtggaattaataagaaaaaaaata

SEQ ID NO: 270291 - DNA, 608 bp, Homo sapiens
attagtcaaatcactaacctgaattatgccacaaatctgacccacttgtacctacaaaacaattgtatttcatgtatagagaacctcaggtcattaaagaaactggaaaaactgtatctgggaggcaattacattgctgtcatagaaggtttagaaggattaggagaactaagagagcttcatgttgagaatcagaggcttccccttggggaaaagcttctgtttgatccaagaactcttcattctctggcaaaatccctctgtatattgaatatcagcaataataatattgatgacattacagacttagaactactagagaatcttaatcagctcatagccgttgacaaccaacttctgcatgtgaaggaatctctctttgaagcaatctgaaagcttgctgacaaaaaatgatgtgcatgaacctcacctcttccataacccagaagaaaaagaaaatttgtttgtggaaaatgagtaaattcagcctcaagtgacaggaaacgtttgattttgtttttaaccttatatgactaggcaacaatatcttttgtgggtttgtagctttatggtatctcataatataaggaaaaacttttaagttattg

SEQ ID NO: 270292 - DNA, 504 bp, Homo sapiens
ctaatgctaacttcgttatttttcttacagaaatccctctgtatattgaatatcagcaataataatattgatgacattacagacttagaactactagagaatcttaatcagctcatagccgttgacaaccaacttctgcatgtgaaggatttggagtttttactgaacaagttgatgaagctgtggaaaattgatctaaatggaaatcctgtttgtctcaaaccaaaatacagggacagactgatattggtgtccaaatcactgggaatctctctttgaagcaatctgaaagcttgctgacaaaaaatgatgtgcatgaacctcacctcttccataacccagaagaaaaagaaaatttgtttgtggaaaatgagtaaattcagcctcaagtgacaggaaacgtttgattttgtttttaaccttatatgactaggcaacaatatcttttgtgggtttgtagctttatggtatctcataatataaggaaaaacttttaagttattg

SEQ ID NO: 270293 - DNA, 905 bp, Homo sapiens
attagtcaaatcactaacctgaattatgccacaaatctgacccacttgtacctacaaaacaattgtatttcatgtatagagaacctcaggtcattaaagaaactggaaaaactgtatctgggaggcaattacattgctgtcatagaaggtttagaaggattaggagaactaagagagcttcatgttgagaatcagaggcttccccttggggaaaagcttctgtttgatccaagaactcttcattctctggcaaaatccctctgtatattgaatatcagcaataataatattgatgacattacagacttagaactactagagaatcttaatcagctcatagccgttgacaaccaacttctgcatgtgaaggatttggagtttttactgaacaagttgatgaagctgtggaaaattgatctaaatggaaatcctgtttgtctcaaaccaaaatacagggacagactgatattggtgtccaaatcactggaatttcttgatggaaaagaaattaaaaatatagaaagacaattcctaatgaattggaaagcatccaaagatgccaagaaaatcagcaaaaaaaggagcagtaaaaatgaggatgcaagcaattcactcataagtaacttcaaaacaatgcatcatatagttcctgtttattacccacaggaatctctctttgaagcaatctgaaagcttgctgacaaaaaatgatgtgcatgaacctcacctcttccataacccagaagaaaaagaaaatttgtttgtggaaaatgagtaaattcagcctcaagtgacaggaaacgtttgattttgtttttaaccttatatgactaggcaacaatatcttttgtgggtttgtagctttatggtatctcataatataaggaaaaacttttaagttattg

SEQ ID NO: 270294 - DNA, 773 bp, Homo sapiens
attagtcaaatcactaacctgaattatgccacaaatctgacccacttgtacctacaaaacaattgtatttcatgtatagagaacctcaggtcattaaagaaactggaaaaactgtatctgggaggcaattacattgctgtcatagaaggtttagaaggattaggagaactaagagagcttcatgttgagaatcagaggcttccccttggggaaaagcttctgtttgatccaagaactcttcattctctggcaaaatccctctgtatattgaatatcagcaataataatattgatgacattacagacttagaactactagagaatcttaatcagctcatagccgttgacaaccaacttctgcatgtgaaggatttggagtttttactgaacaagttgatgaagctgtggaaaattgatctaaatggaaatcctgtttgtctcaaaccaaaatacagggacagactgatattggtgtccaaatcactgggtaacttcaaaacaatgcatcatatagttcctgtttattacccacaggaatctctctttgaagcaatctgaaagcttgctgacaaaaaatgatgtgcatgaacctcacctcttccataacccagaagaaaaagaaaatttgtttgtggaaaatgagtaaattcagcctcaagtgacaggaaacgtttgattttgtttttaaccttatatgactaggcaacaatatcttttgtgggtttgtagctttatggtatctcataatataaggaaaaacttttaagttattg

SEQ ID NO: 270295 - DNA, 1018 bp, Homo sapiens
attagtcaaatcactaacctgaattatgccacaaatctgacccacttgtacctacaaaacaattgtatttcatgtatagagaacctcaggtcattaaagaaactggaaaaactgtatctgggaggcaattacattgctgtcatagaaggtttagaaggattaggagaactaagagagcttcatgttgagaatcagaggcttccccttggggaaaagcttctgtttgatccaagaactcttcattctctggcaaaatccctctgtatattgaatatcagcaataataatattgatgacattacagacttagaactactagagaatcttaatcagctcatagccgttgacaaccaacttctgcatgtgaaggatttggagtttttactgaacaagttgatgaagctgtggaaaattgatctaaatggaaatcctgtttgtctcaaaccaaaatacagggacagactgatattggtgtccaaatcactggaatttcttgatggaaaagaaattaaaaatatagaaagacaattcctaatgaattggaaagcatccaaagatgccaagaaaatcagcaaaaaaaggagcagtaaaaatgaggatgcaagcaattcactcataagtaacttcaaaacaatgcatcatatagttcctgtttattacccacaggtgggtaagccaaaattagcctttttctctgaaatacagagataccctgtaaatgcaaatgcatctccagaaagttcctgagaagattacactaaaattatttaagagatggggaatctctctttgaagcaatctgaaagcttgctgacaaaaaatgatgtgcatgaacctcacctcttccataacccagaagaaaaagaaaatttgtttgtggaaaatgagtaaattcagcctcaagtgacaggaaacgtttgattttgtttttaaccttatatgactaggcaacaatatcttttgtgggtttgtagctttatggtatctcataatataaggaaaaacttttaagttattg

SEQ ID NO: 270296 - DNA, 463 bp, Homo sapiens
attagtcaaatcactaacctgaattatgccacaaatctgacccacttgtacctacaaaacaattgtatttcatgtatagagaacctcaggtcattaaagaaactggaaaaactgtatctgggaggcaattacattgctgtcatagaaggtttagaaggattaggagaactaagagagcttcatgttgagaatcagaggcttccccttggggaaaagcttctgtttgatccaagaactcttcattctctggcaaaatccctctgtatattgaatatcagcaataataatattgatgacattacagacttagaactactagagaatcttaatcagctcatagccgttgacaaccaacttctgcatgtgaaggtagtgtaaagagaaattaatttttaagatatttacatgaaattatgattgaaaaatgttttgtaatagctataaaataaatatatcacataaa

SEQ ID NO: 270297 - DNA, 349 bp, Homo sapiens
gttcgtaaacttgcccagcccgggacccttttgttgccaaatctgcctcggtctgcccaactcctcctgcgaaattttacactcagtatgcaggaagcctcgctcaaaatctgacactcctccacgcccttggtccccaaatccattccttctctttgttttccaacccgagaacccctcgttttccccgctcagccttccccaccccgcttgtcccccgcacacagcagggccgctccgagacttgtccactcagcaagagcagagctgagaatcagccagggacgccagctgaaggcccttctcccaaattaaggaaataattgttgagggcttaacttcacgcccc

SEQ ID NO: 270298 - DNA, 432 bp, Homo sapiens
ttcatcctaatgacatagaagaaacattttgaagacctgaaaaaagtagatctgtgtcatcaatgtccttttgtcagtgttcaaaattattaccattattatttttattttactctcatttcttgattaaccccatcttatataaattcttgataatgtatctcctatactatttcctaaaccaaataaatatatacatatataattattatgaatctctatatagtaaatacattttcaattttgcctaaggtgcatactatctatattccttatgtaccttggccttcatctcagtaatcatatccttattctatgttctcattttatatttagcacttcagtcaggcatataaaatgaatagtatttgtacagttgaattaaatgtatgttaatgtgaaaagactcaataaaaagtatagtcagttgag

SEQ ID NO: 270299 - DNA, 1236 bp, Homo sapiens
tggggtccagttccagtctgtgggaggtttgttctttcgctcttctcagtgactcttgctgttgctcactttttggggctgcgctaatctttatgagctgtaacactcactgcgaaggtctgcacttcactcctgaagacagcgagaccacgaagggagaccaccgggagggacgaacaactctggagtgccagctttatgaactgtaaccctcaccgcgaaggtctgcagcttcactcctgaagtcagcgagaccacaaacccagcagtaggaagaaactccagacacgtctgaacatcagaaggaacaaactctggacacaccatctttaagaactgtaacactcaccacaagtgtccgcggcttcatacttgaagtcagtgagaccaagaacccgccaattccggacacagtagctgggattacatgcgcccgccaccacacccaggtaacattttgtatttttagtagagacggggtttcaccatgttggccaggctggtctggaactcctgatctcaggcgatccaccctcttcagccttccaaagtgtgggattacaggtgtgagccaccatgcccagctctaaaattatttaccttttcaaggaataagagtgttgggagttaatggtgtgtctggtggttgcaataagtcaaaaactgctgcaggctgggagcggtggctcacacctagcactttcggaggctgaggcgggtgggtcacctgaggccagtgttgtaggaaaaaaagccaggttcttgtcacacgaccaggaaaagttaggcacacagacactttgaaggggagagggaatggaatttattgtgtgaaaaggaagaaaacctctcagaaaagtgagagaagttcctgttaacggggccccatttcacagtttgaatcccaggttctacccaggaacagaaggggccagcctcccccagtgcaaacagcgcaaatttcccgagactccaccccatccctccatcacgcaggccggtgggagattctctggggatattcaccgttattttcctcctgcagctatcattcctccctctgaagaagtacatgtcactgccatcagagtaaggataaggatgaagatcaatcttaactgcttcctgctgacagggggcactgttttgaggaaatggtagtcagagctccctcagaggtctatgtaagggtccttggcagaaggggccagcatccaaggcttcaactgcatgacc

SEQ ID NO: 270300 - DNA, 377 bp, Homo sapiens
gcagagtccaattaacaagagcaagttctggtagaaagaaggtgactttattccagagctcaggtgtttgaactgatgtctgatgaggatgaatccagcgactacctctgcctgtccatcctgggcctcttctgttgccttcccctagccatcccagccgtgatcttttcttgcctgacaaagaactacaataaatccagtgactatgagctggcagccaagacctccaaacaagcctactactgggccatcgcgagcatcactgtgggaatcttaggtaccatcttgtacacctacctgatatacttacttagattgtaaactgcttcccagctcttgaacaaaccaccaaatatacaccacagtgcaatttacct

SEQ ID NO: 270301 - DNA, 390 bp, Homo sapiens
gagaaaatacttgtgaacaacaaatttgtcaacgaatttgtaagtagaatatataaagaacttaaagaactctcaaaactctgaagtataaaacaacaacagtaacagcacaccacccaattagaaacttggcaataggtacaaacaaccatttcgctacagagggtgtgaaaagatgcccaatatctttagccatgaaggaaatataaattagaatcactctgaaatactaggacacatctgccagcaaggtgaaaatacccactgctggtgaagctgcagggccactagctcactcctacactgcttttggaaatggaaagtgacaaagccattccggaaaacagtttgtcagatttttaaataaaaaatgcttgttatacaacccag

SEQ ID NO: 270302 - DNA, 510 bp, Homo sapiens
atttgtttggcttacggttctgcaggctgtactggcatgacaccaacatctgcttggcgagttgaggcctcaggaagtttttactcatggaagaaggcgaagggtgagcaggtgtgacacatggcaaaagaagagtgagagagaggaggaggttctgggctcttttaaacaaccagctctcatgtgaactaatagagtaagaacttgctcattactgtgaggacagcaccaagccattcgtgaggaatctgccctatgacggaaacatcccccgactaggcccgcctccaaccttgggaattacatttcaacatgaaacttggaagagacacacatccaaatcatatcaattacttccatcattgcttctctcagactttccagatatactattgtgtcatctgtaaatagttttttttccttcttttccagtgtttatgcctttaactatttatctaattgcactgactaatatctccagaacaagattaaatagcagtgtaacaatgt

SEQ ID NO: 270303 - DNA, 797 bp, Homo sapiens
atttcaatttggtgggcacatttaaaataaaaaatttaatactgtaaaatactccaaacatatagaaaagtaaataatagacaccatgtacccattatctactttcatcagacataaatattttacatgatcgcttaaacattttaataacttgatactgaaatattaatattctaggtttgctttaactctttctatatatgtacataatagtttgagaataaactgcataatgctccttcacctcgtatttcttaaaaacaatggcatctcttacataatcacaatatgattccaagtggccatctaatgttccttattggaaaagagtaaaaaaatgtcctggtcaaggatcgaattcaggatcataggatcacacattgtatttagttgtaaagtctccttagtctccgtcaatctgacacagttcctcagtctttgtctttcttgatgttatgaagagtataaaatatttatatcatagaatatgcctcattctatgggtttatgggtttgtgtgtttactcactctcggatggcaggttacacatttttggcaggaatactacagacataatgtgtgtccttcttagtccatcatatctgggaggcgatattatatctatttgtcccattattagtgatcctaattttgatcacttgtttaaggttttatctgctaggtttctccactgtaaaattatcatttttacctttgtaactgataagtattttgggggaggacactttgagactatataaatatcccttttttcatcaaatgttcactaatttta

SEQ ID NO: 270304 - DNA, 272 bp, Homo sapiens
aaattgataaagaggaagtcaaactgttgctgtttgctgataatatgatcatatacctagaaaaccctaaagcctcctccaaaaagctcctagaactgataaatgaattcaccaaagtttcaggatataaaattaatgtacacaaatcagtagctctgctatacaccaacagccaccaagctgagaatcaaatcaagaactcaaccccctttacaatagctgcaaaataaaataaaatacttaggaatatatctagccaaggtgaaagaccc

SEQ ID NO: 270305 - DNA, 540 bp, Homo sapiens
aactagagtcaaatcagactttgtcagaaagtgtgatgtcccagttccaaacagtgtatttagtactgtccttgtgaagaagtgtttcgtttaaatcttaattctaagataaaaaaataaggcatagtgcattccgacgaggttgtctcttgcggggaacaactgctctcttcagaattgtttagcaaagctctcaccttaggcatagcttatgagggactatctggagctatgcttttggagccagggattttctttcaccctggtgctgtctgtgtacgttggaaagatgggcaagaagtatgcctctctcagtaaagtggagaggggaagaaccagaagactcctcaggccccttgtataatagaagagtatgttacatggcatataacggattgattaccttagatgtttgcacctaactgtatatgagcaaatgatgctggattaatggttcatcataatcagtatggaaatggcattttgactaggaaaatgtcctcattcttaagggatgcaggctgaagtcttcagccattt

SEQ ID NO: 270306 - DNA, 292 bp, Homo sapiens
cagtaataataatgatgaaaatgatctagacaacttcccagggagatctgatgtaagttacagcagaatgtttttccctggaacacagacccagcagatcagccgttattcaaccactctgagatctagcgaatgctacactttcatttttttccagttggttaaatttagagtatatggttcattgtaacagacataatgaaaatatttcatgtactatgccacttttgatttcacatatgtgtctggaatgtggaacaaggtcactttagaaaataaaatctaatctttt

SEQ ID NO: 270307 - DNA, 361 bp, Homo sapiens
gtcaaggtcatcaaaaaagtctgagaaattgccacagccaaaggagtctagagacatgatgactaaatgttaggtggtgtcctgcgtggggtcctagaacagaaaaaggacattagaaaaacataaggaaatactaatgtaagatgagaaactggtaaggtttataagaactctgtagcatgtttgcaattttttggtaaatagaaaacttgtaaacaatagttctgttgtttaggtgggagcaatcaaggccgtgcgtggtggctcgcgcctgtaatcccagcactttgggaggccaaggcgggtgtatcacctgaggtcaggggatcaagaccagcctgtccaacatgatgaaaccccc

SEQ ID NO: 270308 - DNA, 313 bp, Homo sapiens
gacgtgccccatcggtggcgaaagaaggggcttcctgacccaactcccccagacagccgccaactccgatcactctggccgagtttgtctactcttcaccccaccccaactccaaacgatgaccttcagtcagacttcatcttcaaatttgacgctggcccctagcaccattctctatacaggaaataaggtgttgttcaatgaatggaatttcagtgtccacgagaaagcccaatacctacacatccaattcccattatcaaatgtttgcacaagaatcgcaaattaaagccaccacttcatcaactggtca

SEQ ID NO: 270309 - DNA, 291 bp, Homo sapiens
tactactactaaattcgcggccgcgtcgacattccgaggattggatagtccattgggtccatggcccattaccagaatcatgtgagaggcatgtaaaatgcagattcctgggctccaccccaatcacaggagtaccacagcaatcaccaaactataactgagctcccaatttttgtacagtcatgagctaagaattatttgtacatataaacgttgcagtcaatttgatggtatggaacactctttgaatcccaataacatttcaagtcattggtcgacgcggccgcgaat

SEQ ID NO: 270310 - DNA, 1133 bp, Homo sapiens
  misc_feature (19)..(20): n is a, c, g, or t
atacatatacaatcgagcnngtaccccaggtagactaacgtatcaactaatttagtccccacaacagcactatgaggtaggtattattattatcatcgtcatcgtgcatatggaaattgaggcatacaggggttatcatgtgaccagtgagtggcagaaccaggattcaaactcagccagtctgcatactcaacctctacactctactgcctcctttgaaacaccctttttttcttaagatactgtaaggaagagctttttcttctccagctttggagtggtgccaccgtagaaagagaatgagttttctattattgaagacgctgaaatgaagagtggatagcatcctggttggagatattagagggccaggaggttcaggaccaggggctgtggattatcattttatgaagccttgcactgagtttgctttagcacatcacagtgggttaggttgaagtggatctggcctttaaggtgctgggggacacattttgagtaaggagaagacaagcaggagctgctcaggcagtctgcatctgcagccaaaaaaactcaacataactggcatgtctttagtatctgggacatagtatgctcatagcacctcatggatcatctcacttaatcatcccagcaactctttaagggtaggccaagcagtgcaatgccacccctgttgtgaggatgaatcatctgatttttggagaggttgagcaactggtaggtgcacagccgggttctcgcactgcaaaaccacaggcccctttggtggacagagattccgaggattggatagtccattgggtccatggcccattaccagaatcatgtgagaggcatgtaaaatgcagattcctgggctccaccccaatcacaggagtaccacagcaatcaccaaactataactgagctcccaatttttgtacagtcatgagctaagaattatttgtacatataaacgttgcagtcaatttgatggtatggaacactctttgaatcccaatgacttgaaatgttattctcccaaaaaataagaaatccacttgtctcgttaacagatctcgttacaaaaaaaaaattgtactcaatatattctgaactttatcaataaaagaattgtggaaatgtgt

SEQ ID NO: 270311 - DNA, 361 bp, Homo sapiens
caggaatttttggaattacaactgtgactaacgcctttaagcaactgtcagctggctggccccagggctacatcctgcaatttgcacctgtctgttggaaaattactccagacacaagcagtccaggtggctaggctcctgcgcatgtccttgaatttgctctccaggccctcctgtttggctgccgctctggctcctaagcaaggagtacccggaggtactctttttgacagtaatgcgttaaaggcaaagaagaaagtatggctttcacagttttactgggaggcctagaatgatttgaaacggacttttgtttcattaatgggaaaagcaaagcaaaacaaaaagcctatcatctaaa

SEQ ID NO: 270312 - DNA, 451 bp, Homo sapiens
caagcaagaattctgtatttgtcaaaactgttaaagaataggggcactcaaggggacattaagatatttccagataagcaaaagctaaaggagtttgttactaatagatctgccctacaagaaatgctaacgggagtcctccaggctgaaataagatgctagatggtaattgaaagccatatgaagaataaagaaaactgatgaaagtaactacatagaggttgaaaggatggaaaaagatattccacaccagaagagagctataatagctgttttattatccaaaaaaaccaggttttaagtccaaaagggatccaagagacagaattattatatattgataaatataaaatattaatctttcaggaagatgtagcaattataaccacatatgtacctaacaacagaatccttaaaatatatatagcaaaaattgaaagacttggagaga

SEQ ID NO: 270313 - DNA, 344 bp, Homo sapiens
aaaaacagcaagttacagaatggtctcataaaacaaaaacaaaaacaaacaaaccaaaaaacacttttcctcctcaagaaaacaaaaataagaacaaaaaaacctcctaaattacacatatgcgtatgtgtttgtatgaacctaggaaaatgtcaggaaggatgtgatggcctctgggggacaggcttggaggaagaaggaagcttatgttttacttcatatccttctgtcctgttccaccttatttgaacaagcatgtgttgctttttattacaatgttaaaaggaaaaatccttagactaactaagttcaacagtttacttgaccaattaaaatgattcaaa

SEQ ID NO: 270314 - DNA, 908 bp, Homo sapiens
ccacaacgcacccacgataagagtccctgcctcagcctcctcttttactaactccaccctttctcatctctgggacccagcagggacctggagaggccaacagccactgctacctttgtagtcttcaaaatattgaactgcaggtcccaagatgcatttcaggatttaagacaggtgcactaatgataaccattccttcaccaagtagcaacattcttgccagagttcttgggaaacctgtttttttctctactctccatctctgctgctctcatgctttaaattgataaaatatgggctcaaaaaaagaaagccgccaaagactcttatccttattggtgccccatcattggccaccccagccataggtgtgtgctgttggtgggaaatggtctccttcctcagcgttgtgtttgggttactggtgaggccagctcacagagtgacatcatggtcaccagtacatgtcgctggagtaaaatcttgcctttagaaactaggttgagctgttcagaaaggtcaattctcttctgtattccccctcaacatttatctgggtctaaagctcagcactgagtcacaatttcacacaagatcaaagtgaggcagtgttaggaaaccatgggctgggtgcagtgcctctcgcctgtaatcgtagcactttgggaggccgaggcgggcacattgcttgagctcaggagttcaagaccagcctgggcaacatgacaaaaccctgtctctacaaaaatacaaaaattagctgggtgtggtggggcatgcctgtagtcctggctactcaagaggctgaggtgggaggattgcttgagcgcaggaggcggaggttgtagagccaagatcacaccactgcactccagcctgggtgacagagcaagaccctgtctcaaaaa

SEQ ID NO: 270315 - DNA, 475 bp, Homo sapiens
ctcctttgatacaaaagtttcattctgtcagaaataagccatagtacagactcagagatagaggcagtttctagagaactcggtcttatcgtgggttctggagcacacctctcagaccagtcaggaacactggggaggtgacagcaggtccccaggggcctgcagggaatctttcagctgcacggattgggatttccctccaaaccaaactgtcctttaaggggcagcctcctcttttactaactccaccctttctcatctctgggacccagcagggacctggagaggccaacagccactgctacctttgtagtcttcaaaatattgaactgcaggtcccaagatgcatttcaggatttaagacaggtgcactaatgataaccattccttcaccaagtagcaacattcttgccagagttcttgggaaacctgtttttttctctactctccatctctgctgctctcatgctttaaa

SEQ ID NO: 270316 - DNA, 492 bp, Homo sapiens
tagacacagacagaactgtctatattaacatttcctcctaaaaaacaacaggaatcctggggaaagaccactggcctgggactccatgagccctggcttctatctctggctttatcaggtgaccacaggcaagtcacctagcctccatggtctaggccctcctgcctgttgggtgggaatcattacatatcacaatcattacagctgaccttcagggaggctgtactctgggtcaggaattgtgttgggtgcattatcatatttattctcacagcaccctttgcagtagctactattttcatacccattctcagatgaggaaactgtggaacaggctggttaggggacatgcccaaagtgacaaacttagcaaaggtggacctggcactcagtaccacatctgtttttccatgctcttaaccactgtaacatacagagcccttttacagagatcaaggacagaggtaaaagtgttttgaaagcaaaaaaaaa

SEQ ID NO: 270317 - DNA, 290 bp, Homo sapiens
ttgccatgctgtggtgagttctgcacagtcagttaacactgcaagggaaaaaccagctactcaagcctcagtaatggtggacacccctccctcactgagctcgattgtcagaggttgacttcagactgctgtgctggcagcaagaaattcaagccagtggttcttagcttgttgggctctgtgggagtgggaccctttgtgcaagaccacttggctccctggcttcagtaccctttccaggggagtggacagatctgtctcactggtttccgaggtgccacagggcaaaa

SEQ ID NO: 270318 - DNA, 235 bp, Homo sapiens
agctgaggtgctaaaaacaaatacgttaatttccacttcaaatgcagttttatgcttaaaaaatatatgtatattttgaaaatgacggtattccaaaatagtgtttgtcaggttgctgtttttcatgaggactagctcctttccaaaccacaaatctgcttctgtattttcagttccacctctcagtttctttagattttttttcggtgtcctaattctgttgtaaatgacctat

SEQ ID NO: 270319 - DNA, 1045 bp, Homo sapiens
agtacattttccttcttctaaagtatatcctatagatatactcctttaataatggtctattagggaaactgtgatgtctttcattttctgaaaagttattttatcctcattcttttaaaattattcttgttgagtctctttgacttgtggaaccattcatatctctttttttctatataatattgtattatgtaccaccaaaaccttagtgatgcaatagttcttaaatgacaatttcacttttttgtcctaaatttttcccgttaatccatcgtcatcagtttggcaagttttgatacaggtgcttttaatgtttgcatgtaagcaggcagtaactattatgtcacagcagcccctgggccaacaacaattcataattttgattgattgtaataaacaccttgatataagagatattaaaaagtgacaaatttgaatagaattgatggaaacagcattattctgtagtcttttagcttccatttttgctattaaaaaattatttgtcagcctaaaaaaaaaaaaaaaaagaaaaacaaaaaaaaaaataatacacaacaaaggagagaaaaaaaaataaaaaaaaaacacaaaaaaaaaagaaaaaaaaaggggggggggggcgaaatcccccccgggggggccccgacacgatcgcctcaccccaccgttttgagctgaaaaagaacggcgcccaccattggggagcacgtctgtataaaagagaaccgcaagacggcgggcggtgttaccaaaacattggaacagaggaaacaaacccaagcattccagacagcctctagggaggaaaaaaaccaccacctatccggtgggggggtgacacagcaagatggagagaacacacccgaccctcagacagagaatgaacggccaccagcgggggcaaaacagcaactaatgcatgggctgtcgacgtgttgggtcacccccgacactcaacgaacgacagccggccagagaaaaaacttgaacaacacacgatcatatacacgacgaaaaaacacacgcgaggggatgaaaaact

SEQ ID NO: 270320 - DNA, 440 bp, Homo sapiens
tttttaacagttctcatattactagtaaacaaatttaacctgggcatggtggcatgtgcctatagctccaattgcttggaaggctgtggcaaaaggcttgagcccacgagtgaggctgcagtgagctatgatctatgatcatgccactgcaatccagcctggtgatggagcaagactccatctcttaaaaaaaaaaaaatagagttttagaataagaaaacattgttttgtacaaggaatattattttatttatgtatttttttttttgagacagagtatcactctgtcacccagactgccagactggctcggctcactgcaacctccacctcccgggtccaagtaattctcctgtctcagcctcctgagtagctgggattacaggcgtacaccaccacacccagctaatttttgtatttttagtagagacagggtttcg

SEQ ID NO: 270321 - DNA, 494 bp, Homo sapiens
atatttcagagataccattataacaagccacatggaatgaagttaactaaaaatgtgtttataactaattcaggaggaggaaggttcagaggagaccaggagggagtgtgggatctagagaacaaggggatagaacagcttttgtggaaggggagggtggctaactcttcctccggtgaatcactgtgtttgatgcatgtgcaccaaggctgggacactgggtgaatagaggatagcggcgatcgggacattgcgagtgccgtcctcatagctcagaagtcatagcatgtcttaatcatggccatatcctcagtgcctggcccatagtaggtgtcctttaagtgattatgaactgagttgctggtaggagctggaggattagggaacactctggaggcgataggtgataatagttgaacttgctgcctgagggcagtggttcctaaacattgaactgtgcagctgaatcacctagggggcttgttcatacttcc

SEQ ID NO: 270322 - DNA, 299 bp, Homo sapiens
ccgtggagacagtgtctccagaggggcgtggcgaaaagcgtccgcggcccgacagggaagaaactctggtgacgcaaatagatgagcctccctcgtacgaggaggcactaaagcaaggcctgcccaccacccgtcccatcgcgcccatggctaccggagtgctgggccagcacacacctgtaacgctggacctgcctccccccgctgacacccagcagaaacctgtgctgccagggccgtccgccgttgttgtaacccgccctagccgcgcgtccctgcgccgtgccgccagcggtccg

SEQ ID NO: 270323 - DNA, 553 bp, Homo sapiens
tggccgttcttagttggtggagcgatttgtctggttaattccgaataagtgatttgtccaagatcacagttaatgaaattgtcaagtgagaatgctcttggtgtacttgcaactaactccccccacccacctccacatcataaaagcaaaatttcagttgggttgtattttaggcttaccaaaaattactatttcttggttaaatcaccaaatgctaaaatattcctaagaagttaataaatcaagatgcacagactcaacaacaaaaaatatcattaaaccaatggaactacaaattaacctacttaacttccaaaatggcctacaatcttattcctagttgcaggtttagaaatctttcataagccttttcctcaaacttcttataaaattctaggatccacctttttgcataattcagtaaatcatttttattctgattgaaaaaagaaagtgcatggggaaagaggatggagttgctcatttctaataagaattaagtcatatgcaaaaggtagtggtttcaatcccatctctttcaataactggcccg

SEQ ID NO: 270324 - DNA, 316 bp, Homo sapiens
ctgggagcgaaaaatccgggatccggcaactttgggcagcgcatgcggcccgcgacgctccatcccaaacacacacacatttttcccccggacttggaaagtcacccaaagccgccccaagtgcaggcaaacagaccttgctgactgaaggcaaagactcctccatcccacctgccctcccagctgccacggccatcgacccctcctttacaaggggctcctgcaactccccagcagcacgtgttggaatggacttcggaccctggcctcttgggatgcaaaggtagatgcttccggttcccaagatgccactagg

SEQ ID NO: 270325 - DNA, 261 bp, Homo sapiens
tgtctaaccggcctccggcagagtggcagatcatctgactctctgaaccactctgaacatcagtctcttcatctctaaatgagggtgctggccgtgtggatccgcaggggtatcctgaggtttgccacgtacaaaaagcttaggacagtaaatactaataggctggtgcaaaataaattgcgtttttgtcactaaaaaaaagtagcaaaacccgcaattattttccaccaacctaatattaaatgtgagtgactgggtcaa

SEQ ID NO: 270326 - DNA, 409 bp, Homo sapiens
tataaggtttctcactattatcatgacagccgtctgctaacagtgcaattttctgctgtattcatgtgtttagataaaagaagattgcaaaaaattttcaaataaaggtttacctcattctcttgccaggtaacttttgtcattaatgtgctgagttatggtctcggcatcatgcacagtcaagagagctgatcctctctgctgggtcatatatatgctttccttcctaatacccataagaggcattagggggaaggagaagaatataaacacagaaaccacatcctaacagctgcctctagttagctctgcttccccccccatccccacccccgagcttttaaatcttgcagcggcacctaatttgtcccacatggctttcctcccagtggaaccactggcccttttc

SEQ ID NO: 270327 - DNA, 419 bp, Homo sapiens
tttgctgaaacattctagtttctgaattctcacttttgcactctctactagagaccaggctttatgctgcttctgtgaatgggaaaactcaacaatgagggggaaaatgtcctccaaaatgaagttttagccccagtactgtcccatgagcaggaaaaccacctttcattccttacattattttaaggcacctattctgcctccaattaacatgttacttaaatagtaacattttatgtctgaaagttaaccagaatcactgcctaagaataagtacatgactcgaggccatgatagcaaaatagagagctcaactcagtacactgtctccattaaagaggccttgcccaaatacaactattacatcctattttccaagatccatctattgaggaaccatacaggtcacacaggtttac

SEQ ID NO: 270328 - DNA, 466 bp, Homo sapiens
agatcaaaggagaaatcaatgaaatttaaaaaaacacagaatgaaatcgaaggcatttgtttttgttttcagaaaatgaataaaattgataaacttctatcaagaatgatcagaaaaaaatacagaagacacaaattatcaacatcaggaatgacagaggtggcagtactacagattatacagatattaaaaggataataagtaaataatatgaactatttcatgtgaacaaatgtgacaacacatacaatgaacaaattccttgaagatacaagttatcaaagttcacccaagaataaagagataacaggaatagccctgttactatttaagaagttgaggccaggcatggtggctcatatctgtaatctcagcactttgggaggccgaggtggacagattgcttgaacccaagagttcaagaccagcctgggcaacatggtaaaaccctatctctaccaaaaaa

SEQ ID NO: 270329 - DNA, 637 bp, Homo sapiens
tcatcctgtcccacagcttagtatctatatgccaatgattcccaaatctatacccccacttagaattcttccctgaactccagattcgcatatccaccatttagtctatatctccacttggatgtctgcttttcctctcaaatttaacacacctaaaacagaacatctaaagcccccacctctgcagtcaaaacctgcttttcccatagcctttcaaatttcggttaatggtaactctcatcagttactcaagccaaaaatcttggattcatcacagactcctctctttcactaatctcttctttcccacatctaatccaagaggaaatcctattgttctaccttcattggccaggcactgtgactcatataatcccagcacattgggaggctgaggcgggaggatggcttgagcccaggagttccagaccagcctgggaaacatagtgagaccccatctctacaaaaaattaaaaaaattagcagtcaaggtggcatgtgtctgtaatccaagctacttgggaggctaaggtgggaggatttcttgagcccaggaagtcgaggctgcattgagccacagttgtgccacggcactccagcctgggtgacagagtgagacccctgtttccaaaaaaaa

SEQ ID NO: 270330 - DNA, 725 bp, Homo sapiens
aatcttacaagaaatgctcgaatctttaacaaaaatgagtggggctataggggaaagtgaggtcaaggcactatggtgtgcatgcttgcatttgtttcctccgtccattcaaagtgagaatgctcccattttcttactttaccattgatgtgctacaagcttatttattttaagactaacctagcctaaaaatcaactgtccccacaaaataaaaatcacattaaaaaaactaatagtgttcagactaatcttgctcaaacttatgtttccctagtcttgatgcaactgattgagtcacctggggagttggttataaacctgggcagagaccccaaatgcaatggctcagagaagataggagcttatttctgtcttatgcaatagtcagaatgggttttacagactggtgagtagctcaacatctcacagtcattcaggcacccatgttcctcccattttgtttctctgccaccccttaaggacttgccctgactgcatgattattgccgtgttgcctcaaacaggttgcagcttatgggaagcaaaaacacggtatggtagaagctctcccatagactgatggcttggctcaagagtggccgactttatttctgtacatatcccactggatagaatttagtcaatcctaagctgcattgagccacagttgtgccacggcactccagcctgggtgacagagtgagacccctgtttccaaaaaaaa

SEQ ID NO: 270331 - DNA, 1536 bp, Homo sapiens
aatcttacaagaaatgctcgaatctttaacaaaaatgagtggggctataggggaaagtgaggtcaaggcactatggtgtgcatgcttgcatttgtttcctccgtccattcaaagtgagaatgctcccattttcttactttaccattgatgtgctacaagcttatttattttaagactaacctagcctaaaaatcaactgtccccacaaaataaaaatcacattaaaaaaactaatagtgttcagactaatcttgctcaaacttatgtttccctagtcttgatgcaactgattgagtcacctggggagttggttataaacctgggcagagaccccaaatgcaatggctcagagaagataggagcttatttctgtcttatgcaatagtcagaatgggttttacagactggtgagtagctcaacatctcacagtcattcaggcacccatgttcctcccattttgtttctctgccaccccttaaggacttgccctgactgcatgattattgccgtgttgcctcaaacaggttgcagcttatgggaagcaaaaacacggtatggtagaagctctcccatagactgatggcttggctcaagagtggccgactttatttctgtacatatcccactggatagaatttagtcaatcctaactgcagagggagccagggaacacagcccaggcatgtgcctaggaaggggagaatgggtttaggttgacacttagcagctgccactatatgtggctatagtatgtatcattggaatagatgtttaactttagggacaaataaaaaaccaaaacaaaaaaaggagtaaggggagagatttgcagcaaatctttatttttaccaacctcaactatcattaatttcagtgaaccctaaatggtatccaacaaaatatctttctagaccattcaccgtctctgcctcatagatgatcatatcatgttttcttctcttctgaaacctctaatacccttgtcctatcctcattctaagctgatgaccttacttcctatttcacaaaaataatagaaaaaaaaaacagaatttccacaaacccccacctaatttatctgcctcctgccatcagtgccaatatactgtgcttttcttctgtggatacattatttaggccactattcagggccaacccctccacctgcctactagaggccatcaccacttgtttattcaagggcacagctccaggtagttttccttctcttggggatcatcagtttccttctgtctaccaggtcattcccattagcatgtttttgccgcttttcttaagagataatatctcaaccctaattcctcccgctaacttactaccatcatttatttagtaaaatatctcaaaaaagtagttaatcttgttgtttctgattctgctcctcccctcccccacctgttttttttgggagacaggatttcttgagcccaggaagtcgaggctgcattgagccacagttgtgccacggcactccagcctgggtgacagagtgagacccctgtttccaaaaaaaa

SEQ ID NO: 270332 - DNA, 1639 bp, Homo sapiens
aatcttacaagaaatgctcgaatctttaacaaaaatgagtggggctataggggaaagtgaggtcaaggcactatggtgtgcatgcttgcatttgtttcctccgtccattcaaagtgagaatgctcccattttcttactttaccattgatgtgctacaagcttatttattttaagactaacctagcctaaaaatcaactgtccccacaaaataaaaatcacattaaaaaaactaatagtgttcagactaatcttgctcaaacttatgtttccctagtcttgatgcaactgattgagtcacctggggagttggttataaacctgggcagagaccccaaatgcaatggctcagagaagataggagcttatttctgtcttatgcaatagtcagaatgggttttacagactggtgagtagctcaacatctcacagtcattcaggcacccatgttcctcccattttgtttctctgccaccccttaaggacttgccctgactgcatgattattgccgtgttgcctcaaacaggttgcagcttatgggaagcaaaaacacggtatggtagaagctctcccatagactgatggcttggctcaagagtggccgactttatttctgtacatatcccactggatagaatttagtcaatcctaactgcagagggagccagggaacacagcccaggcatgtgcctaggaaggggagaatgggtttaggttgacacttagcagctgccactatatgtggctatagtatgtatcattggaatagatgtttaactttagggacaaataaaaaaccaaaacaaaaaaaggagtaaggggagagatttgcagcaaatctttatttttaccaacctcaactatcattaatttcagtgaaccctaaatggtatccaacaaaatatctttctagaccattcaccgtctctgcctcatagatgatcatatcatgttttcttctcttctgaaacctctaatacccttgtcctatcctcattctaagctgatgaccttacttcctatttcacaaaaataatagaaccaatatactgtgcttttcttctgtggatacattatttaggccactattcagggccaacccctccacctgcctactagaggccatcaccacttgtttattcaagggcacagctccaggtagttttccttctcttggggatcatcagtttccttctgtctaccaggtcattcccattagcatgtttttgccgcttttcttaagagataatatctcaaccctaattcctcccgctaacttactaccatcatttatttagtaaaatatctcaaaaaagtagttaatcttgttgtttctgattctgctcctcccctcccccacctgttttttttgggagacaggatttcactctattgcccaggctggagtgcagtggcgcgattatagctctctcatgcgataagtcagtaccaatatgtacctatgttgactatcagaggcttgatacggcgagcctcctttggtgccgctctaggggatacgggtctcccaaaggggggcacaatttgtcgcactcattcgcaatagattagctgaggtgggagactatcgggaggatacagcgaacatatgatcaaccccaagtcctcgcctcgtgtcc

SEQ ID NO: 270333 - DNA, 487 bp, Homo sapiens
gctagatgccagactatcatttgttgattggttgattcattgtttggaaaatacctggactactataataggtgccaggcatcatacccagagagggacctagcataaccagaattcattcaaaggaggacttccagaattctgagaggtctagagtgctgggacggtgtcttatttatctctacactttttcttcctagcactgtgtctagcactcaggatattcataataaaagtttgataaaacaatggatttacaaatggtggttgaggctcttttacccactggcaggctatcttcctgaagttgcctatatccctgtctgcctgttagctgttaatacctcctaagccaggatgttccactactgtgctgtgccaaacagctgtgacccatcaccacctcctgtgagatacattctttttaccctgcatcatgctaaagatgttaactcttgactagaaccacttcttggggctgtggttg

SEQ ID NO: 270334 - DNA, 280 bp, Homo sapiens
gccagagtgaattcaaatctttatgaccaactcgctgtgccttcttgggtgagttccacatcctgtgagcctccctttcctcttctgcaaaatggagatattaaggaaagcgttgttttcaggatcctgtgaaatgacctacgtgaaacacgtagcttagtgtttggcatatagaaggtgctcctgacagtaaaatgtatgtatgcgtgaatgaatagaagcagccaagttcagaagactatttctggaaggatgctacattgaagattttaggccctat

SEQ ID NO: 270335 - DNA, 513 bp, Homo sapiens
actaaaaatacaaaaaaattagccgggcatggtggtgcctataatcccagctactcgggaggctgaggcaggagaattgcttgaaccttggaggtggaggttgcagtgagctgagatcgcatcactgcactccagcctgggcgacagagcaagactgtctcaaatacctttttcattttcaggagcattttcttaaaattaatatatgtaaattaaattactcaaactataggaatatgcatgtatttgagggggacataaatatttttagggcttgcaatacatattgacaaactgctttccaacaagttataccaatttatcccaagaattgatttggaaattggatgcttgtccacttttctctgcaaagaaagaagattccactgtacatatgatgtcttccacagatttattgtgcaaactgaacggatcacccttagagtatctatctgatcctcttgcccttatgaagtctcacacttcctgatgaaactgttcaccaaattgcca

SEQ ID NO: 270336 - DNA, 910 bp, Homo sapiens
tttagctgtcagggatcctgttgcagctctgcctcagccagtctgtgcacagagcatggagcaccagggccatggagcatgtgggctatggaatcgggttgcctattttcatcttgactccatcacttgctgggcaaccttgactcaatgaatgacatcataaaaatggaacattcaaatgagaatgtccaaggacctgctgacttcactgatgaattctaccaaatatttaaagaagaactcatattttccaaaaaaccaaagaggaaggaatacttccaaactctttttacaaggcaagcattaccctgataacaaaactagacaaggacactgcaagaagagaaaattatagtccagtatgcttcaagaacataaatgcaaaaatcttcaacaaagtaccagcaaaccaaattcaatagcacattagaaagaccattcaccgtgattacatgggatttaaccctagggtgcaaggatggctcaacatatgcaaatcaataaatgttatacaccatattaacagaagggataaaaaccatatgatcatctcaatagtttcagaaaaagcatttgacaaaatgcaacattttttcctgattaaaaactctcaacagattcggtatagaagaaatgtacctcaacacaatgaagcccatatactgcaaacccatagctaacatccaactcagtggtgaaaagttcagagatttttcctctaatatcaggttcaagaccaggatgcccactctcatcacttctatttaacatagtactggaatttctagccagagcaattagacaaaggaaggaagtaaaagatgccaagaacacacaatggggagagaagactttgctaagttgtgctcagaaaactggatattcacatgcagaagaataaaattagacc

SEQ ID NO: 270337 - DNA, 331 bp, Homo sapiens
tttagctgtcagggatcctgttgcagctctgcctcagccagtctgtgcacagagcatggagcaccagggccatggagcatgtgggctatggaatcgggttgcctattttcatcttgactccatcacttgctgggcaaccttgaggagcggactcaaacctttcaaatattttgagtggttggaaagaagaaacacaaaacaattctattttctgagttttaaaaatgtctgaacccctggaagacccagccagaccaaatctgctttttctcctggatccataatgtacagtggtaaattaaaggcttcgagaagctctgtagtaaagaac

SEQ ID NO: 270338 - DNA, 272 bp, Homo sapiens
aattcgcggccgcgtcgaccgacagaagggagggcagcaagctgtaaagtgctgctgcaagtcaggattctgaggtccagttcctcagggattttacttttgttggtctggggtgggaaatccacattttaaagatgagctccaggtgatctaatatccttggcctactgatctcactttgagaaacactgacttagcacacagaaagaagcagctatgtgaaacgacacgatttttattttcttcattatacttttatattgcccaacatt

SEQ ID NO: 270339 - DNA, 419 bp, Homo sapiens
atcaccttatatccgttaagcagtcattcgctattcctttctccccctagaccctagcaaccactcatctgctttctgtctttgtggattagcctattctagacatttcatataaagggaatcatgtaatatgttgccttttgtgattggcttctttaatgttttcaagattcatccatgttgtatcatgaatcatcactttactccttttcattgctgaataatggttccattatatggacatttccattttttacggaaatgtcttatgtgaacatatgaacatttgtgtacaagtttttcattgaacatctgtttttaattctcttaagtatatatatttcaaaggagaattcctgggtcttgtggtaatgctatgtttaactttttgaggaaccatcaaatacacaaattatttt

SEQ ID NO: 270340 - DNA, 367 bp, Homo sapiens
ccttgttcctacttcataggaaaattctttagaggtgggaattccctaaacatatgtaaggtggttcatttaggctgatcacatctttaacagttgccaaaggatcttataccagatgttaacattctattttctatcaaagagccatgttggattttttcattatttaatatgagaacaatagaagtgaacttttatgaagttccttccctatggaatccaactgaagttaactagacacactttaagaaagatggtgaccatttcagagatattctatttactgagcatccggcctgagaacaaaatggacctcaaccttgagaaactcacaagctgatgcgggatttgtagagcatatttaaaa

SEQ ID NO: 270341 - DNA, 339 bp, Homo sapiens
ccaaccaaaaggcagagtgcattgaagcctggagcatgcaggctgtagagttcaatcttcaaggggtgcaaagagtttacagtaattctttgtttcctcatcttttgcatattcttaggattgtggcatctgactcacaattccctttggtctcttaaatctattctatctaaatatctccattgagagttccactttaccctcttgggttatttgccatgtcagttatatcatcaagatttaatcagaaaacagaaaataaagtagaaagatttcaaataaacaatctaatgatgcatcctaaggaactggaaaggcaaaaatgaacaaaacctcaaa

SEQ ID NO: 270342 - DNA, 393 bp, Homo sapiens
ttttctctattaatttcctattttcaatttcattgatttcttccacattaatttttattaatgaaaaattaatcttcattaatgtttattatttgttttcttctgcttactttggatataatttgccctttttctagtttcctaaggaagaagcatagatgattgattttttggttcccacaacttatcaaaacatttttattttttatttttacttggttcaaaatattcttaaatttctcttgtgattttttttctttgactcatccctcttccacttttaattacattggattgaactaaataatccagggttatttccctattttaacataggcttcttagcaaccttaatttcatttacaaccttaactgccctttatcatgtaatca

SEQ ID NO: 270343 - DNA, 426 bp, Homo sapiens
gcactgggagggagggagatgggggacaatttgggggttcagcttccctttgcctcagcctccacccagatgccagagtgaccttcccaggctctggttcccagcccggcccattttccccctcctcccagagcctccaactgcatgtgaaattaacagggcctccgcctctgcctccctcggtgggtctgggctctgggctctgggttcagggctcagggttcagggcagggtaggaacgcaggcagtccttgcacagcttgttccctgggtcactggcccgcatcctgaccccactggagttcctctgaccgttccagcctccaggcctttgtgctctgccaggaacacttcctcacctcacccgttccacccagggaaaccccatccatctttcaaagcctagctgcgcccgagcgcggtggc

SEQ ID NO: 270344 - DNA, 431 bp, Homo sapiens
tatacgtcatgttgtttatccattcatccatggatgaacatttgggttccttccacattttggctattgtgactttatcctgttttatattctgcagcaatttacatctttattttcagaactattaagtttcttcatattaacagtcataggaaaagagcaatgaaagacttttatttgatttcattttgtggccattccttttttttttttttttttggcagccacgaagactgggatttctaattctatgttatgataagtagacaatttaagccatctatctttttttctgtttcctttttaaaaaaaaagaaaatagcatttttctaaaatatgatcatgtcagtttggtctatttttatacgtgttaaggagagcactaacagacaaaagaataacaatatagcgattaggtatttagtttttaa

SEQ ID NO: 270345 - DNA, 364 bp, Homo sapiens
agtataaacaagtaccaagtgaagactttgaacgcactcctcagagtccgactctcccacctgctaaggtagctgcccctaatctaagtcgaatgggcgcgattcctgtgatgattcccgcacagagcaaggatgggtctatagtatagagcctccatacatctcatctgtgctctccgtgttcctttcctttttttgatatatgaaaacctattctggtctaaattttgttactagcctcagaatgtatcagaaaataagttaatcaggagctgtaaggaatatatttttaaaaatttttgtttggttatatcgaaatagttacgggcattaaagttagtaaagacaagtttaccatctgaaa

SEQ ID NO: 270346 - DNA, 421 bp, Homo sapiens
ggccagcaggaccaagccactgtcaactgaggaagtgcgtcagctgggcgacaccagctgccagcagctcggggccttgccctgtggggctctgctccttgcaccgtctcggcatctgcggggctttatggtgaccctgctggcattccacaggctgggaagtcactgagttcgccactttacaccagaggaaacaggtctttgaaactggtggtgacctttggccgggctgacgggaccatgttggctgtctggttatgagtgaagttctcgccctgtgatggcaggtttgttttttagtgcggcataagtgtaagctatatttgtgtaggaagtcctagccctgccccaaaaagaggccaaaagagaattatgatcttttgaaacaagatatttgttttaaataaataatataatttta

SEQ ID NO: 270347 - DNA, 454 bp, Homo sapiens
catattgtgtttctcatttctgggtcaatgttactagaaaatatagacttaagatttagatgtttcattgacttcaatgccagattatagatagttgggttgtacaatgacataaagcaaagactccaggattttgaagttcttcacttctcagatataggcaatttggtcttaagatacctatgagcaaagtaacttcaaaaatgtattggtaagaattaagttggtgatagaagggttgtctgtaaatgtaaagaattacctggtgcaaatgcatacgggtggatgtcggtggggattttgcgtgcacactgcttggtatgcaatatggctggtgaactcaagtacccaatactgtacgtaatgggaaccagatgtctaacagagagagaaaaatattttatagcaataaatgtgacattgactcttaaagggtttgctgtttttaaacaac

SEQ ID NO: 270348 - DNA, 375 bp, Homo sapiens
tgtattgattcaattcagcatgcacttataagcccttgttttatgccagtgttaaaataagtaactgggaggccattaggacgagacagctccagcgctttgggttcctatgtaagcaaacgaaaactcaaatcagtgtgaccgatcatatcccagcaaaatgaaactgaagtttaaccaatcagaaactgccaattaacctctaacgagggactttccactttaaccaatcaaacattttctttgtctttcttccctgaacacctagtaaaaatttgcctcttgttcctcctaggtagagcctacactactaatgatttggcactgcctaattcatcaattgctgtctactcaaataaactctttaaaatctta

SEQ ID NO: 270349 - DNA, 242 bp, Homo sapiens
attttttatgtagtacagggatagcactaaaggtaaagtaaaagaaatgtaggacactatctcttccttttagttgattggtagacaagacctgcacattaaaatattagacaatacattcaatattttgctacacagaacattatagttaataaacgttggaaaagaggaaagtcattgctttctggaaacttagccagagtcctgtggaagagatgggattgaacaggatttgataagag

SEQ ID NO: 270350 - DNA, 415 bp, Homo sapiens
attaatcattacctgaaaaattcctaacagcagtgggttgagtgggaaaaaaggcatggaggatgaaatcatgttctttttttttttttctttttgttggcgtgtttgataggtttaatatgttactgagtctgccagttcaaatagcccacttagggatcttagggatttgtatttatttacatttagggttacctcaaatcctatggcaagcaaaaaaataaaaataaatccccaattatttccctcaaatcaaaccagaattcctactgtttctcaaaaaatcttagtttcttagtctatatatgcaatcataaagcttcttccagtgtttgtataattttggtggcctagatcttggtcagatgggacagggaggggaatttttgtatgaaggaacataaccaaaaaaaaa

SEQ ID NO: 270351 - DNA, 406 bp, Homo sapiens
gatcttgtagctgggcatggcccttgcacagaatggggagctatgcccagagcgtgtttcaagagctttggctcctatggggcgtgaggctcttctaccaggatagcttccactcctacctctctgcacctgaacagactcccacgtgcactgctgcaagggtgcctgcagaaggcgacttgtcctccatcctctgaacagacccagtgccctatgtggcccacggtcatctgtgagtctgaatgttcacaacctaagaaggtgacttgttggcagacggggcaataacatttcaacttcagaggactgttgtgagagtaaatgaggtaattggcctgtcatgtaccaagtggctcaaaatgcagaagctgttattaattacataaagcattattatatcgttaaa

SEQ ID NO: 270352 - DNA, 332 bp, Homo sapiens
cccagaaagattttaggacccaggaggtgcttttcctccagctgttgccagtgtccttctgagcctggattctccggggatttccgtcgtggtggatggacttcacatcagcagcagttctggtacagaattgtaatgtgttttcatttctctgtaggattcacctctcaccagcgtctgtcttaaaggtagggccaatttcatggagcatttttctgtgtgtgtccttgttgcttttgccagaaaaagtggatttgacatgcgtgccccgatgccaccatagcccctaggccaacaatgtcatggtctaaacaccaaaaagtgatgccccg

SEQ ID NO: 270353 - DNA, 359 bp, Homo sapiens
gaaaggataaccacaatccaatgacactggttatctaaataaagggatggataggaacggggtagaagggagagaagcagtaagactcctctgagcatactttttttttgacagttttaactttgaggactttcttaatgtatcttatgtattcaaaaataaaattgaacctggccggccgggcgcggtggcccacgcctgtaatctcagcactttggtctcagcgcttggtccctctgggtatcctcagcccgctctcccttactttggtgcatgaaaaactgtacaatgaggttcagcacagccagcatcagccgagctttttggtgaaactcagatcagccacccaggaggaagag

SEQ ID NO: 270354 - DNA, 261 bp, Homo sapiens
agatcattaaatagtaacagagaaagtaatttcatatcctctctgtcactatgagagaatagaattacttcctttgtttaccagttgggttgaaaacaaagaacatacccacatgtagaagaaaaaccaagaacatacccctccattaaaattcatcccacatacaaagtttcctttatgcttctgagagcctatctagctgtataatcaaagaaaatatgtttctaataaacttcaaatagacacagtactactatcctt

SEQ ID NO: 270355 - DNA, 383 bp, Homo sapiens
ggagtgcagtggtgcaatctcggctcactacaacctccgcctgccaggttcaagtgattctcttgcctcagcctccagagtagctgggactacaggcacatgccaccacgcccggctaattttttgtatttttagtagagacggtgtttcactgtgttagccaggatggtctcagtctcctgaccttgtgatctgcccgcctgggccccccaaagagctgggattatagatgtgagccaccatgcccaggctgtaggttgtctctttactctcatttcctttgctgtacagaagctttttactttgatgtagtatgtttatctgtttttgcatttgtcagtgcttttgaggtattattaaaaaatccttgcccagatcagtgt

SEQ ID NO: 270356 - DNA, 1004 bp, Homo sapiens
tatgtagctctattttattgtaatgttggcgtggtactgcattgtgtagatgtaccaaattatagttaactgtcacttactatgtcctgtccgtatatattgcccagtattcttcaaaattatctgtttctcattagactacagatttcattaatcctttgtgaaatatatggcaaatattttcaagaattatcaatgctttggtttaaaatgcccaggctttttatctcaggtaagaaggtagtccccactcaaaaattcttaaaatcttctcctatattgcctgttaattctctttttatgatttactcattaaaacatctgaaaatgatttttgtatgctaagataaggatttaatttttttctttgtttttatgactaggcagccattttttcctgaaatcatttgttgaaatcatttctctcccaactgactagaaatacctccttaatatcgtaaattctcaagtgtacatgcatcttttctttagactcatctgttgctttgatctttttgtctcttcctttaaaaataccaatctgctttgatattacgttttctagtaattcataggacaagtccctcttcatttttccttttcaaaattttcttgaatataattgcattatctttgagataaaatttaacataaactgttcatgcttcattaaaatactctttttgggatttaaccattatattttcttatattttgtgactggtatgtagatgagtgtttatgtatctggccaactttctaaatttattaattttaataaattgtttcacttgaattttctaggaaaacaatcatctaattataattcatcttatctctttctttctttgctttagtgaattgctggcttccccagaatagtggtaaataaaacagtgattctggccatcctttatcttgtttcttagtttggggatgtttttattatgtcatcattaaatatgaagttactattaatatctaataaattatatttatcaggg

SEQ ID NO: 270357 - DNA, 595 bp, Homo sapiens
catgagcttcctgtttgcattggtacctttgtgcctccataggggagacgcagggctgcccggggctggtgctgtgtttacagtgggtctgcattcacagccaaggatccctgagtttaggaaacccccaatcttaagaagtctgccagtaaacccagccaacttttcctatggaggaagaagctatctttattatcctggtcaggaatcaaacttgctctctgcctcagaggaagacactaatcttgctgtacaaatgtccttgaaaagagagtcttggataacacatggagaattgcctcccacccctgcaacaatattctagcgagataaaggaagaatccaagaaagaggacaatacaggatacacttatgtaaaaattagttacagttgaatatgaccaggagaaatgtataacattagaaagaaaataaaatggaattgctgtgagatggttggaagacactcccttgaccagcagagtttaagttgcatagcattacgtttacatttcattctatctggcttatggatggaaccacattctaattctatgatgaataaagtttgcatgactttttaatgtgataaata

SEQ ID NO: 270358 - DNA, 412 bp, Homo sapiens
ttatggagacaagggaaacaggcccttgaaaagaaggcttccgaggcaattgggcggtgtcagtcttcagctgctaagccgagaagatctgggaaggagtcagagagctttgggccagagttccaggggctctgggagtggttgccaggtatgaattattgattctcaaaaggatattagttgtaattgagaagaagccatccttattgtcttattttgttgggatcatcatcataaaaagtaaagaagcagaagaaaaatcttaagggttaatcttttgatattgcaaatggcttattattgtgaaattaggatagtcaaagttggctccattgttactgagtccaacaaaaatgccatgagagatgaagagatatttaaataaagaaaataaagtagaagagaaagattg

SEQ ID NO: 270359 - DNA, 263 bp, Homo sapiens
gatcttctcatcagagacaaggtgcccaagaactgaatgggagggaggtgggcacgccaccttatagcccaagaatcattagtcaggacagcctatttataaaaatagcttgctaagaggagttttaaagaccacagaagagtacatttctttactagttttatttactaaaagtgtaaaaattagacttttaaatcatttgattccagaggcacattttttaaaaaatgtagtttttgagaattataagaggtatattaaaa

SEQ ID NO: 270360 - DNA, 458 bp, Homo sapiens
cagcttttttctctgaatatctttcttctttaatctgaaaatatgtccttgtatctggtgacttttatcagatgagaacttcagagttggtcattgttaccagtaagaaaaatataatgcttaagaagaaataacgaaggttgaacattatgtgttttagatcagaaatagtttctggccaggcacagtggttcacgcctgtaatcccagcactatgggaggctgaggcaggcggatcagctgaggtcaggagttcgagaccagcctgaccaacatggtgaaaccctgtctctactaaaaatacagaattagccgggcgtggtggtgcatgcctgtaatcccagctacttgggtggctgaggcagaagaatcgcttgactctgggaggtagaggttgcagtgagccaaaatcgtgccattgtactccagcgggggcaacaggagcgaaactccatctc

SEQ ID NO: 270361 - DNA, 164 bp, Homo sapiens
tctgacctagttttgaaccctgggtacaccaattttttgttaagtaacttcagaaaagttacttaacctatctatgcatcctaaccatctcacctactaagtggacatcctcattaaggttgccatgagatttagatgtgatgatgtatgcaaggtacttagta

SEQ ID NO: 270362 - DNA, 950 bp, Homo sapiens
gcacatattagtattcctcactttaactctgtttcattatgtatgttaactatactatttactcaaactcttctttctctggagttgtaactagacagctcaggtgataaggccttagcttagggataaatagtaaagggaaggaagagaagtatttccaagggcttcatggaaactaaaagcaccattcagaatatttgcacaatcttcacacagaagtcacagagaactggaatgtcactcaggacacatgtcactatggtagtccaaaatgttacaaatgacctggtggtcatactagtggttgccacctcagaagaaagtttctgttgttctgtcaggctcaggtacttatctggttttacctgatatttcatttctctttctactctcctctttacatcatcttttgcttattgcctggtttttggccttgtgctgtttccataggacctgccctttgaactggaaaagagagagggtatgattggttcagctgattacctttcagtgtaaataatttggaggcagttgatttgattacccttcagcataaagaatttgggggcagaccggtcatgcctggtcatcataagaactgaaggcttgcctgaagttggctactcttaggttaataatcaaatgtcatctactcatctgtccaaggaaacaggtccgtgaggcaccaaccacagcatcataggtacatgaaacaatctagagaaacaatctagggatcattcagaagagtaccttggatgtggctgcctaaaagatgagagctgataaattctctaaaatacaaagcaactacgtctctatagtatcatctatgataagattcactagcaatcgtaaaacctaaaagctataaagccacagttggatctgaggaatctaagacagcatcaattgcacgatgtctcatagatttaacaagtcttttgaaa

SEQ ID NO: 270363 - DNA, 451 bp, Homo sapiens
agggtttggggcatacatggtatgcagctgggagttctgacaggtccgggggtgcaaggtgacttatagcagcagtttgcggaatggatgatggtaaggtgtattagtgttatggtctgagtatgggtgtccccaaaattcatatgctggaacttaactcccaaagtgatggtatgaagaggtggggcctttgggagatgattagctcaggagggctctgccaccataaatgggattagtgcccttagaaaaaggcctgatgtatcctgtttgccctttgccccttctgccacgtgaggacacagagaaggtgccatctatgaggaacaggccttcatcagacaccagatctgttggtgccttgatcttcaatttcctagcctccaaaactgtgagcaatacatttctgttgtttataaatgacccagtctgtaatggaggaattggtaaa

SEQ ID NO: 270364 - DNA, 346 bp, Homo sapiens
gtcaccagctctatcactacatcaccttttacattttcctttccctgtccacaaatagcatctagagttgttcttcataactaaataattcaatgctatctttcagcttgcatatgccacagagcaaaacaaaagctgcataggtactggcataacctaggattctcggaaagctcacaccaatcaattgattatcccttgtattccaagtgtttcaaggataggatcatctccaacacatctttttactgagctaatagagtggaagagtaattggaaattttgatgctaagaaaaacaagatttttttccttatgtgaactcaatacagtacattttctgtaaa

SEQ ID NO: 270365 - DNA, 215 bp, Homo sapiens
gtgagaaacatcttcctttatttactaaataaaagaatttaaaataagataaaattgaaagaggagacttacactgtctacagatggtagcataccgtggctgagtgtggtggcttacgcttataatcccagcactgtgggaggccgaggtgggagcatcacttgtgcccaggaatttgagaccagcctgggcaacatagcgagaccctgtctct

SEQ ID NO: 270366 - DNA, 443 bp, Homo sapiens
caaactgggacatcgaagcaaggattggtagagtgggaattaacccctcccataactccaccccatcaccaatgtcaatctcatatacccttcaccttggtttatgatttctaatgctggtttggagtataagagagcaaagtgaagaaaaagtagaagagttgatagacaacaatctaaggagcagggcaagtagtttgcacttagcatcatcccaaagaagaggatgggcttttaagcaatttatatattaaaaaaaaaagcatcttgcccattcctcttcgccagtgtccctgggaggaaatggaggcctgatcatctgatggtgctaaagtcaacaaatttacaatagaaaaggattttctctcctggaaatatacccaagctattttctttgtttaaaaaaataaagatctgctcttacgatcctttgtgaagttaaa

SEQ ID NO: 270367 - DNA, 475 bp, Homo sapiens
gctcatagacattctacacacacttcttgaaattgctcctggcctgatattttggatgttaggtagtcagtgtccaataatactgttgtccgtgcaggttaatctagccattccttcatttgtgtgaagcataaataatgtaagtaaatacagcaactgaactttttatgttctataatagagcacttttatgtttttaatatcatttattatttctctgaaaatccagttaagatggcagatgattctattttttcatattatagcatctacccacaatatttctaactaactgtatttgaacaaagaacttccttagtctttcaatttaaattatgtatttgcttaatacatttttatatttgtaactgtggtaaaaaaaaaaatctatatagcatcttgcatacattctcactagtacaggaataaaactgcagtttgttgaaggagagtgctctgtcttctattcacctgc

SEQ ID NO: 270368 - DNA, 337 bp, Homo sapiens
acttgtcgtaaagttgtaaaaattacatatcatttatttagtactgtttggggtacatagtaagtgctcaatacattgcagtatttctacagataaagaaaccaagatggcagatcagctgaggtcaggagtttgagaccagcctggccaacatggtgaaaccctgtctctactaaaaatacaaaattagccagggatggtggtccatagtagtcccagctactcgggaggctgaggcaggagaatcacttgaatctaggaggctgaggttgcagtgagctgagattgcgccactgcactccagtctgggccacagagcgagactccatgaccccaa

SEQ ID NO: 270369 - DNA, 402 bp, Homo sapiens
aaaattttaagtgaagtttctgaggatgtttgaagagataaatgaagaaataagtttgattaaaaagaatagaatatttggtaaaatgaaggtaaaatataaagtaagagggccaggcgcagtggctcacgcctgtaatcccagcactttgagaggctgaggcgggcggatcacaaggtcaggagatcaagaccatcctggctaacacagtgaaaccccgtctctactaaaaatacaaaaaattagctgggcgtggtggcgggtgtctgtagtcccagctactcgggaggctgaggcaggagaatggcgtgaacctgggaggcacagcttgcagtgatccgagatagcaccactgcactccagcctgggtgacagagcaagactccatctcaaaaaaaaaaa

SEQ ID NO: 270370 - DNA, 433 bp, Homo sapiens
gatataattcaaccatttaccggtctttggagaaggaggatgttttcacgatttacacatacctaatacaaatcactgggggctttcagaggctgagaggtaaggcccctgagtcaaagcacaggacgagtcttgtgctctcagtaccaatagccaaatggcctcccagcaaggctgcagcactgttcactccaagggcaatgtgaaaataagctgccctggcacacttcaacgacacgaagtgctccatgggtcacctagcaaagatggttttattaggtagtaagaaggggaaaaacacattttatatttggacattaggagcagagatatattaccatgaagctaagaaaccgtaatcttcagagccttccacttgactaagccctgcccattctcattctaaataaaccattcacttttgtaaaaaaaa

SEQ ID NO: 270371 - DNA, 558 bp, Homo sapiens
agattaaacatttatttgtgtgtctgtgcaggtgtttctggatgagattagtatttcagtcggtggactcagaaaagtacctagccctgcccaatgtgaatggacatcatccaagcctctgagagcctgaatagaaaaaaaagaggcagaggacggagaaatttgccccttttgcttcctgcctgccttctgagctgggacatgggtcttctcctgcctttgcactgggatttataccatcggcttctctggttctcaggcattgggactcagaccaaattacatcaccagctttctcctgaatgttcagattgtggaacttctcagcctccttactcatgtgagccaactcctcagaataaatgtcttactgggaagctgggcatgggggctcacgcgtgtaacccagctattttggaggtcaaggcggaaggattgcttgaggccaggagttcgaggctgcagtgagctataattgtgccacagcattccagcctggatgacagagtgagacccggtctctcaaataaatgaataaataaacaaatctcttagtga

SEQ ID NO: 270372 - DNA, 428 bp, Homo sapiens
cagtgcttcactatagctgcgctccgtgctaggcctgtgaggtacctggggtgggtgcatggcctcctgcaactgagaataggtgtgtgggagctgtctggggtcaccacctgtgtgactttcaccttcttaagccacggttgactcatctgtgaaaaggaaatagcgatgtgttaacggttgttgagagagtgagtgagctcatatttagcacactgttagcgttcatcacattttagttattgctaggccatggccttgtgccgtcgaagctacccgctgcactctgccacgtcctggtccctgatcgccgaggttctggtcctcacgttgaaccagaatgctgagcccgccctgtgctcccgcggctcgccgcggaccgcaccgacgcccgtgaagggcgagccctttcccggcccgaggcgcga

SEQ ID NO: 270373 - DNA, 545 bp, Homo sapiens
actacaattctacaacattgttctctggggcttagcaaatgatacaagtactgggaatggaagagactgaatgtaagatagtttacctcatggagagattgaatgttattcacaaagtgtaagatagtccacctagaaaatacatcccagaaactgaaaaactgctaggagagttcagtaaggtgacaaagttcaagataaatatgcaaaattatttaatattagtttccttattcaccacacacacacacaaatcaaaatgtgatagatgtaaactacccaggtatacatttaacagaaatactcaagatatgtatgaataaaacacattttgctaaagaagagatgaattataaggaaaatataattggatgggatcaatgtacagatgaccatgccatttttttctacaaattaaatctaatccagaaaggcttaaaaaaaatttctttttattgagacagggtctcactgtagtacaagacgaggtagagcccaggagtttgaaactagcctgggcaacatagggaaacccggtctcaaaa

SEQ ID NO: 270374 - DNA, 277 bp, Homo sapiens
caaaaaaaaaaaaaagaaactgagaagaaaaatatgatccaagcagcatttcctataagctccccaaagtaaattttgctccaaaactaatttgggggtatctgcatagagtttctggccagcaatacttgagcaagaagagtaaaaaataatctctcttgtggggaatgaatagggtcttcatctctaggtatgctggatgttttctttctttccttccagattacgctcctctattctgtagcctgttctctgtcctgggagactgacctatatg

SEQ ID NO: 270375 - DNA, 238 bp, Homo sapiens
  misc_feature (169)..(169): n is a, c, g, or t
  misc_feature (176)..(176): n is a, c, g, or t
  misc_feature (198)..(198): n is a, c, g, or t
  misc_feature (213)..(213): n is a, c, g, or t
agaaaatgttaaggaatctgcaaaggaaaagctattagaaacaaaaaactaggcagagttgcaggatataagatgagtatataagtatcagttgtctgaaagcaaagcttttaagtgtatgtgttcaggttatattcttcttcttttctgttgcaccagctgagaagtngcaacgntgatcagctgggcaagggactntgaagactagagagntagctttactggaattgtatctgct

SEQ ID NO: 270376 - DNA, 437 bp, Homo sapiens
atctcctattctgtgcccactgtgaagcaagaagttattgagtggaggtatgcagaatcatgaatcatgattcatagaatcatctatatgaatcatttctttctctccttcccgttgctgaagataatagatgaaatcctgcaaattgaatggaagtatggtacatttccactgtattcatcttggcctctaagctgaattaacgtaaaagaacataaaacatctgagattgtgggatttgcatcatgttataaatgagctaagtgatttaaaaatatctctcctagatgcaaagaatggaacttgcacagatggaggcgttttggagtagtgtaactaaccatactttgtattacgtgaccagaactgctatttgagattctggaagccagtgatgcagtcttgcttgggtatttacctagggagggagggaggga

SEQ ID NO: 270377 - DNA, 458 bp, Homo sapiens
ctagaatcccactttgctctttttctaataagaaactatatttgtccattctcacaccactataaagaaataacctgagactgggtaatttataaagaaaagaggtttaattgactcacagttctgcatggctggggaggcctcaggaaacttacagtcatggtggatggcacctcttcacagggcagcaggagagagaatgagtgccaacaggggaaatgccagatgcctatgaaaccatcagatctcatgagaactcactcactatcatgagaacagcatgggggaaactgcccccaatattcaattacttctcactgggcccatcccataacacatggggattatgggaactataagatgagatttgggtggggacataaccaaaccatatcattctgccccctggcccctcccaaatctcatgtcctcacatttcaatgcataatcatgccttc

SEQ ID NO: 270378 - DNA, 364 bp, Homo sapiens
tgtgcattccacagatcagcacattgtctaagggaacagagggcttcttccagcaaacagggattaagtgtatgcacatctgcattgtccacagccaggtcttacccataagtgccacttactggtccagaggttaactggcacaacccaataggaaatatctaacacaagtgcacagcaccaggaaacgagataagcttcctgacatctccattaccacagcctcacaggaggcagtgaacctgttcaaatgcccaatacatcactactatgaccaggattcggaaaagccagcatacaaaggctgtctataaccaaggaacttatacacagtatttgccactgaaagcataaaaaaaaaaaa

SEQ ID NO: 270379 - DNA, 1810 bp, Homo sapiens
cggggcaggggcgctcccctgcgggccccggacgtggagacgctcgagtcaggctgacgcgcgcgccgggaacgaactcttgcgtgtgacttgggatgaccggatgggatgagtgatgccagtggcagtgggagagaggatgaggagaaacggaatgaggaagtgcgctcctgtgttcgcgcccgtgcctcctctcacacaggctccacagtgcttcacccagccctgcgcacgcatctgttttctacctcttaggactcacttctgcaataggtgtcttggggacacaaaggaatccccaaacccaggtgcctccacgtgtaaactccaaataaagctgctgaaacatcaacactccatacgggaaacaagggaaggccgcccccaaatttaattgttacagaatttttaaaatgtcgattacaaacacaccatcattctgaaaaaaagagaaagaagaaacggggaagaaagaaaaaagaaaaattcaggaaaacagagagaagaaagtactcacccaaatcccatcgactaatcgatttctgggacatgacgtgggaagccgtttatcctatgttaatggctagttactcttcagatgaacttaaaaatggacttgtccaagattgaccttgtgttggtaattattgaagctatgtaatacattaaagtattcctctaattttttaatatatttgaaaaagtccatgctaaaaggttttttttaaggattgatttgtcaaatccctttgcaaattcttttaagattttggtcagaaatgaactctattaatagattgagtgctgtttccggtcatacccggaagcaggagttcaagccgcagctggtagggattggcggctgctggccatctgagttttattaaaactgctcgccgcgaagccagtcttcagccagaatgtccagcagaaacaacaacaagctgcccagcaacctgactgcagttacagaatctgatgaagcgagacccaccaccctccatctaggagtttctacagcagtataatcactacacatccaatgtggagattttcaaattgcaaccatataaacccggtaaagaactagcagagctggtggtgtttatggcacagaacgtcctaaatatgtgcatctgaataataggagagaaagagagaaacttcagaagagcctttgctttgttatagattagttactgctacccagggtatctaagtaattttcctcaagtggtgaaagatcttctgtcctgtaatcatactgtattggatccagatcttcgaatgacattttgcaaagctttgatcttgctgagaaataagaatctcatcaatccatcaagcctgctagaactcttctttgaacttctctgttgccatgataagcttctgcaaaagacttcatacacatatatcgtgactgatatcaagaatataaatgcaaaacacaagaataaagtggatgtagtattgtaaaatttcatgtataccatgttgagagatagcaatgcaactgcagccaagatgtctttagatgttatgattgaactctacagaaggaacatctggaatgataccaaaactgtcaatgttatcacaactgcatgtttctcttaggtcaccaagatattagttgctgctttgacattctttcttggaaaagatgaagatgaaaaacaggccagtgactccgaatctgaggatgacggaccaacagcaagagacctgctagcacagtatgctacagggaacaaagttcccaaaacaagaaaaagttggaaaaggcaatgaaagtgctcaagaaaca

SEQ ID NO: 270380 - DNA, 1594 bp, Homo sapiens
catgtaatcagatttatcattcttacatggcttggggagacagtcacaccaagattactaatctataattcccttataactttttctaattttcttataggcttaactttacatttagagctctaatccatctgaaatttattttccatatgctgtaaattatttaacttcaattcttcccaattttgtagcccattgacctaataatattaattttaagccatcctttctacactgatttgaaattgcacctttgtcactctctgaatgaccacaaaaatgtgagtctgtttcagggctatctgcaatacctctgttagataactattaaagtttctcttcctttgtctttttcagatgttaatggctagttactcttcagatgaacttaaaaatggacttgtccaagattgaccttgtgttggtaattattgaagctatgtaatacattaaagtattcctctaattttttaatatatttgaaaaagtccatgctaaaaggttttttttaaggattgatttgtcaaatccctttgcaaattcttttaagattttggtcagaaatgaactctattaatagattgagtgctgtttccggtcatacccggaagcaggagttcaagccgcagctggtagggattggcggctgctggccatctgagttttattaaaactgctcgccgcgaagccagtcttcagccagaatgtccagcagaaacaacaacaagctgcccagcaacctgactgcagttacagaatctgatgaagcgagacccaccaccctccatctaggagtttctacagcagtataatcactacacatccaatgtggagattttcaaattgcaaccatataaacccggtaaagaactagcagagctggtggtgtttatggcacagaacgtcctaaatatgtgcatctgaataataggagagaaagagagaaacttcagaagagcctttgctttgttatagattagttactgctacccagggtatctaagtaattttcctcaagtggtgaaagatcttctgtcctgtaatcatactgtattggatccagatcttcgaatgacattttgcaaagctttgatcttgctgagaaataagaatctcatcaatccatcaagcctgctagaactcttctttgaacttctctgttgccatgataagcttctgcaaaagacttcatacacatatatcgtgactgatatcaagaatataaatgcaaaacacaagaataaagtggatgtagtattgtaaaatttcatgtataccatgttgagagatagcaatgcaactgcagccaagatgtctttagatgttatgattgaactctacagaaggaacatctggaatgataccaaaactgtcaatgttatcacaactgcatgtttctcttaggtcaccaagatattagttgctgctttgacattctttcttggaaaagatgaagatgaaaaacaggccagtgactccgaatctgaggatgacggaccaacagcaagagacctgctagcacagtatgctacagggaacaaagttcccaaaacaagaaaaagttggaaaaggcaatgaaagtgctcaagaaaca

SEQ ID NO: 270381 - DNA, 482 bp, Homo sapiens
caaactctactctgtattgtatctcccacggcacctttagtatctagatcaaccaagctggaaggaaaggaaagttttgaagtggaggtggagaaggaaatctggtgttaaggaaaacataggatcgtatcaagatggcagcctgaccatgtaatgtcatctctactttctgccttaaatgacacacacacacatacacacacacacacagacacacacacactttagcttataattgtgctagaagacaaagtataccattgtgtagataagggataattaagtatctctgaaaaagagaaggcaggtaggatgataagtttgatgtggaaaccatagtccaaaatgatcacagcaaaagctggggacattgtaaactatgtttgtaaaaggatctggcaatttggaaaataataatgttccagataaagtctaatacaaggaaagtagttttagcaatataaatatcgacaaaatacaaa

SEQ ID NO: 270382 - DNA, 806 bp, Homo sapiens
cccacactcagggtgagagggagattctgaagctttgtgtttcttgctagctagtcaaaggtgactaagatagaaaaataatacatgccaaaagaaatttgaggaacaaattcagccctgagacaggtcacggaaacagccctccagtcttcctcaagaaatgtagactgaatcagcatttacccacccctggaaaaacgcaggagctgcgcattcctgggatctcagcagggcttttgggaagagcagaactgggctggagtcacggtttctgggctgactctagattttccccggcttttgccacctgtgatggctggagagtatctgaagatgacagccagtgtccttagcttgtgaagattggatgatggccggggccctcagaccccttggcccctccttaactgcaggtcttcaaaagcccaacacctgttcgtcatttctgtggcttcccagggagtcttactcttctgcttcaagctgctgggtttgactctgagcagtttctgtgcagccacaaagattcttatgtgagacacactgctgcttcagagtgctccaacccatctcccctgattaaacactaaccagggctgccacagcaaagtggctcaaatgggtgacgtcaacaacagatttactttctcatagttctggaggcaggtgtctaggatcaaggtggtggcaaggctattccttctgttgcctccctccttgccttgtggatgaccgtcttctccgcgtctttccaagatctctcctctgtgcatgtcagtgtccttgcttcctcttcttatgaagac

SEQ ID NO: 270383 - DNA, 1129 bp, Homo sapiens
cccacactcagggtgagagggagattctgaagctttgtgtttcttgctagctagtcaaaggtgactaacccgtgtgacaggagctacaaatatgttccatgaggtcctgagttgaccagcttctttcaagacgtaggtcagggcagtcacatagaagtatcatggtgaccttggggatggtgacagtggctaaaagacgttgagagagacagtgcaagagaggaaagcatcttcaccctggaccctaatatggagacacctttgactagctagcaagaaagataaaacttaaaatctccctctcttctgtcgaatgtgggcggaacacagtgattctgaagctgcggagagtgggaagccatccccagggaaatgtaaacaccaagagcaggatagaaaaataatacatgccaaaagaaatttgaggaacaaattcagccctgagacaggtcacggaaacagccctccagtcttcctcaagaaatgtagactgaatcagcatttacccacccctggaaaaacgcaggagctgcgcattcctgggatctcagcagggcttttgggaagagcagaactgggctggagtcacggtttctgggctgactctagattttccccggcttttgccacctgtgatggctggagagtatctgaagatgacagccagtgtccttagcttgtgaagattggatgatggccggggccctcagaccccttggcccctccttaactgcaggtcttcaaaagcccaacacctgttcgtcatttctgtggcttcccagggagtcttactcttctgcttcaagctgctgggtttgactctgagcagtttctgtgcagccacaaagattcttatgtgagacacactgctgcttcagagtgctccaacccatctcccctgattaaacactaaccagggctgccacagcaaagtggctcaaatgggtgacgtcaacaacagatttactttctcatagttctggaggcaggtgtctaggatcaaggtggtggcaaggctattccttctgttgcctccctccttgccttgtggatgaccgtcttctccgcgtctttccaagatctctcctctgtgcatgtcagtgtccttgcttcctcttcttatgaagac

SEQ ID NO: 270384 - DNA, 515 bp, Homo sapiens
cccacactcagggtgagagggagattctgaagctttgtgtttcttgctagctagtcaaaggtgactaagatagaaaaataatacatgccaaaagaaatttgaggaacaaattcagccctgagacaggtcacggaaacagccctccagtcttcctcaagaaatgtagactgaatcagcatttacccacccctggaaaaacgcaggagctgcgcattcctgggatctcagcagggcttttgggaagagcagaactgggctggagtcacggtttctgggctgactctagattttccccggcttttgccacctgtgatggctggagagtatctgaagatgacagaccccctactcccagtgacacaagatggttggacccacggctgatttactgctttactcccattctttatggggccagctttaatgagcacccaagcagaaatgcctttgactcctgcactgtgaataactgttattaataaaagggcaagctgcttgccatggaaccttgcata

SEQ ID NO: 270385 - DNA, 559 bp, Homo sapiens
cccacactcagggtgagagggagattctgaagctttgtgtttcttgctagctagtcaaaggtgactaagatagaaaaataatacatgccaaaagaaatttgaggaacaaattcagccctgagacaggtcacggaaacagccctccagtcttcctcaagaaatgtagactgaatcagcatttacccacccctggaaaaacgcaggagctgcgcattcctgggatctcagcagggcttttgggaagagcagaactgggctggagtcacggtttctgggctgactctagattttccccggcttttgccacctgtgatggctggagagtatctgaagatgacagccagtgtccttagcttgtgaagattggatgatgggccatggagaggaactgggggtgatggctatggggcgctgggtttcttttgggttaataaacatgttctattattgattgcggtgaactttgcgaatgtgctaaaagccattgaattgtacactttcaatgggagaattgtatgtgatgtgaattatatcaataaaactgttaaataaagaaaaa

SEQ ID NO: 270386 - DNA, 431 bp, Homo sapiens
tgagtcactgcgcccggccatatatcttctatttttaaaatgtgcttatttctagtatatgtgctgctgaagcgagcagtaaaatgtgcttatttctattaatgaattctttattataaaagtggtacattattacaaaagtagtaaatgtttattaagattagaaacaaattctaattatacagaagagtacttactgagacccagcacagtggctcacgcctataatcccagcactttgggaggatgaggtggttggatcacttgagctcaggagttcaagaccagcctgggcaatatggcgaaaccccgtctctacaaaaaatacaaaaattagcctggcctggtggcgtctgcctgtagtcccagctacttgagaggctgaggtgggaagattgcttcagctttggagtttgaagctgcagtgagct

SEQ ID NO: 270387 - DNA, 3208 bp, Homo sapiens
  misc_feature (2055)..(2055): n is a, c, g, or t
ccacagcaggtgagtggaggcaggagccacgggtggggccaggccacacagcctgggaggcgcaggggctgggcagctgccagtgacccaagcccacacagagacttgcacagctgccccagccccaaattagggggatcccctggcccaccttctcttggctcagccactctgggaggtgggcacacaggggcaccgaagggagcaggcagccctggcatcccacagccgccaggagaaaaacttaggcctccccaagacctggcacagagcaggccggccctggcccccaagcagaggaggctgcacctccctcgcgtctgcgcctgcctcaacgcgggttaaactttgaccaaggaaatgattgctaaactcgattccataagtgtcaccggtcacactttaattccagtctaaaattaaagtcttcagtctccacattccctactttccaaattcagctttcccgggaggtctggagcagctgcctctctggggagatgctggaggtctcggaatcacctcacacggcctcagggcccagttggagccaccccaagtgacaccagcaggcagatgaccagagagcctgagcctccggccccgagtctgtgaagcctagccgctgggctggagaagccactgtgggcaccaccgtgggggaaacaggcccgttgccctggcctctttgccctgggccagcctttgtgaagtgggcccctcttctgggccccttgagtaggttccatggcattttctgaactcctggacctcgtgggtggcctgggcaggttccaggttctccagacgatggctctgatggtctccatcatgtggctgtgtacccagagcatgctggagaacttctcggccgccgtgcccagccaccgctgctgggcacccctcctggacaacagcacggctcaggccagcatcctagggagcttgagtcctgaggccctcctggctatttccatcccgccgggccccaaccagaggccccatcagtgccgccgcttccgccagccacagtggcagctcttggaccccaatgccacggccaccagctggagcgaggccgacacggagccgtgtgtggatggctgggtctatgaccgcagcatcttcacctccacaatcgtggccaagtggaacctcgtgtgtgactctcacgctctgaagcccatggccagtccatctacctggctgggattctggtgggagctgctgcgtgcggccctgcctcagacaggtttgggcgcaggctggtgctaacctggagctaccttcagatggctgtgatgggtacggcagctgccttcgcccctgccttccccgtgtactgcctgttccgcttcctgttggcctttgccgtggcaggcgtcatgatgaacacgggcactctcctgatggagtggacggcggcacgggcccgacccttggtgatgaccttgaactctctgggcttcagcttcggccatggcctgacagctgcagtggcctacggtgtgcgggactggacactgctgcagctggtggtctcggtccccttcttcctctgctttttgtactcctggtggctggcagagtcggcacgatggctcctcaccacaggcaggctggattggggcctgcaggagctgtggagggtggctgccatcaacggaaagggggcagtgcaggacaccctgacccctgaggtcttgctttcagccatgcgggaggagctgagcatgggccagcctcctgccagcctgggcaccctgctccgcatgcccggactgcgcttccggacctgtatctccacgttgtgctggttcgcctttggcttcaccttcttcggcctggccctggacctgcaggccctgggcagcaacatcttcctgctccaaatgttcattggtgtcgtggacatcccagccaagatgggcgccctgctgctgctgagccacctgggccgccgccccacgctggccgcatccctgttgctggcggggctctgcattctggccaacacgctggtgccccacgaaatgggggctctgcgctcagccntggccgtgctggggctgggcggggtgggggctgccttcacctgcatcaccatctacagcagcgagctcttccccactgtgctcaggatgacggcagtgggcttgggccagatggcagcccgtggaggagccatcctggggcctctggtccggctgctgggtgtccatggcccctggctgcccttgctggtgtatgggacggtgccagtgctgagtggcctggccgcactgcttctgcccgagacccagagcttgccgctgcccgacaccatccaagatgtgcagaaccaggcagtaaagaaggcaacacatggcacgctggggaactctgtcctaaaatccacacagttttagcctcctggggaacctgcgatgggacggtcagaggaagagacttcttctgttctctggagaaggcaggaggaaagcaaagacctccatttccagaggcccagaggctgccctctgaggtccccactctcccccagggctgcccctccaggtgagccctgcccctctcacagtccaaggggcccccttcaatactgaaggggaaaaggacagtttgattggcaggaggtgacccagtgcaccatcaccctgccctgccctcgtggcttcggagagcagaggggtcaggcccagggaacgagctggccttgccaaccctctgcttgactccgcactgccacttgtccccccacacccgtccacctgcccagagctcagagctaaccaccatccatggtcaagacctctcctagctccacacaagcagtagagtctcagctccacagctttacccagaagccctgtaagcctggcccctggcccctccccatgtccctccaggcctcagccacctgcccaccacatcctctgcctgctgtccccttcccaccctcatccctgaccgactccacttaacccccaaacccagccccccttccaggggtccagggccagcctgagatgcccgtgaaactcctacccacagttacagccacaagcctgcctcctcccaccctgccagcctatgagttcccagagggttggggcagtcccatgaccccatgtcccagctccccacacagcgctgggccagagaggcattggtgcgagggattgaataaagaaacaaatgaatggctgcc

SEQ ID NO: 270388 - DNA, 454 bp, Homo sapiens
tataccatcttctctgctcttgtatgtttcaaattttccacaactaacaagatttaaaacaatcaatctagaggtgaacaaatgcatctataaggagagcagacccatcacagaaaatacataacacacaaggccagtaagtatttgaaaagaggcacaacctccagagtaactaaagaaatgcaaatgcaattggggaaacattttgcacctagtgcgtgacagaggttaaaacctctgatgatgcccagggctcacctggggagcaggtgctcacatcttgtgatggtgcctgtggagagacacaacctctactatcattttattttagtgttttctttttattgagacggagtcttgctcttgttgcccaggctggagtgcaatggcgtgatcttggctcactgcaacctctacttcccgggttcaagcgattctcctgcctcagcctcct

SEQ ID NO: 270389 - DNA, 715 bp, Homo sapiens
gcctaggtgacagagcaagactctgtttctaaaaggataaatacatacataataaaataaagttaaattaaaaagagacatataaggaagtaaaactgaggccaagcacagtggctcacgcctgtaatcccaacactttgcaaggctgaggagagaatcactcgagcctaggagttcaagaccagtctgggcaacaaagtgagaccctgtctctacaaaaaattttacaattagctgggcacggtggtgcattcctgtaactgcagctacttgggaggctgaggtaagaggatcacttgagcccaggaagtcgaggctgcagtgagctatgatcatgccactgcactcaagcctgggcgacagagcaagactctgtctcaaaaaacaggtaaagctgagaaaagaggaggcctgttctttcactgggtggttgtaagcagccatgcagaatgcccaaggttttccaaagagtttcttctttctgaaaggatctgagtccccaaaactttggggactagtctcatggttgaaggcatttttcatgagggcataatccttttataaaaaaattatttcataaaacctgcaatttaaaaaatctaaagtgtaagggcagcaaaagttaacattaattaaaacaatatgttgggaatatgggtaagctatatttcatgtttttctttgcattgtgaaatatttcctatgtgtaaaaaag

SEQ ID NO: 270390 - DNA, 720 bp, Homo sapiens
  misc_feature (7)..(7): n is a, c, g, or t
  misc_feature (18)..(18): n is a, c, g, or t
  misc_feature (38)..(38): n is a, c, g, or t
  misc_feature (49)..(49): n is a, c, g, or t
  misc_feature (56)..(56): n is a, c, g, or t
  misc_feature (77)..(77): n is a, c, g, or t
  misc_feature (178)..(178): n is a, c, g, or t
  misc_feature (188)..(188): n is a, c, g, or t
aggccancggccacatgntactcccaccatctgggctntggactcttcnttacatnttaaactctgcttgacctgtncatgcatgtaagcatgcatggaaacagtgggtgggcgtcttgatacatcatctgttgttccgttcaaaatccagagcctttctacacttcagttgatgttntttcaaaatnccgatgtttctttctgactcatgaagctgctgtctttgaatctgacattagagggaagcgaaactttacaatgtgtggggcagcctggtgtggtggctcaggtctgtaatccagcaccttgggaggccaaggatggcggatcactcgagccctggagtccgagaccagcctgggcgacagagcaagactctgtctcaaaaaacaggtaaagctgagaaaagaggaggcctgttctttcactgggtggttgtaagcagccatgcagaatgcccaaggttttccaaagagtttcttctttctgaaaggatctgagtccccaaaactttggggactagtctcatggttgaaggcatttttcatgagggcataatccttttataaaaaaattatttcataaaacctgcaatttaaaaaatctaaagtgtaagggcagcaaaagttaacattaattaaaacaatatgttgggaatatgggtaagctatatttcatgtttttctttgcattgtgaaatatttcctatgtgtaaaaaag

SEQ ID NO: 270391 - DNA, 419 bp, Homo sapiens
agcaaagcatgtgtttttaatctgttgtgggtatcgtattatgctaataagcaacaatgtctaaaactcatcccaatgcctataacaccgccatctacataacatacttgtcctttactccaatgaagcttaaactagactcgaactcagaccatttccccctcctggcacacagaaatatacgagggggaatccaagaaatcagatatgttaagtgccggtatcttcttccaaagtagggtcaaattcgtgtttgcccgcaaatgtcaccgtcctagtaagtctgcaaattctcactagcgctggagtacaaagaggcctgaccacggaaacacctgtcctagcaccaggaagacagtgggaaatataaccctccctgggtctgagcccgccccaaagactcagcagcagcgatggtg

SEQ ID NO: 270392 - DNA, 386 bp, Homo sapiens
cactgattcctcatctcccttccacctatacctgtggatatgactctggttgagggaaagggctttctgaaaacactcttgtgctttgatgttgtcttcagttaggaggcagaaggcaccatagtccaaccagtgatccagattctggggctcacggaccaatctctaagcatcaggagagccaaggttattgtgatactatgtcctatttttatgcatacgacatcacatggtaaacactgtaaatactgtaagttctatgaaagcacagattgtgacttcttttttgcttatcactgaatctcaaatgcctagtgcaatcactgttctggcctttagtaggtggttgaaaaaagtattaatataattaaaaatttgaatcatca

SEQ ID NO: 270393 - DNA, 480 bp, Homo sapiens
cagtggcctcatttttcctttggacaatgtggtacttaatagagtaaaatcttgatcctacttagttattatgtttcatgtttgaaaataccattttagatatattgggctgaaaggagcatcttccctcataaaatcctacatatgtaaggaaggaaaaatactgtgacttgctcaaaatcacccaggaagactgggtccagcactttttccaccttacctccacttattcttgtgtcgctattgaccatctgggcctgttaggagagtgtcacaatcatggcttcagtgcctgcacctcatttgaaaggagatgttgaaaatcatcagagtagccattcattgccacatgaaacccctccctttacccattctccattcattcaactcttcttcattaagaacgttctgtattccaggcactgggctaggcactgaggattgaatgataaacaagatggtcaagtttcctgccctcct

SEQ ID NO: 270394 - DNA, 251 bp, Homo sapiens
catgtttgttacataggtgtaaacgtgccatggtggtgtgctgcacccatcaacccatcatctaagttttcaaccagcattcaagaccatttgtgttgaattctggttcctgctggtaccatgtcctgggatatttcttcccttaggggcaaagagttttctagacagactgagtcagaatcacttagtctttatctcaagagcagccttgtcacccacagtagaaggcagaattactgtggagtctagca

SEQ ID NO: 270395 - DNA, 164 bp, Homo sapiens
gtcatgcataggcgtgtggccatagaaacagagttagcgtagtttgcttttgggatcatactgtacgcatttttctgtagcttgcttgttttccttgggaataagtgagaattctttccgcatcagcacaaatagatcaatgtctttcttgacaactaccacac

SEQ ID NO: 270396 - DNA, 428 bp, Homo sapiens
atgcaggcttgaaactgaaggagccaagtcagccccctaaggaaggttataattgctaaaggaaatactgaggagggaggtggatggatgcgctatggctgagagattgtgtgtcttgggaccttggcaactcaaacttctccacaaaagcagagaaggaacaaggagaaagtcagtggcagctggaccccaaggccaccagcaccccagcagtgactgtgtctaaagcaaggtcatccacgtagatgactgcagtgagaatggatactcagctgcagagcgagaatgagctctcattattagcggctgttttaaaatcatttaacaatttgggctaagggctgttgagaatataaaacagtgtgagccaaggaacttagcctctggttagaaaggtaaaactaattcataaatacacattgaatgcg

SEQ ID NO: 270397 - DNA, 377 bp, Homo sapiens
tttttttttagaaagtcttgctctgtcacccaggctggagtgcagtggtgcaatctcggctcacagcaacctccacctcctgggttcaaacgattctcctgtctcagcctcccaagtagctgggactacaggcacatgccaccatacccagctaatttttgtattttcagtagagacagggttccaccatgttggccaggctgatcttgaactcctgacctcaagtgatctgcctgcctcagacttccaaagtgctgggattacggggacatgacccaggcccaaagtgatgtctttttgtatgttgatgattaactgatggctggcagctgctaggtggctttaggataagagcaaggcagaattagaggattgtg

SEQ ID NO: 270398 - DNA, 990 bp, Homo sapiens
tatttggtatgagattcgctcaatggtgtgtatgtgtgtgtgtgtgtgtgtatttgtgtgttagaattcatcagacaagaaaattaatttctattttagatattttacaaagaatcacttattcctaggattgttccccaagacatctgaaatcttaatttgcatatctatgtggcaaagctttaaatttaagttatccagtagtttaacataaaatcatactgaaacactcattaacacatttgagtatactatgtaagttcagaatataaattacttagtactgagccatgctgcattaagttaatctttatgttgttagattatttttatgttaaggaaacattatcccagattcggtttttctagatacatagaaagggacatactggatgtttttattatgttgaatgaagctgtgcattgaagctattatacttaagaaacatttttatgacagtttagctttttcagctgctttcattatgttgtgttttttagaagtctattcagggtatttttaatgtcttaactaacaatatgatttttgagctatgtttctgtcgtgttgtttctcatcactatatggatagaattagttatatagtaacaatgcctctgtgctcctttaccaccacaaaatacttattttattttaattcttatttattagttgaattatttattacattaatttaattcttattttctttgatgttttatgaagcagagtttattttcataattgtgtctcataattctgtacaataattgttggaggagtatgtttagtgaaaacaaattaaaggtggaagagatactattcttcctcagcattggtaataatgaagctcaatttcaagtcatatacttttttgttatttgggtattgaatatcagtttttgtgaaactaatattgcaacctatacagttgaagaaagagatatttctgatgtaatcttataaatcagggtgtaggaaaataaaaa

SEQ ID NO: 270399 - DNA, 1554 bp, Homo sapiens
gggaaagaaacctggaaaggtagggaggtatggatatggacaagctatgccaaggagcagggctttgtcatggagagtgactaggtgcttttacataggaaagtcacctgataatattaaaacctgtgaaatatcactctggtggaagtgtgaatgaatttgaaaggggtgtaacactgttctactttgtttactcctcagtacccttggctgtgtacatttgagtaaagagagcactataaaatcaaaaaccaatgaaatggtttccagaacacagaactattaagcttaagaaaaggacagaaggaactgaagagagaggaactgttttggagcatcacacttccacctcagaagaaataaggaaggaaggaggagggtgttcccacggctcttcaaccaggccggctcttcagcctacatccccatctcatcaagtaaaagggatttttcaactggaccaaccagatggtttaacagtgcactcccacaccattcaactacgcaagggagatacacttaacatatgcagtcgtataacacctactaacattttcaaacattaaacctttaaaaaagagttctaaagaaatagaagcttgaagtatcatctctcaagtatatagacactacttcatggtgtggtaatatatgcatatagaagctagtaaacacctccaggagatgcaaaaggaattagaactgccacaaggtgcaagcaaaaccttgaggtaatcaatctgcatcccattttggatgagaatatttgcaactttgaaggttattttaaggacagcagcagaattatggcagctcttcacggaaaaaaaaatggcaacaataaaatcagcaactcctgccaaataaatgggcataaaaaagaaatcatagactgctggcaatggtggggaaaaagttataaaaattgtctctgcaccatcttccttttgtcctctaaaatattcacattagcaaaagtatataacagctgatgaagaaatactgataatttgtctttttctgtttttcctcttctaatccttcacccatctgagctaaagtctagacctaaggaggctactaattcagggatcgagtaatctgccaagcaagagtttattcaagcacagtttgaaataaaggtttcaaatgcatagcctgtcgatactttggaaggattctcatcataacgagtatgcaatttgctataaagaagaatgcccattacggactaaatgtttatgtcctcctaaaattcatatgttgaaggcctaactctcaatgtgatgattatgtggagatggtgcctttgggaggtaactgggcttagatgtgggcgtgagggtggggcctcatggtgaaatttgtgcccttgtaagaaaaacacaccacaggttttcattcttcctctgccacatgaggccacagtaagaatgtgaccatctgctagccaggaggaaagtcctcactggaacccgcccataataacactccagtctggggcttttcagcctccagaaccatgagaaataaatttctagtgtttaagtcacc

SEQ ID NO: 270400 - DNA, 435 bp, Homo sapiens
caaacgtggtaccatgcctcttttctatgcctatgatggacatttgttaattgatcatatctgtgtgtgaaacagagccatgctgagttagcaatatctgccatgggtacaagggtttatggtagaacagatggcaggcagctgacattatggttcaaacctgtcagcagaacctaagtgtgaaagtggcataccatgatggtttgagtcctttaccaggattcctttgtccaagtttctttagcagtccccagggaatgcttgcatgttccaggaatctgtgtggttgatgcataccgtcttcatcactcatccagctctgagtcttatcaatccccactcaccactaccactacatagcaggccatttcctaccacttctaacttttttaaaaaattaaataagctttaaaaatgttatttttaaaatgcata

SEQ ID NO: 270401 - DNA, 511 bp, Homo sapiens
agatccaatccatgaaaaagggaactttctggaccaggatctctgaggtcctgagacactgggtttaagaaatgtatctgtcctgtgaccttggttggggagatccagcccctctctcttctggcactccagctttggtgcatttaatagaaagaaaccttttcaggactatgaaaggcagcattctccagctcctccctagaccctcctttggacctgtgagatctgaagagtatgccatctgtttccattcattttgtgaccatgtggggaaggattgttgcccatatttggccacctcaccttctctctccaggctgcccaaggctttttttcccatgcaatgagcctaccacctccaactcatctcctgttgcctgcagtttcctaagcctgggcaactcagccaaatccaaggcagaagtaaagtaggaagactgatgttgtcgtgaagtccaagttgcattctgctattcatattactcaaaataaaactgattacttaatttga

SEQ ID NO: 270402 - DNA, 424 bp, Homo sapiens
  misc_feature (35)..(35): n is a, c, g, or t
aattcgcggccgcgtcgacacggcgagaagacganagaagggggtggccagcacaaaagtattgttgggctacagtgaaaactaggtcggggcccaaacccttttctgcaaagagcccctccaaagagtagagtgccaacaagccactaatttggctgtttgacattgatactggtttctgacaggtttctgacttactgatggcacattgagtcatttaagattctgaaatctttttccattgctgtctgaacctttcaatttggaatctctgagatgtctttgactctttttccttatttctcatatctatcactcagttgctaaaaagctttatattctgactatagccaactttttcttgcccataaatagcactgttagttagatgtttggtcacctctcatctggctgttgcagtacc

SEQ ID NO: 270403 - DNA, 411 bp, Homo sapiens
aattcaaaaggtcactttttactgattaagattgctttagcctacttatactaaaaatgtagcatcagcctcaatggacagcttggtactccagcctaggtgacaaagtaagaccctgtctgaaaacaaacaaacaaaacaaaacaaaaacagtacaagttctgaggccatatctcagacctattgagtcagaacctctgatatggaggcttatgaatctgtattttaaagaactctctgggcattttctcaagtttaaaaggcattgctccggatccttgtcatccctgtggcttttcctaaaacactggtaaatctaaggggctgtgggtagggagtaggggtggggaagggagtgtggaaggtcactggtaagggaaaggccccagatatcatcctctgggaaaaaaa

SEQ ID NO: 270404 - DNA, 432 bp, Homo sapiens
gactccatctcaaaaaaaaaaaaaagaatatatcatccacctcttcagggaagttacattctaataaaccctatttacacaaaactacatgtaactataggattttaaaatgctgtaaataggcaagtcagctcaggatccaccaagccccccgccccgcccccttccatttttaggaaggaggcaaagaaatgatagggctcagagcaaaacccatgggtcctgggctggtcccatatcgtcttttatcatatgataaagcccctcaacaaatcactgggagatctgagtgaggtttcagtttaaataggcattgccaaaccataatcacaacagcagggactgtggctgcttggtaacccccgtaacccttgtgcctaagacaatgcttgacatatagcaggatgtgaaacttgttcaatagttgaaagg

SEQ ID NO: 270405 - DNA, 278 bp, Homo sapiens
gtcccatttataatttggtatcttattgccactaagagtctgttctgttcatcttatgatgtctattttaacaataatgctgatcagttgttgtgtctacatcataaaagagagggtatatagtgaagcctgtctaacctaccatcctgacatggccaggaacttggttttaaggtttttctggagtcccgttggctacctgggcattcatttagttggtgggatagggggtggttaggattttattttaaatttatattataattggcaaataaaaa

SEQ ID NO: 270406 - DNA, 643 bp, Homo sapiens
tccacttagggtgaaaggaggaagaaaaaaagcattgagagaaagttgtaagaaggtaagaacaatcaatataatttgcactaccgagatttcaaaggaaagatttctgaattggttaagagaagtcctttaaagtgccccaaagaaagtttgatgtttaaatgcttttaaaaaatattatttaaaaaaccctgagtgtattttattaagatatcagttgtgcaagaaatattaggtattttacttttattaccctgtgtgttacaagtggtactaaattttcctatacttcttcccctaaatctaatatcaaggtcgggaagtaaattcagtcagaggctccctagagtctgaaactaaaggaaaaacactttagtcctgaggaagttctcattataacctctagatttaagtcagtggataaagtaatatactaggggtttccataaaattcactcattccagtagttcaagtgaacatttgtaatgacccactgtaaaagcatgatctcataaacataagatcttatgaagacgacatggggcgttttccactccatcttaaaatagctcatatgataatgaattagtgcctaaaatgaaggacatttgaaatgagttttaattacaaaaggcacagctg

SEQ ID NO: 270407 - DNA, 521 bp, Homo sapiens
actttacatacgtaaaatcctaagtagtccaagcaatcaaaagtaacattttccagtgacatctccataaaagccactttcttctgaacaaatacaaactttccagagatgtctaagccacagaactgcacaggcagatgtgaaatgtaagccctatagagaaacagagaaacgaaacaaaatctgcatttgaacattggagttttatcacaattgcaatacatctaacagtcttctttgttttagttactatactttttcttaccatcatgaagaaaagatatcacagaaaatgatgttaaagacaggcctaacatacattttctgagctttctggtgaaagattatgttttcaaaaaacttctccaagggaaactctttgaagtgtttttactgccatttgatcagttaaaattttgttatttgcattattttgaaatgtctttgtactctaaaggctggtaaaagaatgcataattgtggaaaacaatttaataaataagagaaaactaacaacaaca

SEQ ID NO: 270408 - DNA, 470 bp, Homo sapiens
tagagacaggttctcactttgtgtggtatgtttgtgtgtgtgctgtgtttttaaaaagtggaatattatacagcctgtgggccaaatgcatccgaagtctgtttttacactgcccacaagaatggttttaatttttaagatgtttaaaaataaagaacacgtgacagagaccatatgtggcctgcagtgcctaaaatatttacttgctggccctttacagaaaaaatctgctaagtcctgatctgcagctacacgccaacaatgtggatgagtcctagcaatgtaatcgagttgcgctgtccaagacagtagccatcagccacatgtggcttattaaattagtgtaaattaaatgaaaatttcaattcctcatttgcactagctacaataaagtcaaaacagctaaaaccaaaaggattttttttttagagaagtgcacacagatgaaatgaaattatatagaaaggaaa

SEQ ID NO: 270409 - DNA, 452 bp, Homo sapiens
gtaggggggtgcttttgctttcctcactgaagaatcctttaagctctctcactcatggactggcctcttttcatatgtaattctaacaagcttggttatctattttctaaactcagcttgagaagaggatgaagaggagagtctgccagaggcaggagcaccattaatagcaagaagtgacaagagagatttaaaaagctataaaaagcaaacataattctggggctattttaagaaaaggaaaacaaccctatgtacttccttggtccctgagggtagtacaatgtttattctataaggatgattttgagtcataaaaattaatattcagcattctctgtttaagggattgaaacagtgtataccatttaataaaagatacccataaagtggttaaaacgtttaaaaccatgatatcactacatgcctattagaatggctaaaagagaaaa

SEQ ID NO: 270410 - DNA, 1109 bp, Homo sapiens
acagccttgagtttccctagtcttgactggggaatggtcttcgcctctctggaaaaggccacctccccgattgaatattccaccatgggaagtggtgaaatggcgccctgagaccccgggggagcatccttccccatcccggcccgtggaaccagcaggtggcagatgtggcagcagagcctcctcaccttgtactcaaggccctcttacttgtgtagagctcagcttcctggtctatggacttactttgccttttctgtatgaaggccatcctcgatgaactgtaaagccaatcagtgttgaatgagtgaggaaaaagcggaatgaaaacagtaaataaggagttgccttctctgtattaatattagaatctctgcctcagccgtagagaaaatcattgacgtgcttgctagaagcagctctgaaagacgtttttgtaaaacgctttttatcccgtcaaaggctcagctcatttggggctaaggcttcctgcatccaccatgggcttgaacgtgaggcttggaaaaagcggagacaacgttggaaagaatgaggcctgagaacgagtcagtgccgcctcatccgcgtcaccacatccctgtaggatgcagtgtcttcattcgtaaaacaagggtgttggactactgtatcttgagggtcccttggcgctgaatttccatctttgagagacaatggcactcttacctttgagcttttgggagaaatccctgtgaatgtgccctggggtcttgcatgcctctcagcattctccttgggaggtcacaggcgccggtctcatcaggtgagaaggacaaaagcagccctggccgccgtcagctgagagctggcccgtgctactcagccagggcgttgaacacgccaggggatgccacaatcagatgcgcgtgctcagtgacccaaggagctgaggccaaagggagatcttccgcagtcaaagctgagtgcatatcagaacactgcacacagcacagaaatgaccagctttccccctcccagctaacagggcttgtctgctccaaatttagccctgctccactcttgctacctactagataaaaattattaaaatatccaactattaaactacc

SEQ ID NO: 270411 - DNA, 495 bp, Homo sapiens
ctcccaaagtactgggattatagaaatgcactttataatgtttatttatgaacgtattccttctctctagctgtgcttttgtatttgttaaccaacccctggcttttctccctcctcactaccctttccaggctctagtagccactattctactctctgctcctatgagatcaactctgttagcttccacacatgagtgagaacatgcagtatttatgtttctgtgcctagcttatttcacttaaaacaatgtcctccaagctcatccacattgccatgaatgtcagaatcaatctttttaattttatcagtaaatagtatttaattgtgtaagtatacagcacattttctttatccattcatctgttgatggacacttaggttgattccatatcttagcgattgtgaatagtgctgcaataaacttatttattttgctgttgttgttgttgttgagcctgggcgacagaccatagactctgtctcaaaaaaaaa

SEQ ID NO: 270412 - DNA, 418 bp, Homo sapiens
ttcagagtttcttcaatacctgtacagtagtgtggtcattggaattacatggcattggcctggtcaaatgcagaagaccgatattgagacccttcaagacacagctgctataggggaaactgagctcatataaccaggagaaggggaaagatgggtttctgaaaaaaggcttcaagctacatagaatcctctcaggatgctgagaaactcccagggcaggtagttatcagcctggtgagcaagtgcaagaaataactggattatgagaggcatgcctcacaagtggccccttcaatatagaagcatcagtgctcccagatgctggacaatggacggcagacaaaggctgcagctgagtcccccaactggcagctgcccttgggtgaagaagcctgcctcatgcaaggtcacacccctt

SEQ ID NO: 270413 - DNA, 332 bp, Homo sapiens
cacatagtttgcaaaatattgcattagatgaagcctattaattgtgttggtcaaatctcaactttattactgatgtctgactcctgactgatttttatcaattattgaggtgtgttaacatcacattaagacataactatcacataagacggattctggagccagagtgactaagcttaactcccatctctaccacttactacacaggtaaccctgggaaatttacctaacctctcttgcctccatttccccacctgtaaattaaggataacagaaacttaactactagaattgttacaattaaatgagttaaaacatgtaaagcacttaaa

SEQ ID NO: 270414 - DNA, 226 bp, Homo sapiens
  misc_feature (17)..(17): n is a, c, g, or t
ggcggacgggggcggantcacgaggtcaggagatcgagaccatcccggctcggcctcccaaagtgactatgctaattttttataatgaacatccatttgttgtataatttgaaatgctgtatcataatcttatgtgtagaacactgtttaacttttatctgacacagaataatggtagaaataagagattaagcttccctgccaaagtgatacaacattataatca

SEQ ID NO: 270415 - DNA, 341 bp, Homo sapiens
ctggcaaggttcaaaggccttagggcaagaaatgttagtagagtcctggaagacgatgtggggaacgggtagcggccaccggatggtgatcgttcttctacaagaccttgacatggatggggagaaacagagaagaaccttccaagtttgtcccactggacatgcccaccacactttaccagccctttctagaaggcctgtgcgtaacacatgaaaaagctccgctcgacctttccctgaccttttaaaagaaaacatttgctgcatctaatccgcctagatataaggaggttcccaaatgtatgacagagtcagaaaattacatgtcttgtaagttacca

SEQ ID NO: 270416 - DNA, 267 bp, Homo sapiens
ggaaaattagtcaagttttcctatttaatagaagcttctagaagaaaagtaattgcccaattaatgtttgtttaataatatttttcagtgctgatgatgtactaggtactgttctgggtactcttatgcttgaaaaggtcactgtgtttgtttacaatatagtctcctatccatgaggcccagcactgggcatacatttattctatcttttatgtggtttgtatataaccatagaaaccttaagaataaaaaaaaactcttttaaaa

SEQ ID NO: 270417 - DNA, 306 bp, Homo sapiens
tcctatatgctgggggagaagaaaaaatgctggtgtctttgaacacctctgccagttcttctgtgctcctaaagcctacggctttggaaagaaggctacgtttgtataggcacacttgaatttcaatcacttgcaaatcattttcaagatttttgttttatctgccctgagcgtctattattatttacctgtttttaaaattaacttattgtcctaaacaataacatttgcaagatcagatgtactgttttagctacattttaaacggtgacattaaaataaatacagaaagattcaaatttaaaa

SEQ ID NO: 270418 - DNA, 601 bp, Homo sapiens
gtaggtaacacactgacagccgcatccctgtaggaacgctcaataaaacggctccatatttacttctctggtcacggttcatactccacgattttaacaaaggagtcgaggaagctagatactgtaagtggaacggtgtgtctctggaggtaagcaggcttgctgatttcttgttttataattctttttttaattacaatgtaactactaagagcttcagttcccactggagtggtgcacacatctcattactactaaaaccacaggaatgttccagggaaacagactatcatcactgagcgaggtggaatccagccaaaaccccaggctaacatccagatgcctgcagatcagctaaaatccttttaaaggacttggaatctccagacgattgtgaaataggtaggtttgagggatgagggaggaggaatacctgttgaacatttaaactgtgaagtttgccacctattttcccctttattgaaggtttcaggaggtagaatttaaaaaaacaaaactctgggctgcaagggtcagagatggtcattacggtatcttaatagagtaatttcttttttttgacggaggtttgctcttgttg

SEQ ID NO: 270419 - DNA, 419 bp, Homo sapiens
gggtttcaccatgttggccaggctggtcttgaactcctgacctcaggtgatccacctgcctcggcctcccaaagtgctgggattacaggcgtgagccaccatgcctggccaaaagatgtcttattatataatagacaagttctgctctttactattctttttaaaagttgatttagctttcaaaaacgtttattaattctcgaaataaattttaaagtaagtttattaagcgcctcaaaaaaatccaactaaaatgggattatcatgacacttaatctattgattaatctggaaaattttaacaacttaataagttatcccatccaagactgtggaatgtctttccatttattaaaatcatctcctatcatagattattttaataaaattttaaagttttaaaaatttaagatcttgtg

SEQ ID NO: 270420 - DNA, 1793 bp, Homo sapiens
tctgtattgcctgaagtgtaaatcagaggtcaacaattagattgcaaatcatgaaaagcataacttctaattgtttagtctttttagggaaacaagcccagaaaaaaagtaagattctcattcattggagataagatttctatttatcaaagatactacacaagagttagatagcaagtagttcaaatgtcttttaaaggtatctgacatctttaaagctctgtaatttttaaattctaaattttgttacagctaatttttaaaaattaattgctaagtcatggtcaagtatttctgatgacttacatgctgtctttggtatattttaagtttctaaaccaaaactactatttgactctattacaccctgttttagaaaaacatttgagttatacaacttactaaaatgtattttagcggtgatgttttggagcactggtaatatagtgtttaacttattttctattttttatccctctatattcgtgaaattacttctatttgaaaagttttccgccagtgataaaaaaaggctgagcactatctgtaaaaatttttaaggtgtccactaggtggagatattgtgctacatttccaagtgttgtagttaaacttttattagtctgaattaaactcttttatagtgttttattgttttaaaccacaaagatttataatcatttatatctatttatctaatgttattcaaatgttttctgcattgtatgaagctaagataaatgtaaaaaaaacaaacaaaaaaaacctcactttgtgtttggtaatcattagacgatttaacctaatatatcttcccatatgatatgatctttgcatatggcatacttcattcatatgacatagttagaatcttttcccacaaacaatgagtgatgatatctcatttgaaaactcgtgtaacattgtatcagccactgttataaagtgatttacccatgttagtctcataacaactctatgagatcagtaccgtacacatggggaaacttagtatagagaggtgaagtattttttccaagattacaaaataactgtctgagctgggattcgtaaccaggcagcctgactccaaaatcaatattcttaactctattgttatgatggagaaaggcatgaagtctaccttcaaattcatggcattttagaaggaaaaattgtcgcaagtaatgtgattatacttcctagttttataggtcagaaaaatgaggtccacactaattttgcctcttccacagggagatagattctcatctaccattgtgtcttttgtttctgtttttgtcatgatacctcaaattgatatatgttgtaattatgaatttaaggaagtaaaaaaataactcagggctggagccttcagccatattaacatacattgacataaagacctttgttttaatatgaatgattccagttaacaaatggagaaatagttgtttgaaaattaatatttagcttctcaaaagagactcctgtttggaagcaaattgttggtttaacaggacatactttagatatttgaaaaattctctgtggaatcacaatctcttatttttaagaatgtaggaatatgtgttctatatgcttttaagttatgtattacatactattctctaaaatagaaatgtttatttggcttctaaaagtcatttgtgagttgatgttatttaaaactgcttttcagtcaacttattctttataaaaaagtttgttcaaatagcatgtttttattttgtttctaaataaattcatgtttgataatattttataat

SEQ ID NO: 270421 - DNA, 641 bp, Homo sapiens
cagaggatcccaaagattttgagcatcacccaagacagtagttgttacaaaaggaatgtttgaatcgccaataagcatgtgtaaaagtgtttaaaatcattagttaacaaggaaatgcaaatttaagataccatttggtgcccaataaaatgagagaattgaatatattcacagaaagatatatgtgaatgtttatgacagttttattcatagttgccaaatgtccattagcacgagaacagacaaatggtgataatataatgaaatactattcagcaataaaaaggaacacaatttttggggtaaatctgaaaaacatattaagtaacagaaatcagacataaaagaagacagtttgttggactgttcatagagcctgtatagaccatttacgtgaagtttaagaacaagcaccactaatcttcagtgatggagatcagaacatagttgttgcatgtggatgtatgtgtatgggtatgtcagagtggggagaaattgactggttagggacatgaaacattttgggggtgattgaaagtgttcagtatctcttgaacccaggaggtggaggttacagtgagccaagatcacacaattgcactccagcctgggtgacaagagtaaaactccatctcaaaaaa

SEQ ID NO: 270422 - DNA, 407 bp, Homo sapiens
gacccctttgaggtcatgggatcacggagccagaaatgcctgtagagcaatctagatttgagggggatgacatttgaactgcgatctgaagggacaagaggaaggtagccctgaaaggaacatagcgaaaagcatccctggtagaaggaaaataagcaaagattgtgaggccgaaatgaagagtaacatcaagggaacttggtttatgatacagacggcattacaagtcagtgggcgaaaggacagactcttcaataaatggcgatgagacattttttccaaaagggaaataaatgattagatttctacctcaaaccatttccaaaaataaggccgagatggattaaagacctgcaaacatttttcagaaaataaaaatagctttataatgtcaaaaatagggaaga

SEQ ID NO: 270423 - DNA, 454 bp, Homo sapiens
gaagaggtgttcagtacaatattagacagtttgtatcatcagacatagatttatgtaaggttcttgacaatcacaaaacatgaaaaaaaatgcagaccaatagaattctcatttgttaagaaattgtccagaaaacgcatcaggagacaattctatccacctttctcttgatcattcaatctaacggaagaaggaaaaaagaagatgtctggaatgcaatgtggaatttgtttaaaaaaatgctattaaggatttacttctaatcattccttgactgtatgattatgtattataatgatgtcacaacaccaattttttgatggaatgtcagaaacatttcacaagtctatgactccctgaaaactcaagtgcttttataactccttgaagttactataataggcattattctttcttttaaatgactgtcagagggacctactgttatcttgat

SEQ ID NO: 270424 - DNA, 619 bp, Homo sapiens
ttgaggctagcagtgattgaggcttggctctccaaggacaggacttggccctggtggggtgggtggcagcactgcccaggttcggccacacctggcctcaggggaggctgcccatgtcatctatagcttggctccctccctgctctcaggctgctgagccatggaatctgttttctatctcccagtttaaagtcctcaagaagaatgtcagtagcattcagaggaagtgctgggatccaggaagaatcctctccgtcagtctcctttaagggttgtattagtctgttctcattctactaataaagacatacccaaaactggataatttataaaggaaagaggtttaattgactcacagttcagcatggccggggaggcctcaggaaacaacttacaatcgtggtggaaggggaagcaaacatgtccttcttcacatggcggcaggaaggagaagtgctgagcaaaagggggaaaagccttatgaaaccatcagatcagccgggcgcagtggcttatgcctgtaatcccagcactttgggaggccaaggcaggcagatcacctgaagtcaggagttcaagaccagcctagccaacatagtgaaaccccgtctgtaaaata

SEQ ID NO: 270425 - DNA, 657 bp, Homo sapiens
cttcctttctgttctgtgttcgtccctatttcctagattctttggtgttctctctctccttttcctttcttgctctgatggaaggtcctttcacgtcctgtttctggttcagtcctgaatctggaatccagaattcaggattctgcagcaaaaactccagctatcccaccttcagctttgcgccacccaccctggaaggcagttcagttctagcgttctctgctctactaaattcacacgctggccttccatcttacaagatttggttggtatttctctgggaagtttctgggcttatactgtttttattccttatcatcattttaaaatttttattagtttttttgagacagagtgagaccctgtcttttaaaggaaatggatgtctatctgatcttattctaaatgttgactctactatccgtaaccccttctggaaatatttaatagttgtctccttaggaggctgttgtttggtttgcacatggttaatgtagtactgccgagtttatagccggtcctgagcttggacgtttcagcattcactgtggacctttagtgaagtctgaagctttgtatttggctggcttttgggaatgtattttggcttttggatgtacatcaaatgttattagttcagtgttggctgaaagattg

SEQ ID NO: 270426 - DNA, 368 bp, Homo sapiens
gaaaaaaaattaatatctaattatgtatcccatttgttaaaaattctcatttacctttttctttcccagagtgagtttacaagtttcctcaggtgtgttttttttatggctgggtgcattcaaacagaattccaaggcttagcttttagaatgctagctaccaaggaaaagaatagggaaaaatctctattcattctggctgtacagaatgaatacatttccatgagataatgtggtagataattggtgagttacatagattcatgaaaacatcagttgctctttttgcagggtgaatttgtgactaaatatctctgttcaaatcctgttatcttgatttctgagtttcatgctacattttatgagat

SEQ ID NO: 270427 - DNA, 315 bp, Homo sapiens
aggaagttgttgggagaagcaaagtgtctctcctccttcttgacaaatatggaagattatttccttctggttgggaaaacatatctcagataatctcacatagctccattccattataaaatttagttttttattaaaatttctcaagaagacaaatattttaagtgtgggaatttgaaactatctaaacaatactttctctgagaaaaaaattctgtaaatgggagaaagcaagaaggccctcttctttgttcagtactacatattgcgtgattaattttacactaaaaataaaatgatgatacaataagtaac

SEQ ID NO: 270428 - DNA, 457 bp, Homo sapiens
tgcagcccccggaatcaccaggtccattcgtaattgcggtggatggcatttccactggaaagcctgtggctgtcgctggaaatgttcacccgctggccttgtgacagagccccctggaagctctgactcaggagtgctcagcccctacccctctctggctgcagagccaggcagggaggccatgtctggcacagaagggaagctccccacctctccagctttcaggctccaggcgctagacaagtgacgagcttggctaagcctttctttcggcctctttggcaaagagaaatccagattatgtcgacaaagggtatgtggcaacaataataaaaatgtagagggaagattaggaaaggattatgctaatcagatcaaagagcaatgactgtagtagcgctttcaccctctgcaattacagggcagtaattaaataaaaaccatttagcgtcaaaaa

SEQ ID NO: 270429 - DNA, 621 bp, Homo sapiens
agacattctgagggaatattaaggaacaattctaacagtcctgattattctatccacaacttcctgacactagaatgagacaaaaacttccatgggcttacaagagcatttggacatcccactgtctgtttccctccttagtgagttttattcagaccaagtggtgaaatctgaaaattgagatttcacatgtatgattcaaatgactacccaaatgagttttataactgatcaaaaaatttaaaaatccaagccgggcatggtggctcacacctgtaatcccaacactttgggaggccgaggcaggaagatcacctgaggtcaggagttcaagaccagcctggccaacatagtgaaaccctgtctctactaaaaattcaaaaattagccaggtgtggtggtacacacctgaggtaccagctgctcaggaggctgaggcaggatgattgattgagcccgggaagtcaaggctctggcgagctgtgatcacaccattgcgctccagcccaggtgacatagcgagatcctgtctcaaaagagaaaaaaagtgtttttaataaatacaggctgaaagaaaagatggagtagtctcccagcgcttggagctaaatagacaaagga

SEQ ID NO: 270430 - DNA, 399 bp, Homo sapiens
agacattctgagggaatattaaggaacaattctaacagtcctgattattctatccacaacttcctgacactagaatgagacaaaaacttccatgggcttacaagagcatttggacatcccactgtctgtttccctccttagtgagttttattcagaccaagtggtgaaatctgaaaattgagatttcacatgtatgattcaaatgactacccaaatgagttttataactgatcaaaaaatttaaaaatccaagccgggcatggtggctcacacctgtaatcccaacactttgggaggccgaggcaggagaattgcttgaacccaggagacggaggttgcagtgagccaagatctcaccactgcactccagcctgggcaacagaatgagactctgtctca

SEQ ID NO: 270431 - DNA, 426 bp, Homo sapiens
tttttttttgagagggggtttcccttttgttccccaggcaggagtgcagtggcacgatgtcacctcactgcaacctccgcctcctgggttcaagccattctcctgcctcagcctcctgagtagctggggtttcaggtatgtgccactacgcctgactaattttgtatttttagtagagacggggtttctctatgttggtcaggctggtctcgaactcccgacctcaggtgatccgcccgcctcagcctcccaaagtgctaggattacaggcgtgagccaccatgcccggctggaagttttttcttaaaaggtgttggttttttaaaaagccgacatgctctgacttacagagaatagtttcctaagatgcagtcggcagggaatggaatgaaaacggatggcaaaggtaaagtctcagagctgagg

SEQ ID NO: 270432 - DNA, 313 bp, Homo sapiens
aggtatattgagtattcaagcatgattttaaacaaatatggaatttaatcttgtaatggtttcctcttggtggcatatgtagacctaattcccaaatttttagaaattttctgtttctgttaagcgtgagcacttaagattttctctggcatcagaatatggaatctcatgtctttcagcaactttattgtttcttatgttttaacttaaatggaacactttagggttggcagacttatagaaattatctctttcctgtctttaacagtgaatatttgaaaaattcatctatgaaagctcttagaatgcactt

SEQ ID NO: 270433 - DNA, 374 bp, Homo sapiens
ccgaaagcaccccactgctctccagcctgggtgacggagcgagactccatctcaaaaaaaacaaaacaaaaaccatgttgtacagtagattacttgaactgatttctacaaaaaatatgggacacttcatgaatttgcatgtcatccttgttcaggggtcatgctaatcttcgtatcatttcaatgtttagtatatgtgttgccaaagcaggcactcatttcatcttttaaataactcagtatgtatctctaaaacagtgggagtcttttttgcttctaaaccacagtactattatcatgtataataataatttcttaattatcatcaagtatttagttagtattcacattttcttgattgtcttgtaaatgtc

SEQ ID NO: 270434 - DNA, 595 bp, Homo sapiens
tccatgaggtactgtagaattgcatcaagttatggtggccagattgagcaaataaaaatacaggatgccagggaaaacttgtttttctcatacaattttaaaaattgacatataattcacataccataaaattcacgcttttaaagtgtgcaataaattcagtgttttaagcatactcacagagttgtgtaaccatcaccacgatctgattccaggacatttgtatcatccccaaaagaaaccctgtacctattagcagccagtcctcattccccctctctcagcccctggcaactaccaatctgccaccgcgcccatcccacttacatgtataatcttaaaaaaaaaaagtcgaatatctaggcaccgaaagtagaactgtggttaccggggatggagagaaggaggaaatgggggagatgtaggtcaaaggaatacaatttgtagttacgcagcacaaataaatctagagttccaaggtacagtagagaactataattaaaaataatgtatattgaaaatttgctaaaagaatagatttacaggcgtgagccaccgcgcccatcccacttacatgtataatcttaaaaaaaaa

SEQ ID NO: 270435 - DNA, 485 bp, Homo sapiens
gattcttttccttagtgtaaactatccccacctctcagggtggcctgaaattcagtctctcatttatcttatttttctgtaatgcacatcttaaccaccagagagagcctgatacaaaggaatctcaactccaagtacaacagagaaattaagctgggcataagatgtggaatcctggatacaactgcagcgattctcaatggtagggtagggaatggatcccagtgcctcctctatgggccttcttagacccatcccaaggagagggggtggggcatgctgccacaacctagaatttagcagctagccagatgtaaggtcaccaggaaagaggtgaggtgggtaaggatgagggccagatctagtttagggacctgaatttctgtatctcaagcaaaagagactctcaactctgctcataagccaccaggcccaactccttcctgggctaccccatggcaggccaggtcatctagctggcccgg

SEQ ID NO: 270436 - DNA, 711 bp, Homo sapiens
gcattcacattcttttgttaagctggaattggactagaatgagggattccctaaacatcaatctataaattgaatacctactgatggccaagctgaaccacttgccagcctctgaatatagctcctttctcttgcacgtgctgtttcttgaaactccatttcacagcttggcctggttatatgtaaggcattgttcatttcaggccttcttttcttccagaagctccccctggcccattttgtacacaacacattttccctcctgtgtgtgtcgtttacaccatttgcttaattctacttaacatgtctcctccccatcttcatccttacattttctatacaccctacttccccactctcaactcctctcaccccccaacacacacacacacacacacacacacacaccacacacacacacacacacacctgagatcccagggtacacggtccagcagcacagcagcattcatatttctttctcttattttttttttttttgagacagagtctcccactgtcaccgaggctggagttccagcacatgatctcggctcactatagcctccgcctcccaggttcaagcaattctcatgcctcagcctccagagtagctgggactacaggtatgtgccatcacatccacccaatttttgtatttttagcagagacagggtttcatcaagtattaatccttttatctttagtgta

SEQ ID NO: 270437 - DNA, 705 bp, Homo sapiens
cccaaaccaagtcacgagctgcactttgatgctatttaaggaatctcagttgagccctgtgatgactttgaggctcatacaggtactcagtagtctcagttctagatgtgtcacactatcttgggcccttggaaatgagaagtattctgggatcgtttctttcagcacaccaaaatagatggtcccaaattctgcagcacaaatctaatttgtttcctccttgagtgaatggcacttctcatcctgcttttggtccctctcctcttgcctgacagtggttccgaagcctattcaggtaatgaacattaggcatttgccctgagtagagtctattttaattctgtttctcacaaaaactgcttctgcatcataggcgggtctgagctcagcctgaggcctgcagtgttgatttgagcagctagagttgggaaaacagcacttcacaagagctctgagggataattgctgtctcttctaaacctgggctcataactcagggcctctgtctgagatctataattcttctttctcccagtgaggctcccaagaataggctaaagtgttatggctgaagattgtttccagacttctcgaggcctggggattagagtgcagggtgtgtatggaatgaaagccacttctggaaaacatgggctgggtctccagggaagctttcctatcttccctgaggtggcctcagacagg

SEQ ID NO: 270438 - DNA, 275 bp, Homo sapiens
ctgagaagcgggcccttggtgtggcccaggagatgaaggaaagccgctcagggcgaagcttagagaggagccacagcctggatgtcagggccagaggggcgccctaagcttcttttccctcctggagtatcgagggtaagtaaaatggagaaagcaggccctgtggtagaccacagtggagaaggtggaatttctagacttagcaggccagcgctgctacagaagccttccgggggcacttggagcagtttcactggcatgacctgagtgctgta

SEQ ID NO: 270439 - DNA, 504 bp, Homo sapiens
tgatttcagatgaagatggtgctggcagtttccccatcagcgcaatggagtttgagcaaaggatctcactggagaagtcgcagcgacagtggatctaagagcagagggcaagggctgcctgagccttgtgaagctcaattctgccccctggtgcccagaatgccgcgccagcaatgggatgcaggaagaagaggcaggagacacctgaggtctcttaccttttccaagctactcagacctccctcttacagggcagggaacacagggcaccagccctactaacccaatctgaggggaaactctgaggctccctctcctgcagagatctcagactctgtggtagagttggtgtggggggacacgtgacgtcagcaatagccctgtccatccagcacctggacaccccgagtggttccttctatgggaggcagaggcagggctgccccctctgctgtgcaattcctggggtcttcatctgagttaaattcttttaagtcaggattt

SEQ ID NO: 270440 - DNA, 554 bp, Homo sapiens
gaaggaatgtccactgttgccatcagtcctgaaaagatttccttgcaccaaatcaaaatggttcgagtttgctgttgttgatattttttttccttttgtgttctgcttactgactgacatctgctatcatgctaagcaggtgttcctatgtaaacgaacgtgccctgtttgtgtttcgccatcctcgctgctgcgcacccaaatgagcagcgtgattaagaatcctgtaaatttttgaaaggaaacggatggctaccctactagaacataattacaccgttccaacatccgcagctcactgctgcagcagagttggagaacagcagaaattaataatatataatagcatcattctagtaatttataaatgaaataaagtagagaggagattctgctgatatgcattttctccttaattctaaaagacaaagtatagattagaattttagtggggtgaaacctggccagcagtctcccactagttgcctgattcatgataggagtgtttttgcttagggaaaagagctaatatgttttattaggccagaggaaaa

SEQ ID NO: 270441 - DNA, 162 bp, Homo sapiens
tgccatatatgaaaattaacttcaaatggataaaatactaaaatgggaaagaaaaatctacattgacaacaaaaaaaatagtataagatactatgtttggaactctgagacagaaaagctttcttaaatatgactatgtatcataaatactaaaaaaaaaaa

SEQ ID NO: 270442 - DNA, 327 bp, Homo sapiens
ttttcatgaagaattgacccctttatcattttgtactatccctctttatccctaataatttttcttgttccgctctcctccatctaaaattaatatagctactataagtagattattaatagttattctgattattttacctaaagtattatttgaataggatttatagtactaaaaactccatcactaaaataattttagggtattattccttctcaaaatctaaaatattataatatggtttggactataaaacatagtacatgttagatcatgaatagcgtacctttaaaagctcataagaaggaagggaaagttcctaggacc

SEQ ID NO: 270443 - DNA, 566 bp, Homo sapiens
aattgtactccaaaggagatcttggttatacattgataccagcatagtttgagcctaccctcttccctgtaccctcaaaacccttgttaacatcttatgttttgccagtctgctgaagaaaaaatggtatccaattgtttaattcaattacttgattactagtgaagtgagaatttttttatatttatcataatttgtattgcctgtaatctgaaagggttattcatatttttttgcctacttttctattaagtcatgtctctctaagatctagcttaaacgttactttttccaaaaaaccttccctgatctcccacaactcaaaacattatcttcctactttagtttcttacaatattttatctacatttctcttataacaccactttctactttgtatgattgttattttagtactatctaatcagtcctttaatttcctttggggactattttatggtgattaatccttatgacacatattgtccacatttttggacaaaattcttcaatgaagattgataattaaaattaataaaaattaaattaattaaaaatttaaaaaa

SEQ ID NO: 270444 - DNA, 394 bp, Homo sapiens
gacctaagcatatatggacattggatttataacaatggcattatagtggagtgaggaaaggacaatcttttcaataaatggtatggaataattgagtatccatgtgtaaaaagggtaattagaaccctgtttcacatcaaattccaggtggattacaaacctaaatgtgaaaggcaaaacaatacagcttctagatgataatgcaggaaatgttttaacctcaagagaggaaagatttcttaagacaaagagcatattaaaatgtttgtaaatatgctgcattgataagaaaaaaatctgcagtttttaaaaaataaaaacacattcatgtcctttgtagggacatggatgaaattggaaatcatcattctcagtaaactatcgcaagaacaaa

SEQ ID NO: 270445 - DNA, 633 bp, Homo sapiens
ccagctgccagcaggggcaggctttccagcgaagcacctcgcaggaaaggtgccaccgcgttggggcgcattctatatgtttgggaaattagacttgctttctaagtaaataagcggttagggtgccagtggttagagctggcagtggttggtagtgtccccaggatagttctagttgttttggctgaaaacaaattgttctaaagcaggatgaaaacaatatgatcaaggtgaaaattaggtccaaaataatgagttggcaaaaagaaaaatcagtactccccagtactggatttccatgtattggtaattctggtgcactcttcatttagtcaacaaatattaaccatttattataggttgtagacagtgggggttgagggagggtacatcaatgaacaaaacgagagttccgtccagagagcttgcgtgctgataaaggagacagacaatgcaaaaataaatacatcttagatagctagctaggtaggtaacatgttaagtggtgatggcactaggaaaaaaaacaaaaacaaaggacagtcaggccctaatatttacgggtgagtgatttctgtttgaaactggtgtccagagaaggcctctctgagatggtgctggagcagagattgg

SEQ ID NO: 270446 - DNA, 302 bp, Homo sapiens
tggagatgtggctagatctcctagccctaacatgcttacttattttgataagcaaagatgaagctcacatgggtcccgtgtgctcttgaacttctgtacattgtaccattaaccacacttggatgctggcaatcgcagttttagttaaataaagtgacttgcccaccatactataaaaaattaattttggtagcatgttgattctgtatcctaaccataagaccacacagagccatggctagtaaactttagcttgtgcgtaaatgcctgccaagacctgctaaatactgttgcttacattt

SEQ ID NO: 270447 - DNA, 556 bp, Homo sapiens
ctagaaagaaaacctatggaaagatcctgtgctggaagaaagcatgaagtaattcaaatgactaaaaggtcttaaacatctttgccatcatttataatgcagacttcatgctgagaagagcactcgacactgccaccgaagttctgtttctggtgttgttttgtcaattatgctgatgccacgggaccatggaacagtgccactatttccaagagcaacagcaaatcgaaaaatcttcatgcaatggttgttctagaaaagtctattacattggtttatgctttaaatatagttaccaccagagtagtaattttccaatctatcctttaaaagttcaagtgtattattgcattttttaagttgtaaaagaatgatgtacacatatccttaaacatagtatataaaagcaactactcaatggggatttatgtgatgagattacttacgtaaagaaaattatttgtcttttgattaatagtgcaatttaaaactggaagtcgttttctttaaaaatgcattctctataccattgaaataaaaaaaccaaatgtaaaac

SEQ ID NO: 270448 - DNA, 797 bp, Homo sapiens
ctagaaagaaaacctatggaaagatcctgtgctggaagaaagcatgaagtaattcaaatgactaaaaggtcttaaacatctttgccatcatttataatgcagacttcatgctgagaagagcactcgacactgccaccgaagttctgtttctggtgttgttttgtcaattatgctgatgccacgggaccatggaacagtgccactatttccaagagcaacagcaaatcgaaaaatcttcatgcaatggttgttctagaaaagtctattacattggtttatgctttaaatatagttaccaccagagtagtaattttccaatctatcctttaaaagttcaagtgtattattgcattttttaagttgtaaaagaatgatgtacacatatccttaaacatagtatataaaagcaactactcaatggggatttatgtgatgagattacttacgtaaagaaaattatttgtcttttgattaatagtgcaatttaaaactggaagtcgttttctttaaaaatgcattctctataccattgaaataaaaaaaccaaatgtaaaactaaacaaaaaaaaaaaatggcctggttgtgcctcatcagttgaagctaatacagtcgttcagcttttattcagggtgcactcttgatcttcctccactcgctcattcgcgctcggcgatccacgaacgatcacagtaggtacgtggtcaccgtacctctcgacagtccgggcccccacctctctgcgcatactcacacaacatgccccatcacgacccctccccaccgtactaccactaca

SEQ ID NO: 270449 - DNA, 646 bp, Homo sapiens
ctagaaagaaaacctatggaaagatcctgtgctggaagaaagcatgaagtaattcaaatgactaaaaggtcttaaacatctttgccatcatttataatgcagacttcatgctgagaagagcactcgacactgccaccgaagttctgtttctggtgttgttttgtcaattatgctgatgccacgggaccatggaacagtgccactatttccaagagcaacagcaaatcgaaaaatcttcatgcaatggttgttctagaaaagtctattacattggtttatgctttaaatatagttaccaccagagtagtaattttccaatctatcctttaaaagttcaagtgtattattgcattttttaagttgtaaaagaatgatgtacacatatccttaaacatagtatataaaagcaactactcaatggggatttatgtgatgagattacttacgtaaagaaaattatttgtcttttgattaatagtgcaatttaaaactggaagtcgttttctttaaaaatgcattctctataccattgaaataaaaaaaccaaatgtaaaaccatgtgaaaagtcctacctttttgaattaatagggacttataaaatttttattgaacaataagaatattaaaacctaacatattttttac

SEQ ID NO: 270450 - DNA, 450 bp, Homo sapiens
ccaataaggacaggtggattttttaatgttggatggaaatgtacattctaatgatcaagcatcactaacataatttactattgtctgtgaaatcagactttcaaatgagctgcatttctcttcctcaaagcatactcttggatttacttatgtttttacaaatctaggtcttaaacatctttgccatcatttataatgcagacttcatgctgagaagagcactcgacactgccaccgaagttctgtttctggtgttgttttgtcaattatgctgatgccacgggaccatggaacagtgccactatttccaagagcaacagcaaatcgaaaaatcttcatgcaatggttgttctagaaaagtctattacattggtttatgctttaaatatagttaccaccagagtagtaattttccaatctatcctttaaaagttcaagtgtattattgca

SEQ ID NO: 270451 - DNA, 522 bp, Homo sapiens
ctagaaagaaaacctatggaaagatcctgtgctggaagaaagcatgaagtaattcaaatgactaaaagacttcatgctgagaagagcactcgacactgccaccgaagttctgtttctggtgttgttttgtcaattatgctgatgccacgggaccatggaacagtgccactatttccaagagcaacagcaaatcgaaaaatcttcatgcaatggttgttctagaaaagtctattacattggtttatgctttaaatatagttaccaccagagtagtaattttccaatctatcctttaaaagttcaagtgtattattgcattttttaagttgtaaaagaatgatgtacacatatccttaaacatagtatataaaagcaactactcaatggggatttatgtgatgagattacttacgtaaagaaaattatttgtcttttgattaatagtgcaatttaaaactggaagtcgttttctttaaaaatgcattctctataccattgaaataaaaaaaccaaatgtaaaac

SEQ ID NO: 270452 - DNA, 202 bp, Homo sapiens
gaaaatcctgccccacttccccaataggaagagtggtgggggaataataaagttgttttatgatgcatcctgtggacttctactcgacagaatggtaacattcaactgtaatcaggatgagcaagccactttattaaactaaaattttaaactttaataaatataatacaaactgaaaaataaaaataatttttcaactcta

SEQ ID NO: 270453 - DNA, 270 bp, Homo sapiens
tttttttttcaagatgttagcaattcctgtggaaccatctggatgttattaagaaagtgtcccgggtcctctgaggcagctggctgggcctcttgccttgtttcctgtgtcctggatgtctaagttgactttcataagaaatttggaatattagcttaaaaaaagaaacagtcaatatttttcaggcgttgagctcttgcagcttaatttccccggctgggactttgcatttcgagttcccatctttggcccctgctctgggaaggatga

SEQ ID NO: 270454 - DNA, 315 bp, Homo sapiens
tagaggaacatcaggaaaagatggtgtgatcatagtctagaagcagggctgcctatctggagctggggccaaagaaaaaaggtctgtccaataggaactggggcaatagaggaggagcactgcagctactggccattcccattggccaaacctatttgtaatctagagggcaaaggaggccaagaaatgcagtttcctgcaatacacagagcagaacaggggaaagccataggtaaatctaagagtaaataatgtagttgaccagcactccagacttaggtgcatcaagtaattatatagccttagaagtttaaa

SEQ ID NO: 270455 - DNA, 2363 bp, Homo sapiens
  misc_feature (1394)..(1394): n is a, c, g, or t
gatgccaaaattacttttttccttccaaatatcaccttctgactgtttccaccatggttaagagggctgaataagatgatcattctttagatgacgaattaacccttgcttcttcgaaaggttttagggaaattaacaaaaaaattcccagatgccaacagccaccattcaaaagaccaccaatctattgcatcataccagatgccactctctcttcctagtagggatttctctcctcggtcctgatcaaggtgttataatagagacattttcattatagacagtgtcctgaagggattccagctcaaatataggaattcttaaacctagctgaaactcccaaagtgatttcattgctgggcatattttaacatacttaggggaaagcaaatctttaaacaaagcaaaacaccaaactacagttttaaaaagaagaaaggagagcgtattttagtttcaaaattacattacattttaatttaattttccttctaattttcctgtcagcattttatttacaaaaactgtgcagcaaacgagggaaaatcttccaacacaaacaactctgtaatgactaaattggttttattcatatattttagacatttggttaacttggatctttttcataagttctttgtgatgctttgtaaggttagtgtaactgaagtgtttgtgagtttgatttggtcccacagtgcttaattcagtggatatttgcatagtttaggtttaatgtaaacttgggtggttaactgactattaagtgtaacctattgtgatttctaagaggagtcctgccaagaactgtatgtccaaaactgatctgttttaacagttagtgaggaacagcttccgagataaagtaagttcatttttctattgctaattttgctttttaaaatagcagtgttgtaagactaatatttccacttaccaccaatagagggagcattaattaactatgtcatggaattgttttgatattttggaaaacaagtgattccacccataaaatgaaaagagaagattgaccttaagaaaaaaactcttaaagctaggagacaatgacatgaaatcactcaatacatgttacaaatgaaagaaggccaaaagccactttaaaatattttaaactgtttcacagtagatttgaaagtgtctttgttcaaatttagcaaagtaggaagaattttcactaataccgcctgaaaagttgatcttaggtgccattatgggccacgtgtagctttctgtttctcaaatctgagagagacccatttgccttaatgctgatttgccatgtaaaatgctaagcaattgggttagaatccaccttttcttttggtagaacatgtagagaaaaagctgcaggtgacttgaaaccctgaggngtctatcatcctttccctgtaaaggaagtgtctcttaaaaaaaagggagtgggggaggaggtggaggatccctaaagaattcttaatgaggtgatataatcattgtagtccatgacaaaatggaccagccaggtttgcatagcagtagacatattcctactgtacatttatccttcccaaatatgtcacattctaaaatagttgacaaattattttgtggaaagaggaagaagctggattggagtgggagatctaatctggaggagcaaagaggtagttgtttattgctatgttcctggcccatcaaatggccactttccaaactgacccacattttaggaaataaaccaatctggacctgtttcaaaaggatagagatgcttttagattgtcaattctcacttttaagttaaacaatcacaaatatctttagaaatagggaaagacatttgcttcaaaatcaaagaatgagtgtggatctttttaatttttttttgtttcaagtcctacagtcatcttacatttagaccttcatggtagggtgatatgagtgctaaaaaaatttctttctagtagccaggaaacagatagataagataaaagcaaatgttccagatttaagacttcttaggatgagtacaaggaagagagaaatagtatggaaaggacattttttagcaatttataattttaaaatggaatttgccaaacaagggagaggaaaaaaagtcaaaggggaatttttatctcaagatatttagatatggtttataaaaaaataatattttctaccactaaaaacactggtattatctcagcatcatgggcaatttttccttattacatgccaatatttgtacaaaaagggcccccaaatgtgtgaaatataatcctaaaaaagaaaataattggaacacatggatctgttacaattctacacagggggaaacaagctaagcaaagaaaaaa

SEQ ID NO: 270456 - DNA, 2365 bp, Homo sapiens
  misc_feature (1394)..(1394): n is a, c, g, or t
gatgccaaaattacttttttccttccaaatatcaccttctgactgtttccaccatggttaagagggctgaataagatgatcattctttagatgacgaattaacccttgcttcttcgaaaggttttagggaaattaacaaaaaaattcccagatgccaacagccaccattcaaaagaccaccaatctattgcatcataccagatgccactctctcttcctagtagggatttctctcctcggtcctgatcaaggtgttataatagagacattttcattatagacagtgtcctgaagggattccagctcaaatataggaattcttaaacctagctgaaactcccaaagtgatttcattgctgggcatattttaacatacttaggggaaagcaaatctttaaacaaagcaaaacaccaaactacagttttaaaaagaagaaaggagagcgtattttagtttcaaaattacattacattttaatttaattttccttctaattttcctgtcagcattttatttacaaaaactgtgcagcaaacgagggaaaatcttccaacacaaacaactctgtaatgactaaattggttttattcatatattttagacatttggttaacttggatctttttcataagttctttgtgatgctttgtaaggttagtgtaactgaagtgtttgtgagtttgatttggtcccacagtgcttaattcagtggatatttgcatagtttaggtttaatgtaaacttgggtggttaactgactattaagtgtaacctattgtgatttctaagaggagtcctgccaagaactgtatgtccaaaactgatctgttttaacagttagtgaggaacagcttccgagataaagtaagttcatttttctattgctaattttgctttttaaaatagcagtgttgtaagactaatatttccacttaccaccaatagagggagcattaattaactatgtcatggaattgttttgatattttggaaaacaagtgattccacccataaaatgaaaagagaagattgaccttaagaaaaaaactcttaaagctaggagacaatgacatgaaatcactcaatacatgttacaaatgaaagaaggccaaaagccactttaaaatattttaaactgtttcacagtagatttgaaagtgtctttgttcaaatttagcaaagtaggaagaattttcactaataccgcctgaaaagttgatcttaggtgccattatgggccacgtgtagctttctgtttctcaaatctgagagagacccatttgccttaatgctgatttgccatgtaaaatgctaagcaattgggttagaatccaccttttcttttggtagaacatgtagagaaaaagctgcaggtgacttgaaaccctgaggngtctatcatcctttccctgtaaaggaagtgtctcttaaaaaaaagggagtgggggaggaggtggaggatccctaaagaattcttaatgaggtgatataatcattgtagtccatgacaaaatggaccagccaggtttgcatagcagtagacatattcctactgtacatttatccttcccaaatatgtcacattctaaaatagttgacaaattattttgtggaaagaggaagaagctggattggagtgggagatctaatctggaggagcaaagaggtagttgtttattgctatgttcctggcccatcaaatggccactttccaaactgacccacattttaggaaataaaccaatctggacctgtttcaaaaggatagagatgcttttagattgtcaattctcacttttaagttaaacaatcacaaatatctttagaaatagggaaagacatttgcttcaaaatcaaagaatgagtgtggatctttttaatttttttttgtttcaagtcctacagtcatcttacatttagaccttcatggtagggtgatatgagtgctaaaaaaatttctttctagtagccaggaaacagatagataagataaaagcaaatgttccagatttaagacttcttaggatgagtacaaggaagagagaaatagtatggaaaggacattttttagcaatttattttgtggaaagaggaagaagctggattggagtgggagatctaatctggaggagcaaagaggtagttgtttattgctatgttcctggcccatcaaatggccactttccaactgacccacattttaggaaataaaccatctggacctgtttcaaaggatagagatgcttttagattgtcaattctcacttttaagttaaacatcacaatatctttagaaatagggaaagacatttgcttcaaaatcaagaatgagtgtggatctttttctctcttccttgtactcat

SEQ ID NO: 270457 - DNA, 432 bp, Homo sapiens
cctctattcccctttgtttcctagggaacctctgattcttcaaagagtagccttgatagatcttgcaccctcttgtaagggaacaccctgggtagagagagcagcgattaaagttttcatgtgtgctgatctcactgcagcaactaccctaattctgtcagttctggagctctctagctagacatttgcagctgtcaatactgttctcaaccactaggggacacactgtttcccttagctcttttggcatagttgcaggcagaaatcccctttttccttcagtctgtacctggtcctggggccaccatgtttggccctgcaggttgtgcatggcacagctccagtgagttccattctcataaagtaggatgctcctggattcatgcagtgcggtgaccctgactttgttcaaccaaggcaatgtcattttgt

SEQ ID NO: 270458 - DNA, 258 bp, Homo sapiens
gccttccgatgaaacatgtgcctagttgacctaggtgtttcctctcgtctctcttcttcccctttgttctctccctctgttatgggcactaccaagcacacaggtgcaaaagctggaccttcggttcctccttcatcacttctttcccctctgtctgttttcaaatggctaccacgaatagtgattctactttaaaatatcactaatttataaatggtttccgttataaagctgataggaccatgtcagaataataaa

SEQ ID NO: 270459 - DNA, 280 bp, Homo sapiens
tgatgtaaaaatttgctattaatattaccgagaatcacttgtatgtgatgagccacttctccctttctgcttttaagattccttgctttagagagtttaattatgaggtgtctagctctgggtctctttgaatttttcccatgtggagtttaacttcttgaatgtgccagttaatgtttctcatcaaatctggacattttcagccattattagttcaaatagcctttctgccactttctctttttcttctccctctggagttcccattatgtacatgctg

SEQ ID NO: 270460 - DNA, 366 bp, Homo sapiens
taataatccttctatgtttatgtgctgatttgcaaataaatgggcctatatagtctttatctagtgttggattggggtcaaaagttttatgaaatcattgtttttagtatacgtacagatggataattgtataaataagtacagatgtgtataaatgtgtgagtatacatacatacattttctagctcttctaacaaaagggcctagaaacaacatcatcccagtaacaatgagaacaccattctccaattgaaggaaccaaggctccttggggacatatttgatatcaggattgggcagggaaaatacaagattagtttgaaatattttgtcatgttagaaagtaaggaaatgctcacaaaatgg

SEQ ID NO: 270461 - DNA, 405 bp, Homo sapiens
cccagccaaacacccttacagcccacaggaaccccagctgggagaataccaatctcacctgaattaaaaaaggaaggcccccgcctccaccactctccttatttccatcacatgagcagacaggacttgaggaccacatcctgtagctgcatggtggggatgctaacatctactcctggatcaactgctaaccagccctctacccttgctggggcagggacacccgccgacacccctcccttctgcacatctgtccactcaacagtaacagtgcacatggtccctccctgtacaccccacctccagaattctagaacctcttccattcctttaggaactttctttggtgagaagctgttggggtctgttggggcgtgtccccaccgccactggtatttaacaccc

SEQ ID NO: 270462 - DNA, 454 bp, Homo sapiens
caccaaatgttctgtttgttgaagattaaattataaaattaaatttcagcaatatgcatatataattaatgaacccagagaaaagatcaaaatggtgagcatataatataaatgtgtacatattacaaagaaaaaatatggaaagctactatcatacttacttgtttttctaatctgtcatgaggccattttttttttttaagacaaggtttcactctatcatccaggctagagtggagtggccccatcatggctcactccagcctgggtttcctgggctcaactgatcctcccaccttagtatccagagaagctgggactcacagcatacataaaaattaatttcaaaatggatcaaagacctaaatataagaactaaactataaaactttttgaaaaaaacataggggtaaatgtttgtaactttggatcagaaaaataattttttaaatat

SEQ ID NO: 270463 - DNA, 355 bp, Homo sapiens
tcctcactactattctgtacccacagtgtctttgggtgctagtccaagcagaactgggtgtgatcagctccggccatattcaccacaggcagagcaatgtggtatatggatgctgctcaggcaaattctctgattcctagccttgtttttccatccggacaaaaattcatccatccatctaagacaggtcaaatctggcctgctgcctgtttttatatggtctaggagctaagaatcattgatattacacttgtaaatgattgaaagcaaatcaaaagaagaagagtattttgtgacacataaaaattgtacgaaaatcaaatttcagtgttaataaagttatattagaatacag

SEQ ID NO: 270464 - DNA, 338 bp, Homo sapiens
gtactctccagtgactcttagcaggaagctgcctatgcaagtacaaaatgggtggaatgatggtctttagctgatagcagaaatggacagtcggccttcaccaacccaccctaccttgtgtctcatacacagcaagttttaaagatttccaggaaacatatcttaccaacttccttagtaactaattccggaagaaatgaagaaatccacctgcaagctagaaatgaaatccgcttgatggcacagaatattcaagtgagtttctaactcagttaacaatatgataaaaccaaatatatgcacatgcaaaattattaaagatttgtttatgtgagact

SEQ ID NO: 270465 - DNA, 357 bp, Homo sapiens
ttttattcccgttattgaaaccccagtgcctaccacttagcaggaactccatgaatatctagtaaaatcaagactgtttatacgaagatgattgctacagtctagcagcaaaggggatagacatgcaaagacatgatgtgcagttcagatggtggagtgacactagaaaacttgacaaagtactaagggagccccaaggaaggagacgcctgtgtacgtggagaaatacagccagattcaaggaggacttcacatagcattctgagtcattttttcttttttctttttctgtttttagaaacaagttcttactctgtcacccagggtggagtgcaagaacttgtttctaaaaacagt

SEQ ID NO: 270466 - DNA, 576 bp, Homo sapiens
gaatatttagaataaataagcagctccttcaactcaataagaaaaagacaaatagcccaatggaaaaaaatcagtaaaaggcacaaataggcaattcacaaaagggcaaatatgaaaaaaatgtgcaactgactaataaactataaagagatactatctcacagctgctggattagcaaaagtttaaaaaaaaatctgacaataccaagtgactacagaagggatatataaattgttgtatattcttataatgcatactatacagcagtgagaatgaatgtgcattaggtgccaacatctatgactccaaatcacaatgagggaaaaaagttacattgtaggccaggcgctgtcgtcacgcctgtaatcccagcactttgggagattctgttgaagggggattgaatatacatgttcgagctctgttcccttttaaaaccacactaaattggtaggaaactgattttttaaaagaaaaaccaaaggatcttagaagaaaacataggggcaaatcttcatgactctggatttggtgatggtttcttaaatgtcacaccaaaagcagaggtgaaaaaa

SEQ ID NO: 270467 - DNA, 354 bp, Homo sapiens
tctcagattactcatctgtaaattgggaataattttagtatatttctcataaaattgttgtgcctattaaataagagaatgcctataaatcaagtaacacagttcctagcacttagtagatactgcttgttattatttttgaagttaacactattttcagtgttctttatcacaatggtaataggtatactatatgaagtatacaaggtattctacataaaatatagtagaacttggctgggcacgatggctcacgcctgtaatcccagcactttgggaggtcgaggcaggtgggtcgcttgagcccagaagttctagaccagcctgagcaatatagtgaaaccccatctctga

SEQ ID NO: 270468 - DNA, 260 bp, Homo sapiens
cgccattggcctccaagtgctgggattacaggcatgagccacggcgcccagcctaaataagatcttaagattagattggcaattttcagagtggctcctctgacacggggaaaccgaggcctgatggtaactctcctaactgcctgagaggaaggtggctgcctcctctgacatggggaaaccgaggcccaatgttaaccactgttgagaagtcacagggggaagtgacccccttaacatcaagtcaggtccggtccatc

SEQ ID NO: 270469 - DNA, 431 bp, Homo sapiens
gggtgcagagcgtgcaggccaaacccacgctcagccccaccgtttgcatactgcacgctcaagctgctccaggcctgggtgaaggcatgcacactgtcctgggtccaggtagcccagagcgtggatgaccaaagcaaaattccattaaagtcaaaccagatctcacccatagctctttgtttgtttatctgagaacaaagtcaaaggccaaggaggccccactctcctgccacgggggaaccagtgtgcaagctctaggcacctactagagggtacagaggtggcctccacagtggactcggagttctttcccccttcttcggcaatgaggggtttcttcctagggcctattttcctgcagggttagagttaggttttagagcccttttccttaaccctcttctctacttcctatcccaattcatttattt

SEQ ID NO: 270470 - DNA, 448 bp, Homo sapiens
atagaacacttccccaccccaacaccataccaccacattactaaaggctaatcaacagcagttccttttaaccagtgcctcatgtccagctataaagaaaaaattacaagacatattgaaaggcaaaaatgtagtttgaagagacagagaaagcctgagaaccagcctaaaatatgtcagggatggtggaattattaggctggaaatttaaaacaactattattaacatgcttagggctgtaatggataaagtagacagcatgcaagaacagatgggcaatgtaagcagagggatggaaatcccaagaaagaaccaaaaataaatgctagagctcaaaagcagtgtaatcagaatgaagaatgcgtctgatggcttattagcagactgcacacagccgaaaaagaatctgtaaacttgaagatacctcagtagaaacctcccagacta

SEQ ID NO: 270471 - DNA, 313 bp, Homo sapiens
acagtcaagtcaggaaggatccataaatctctacttcacggagataacaaacactggcactagcattttgtgaccaaggtttttgaactcgaactatgcaccatgtgggagagagatggaccagagttaaggcctgggtggtgagtggaatagcagattgaatcagctgtccttcacaaaaaaccagaaagctaggagtccaaagggtgaaatataataggtgaattaggaaaacaaaacaaaacacagactgcttgtttgtcatgattccaggtgtggagggtacctgtagtctaattcctaagcttgtgga

SEQ ID NO: 270472 - DNA, 375 bp, Homo sapiens
atgtatcaacatgactcaaagtggcaaaaacaaagtgggatggagttactatcaagaacctggtgtttgaaggaaaagagatgagaaaggtaacagcttactgtccacatctagggaagatgattgtcttgacactttgacagttttatagtcaaggacaaagggaattctaaaggcacacataattagagcatttcaatttatgttagtcctgagagatctgcctattattaagaaacctgagatttgataacattttttatacaaacagattttatacaacagcatagtaaagttctgtattctcttgattttatgtcgattataggtgcaatgttatagaaaaaattaaacttaaatttgtatatttctaaa

SEQ ID NO: 270473 - DNA, 502 bp, Homo sapiens
gtttgtcaagtgcctgttattgacaaattttctattaaaatatgtatattttgttgtatagttcacgataggtcagattttacaacataaccagcatattatttacaatattctgcaatataattaataaaataggttaactcacttaaactaggaatttaaaattctctgatgttcattgtaccacttttcctccaaagctgaaatattagtgagtttttattagaagggagaaaatgtaagtttatatgaactctgtttctaaactctgaagaaatgttttttgagaaatgttttaaaccctgagttaggatttggaaattgagtttggttttgaaggataatatttcttttaaacctgttatttctgtgatctcctggaattgtgtaatgtaaattgttagtccagaagcaaatatcaatgtcctgattctcatactctaaaagaaaattgcagtttaaagaattctaattgtgttttattcagaatgtttttctcttc

SEQ ID NO: 270474 - DNA, 515 bp, Homo sapiens
tgatgaaaatgaaatattaatatgcaggttatgttagatgctgcttcggaatttcagaaaaatgaacagtaatcaaatgagggtgtcacataatacacagcaagcagagagccaattatgtaaatgaacacccaaggttagcttgatacaatgctctttaatttgacaaatattaaaatcaacttgttcttaatgtaatagatggctgtgacaaaagttaaagagcacccagtgtttttgtaatccctgtcaaattaaaaatgctaatgtgagtgagctgctttcatcagtacaatagttgaaaggcccaaaatgtacaacatttcctgggtttcagtaacattagactaaaacgtttctgagataaaagtcataatgaccagtgtacatctacttccaacaactgaaaatacataacggtaaactcctgttgcctcagtacatttacaaaataagaagagcttctcccatttagctgattttatttgaataaactgcagatacattttcataat

SEQ ID NO: 270475 - DNA, 337 bp, Homo sapiens
cctagctgctgtggtcttaatacagcccccaaagttcatgtgttggaaacttaatccccaatgcagcagtgttgggaggtggaggattttgggaggtgtttaggtcatgagaactccaccctcatgaatgaattcatgtcattataaaaggacttaatggagagagtttgttttttttcaccccttccattccttctgccatctgaggacacagggtttgtccccctctgaatgatgcagtaacaaggcaccatcttggaagcagagagcagccctcaccagacacccagcttgctggtaccttgatcttgggcttcctaacctttagaactgtgag

SEQ ID NO: 270476 - DNA, 542 bp, Homo sapiens
atggcgaattggctttgggaatgaagaatttgacttccctggttccagttcaagacatacgggtgggaactcccactgggtatccactctgctttcttgggaaagcttcacggtatctttaggaaggaagcctgggattccacaccctggagatactggatctcttattctctatgcacttccttacacactttctcttccttcaagggcctctcagttgaggcactactccaccttaaatccaggtggccacattcagaagcactgtcacgctggcctctcagcaacatgctaacacagaaaaggaggctgtttatgagtcagctctgccaacaggattgcttcctaggaaaagtgcaaattgatttttttcctcctgttggtctgctgggggattggaggcagccacggacaattcattagcacatgtaggaaggccagggagaaaaataagctaagttgctctcatactagaaagcatttaggaagcaaacccataaacatggataattattgtgtgtccattaaaatttaaaaaaaaa

SEQ ID NO: 270477 - DNA, 204 bp, Homo sapiens
cactctccattctgctccattggtcagactatctgtctaaagtactatatgttataacaggtcttcgtatctggaaatgtaagtcctctggctttgttcacctacttcatgatggcatggctattcttggcctcaactcatgattttttaaaaaaatgtatcctagcactgcctactaaatcatggcctgaactcacgattaca

SEQ ID NO: 270478 - DNA, 169 bp, Homo sapiens
gcttgcttctgttattgtccaaatcttaactgactctgacttggcctataaggcaggttcacccacccggtagagccatgctagtggctcctagcagcccaagagcccagcctgtaaccattcatccctggagggaaaggagctgaacctaaagtttccagtacaacct

SEQ ID NO: 270479 - DNA, 280 bp, Homo sapiens
cccatctaagatccaacatctgagatttccctgatggttttagaatgatttctgtaccatccccaacccttccaggtatgatcttgtccctttttactgttctgatcactgtctcacatttaggttgaagctttatgttctggccataatgacttttttccctttcctcctgcaaacgaagcccattgttgtctcagcagttttgcactttctcttcactttgtatgaaaatttcaggtcttacacagaatcctgtttttcaacattcaggtttcagttc

SEQ ID NO: 270480 - DNA, 173 bp, Homo sapiens
atcaaaaagtttttattttggcaaatttaacttcatatttcattaatagtagcttacttgttccatgtatattaataaattgaggtgtaatgagaagaaagaactgccgacagattatcttctgttcaatttcaaactcaaatcaactgcttaagcctttaagctcatgagca

SEQ ID NO: 270481 - DNA, 525 bp, Homo sapiens
ccagcggccaggctctgttcccaagctggagagagaggcaagtggtgagggagggcaggaggaccagtcatgggtttaatgcaaaatgacagttacgggggttgccattttagagtaaaacaggccatgtgactgaggagcaggtagcattcatattattcatatttcgagcttggtagatgtagaattttgcagtggaggccaggagaggatgtgagagctgcaggacagaggcataggtttttggaggtggttgtggtgttccccgatggcaatcaacttcacggagagaagaggttattttctacttaggttgcctggagcctacattccaaacttttagtcctcttcatctagcactaagttttgcatctcccttattcctgtcatacattattagtgtgcactgttttaaagtcttttacatacatatgtcttgcattccctacttaattgtaagctccttgaaggcattgcctgtgtattatgtttctttgaatctctctgtggtggctaatgctctgc

SEQ ID NO: 270482 - DNA, 400 bp, Homo sapiens
cttccattgggttcttcctttagtccaggccatcccatgtaaggcctgctctcgggtggcaatttggggagttttaggtgatgcagtggcagtgggcgctgctgctacagactcatctgaacacaccttgaaagcctggcctctttccaaatctagtttctattggcatctttgaggggggtgagtgacaagtgtgccaatcacccagtgactgagcaatgaggtcctcactgaagcccactctgaaagagagactcaaatacagtccagagaagttcagtgggaaaaatgtatacaacattgtaaatgttttggtcagaattgttgaaaattctgggtgaacgtccagagaaaactggtttcctgctaacccatgaaacgtgattcctttctcagagta

SEQ ID NO: 270483 - DNA, 473 bp, Homo sapiens
aaaataatacctattttacacaaactcttccagataattgaacaggagtacttattctgtaaagcctgtttaccctgattccaaatctgacaaatatattacaagaaagaaaaactatagttcactattccttcatgcacatagattttaaaatttcaaacaacatgtcagcaaatcaaatccatctatatgtaaaaaggatggggccgggcagtgagtcatgcctgtaatcctagcactttgggaggccaaggtgggagaacagcttgaagccaggagttcaagaccagcctaggcaacatagtaagactccatctctacaaaaaaaaaaattttttttaattagctgggtgccacaagctactggggaggctgaggtgggaggatcacttgagcccaggagtttgaggctgtagtgagctatgatcgtgccattgcagtccagcttgcataacagagcaaaaccttgtttc

SEQ ID NO: 270484 - DNA, 268 bp, Homo sapiens
cctacaaagaaggacacaattatgaaaacaaccataattttcatatgaatactcccaaatactttttatgaaacatttaaaacaagaagttattggctgggaaaatctaagaaaaaaagtatgtaagataaaaagaagagattaatgaaagtgggaaaatacacatgaagaacctcaacttaaaaaacacatggtatctatgcagtgggaaattacctccatttgtaaactatgttgcttaataaaaacatttctctaaattgttttc

SEQ ID NO: 270485 - DNA, 318 bp, Homo sapiens
caattccttacctgtcagtacaacatgcattggttccccttccccccaacagatggcaaggtgaattatgaaatctcataaaaaaaaaatacaactagtctactcttggaaggtagagatatgtccttatttgaaatggtttgcggtgtttttcaaggagatgagcacctactgatctctttctgtgcctattaaaaccagaaatcggagctggatgtggtgggcacctctgtagtctcagctgcttgggaggattgcttgagctcaggaatttgaggccagcctaggcaacatagtaaaaccactgtccctaaaaaa

SEQ ID NO: 270486 - DNA, 254 bp, Homo sapiens
catgcatgaggtactggatacattaaacacacacacacacacacacacacacacacacatatggcattgagttctagtcatatcctaaagaaaaactatggtgcgctatgttatttatagtactatactctgtgtgagtgactctgtgtgtatgtgtgttggtggaggtcagggatgacttgtttgtaatataccttaaggaagtctgtccgaatttgcccttcaaatactaaataaattcatctctcacctca

SEQ ID NO: 270487 - DNA, 605 bp, Homo sapiens
cttcaagtgggctggagacctgggagctgatgaagaatccatcaggaatctgtttgactttacccccaagtacagagcaacccatgaggaccaaaagtttaagaaagtaaaggagtgttcctcagagctgaagtacagcatggagctagatgaagtatggagcatggtacctcaagcctaagttgtggaaaaagctaagaagtgatgaacctttgattgaccccaagctcttacttaaaaagcctgatgaacctgacgttcttgacgatctttatggaccaattgcctttaaggatttcattctaagcaagggctatgaaatgcctggcatcattcaaaggctgtttgccaggaggggatggacttatgactctgttaagactcctattcaacgtgcaatgatattttacaagtacaaagaaatcgtagaggcatcggaagaagattaggcagttttcaatttactactcaattgggtatttcttgctctcattttaatcatcaatcataatttatgatgactggccccgtggatgcacaactttggcaacatctgtaaattcaatacctaatgtttatcaatatttcttaatgaactgctttgg

SEQ ID NO: 270488 - DNA, 338 bp, Homo sapiens
gcacatttttttttgtttgcttgtttctttgagacagagtctctctctctctcccaggctggatggagtgcagtgttgtgatttcagctcactgcaacttcttcagcttcacttgaaccgggttcaagtgattctcctgccttagcctcccaagtaactgggatgacaggcgcccaccaccacaggccctcagagccttcacccaagctgtatacatgagagacagagaagaagcatactcccttaactcactgccatcttccacacccacgtcatctccacgtccatggcgctcccagatagactgtggtacgacagccaaagcattcgttccctca

SEQ ID NO: 270489 - DNA, 808 bp, Homo sapiens
  misc_feature (18)..(18): n is a, c, g, or t
tgctccggcgcggagccnagagccggttcggccgtcgactgcccagagtccgcggccggggcggggatggagccaagccgccatggctaccacagcttcctggtggagcccatcagctgccacgcctggaacaaggaccgcacccagattgccatctgccccaacaaccatgaggtgcatatctatgaggtgacaggcatcgactgggcccccgagagtaaccgtattgtgacctgcggcacagaccgcaacgcctacgtgtggacgctgaagggccgcacatggaagcccacgctggtcatcctgcggatcaaccgggctgcccgctgcgtgcgctgggcccccaacgagaacaagtttgctgtgggcagcggctctcgtgtgatctccatctgttatttcgagcaggagaatgactggtgggtttgcaagcacatcaagaagcccatccgctccaccgtcctcagcctggactggcaccccaacaatgtgctgctggctgccggctcctgtgacttcaagtgtcggatcttttcagcctacatcaaggaggtggaggaacggccggcacccaccccgtggggctccaagatgccctttggggaactgatgttcgaatccagcagtagctgcggctgggtacatggcgtctgtttctcaggccagcgggagccgcgtggcctgggtaagccacgacagcaccgtctgcctggctgatgccgacaagaagatggccgtcgcgactctggcctctgaaacactaccactgcgcggctgggtacatggcgtctgtttctcagccagcggg

SEQ ID NO: 270490 - DNA, 862 bp, Homo sapiens
  misc_feature (18)..(18): n is a, c, g, or t
tgctccggcgcggagccnagagccggttcggccgtcgactgcccagagtccgcggccggggcggggatggagccaagccgccatggctaccacagcttcctggtggagcccatcagctgccacgcctggaacaaggaccgcacccagattgccatctgccccaacaaccatgaggtgcatatctatgaaaagagcggtgccaaatggaccaaggtgcacgagctcaaggagcacaacgggcaggtgacaggcatcgactgggcccccgagagtaaccgtattgtgacctgcggcacagaccgcaacgcctacgtgtggacgctgaagggccgcacatggaagcccacgctggtcatcctgcggatcaaccgggctgcccgctgcgtgcgctgggcccccaacgagaacaagtttgctgtgggcagcggctctcgtgtgatctccatctgttatttcgagcaggagaatgactggtgggtttgcaagcacatcaagaagcccatccgctccaccgtcctcagcctggactggcaccccaacaatgtgctgctggctgccggctcctgtgacttcaagtgtcggatcttttcagcctacatcaaggaggtggaggaacggccggcacccaccccgtggggctccaagatgccctttggggaactgatgttcgaatccagcagtagctgcggctgggtacatggcgtctgtttctcaggccagcgggagccgcgtggcctgggtaagccacgacagcaccgtctgcctggctgatgccgacaagaagatggccgtcgcgactctggcctctgaaacactaccactgcgcggctgggtacatggcgtctgtttctcagccagcggg

SEQ ID NO: 270491 - DNA, 368 bp, Homo sapiens
  misc_feature (17)..(19): n is a, c, g, or t
  misc_feature (24)..(24): n is a, c, g, or t
tactactactaaattcnnngccgntcgactagagttcctacctcattagaaattctagaatatcaaggtacattttgagcaggaagtgatatcatgaaacaataatttgcccagaggctaaaggcaaatttaaaatatttttctttatcctttcctcctgcaccatcaccccttaaaaagtatatatcatttaatccactaatcttactgtttgaaatttacccttcaagaaaaccttaaaaacgtaaaaaaactattgcactaattgagtcatttcagtgttagttacaaaaattggaagctattcaagtgccttatagtataatgtttaaataaatgtcgacgcggccgcgaatttagtagtagta

SEQ ID NO: 270492 - DNA, 355 bp, Homo sapiens
aagttccagttcagtccttaagtccataaagcatgaagagacttctgagtcttggaaaagggaactggaagataattggaaaatactcctgatgtgtaggaatatttttgatcctaaggtccctgtgttgtcacacaatctggccgttgtggctcttcatcataaggggctttggcacataagccagagactgaccttagattcctgggcagacactggacaataaattcactatttaaggtaaatatcttagggaggcagagctgggaggatcactggagcccaggagtttgaagctgcagtgagccatgatatcaccactgcactccagcctgggtgacaagaccccaacttt

SEQ ID NO: 270493 - DNA, 521 bp, Homo sapiens
agactgtgaagggcttgaaagtgatcagttgtttcctgctcaaatggacccttcagtgccaaccctaccggccttggtccactttcagattcagatgaaatcattgcagtctcccggattaactaaatggatgagccaaattcactgctgacattgatgcccaggtgttcaagtcaaacctccatgatcacagttttaagatgtggttggcaacatgctgccttaagttctctaaagtgttcaggctgtgggatgagaagtgataggactttggagcaaaggctgtcctgactcatcctgaaaactggaaaatggggtacatttcacagctcagtagcttcatgtcttaagaacgagaaatcacttcattatggttataaaacagtaaaggatggataacatccttcaaaaccccaaccacaagaattgccaagagaaagagtgatttttaaatttttattcatttgcttatattatgatctttttgtaattacagaataaaagaaagactcagtaacacc

SEQ ID NO: 270494 - DNA, 741 bp, Homo sapiens
attacattataaccattctgttattcctgctatataccgtgttcttcatttcaactattatattgttcacacctaatgtttttgcttggctctcttcttcttgtccttgtttcatattgctaatattttctcatttcttttagtatggttaccgctccccagtttaaaattcttggtcagcagttctaatattgttgctcctgaccaaaacttgtagttgattgtgttgtttttcttttgaaatgtactcttggccaggcgtggtggctcatgcctgcaattctagcactttgggaggccgaggcgggcagatggcctgagctcaggagttcgagaccagcctgggcaacacggtgaaaccctgtctctactaaaatacaaacgaaattagctgggtgtggcagagtgcacctgtagtcccagctactcgggaggtgaggcaggagaactgcttgaatctgggatgcagaggttgcagtgaaccgagatcacgctactgcactccagcctaggcaacagagccagactccatctctaaaaaatccatgagtatcagctatcccatcaggcactggaatggagggggccccagtccatgctagtactagtaagttctgggtagggggtggatgagtcctaggagtggggggccccaggcacacaggaaccatagttaaccactcttcacctacagaagagctcctcaggtcagcttcactgtacagtccccttctaccccag

SEQ ID NO: 270495 - DNA, 799 bp, Homo sapiens
attacattataaccattctgttattcctgctatataccgtgttcttcatttcaactattatattgttcacacctaatgtttttgcttggctctcttcttcttgtccttgtttcatattgctaatattttctcatttcttttagtatggttaccgctccccagtttaaaattcttggtcagcagttctaatattgttgctcctgaccaaaacttgtagttgattgtgttgtttttcttttgaaatgtactcttggccaggcgtggtggctcatgcctgcaattctagcactttgggaggccgaggcgggcagatggcctgagctcaggagttcgagaccagcctgggcaacacggtgaaaccctgtctctactaaaatacaaacgaaattagctgggtgtggcagagtgcacctgtagtcccagctactcgggaggtgaggcaggagaactgcttgaatctgggatgcagaggttgcagtgaaccgagatcacgctactgcactccagcctaggcaacagagccagactccatctctaaaaaaaaaaaaagaaatatattcttaaaatatctttttattttagcctacaaactgcttttcatccatgagtatcagctatcccatcaggcactggaatggagggggccccagtccatgctagtactagtaagttctgggtagggggtggatgagtcctaggagtggggggccccaggcacacaggaaccatagttaaccactcttcacctacagaagagctcctcaggtcagcttcactgtacagtccccttctaccccag

SEQ ID NO: 270496 - DNA, 464 bp, Homo sapiens
acatcctagttcttaaatgccttggaccagaagtattgtctttccttgctagaattgagtcgtggcctcaaatcagctgcacaggaggtactatatctctgtcaccatcaagaatttgcatgacaatccaggtttacatgtaacctgcttgtaccttttaaagggaatctccacttcaaatacatacatatctagtctgtgattcatgacttttgccagattttgggagctgtgtggagcaggaacctgaagagcttagctgaaaacctctcatcagtaggaatccactgaggtagttacagatacctgaggctcagatgggaagccctggaggaccatacccaagaataggagcaaaccagctcaacgccatgccctctgcctggtggttcattgtgattggtttattgtgtagatattgaagaaaaagagaatattttaggttgacatttttaagccaaaaa

SEQ ID NO: 270497 - DNA, 315 bp, Homo sapiens
agtcagccctgacacattaataccctgcacagatcagagactgctggccatacagactcaccaagccacagacttgtcttccacaagcacgttcttacctcagtcacgaagtgaccaagccacacgtactaaaggttgaactcaaagatatgtacagggtattaaacgaataccgaggggaacagttaacttgaatacaaggtcaaaaaatccagtgctgacgtcagatacaagcttcaaggacaatttcttttcaaaggcttattccagtttcatgaggttagcatgaggtgtatgcatttgccaagggcaaat

SEQ ID NO: 270498 - DNA, 741 bp, Homo sapiens
aaggtgaaaaaatgctttgagaactacacagaatgacataggtcatacgggaaagcagaccatagatcatttgcttttcttgtgactttaatacagaagtgtaacactgctgtatgacagtagacctcaaatgcaaaaaaggggcagggaagggacggagcaagcatcactttagtttgcggtaagaattagagtcgaggtatgttctgagaataaagaaaaaagtactggttaaccaaagtacaggaaggaagggtatgtcatgttctatatttcacaagctgtaagaaaattagcttttgtttagtagaaatgtgggtaaatttctcacagtataactttcagactaatttatgacttcagtcaggctttagaagaaacttctggtgcatagtgattcattctgatataatttactaggaaaaaaattgaaaagtgtttttttaacttgaaagttctcaaatatgtattactggtgaattccattaattgacaacctgttatgaaaatgcatttttctagaagggcatttgataaaccaaatttgaatcaagtagattgggaattactttatcatgtggctgaagaacacaaccatgacaaacagattagtaatatatttttggaagtgaacttttatttatgactttctaccttgtaataattttatatcttaagatacagatagcatttaaaatcccagtttgcgctgaatagatcaaacttggaaatagtatgtgt

SEQ ID NO: 270499 - DNA, 728 bp, Homo sapiens
tttggccgtggcgagggttcccaaaatggtggtgctgttatcagggttcacctccctttggtttttccaccttcatctggaaagtggagccagtctcccctgcttataggctttgcagggctgctgacgtgttcttggatagaaggatgctttagagaccaccacgtgccgcaggtgtggccgttaatacgaggcattggaacaattctttgccagactctaggctgcccaggagctgagcggtatagaggttgagagcctggcagcctgggttcaaatccagaccccaccacttcctagcagggtgacctcagccaagtgatttctctgggcctcagtttcttctctgtaaaatgggactttgatgaggattggaggagtcagatcatgtaaagtacttagaccaatgtttcctacataacaagtgccatataagagccatcatttggccggacaaggtggctcacacctgtaatcccagcactttcggaggccgaggagggtggatcacctgagatcaggagtttgagaccagcctggccaacatggtgaatccccatctctactaaaaatacaaaaaaaaaaaaaaaattagccaggtgtggtggcacgcacttgtaatcccagctacttgagaggccgaggcaggaaaattgcttgaacccgggaggcggaggttgcagtgagccaagatcacacctggctgacaagagtgaaactccatctca

SEQ ID NO: 270500 - DNA, 391 bp, Homo sapiens
tcgcacagtggggtacgatgggctactctgcccaatctgtgtactctccttgggctactctgcccaaactgtgatttggggcatatagctatgccttctctggttcctctgtaccaaggtctctccagtggctacctcttctactcagcaggacagagaagctctcttggtttttattcttaggatccaggttcagaaaacaaataaacaaacaaacaaacaaaaaacctcatggtagctaatctgccccctcccttctctatgaaatgggcaggcagagaaaatccccctggccctgcctagcccatccattcctaagggaccttcccatagccagattgcaagaggagagcaaatttaaatgaaataaatatgaatttcctcctaacaa

SEQ ID NO: 270501 - DNA, 730 bp, Homo sapiens
tggaatctcgttgctggactctgtgccccgcagtggatgacagttctccatcagggtctgcagtcctctaccctggacttgctgcatcctggagcccccagcagtcaggtaccggctctcagaactgcctgcatcccattggcctgagctgctgtctgccagggctgctggtaaccaggcccacagggttggatattcccccaacagggcagctcccagtccaagcccaactgttaccagcccagaaagatgtttcaggatacccctttcctccccacttccctgccctctgcagctccagctggtgcaccccatctttctctccccctccctgctaggctgggccctaacaggagacctttgaggtggttgggcttgttctgcaaccttgagtacccttgagctactgcctcactcctcagttttcttcttcttaaggtttctaattggactttgccagtgtatttatttcaaaactggtcatcttactgacctcgctcatagtctcttattacttttctagttgattctcttgagttttctggataaacaataatatcatgtacaaataatgatgacaatttctcctcctttccaaatgttgtgtttccttttgtgtattaatgtactcttgccttggctaaaacttccaaaacaatgtaaaataattgtgttaatagcaggctttctcattctaccctgactaaaatatgaatgaccctggctaggt

SEQ ID NO: 270502 - DNA, 407 bp, Homo sapiens
acagaacatattctaaggtccaccacatccttggacataaagcaaatcacaataaattcaaagaaatcaaaaccataccaagcaaactctcagaccatagtgcaataaaagcagaaatcaataccaagatctctcaaaactaccagaaaatggaaattaaacaactttctcctgaataactcttgggcaaaaaacaaaattaagacagtaattaaaaattactttgaaattaatgaaataggagacacagcttaccaaatctttgagatgcagttaaagcagtggtaagagacaaatttgtagtgctaaacaccttcatcaagaggttagaaagatgtcaaattaacaacctaaagacagtcagataaacaagaaaaaagaacatccaactccgaataaagtagaag

SEQ ID NO: 270503 - DNA, 410 bp, Homo sapiens
gacccaggcacatttccgaagctctctccttccccgccccctacctcttcctgcctcctggacaaactttcccagttctgtcttccctctgcgggcagcatggacagacgcaaggacacgccctgtctgctgtccgctccctgtctgtagcacagctgaccaggccctcagtgaagcctgcgctccctggatgggggaccctgtagtgtctgtagggatactccagcctccccggccaccacacggtccccgaacccttggctttgacatgtcctaacctgtggcccttctctcctggggtggtcagatccatggtctgtgcctcgagcatcgcctgtgtgttgtattgactcccaaattgacttggccagtgctgcccctcaacagggttcccaaaagcatcacaaata

SEQ ID NO: 270504 - DNA, 127 bp, Homo sapiens
tttgtgcagatcctattactttgccttggttgcttgctataagacttgtttaagatagaacttgccctgtggagaagaatagagtagaataaaataatttaaaaataagaaaaaaaaagattaaaga

SEQ ID NO: 270505 - DNA, 766 bp, Homo sapiens
  misc_feature (23)..(23): n is a, c, g, or t
  misc_feature (102)..(102): n is a, c, g, or t
  misc_feature (296)..(296): n is a, c, g, or t
tgtggtggctcatgcctgtaatnccagcactttgggaggccaaggtgggcagatcactaggtcaggagattgagaccatcctggctaacacagtgaaacccngtctccactaaaaatacaaaaaattagccgggcacggtggtgggcgcctgtagtcccagctactcggaaggctgaggcaggagaacggcatgaacctgggaggcggagcttgcagtgagctgagatcgcgccactgcactccagcctgggtgacagagcgagactctgtctcaaaaaacaaacaaacaaaacanaaaacaaaaaacaaaaccccaaacaaaacaaaacattgactcaattataaccaatgtgccacatcagtgcaagatagtatgggaaactgagggagaagggggtatttggaaacactctgtattttctgcttttttgtaaacctacaactgctccaaaaataaagtattaaaaatatatacatatacataaaaatgaactaacgtgtttttgtattatgataatatggtatccctgaaaagtaactttttctgtgctgcattaatgaacttagttaacaaattgcatcctgtcaagtcatcctaaattacacacttttggcaatggctagttttcagggctaaaaggaaaaaaaatgactttgtagaagtcaaaaacccacaaacctagctttatgcaaagcttaattttattgtctatgtagttagaaaacagtctgaaagaaaactcagtgttaaaacttatctatata

SEQ ID NO: 270506 - DNA, 217 bp, Homo sapiens
  misc_feature (202)..(203): n is a, c, g, or t
caggcacggctcgccccgtggagcccttcgtttcttcctcaggaggtcctgggacagaatcagtctcttttcctgccagggtgggctccgggcacctggtgggtgtgtagggctgggcaggtgtggatgtggcaggtacgggcgtggcaagcaccagccgacggccgcagccttccgactctgcacgccactcttcccgcanncgccagcgaagccg

SEQ ID NO: 270507 - DNA, 393 bp, Homo sapiens
gaggaagcaggcttaggattggttcgtgtgaatgtcttcagtgggctctggttatctggtacctggcccggggtgatgagggtagatagaggcccagaaggtgagagcctaatacccagagcggtcgggggggtgggtaggctcagggctggttggtttgggaagcatgtttgtgggcccgttggttaccgtctcaaggaatgggctaggcctgggtgtggctgtccttctaggatcagcaaggcagcaaatatcaaagcaccagaatacacaaagtaaaagactgcattaatacagggtagtttacaaagaaatgggaaattgttggttctgagctgggtggggattgaaacggtgttccctgcagatccatttaaagtctctctgtaaata

SEQ ID NO: 270508 - DNA, 953 bp, Homo sapiens
gtaaagagagaataggagaaattacaaatcatatacctggtaagagacttgtacccagaatatataaagactcttactacccaataagacaactaaaaaaatgggtaaataatttgaataaacactgctttaaggaagatacacaaatagccaataagcacaagaaagaatgctcaacatagtatcagagaatagcaaaccaaaactagatagagatcccatttcatatccactagagtgactaaaatcaaaatgtcaggtaaacaagtattggcaaggatgcagagaaaatggaacctgcatacactgctggtgggaaagtaaaaagatgtagctgctttgggaaacaatgacagctcctcaaatgattaacatagttatcatataacctaaaaattctactcctaggtaagaaatgaaaacacatatgcacataaagacttgtacacgtttatagcagctttagtcaggacagccaaagggtggaaatacccaaaatgtccaacttacaaatgtataaacaaagtgctacagccatacaatgaagtattttcagacatactaatgaatgtgctgatacatgctcgaatatagatgaacctcttaagacatgtaaagtgaaggaagccagtaaccaaagaccacgtattatgattccatgtacatgaaatgtccagaataaggaaatctatgagatgaaaagaggtagtatggatggcgggggatgacaggagaaggataaaagctaaactatacaaggtttctatctgaggtgatgaaaacattctaaaattgattattggaatggttgcatttatctgtgtatatactaaaagctactgaattacacaccttaaatgggtgaaatgtatgttgttacaataaagcgtttttcttaattatatatgatcccatttataacatgcttgaagacaaaaatatggagatgggga

SEQ ID NO: 270509 - DNA, 838 bp, Homo sapiens
atgaagttcagaaaggggtaaatgcagttttggggagggctgagactaagagagaacacaataagacaggcaattaagactgacatgaaagatcagtcacattgataggatatactcttgatatgatataatgagaatggcagtttaccgctgtggttttcttttcccaaaacccataaccacagcctaaccatgagaaagacatcaaacaaatcccaatttgggacattctgtagaatacctaacccagtattccttaaaaacaatgaaagtcagagatactgtcacagccaagaggagcctagggagacatgacaactaagtgtaatgtggtatcctggatagaattctagaacagaaaaaaattaaaaactaaagaaatcatgtatgagcttcagttaataaggtatcaatattgtttcattaattttgtcaaatttaccatactaatgtaagatgtcactattataggggaaactggctgtggtgcacatgagaactcgttgtactatcttcacaatttttctgtaaacctaaaactgttctaaccctaaacctagccagtaatggtgccttggtaattaaaacaccatgctgatgagtatatgatttctagctagctttatgaaccccatgatagaatttggatatgtcagtccaaatttatcactcttagtggaaaatcagggtaggttcacttcattgttaagaatacaacagtaacattattcgcctttgtaacttaaaacacatcccagcgtcacataccatttgtacccccacctcccctctcaaacccattgcttccccactggccgccccctaccccccaccaaaa

SEQ ID NO: 270510 - DNA, 273 bp, Homo sapiens
gaattgcttgctgtaaatagaaagatttttctagttacacttaaatgataaaaatctggttcagctggctggatgactataaaaaatgtcatagcaaaccactttagggcaagcttgagaaggtgaaatagtgcagatgcatgaaatgaaaatatccatacattcatttatttaatttagcaaaaaacttcagagcacctactgtattccaggcctgtgttaagcagtagaatacagaaaccaataaaaaggagtatgcactatctagatgct

SEQ ID NO: 270511 - DNA, 380 bp, Homo sapiens
cttctttgggaaaaaagcctttgtaactcttctttcttcttcctgcctaggacccatgtgcacaggcttagatgtgcaacagccatatctaattacaataatggcaagagccacctactatgctggtgaaacaagaagacagaaaaagaggaccactgctaacccatttgacacctgtggaattagaaataagtgctatagaaacctgagggacacacagggaaatcagaagactaagtggagaagggagaatcacagactgggttttgtattagaaaaaattatccagaagctgataccgtctgtcttaattaccatctgttaatttccttaccaagttctggagattaaaaatggacactggaggaacctaaagttat

SEQ ID NO: 270512 - DNA, 928 bp, Homo sapiens
ggcgctctggggccgggatcggcgtcggggtcggggttggggttggttcaccgcagcagccccagctcctgcgccctccctggactgaggtgtgctcgctttgaggagaagcctggagtgatccgctgcctcgggtcggaacgtttccattcattccgctagcatttattgagcgcttatgatatgtcagtccccggagtccgaaagaggaatcagacacagcttccctgccctgtatgttacaagtcactctgcctctgtggggagaaggcaacttcttcatgaactcgaacatcctttgcaattctgtatcagatacttggcagggtttaaaaaaacatggcacctcttataacttttcacccccaatattatgttttatctgctaataaaataattatttggtaaaacacccgcacaggcgttcacttgaccctcaaaacaactttgatttttaaaatgaggaaaatgaaaattaaagaggttaaatggcttgactaaatcacagctgtgattaaatcgtaatgatgaaaccaaaagtcaaagtcctggtctccaaatcttgtggttccccagtatgcataattatcaataactgccttgctttccaatacttttattctttcttctacaatattcctcactgttaccagtaagtttggctgtctgaactgacatcaaatttaaaaggactgcagaaaagagaatcagttcaatgtatgggaaatcatttcctgaagagaattcttcaataaactgcttattggtatctgtgagttctgttttgttaaaataatagaggagcagctgactcttttattatttttaaatttttgtgacagagtctcgctctgtggcccaggctggagtgcagtggcgcaatctcagctcactgcaacctctgcctcctagcttcaagcgattctca

SEQ ID NO: 270513 - DNA, 837 bp, Homo sapiens
tagcaggtacctcattttctgaagatttattctttaagctggacagaggctgttttcattaacacagtctcgtgttcttccggggtctggtacatggggcacaatgcgggcttcattatccaggaggaaaacatcttttcttctggaatcttcagccagctccaagttccaggacagcacagcagcagctttcctctttcctcaacttgtgaatgagaacacattcttcaatacagatgagcccaggcaagaatcattcagcacactttgcacagtgggggcctccttctcacctctttctgctgctgcttcttccagatgaatcagagtgccagccacgtgtaccatttgtaccaagtccattaaagatcgatgagcttgttcttcatctgtaaggacagactatcctcacccttctaatgattttaacagccacaacatctccaacaaataacgcacctctttttattattttggagatctaccttttaacagtacagcacactgagaatcactacagcctcatggcctgtaacatattacagtttctttctacatatgagagcttgtgatgcaccccaaactaccaatgtttcagatgtgggttcttctgtttttaggaaatactgtgaaatcgtttgctagagaaaaaggaagaaagatattggttgaaataaaagctgggctcacctttggattttaatgtgcactctgcccctgttgtgtagcatgattaatacatatctgaactgtattgtaatacaaagactgtttctctttactcttttaaatcaacacactgtcatcaccaatatattgaattcaaataaaaaaaaa

SEQ ID NO: 270514 - DNA, 344 bp, Homo sapiens
gataacaatgactgtcaggtttgttcagacctagcttatctatagaaagctcgcttaggtcttttgtatctcactcagtaggaaatttccatcccagagacacagcttcagtataagagactggatagagttctactttaaagatggtagcatgaagagctcccatagatctgcttcccagtaaagcaaacaaagctagggaaaactataaaaaagcaaccatcaaggctgggcatggtggctcatacctataatctcagcactttgggaggccaaggtgggagaactgcttgagtccaggactttgagaccagcctgggcaacatggcaagaccctgtatgta

SEQ ID NO: 270515 - DNA, 571 bp, Homo sapiens
cttttgaagcactgtaaaacctgaatatatgggtagtgaggatataatcggaaccagaataaggattgtttttaaatactgagttcttcagtgtactgtgaagtgctgggaggtactactaaaatgtatctcttcttttctcttcattattaatgctactgccaaggttagctcctcccctgactgttagaatatttcgttacttctgtgggaattacttctttcatgctgcttatgagaagttgtgtgtgtgtgtttgtgtgtgtgtgtgtgtaccatttcttttcagataagtggatattcaatatgatagaattgaaatgctaaagaactataaggaaggcctttttcagtctcactcaaaccttttttcagtgtggttaccggttcttgcacccaccctggttgcttaccatattgcagctttgttacttgaatagtatttcagtttttaacacatttgtttttgtgttggttctgtttcctagtatggctgttttttttgttttgttttgagatggtgagatggggtattactccagcctgggcaacaagagcgaaattccgtctc

SEQ ID NO: 270516 - DNA, 443 bp, Homo sapiens
tactcactctgtttatatacataagaaattggctgatctgttatcactgatcgttaccaccaccctttgtatcgtaattaaagtgctttatagtaatggcattgtggaagcacacaggtaagtgtgtgctgcttatatggatgaaaatgagaaatcactttactacagcctttgcgtttcctccagaatgagtcgctttttctcttctgacttaacggtgattgtttgcttcatgtctttgccctctgtgatttctcatttttgtttaagtaaaattgccatggtgacattgctgcacaattccctagtgcttcggaggtttcagtgagctgagattatgccaccacactccagcctgagctgagattatgccaccacactccagcctgagctgagattatgccaccacactccagcctgggtgacgagcaaaactccatctc

SEQ ID NO: 270517 - DNA, 364 bp, Homo sapiens
ggagttcgaggctacagtgagctatgatcgcatcactgtattcaagcctgggtgccgcagcaagaccttgtctctaaaaaacagaaggaaaaaaggggggaaagacttgaatagacatttctctggaggtgatacacaaatggtcaataagcatatgaagagatgctccacgtcgctaacttccaggcaaatgcaaatcagaaccacaaagggataacacctcacactcaccagaatggctgctctaaaaacaaaacagaaaataacaagtgttggtgaggacgtgggcaattgggacctttgtgcactgttagtgggagtgtaaaatggtgcatctgctgtggaaactgtatgacaattcctc

SEQ ID NO: 270518 - DNA, 488 bp, Homo sapiens
tctgagttaccaggatgctgctggaggcctgtgctgctgagagggacaaatagaatcctgatatgactggaaccaggaatagggccaccatcagctctagaacccagggagcaaatggcaggagcaacaccaggcagtcggccctcagcccagcacagacctggtgtgttggcttcagaaaatcctggaaacatctctgctgtgtttggagctcctattctgtgagaagtgttttataggctttgctccatttaatccttacgataacccaataggacatactattaatgatcccctttttttcagaccggaaaactgaggttcggagacattaagtaatttgcctaaagtcacacagccacatcctgtaggacttggaattatgaactcaggtctatctgaattttaaagcctggatttttccccctttgctacatgcctgggaagaaccatgtattgacaatgaagaatcctaaactctcgttaat

SEQ ID NO: 270519 - DNA, 672 bp, Homo sapiens
tttaaggaaaactccaggcccaaatggctttactggtaaattctatcaaatatttaagaaataatactgatcatatacaaatccttccagaaaaacaaataggaagaaatatttttcaactcatttgataaggctctaatatcaagacaaaaaaaaagcaaacaagaaaatgacagatgagtatttctaatgaacaaagatgtaaaaatccatgacaaaatgttagcaaatcaaatccagcaatatataaacatcttgcacacacgcttgctcactctctcgcatgctcattctcttgcatgcactctctctctctctctctctctatatatatatatatgcagcaatggatttatcctgggaatacaaggctaattcagtatattcaaagccaataaaaaaaattcactaaagcaatgttctaagaaaaaccatatgatgatgttattagatgtgaaaaaagctttacaaaaatataacatccgtttataacaactctcagtaaactatgaactgaaggaaacactctcaacctaaaaacagataactacaaagaaactacagctaatttcctacttaatgatgaaagactgaataccttccctgtaagatcagaaacagggcaagaatatctgatgatattggaggtcctaggcagtgcaatggcagcca

SEQ ID NO: 270520 - DNA, 418 bp, Homo sapiens
caaaagataagcaccttaaaattttcttatatgaacactgtttttgaatcattttgctggatttttcaaacacttagtttcaaaaactaagtgaatgactctgacatgtaattaaagcttgagcccaatgactgcaagctaaggttaattttgagctagcaaacggaggttattaaaggcccatttagttccttctggaaagcctttcctgcagatgtcccagcctgcttaccgcagccatggaagaagcctctatagtgagagaagctacagagccctggaaagctggggccccacaggcagatgcagttaaggttaagatagaaggggtttgggagtgtcttattgaagataaaattgttactgttttgaggcagttttgagaggttttaaaataaccagctagatgtacattaaa

SEQ ID NO: 270521 - DNA, 468 bp, Homo sapiens
tccctaaatgctgggattacaggtgtgagccaccaggcccgcctctagattcttatctattatgttgctgcaaaagtaattgtggttgatggcaaaaactgcttttgcaccaaccctaatagttaggtccagggaccagggcttgtggccaccagagttccacctaaaatgagcaaacatttgcttaactgggtgtgttgtcatagatgctgtgctgctgggagcaccagctgccagatgggaggggtgaagggcagggagcccagagcccagcatggagtctccacatcagcccaggacccgcacgcactgccactgctagccgtggccacgacagttccctgtgcctcagagcctcattttcttcatctgcgaggtgcagatagtgcacccctatgaagctgtggtgaggctgagattaattagggatcgtgtgtgggaatgctcctgaaactcccagcaagtctg

SEQ ID NO: 270522 - DNA, 420 bp, Homo sapiens
gcagtgagaataatagatgtattttggttttaacttaagcagcacactgaagccggtatctatttggatggcaaatcaaggctatttaagtgcttagaaaacatggaaagagggaaatttacatagtcacctatgtggaaaagtagtatgtataaagtggaaggcaaagggaataagagaaatattttctttccatctggaactgagaggatacttataggatacagatatcaaaattttgccatgcatacacaaaagcttccagctagaaaatggcctactttctgggtatgtgtcaggcaggttcgtagattctagaccacttgaacatattgaacacacctgaagaagaaaggaaatgaagggaatctagtatcagtggaatctgatgtctgccaggcactctgctggatgctttgc

SEQ ID NO: 270523 - DNA, 429 bp, Homo sapiens
aagggttttttcctgtccaggagtatgatatgcaatgatggcttccacattgattgatatctgtgatttagtaacatcaccaaccttcttttggcatactgattgtagttcattgccacctgttctccacttatctcttgctgtgattcctattgttctgttcattctattactaaataaatctgtttcattttgtaaggctgtgttttggctcgtactacacaacaataagcccttggaaacttggctcttcacacttacttctgatatcattttaatggattttggcacacacaggaaaactacaggtagtccattttctaaaggattattttttcagaattgatgagaagatattaaaatcttagataaggttttttcttaaattaaagtttctttttgagctcttcaaaactgtaagatgatgag

SEQ ID NO: 270524 - DNA, 386 bp, Homo sapiens
gctgaggacccagatactgttcaggagtccttggtgccccaaagagcccaaaagtcaatgaataaacaaggtttccagagaacccaggaacaacggccacatccccgccgcccagcccgtaagcacccgtctgcgaggtcacaacagcatggaccaccagggagagggggactgtgggtgcctgagtatctggcagtacaaggtgctccccaatattcaagtgaagtgaccagccaggggccacaggaaaggcatcagaactcctcggggacacgagaagttcaggcagggtcagggcgcttcctggagacggcgccaagctggagcctgggacccaaggtggaggttcctgacagctgacccccccacctccctctccccctctc

SEQ ID NO: 270525 - DNA, 206 bp, Homo sapiens
gagtctggcatgccaggaagcgcttgcatgaggctgcctgaacttagccctaggctttgtgttgaacagcatgaaagacctgcccttctaaaggttatattctgatgtggttgaacagacagtaaattcacagcaagagaaaagggaggatttctgagagtgacgaatgctatggagtaaataaacaagataagtggtttcaaaga

SEQ ID NO: 270526 - DNA, 432 bp, Homo sapiens
tatcaaataaacctctaccctcaccaaaaaatgttagatttttttaaagaaaccatgattccatattccaccagtcagcctcactggcagacgcattagttcaggcctaaccaggagtgaggatgttcatggctggactgaaggaactgtcctgctagggaggtctgggccggccacttatgggtcagactttggaatttttggaagtagtaaaaggaggcttttgtctcccagaatagcaacagttatcatttaaaaccagtggcttctatatacagcaagtgcttctatatatacactcatgtattgtttatataggactattttaagatctgtgtcacatttttctggtgtattttatggtgggaaaattcaattggaaaaaatgtacttagatctggtggggatggtaaggtaaaataagtacttaaa

SEQ ID NO: 270527 - DNA, 462 bp, Homo sapiens
ggaagcacacaaagtcggaggtagtgcagccaacaccaacactacaactcataccagcctgagaccaggacagcctccactcacagccaacactcgctgaaacaggctgaaggacggggagggggtggaacttgagaccacagtcctggggacctgcagttgacactctcttgctgagaggtcttaggtgagagacattttatttgtaagcttctagatctgcaggtttcaagttgcccctcgcttagcatgaagccttcagaagcccagtggtaccatgggtgacagctttaggcatcttgtggtatggagatggagactgaggctgactcaaaacctggttatggacacggttggtggaacttgccatggccagaagactatccagtaatttcaatttgctcagcaatctacacaatggagtttgggttttttgtttttttttgttttttccagaatcag

SEQ ID NO: 270528 - DNA, 158 bp, Homo sapiens
tgacccattttaatctggataagggcagaaatggttcacactccattatttgtaaagttatctgctgttagctttcattatttttgctacactcattttatttgtatttaaaatgtttcaggcaacctaagaacaaatgtaaaagtaaagatgcagga

SEQ ID NO: 270529 - DNA, 547 bp, Homo sapiens
agagccccttctgggcctggagccagctctaaaaacataatcatatgaattattgaagatggtgagagtaaggcttgttcagtctagagagtttagacaataccttcacctctggaagaaccctgctaggtatgtgaggaactctagcagagggaaggggccccctggcagatgggtttccctccaggatgggcatttgcagttgcctggggctccttctactggccataccaaaacacttgccctggacagtgtcaaagaaggctgagtgttggtgggtgatcagcagcatctctttctgggggaatccagccccctgtctggaggcctttgcgtcacccacatcaccatagcaactggaacatactcagactgactcccagaccttgggattcagcctctctctctcctacttcctagattttcctcgctggacttaggttggtccttggttgcgctgatctcttagcactggtagccagatgccggtttctaaaatcccatggaactgtcttagggggctggccagtggtgaacctgagccatc

SEQ ID NO: 270530 - DNA, 219 bp, Homo sapiens
aaaacgcttagcaagtttgaagaaccgaaaagggcactgtgtctgagtgggtaggcagggcagaatgtcgcgctggtgaggcggggctggggcactgtagccgtaaggaacctggatgctgaacggaggggagagtcgctgaacaaatggtcaagggaggaaataaacggatgagcgtgtcgcctctcccgggcgcagccaggtggcttccccgacgct

SEQ ID NO: 270531 - DNA, 600 bp, Homo sapiens
aggcgtcagcttcagactcaagcaaaactggttttagaggaaaacaagttgttgctggagcagttggagattcagcaaaggaaagccaaggacagccaccaggagcgcctccaagaagtttctaagctgactaaacaactaatgctcctggaggcaaaaacccacggccaggaaaaggagctggcggagaacagggaacagctggagattttacgtgccaaatgccaagaactcaaaacacactcggatggcaaaatcgcagtggaagttcataaatcaattgtgaatgaattaaaaagccaaattacagaaggaagaagagacagaaagggctgagatggaggagttgatggagaagctgacagtcctgcaagcgcagaagaagagcctgctgttagagaagaacagtttgacagagcaaaacaaagcactggaagccgaacttgaacgagcacagaaaatcaataggaaatctcaaaagaaaattgaggtcctcaaaaagcaggtggaaaaagccatggggaaacgaaatgtctgctcatccagtacctggcaaacctgtgttggctggcagaaaaatatacccaggaacgtgacagt

SEQ ID NO: 270532 - DNA, 604 bp, Homo sapiens
tcaaaagatctttaaaaggtcatttttatcagctgactctcattagtatttcctaatagccaataattgtgttttgtgaggtcttctgtgccaagtttttatcctcctcttttgattttcagtttctaagctgactaaacaactaatgctcctggaggcaaaaacccacggccaggaaaaggagctggcggagaacagggaacagctggagattttacgtgccaaatgccaagaactcaaaacacactcggatggcaaaatcgcagtggaagttcataaatcaattgtgaatgaattaaaaagccaaattacagaaggaagaagagacagaaagggctgagatggaggagttgatggagaagctgacagtcctgcaagcgcagaagaagagcctgctgttagagaagaacagtttgacagagcaaaacaaagcactggaagccgaacttgaacgagcacagaaaatcaataggaaatctcaaaagaaaattgaggtcctcaaaaagcaggtggaaaaagccatggggaaacgaaatgtctgctcatccagtacctggcaaacctgtgttggctggcagaaaaatatacccaggaacgtgacagt

SEQ ID NO: 270533 - DNA, 669 bp, Homo sapiens
agcaactcacctggggacacagggtaaactgagtgaggcccagaacttagacccagctcattctcctttgtaagtagagttaggagtttaatgcttcatccactcaaacttaacacatacatgaacatgtttagtggcctcaaggcagctttgtgtctaaacctcttacgggcaggtttatcaattttgtgcaagtcagtggacagtcactgtgcccctgactttcatccctctctggagaccagttgcttccaagttggtaccaggcagggaataaacatgatcacatggttaagagtctggactttagagtctgatatggtttggctgtgtccccacccaaatctcatcttgaattgtaactcccacaattcccacatgtggtgggtggatccaggtgggaggtgattgaattatggggtgagtcttttctgtgctgttcttgtgatagtgaatgagtctcaggagatctgatggtttttaaaatgggagtttccctgcccaagttctctctctttgcctactgccatccatgtaagaggtgacttgctctcaagcaatcttcccacctccgcttcccaaagtgccgagattacaggcatgagccactgcgcctggcctatatatattttgcaaatacaatcatggcatttaaatttccattaattt

SEQ ID NO: 270534 - DNA, 1127 bp, Homo sapiens
atcattgggtgacatgtaaaaagaaagaatagcccttatatacacacaggtccaggacagcagagcaaaagtacctgcaggcaaccctatcctagaccccatcctacagggtctctagcccaggccttcctagggcccctaccgggagcactgccaggggcctagggccaactaggctggaagccttgccttttccctgtggaggcgcagaggctctggtttgtctgtcctggccccgggatcattttccagcacacagcacagtctagtccatccactctccccactccccaaattcaaggtcatcagggttctggtggcctggagatgggtacaacattctcatactcaggttcctcctgcctttcctcttcagcctgcttctggggatcctgttctggggagccacagccagagactggctcctgggctctccttgaactctcggtgccagcccccagcccccggggtatgagtggacatgtgacacagtgttggtggttgtagaagtgtatgactattactgtgttgctttggaagcttgatgccataacaaaagtgcagaattccatgtttgataactttctgacttgatgaaaatgaattgtggatacagatttcactatccatgaattgtggccttaactttctcatgtacttactttaaatcagagagcccacctgtccaattctagcttctcctgggcatcctgtatttgacacagcccctcccagcattctgagtcatcgtctgctgctcttgcactgtccgttttccaaatgaggaactcatcggtaaggccagaaaggaaagggagaaaaaacaaacaaacaaacaaacaaaaaataggaaaaaaagaaagagcgtatttatagatggtagagaattctgggcatgagaaacccagccaaacaagtggaatgtgtgcataggtgggactgctgatcttgttttatgaaagaaataaaggcaagtcaaacagatcctttcgcaaggatccccatgtgtgtatgtctaacccagtgacaggtaaggcagccaggagctgctgttatttcagtgcaaagctgttttcacaatcacagacatgcacagctcagaaaccctcacatggtcactcaatacc

SEQ ID NO: 270535 - DNA, 192 bp, Homo sapiens
ctgggacttcatcaaatttacacagaggttgtgtgtctgctttgtccctgcttgataataaatacattctttaaataactgtagcagaaaagctcacttgtgagaacatgacaggagtactttgacccatttccctctccatatcagaacttgtgatctgttcccatttaaagtgttcaaaactgccagatg

SEQ ID NO: 270536 - DNA, 424 bp, Homo sapiens
ctgtcctcctgctctttgctctgtgagaaagatccacctacaacctcgggtcctcagaccaaccagctccaggaacatctcaccaattttaaattggaagacaagaatgtcaggactctgagcccaagcctgcacatatacatccagatggcacgaagctactgaagaatcacaaaagaagtgaaaatggtcggttcctgccttaactgatgacattaccttgtgaaattccttctggctcagaagctcccccactgagcaccttgtgacccccgcccctgccctcaagagaacaaccccctttgactgtaattttccactacctacccaaatcctataaaactgccccagccctaacttcctttgctgactctctttttggacttagcccacctgcaattaaaaagctttattgctcacacaa

SEQ ID NO: 270537 - DNA, 430 bp, Homo sapiens
aacctttgcttttctaactttactttgtgagatacagcagggaatatgagacattttagcattctcctgggattacaatcactacatgtttgccagaatggatatcagaatggtagagacacatttctggtgacagaagccaacaagcccaatccactaatgcagcttggaagaactgtgacatatgactcatccttccgctaattgatcaaccatcatcaattatttctattatttgtataatcttaaagtgattgtgttttatgttgcatataattggtatgcagaccataaattactgaataaattagtaaaataaaaatattatcttatattattacttgaacattagggaatagttcagtaaactcagaaaatgtgaatattctaagtcctaaatcttacctgatgccataagtcagttaacatg

SEQ ID NO: 270538 - DNA, 358 bp, Homo sapiens
atcctcctctcaatgtcttaccagggtgcaatcagtgccagctgggctgtgttctcatctggaggcttaactatggaagattccatttccaagctccttcaggctgttggcagaaattatttccttgcagatgtatgactggggacccagcttgttcctggctgccagatggagcctgctcaacatcctagaagctacttgcaattccctgccacaagacccctcccacaggcagtttgcaacatggtggtttgcttcttcaaggccagcaagaaaatctctttagtctaccaagaaggagtcttatacaataaaacaatcatgggagtggcattcccatcactagtgccatattcta

SEQ ID NO: 270539 - DNA, 356 bp, Homo sapiens
gccactggataaattgcacagcacgccggcctgaaaaagcggaagtgagagatgcttttccccacttctgaatctaccagatgctggggttctcaaccatgctccactcatgacttcctttttataaaatgtattttgtgtaattacagtaatttttgaacattttaggcagatttattgaggtattgacatataataaactgcctagagattacaatttgataatatctgagccttagtatacagctgaaatcattatcacaatcaagatagtgaagaaagccatcctcccaaaaaatttccttgttgccccttggtgatcctgcttcctgccctttctacttccctctcacccc

SEQ ID NO: 270540 - DNA, 670 bp, Homo sapiens
agtttagaatcttaagtaggcttatagctgttcttcaagacctgtcaatttcctgagtgttcccctcaataattctttaatttttatacccactgttattggtcccaccctcttccttcagatttcaataatcaaatatagttatttgcttctgaaataaagaaggtcaattcccagcgtgagtgcctggtttatttatactatataacactagttagtggatcttgtatttctacttatttcccaagacttttagattttcccttctgtctcctggaccacacctgctactttatatacattttagacaggtgaactgagatttggaggagtgaaatgagttgcccaagatcatggagctaggaaatgatataattagttttatatgtcctcaaagcctatgtgtgctttttttttttaattaactgcagcacactgctaacctcataagcactaggcctaagctgctgtcttaaattatgtactaatgtcccttatgttgaattcatttctcatttccaaatggatggtgaggaggaagtaggctttaggatataaattttttctttttagtcaattttgttgaaaggaatttgtttatgtatttagtgatagccatatgatggtcactaaattttgttttttaaatatagtttgacagagaaaaagg

SEQ ID NO: 270541 - DNA, 315 bp, Homo sapiens
ggaggcactgtgaggaagggatggagccggaagtaggaagtagaacaagattctacttatgggtggatgagatggccccagaaagaagagcagggaaggcaacatagaacaggaaatggaccaggccccacgggagactggacagtttccacatttgctgtagttctaggcagagccagtcttctaagaagcaaagaatcactgaatggtaaagatacttggagggcctctctaccttcccacccaaaataccttcccaccgatccctgatgcatgaaatcacaccattaaagagtggttcctttgactgtgaaa

SEQ ID NO: 270542 - DNA, 655 bp, Homo sapiens
  misc_feature (1)..(1): n is a, c, g, or t
  misc_feature (15)..(15): n is a, c, g, or t
  misc_feature (23)..(23): n is a, c, g, or t
  misc_feature (64)..(64): n is a, c, g, or t
ntttagcaggcttcnctttttgnttggaactcattcggtcctgctgtcctgtgaagaagtgccngcttctcctttgtcttccaccatgatttaagtttcctgaggcatctccagcaatgtggaatggtaagctaatcttgccatctctttgtcctttgcctacgagaatgtttggagtctctcaaattgaatccagttacttcgtagcaggtccagccttgtcaatgccaataaacatggtccaacaaaaaggaaataagtaacacggtcagtctaaagaagaaaactggcaggtctgccatgcattttatgctgaccactgcgcttctactaatttagactaaagtcacatgaactacttcggcatttacgtcaaaatgttaagtcattgatgtttgtgtcaactgaagtccataagaatttttgttttaatataatctgctgttacggccatttggttctttgaaattaatttcatggctttcacttgcagttattagaggtcacttgtcagatgtggtctatttttctagtctgtcaaaatcatctttgtgtcacaattttgttctctaatgtttcatgttaacaaaaatatatctatatgctatctacatgctaaaattaagccaatgataaatatattcaattaaccaag

SEQ ID NO: 270543 - DNA, 365 bp, Homo sapiens
acatttaaaaatattttacttatcacttcatacagaattttttttttcgttttcaaattctagagtatctttgtgttttattttcttagaatatttttctgacttttctggatgttagcataactgataaggttatttcctacattttgagttagtgtttttacatccaatgcaattaaagatctaaacatttcttttctttccttattttgagaccagcctgggaaaacacattgagaccctatctctacaaaaaatgggaaaattggctgggtgtggttgcatgtgcctgtcctcctagctgctctggaggctgaggcaggaggatggcttgatcccaggcatttgaggctgcagtgaaccat

SEQ ID NO: 270544 - DNA, 250 bp, Homo sapiens
gcaagtgatgagtgtgactttggaccacctccttgaagatgcagctgcttcccaggacttctttcccacttcccacaggctggagagtgggcacccaggctttagtcacaaccaccaagatgaccctgtggggaggtgacagggagagaagatggacctcttggagaggagcagccacttctccagctatggactgctgacataagtactatttagagagaggaaaataaactatcccgtgtaagtcagc

SEQ ID NO: 270545 - DNA, 404 bp, Homo sapiens
aaacatacattggagtcttagcttacagaagaagtaaaagtaaaaattgcagcataaagaaaggaaatgacattcagcatacatttcggaaactgaaagatattttgataaaaacaagaagaagcaaataaatgagtttaataccaatgtaagaagctggaaaaggaccaaatggccaggcatggtggttcatacctgaaatcccagcattatgggagcctgaagtgggaagatacgtgggaccaggagttcaagaccagcctgggcaagagagtgagacactgtctctagtacaaaaattagccaagtgtggtggtgcttgcttgtagtcccagctacttgggaggctgaggcaggagaatcacttggaatagcctgggtaacagagcaaggccccatctctt

SEQ ID NO: 270546 - DNA, 338 bp, Homo sapiens
gctcaggaaaactcacccaagtgaggagttcatatataagtaataaactcatcttgagggtgtggcagtatttaaattacatgagcagtgctaaagaggttggtggattttgtttttaggttgtaaaattaaaacactgtatgaaagtacagaacttgagattgtgggaaatcttgtcagcctaacgttcttacatatctgagttgtttcactagtgaatatactgttgtcagggttcatttgcatacactgttgggttttttttttttaattgatagctttatctttttattctctggtacagagagcatcactccatatcctgaaaactagcgctg

SEQ ID NO: 270547 - DNA, 475 bp, Homo sapiens
cagtccctgcctctggatatcattctctgggatgtgcagtaggtctttcctttcaggaattggatgaaacaaggtgaagtggcttaatgacagaagttatcaagattgtcctactaactccccttgctctgattccatgcttaagagcgatcttatgatttgggccttccatgtagatatgtatactggatgaaaatgtattgatatgcctatcttgagtactttatcattttcccctctgtgttgttaatgctttattagttcccttctggttttagactaaatgtgaaccctttagcagtataacactatgagctcatagaatattaaaattagagggatcttgacagtggctgattacaaacatggtcaaatgtgaatatcgttgaggttaattacaaatcctagtattaacggtttattaatatcacagcatcttatattaactgaataaaagcaaccagacaatcaaaaa

SEQ ID NO: 270548 - DNA, 409 bp, Homo sapiens
gctccaccataaaatatgtaagtacaagatccctggactccttgaagagattatcacgttgtaaatatcagttacaggattatctaaatgaagagcttcagagtttcaattttttttgatagaataattgtaagtagactttgtatccagaatgtcagtagattttaaaatctaccttaaaatttaatgcaaatagaaataatttaatatttataataggtgtttgtgaatcttaatttccccaacagaatagtcttagaactttcagctaataataagtatgtctcacattaacaaaacttgatatttgctaaatgatttctattgttaagtgacaaaaggatgaaaaacatggttcttgtaaaaagggacttccctgtctctaaaggaaccattgggttaaaagaac

SEQ ID NO: 270549 - DNA, 453 bp, Homo sapiens
ttttgtttccaataatttctaatgtatagagccctattaactcctattactggttgcaggcaggcattacacaaatgaaatgacctcatccagtttcttttctgaagagttccatcactttgttcctagtctgtttttttctgcagccatcttacacagcatggtgatctcttatgtcataaatagtcccatagagattattagaagaaatgagtggtaataagaataaagttgagttttaaaagatgaaagaaaaatgtatatgaccaggaaaacttgagctttgactaacaagtaaaagaaaatacctggctgggcgcggtggtcacgcctgtaatcccagcactgaggtgggagtgtcccttgagcctaggagttggaggctacagtgagctatgatcacaccactgtactccagcctagatgacagagcaagaccatctcttaaaaaaa

SEQ ID NO: 270550 - DNA, 348 bp, Homo sapiens
gctgcagccaccactgccatttcaaaggtgagaaggaactgtctgtgtggacctctcatcccgcacagtgagggaggcgggagctgggtggtgcagggaattaggaaaggcaaacctgggacctgctgtgccctgcagtgcagtttccagaggaaagcagcccggggtggcagacatttgcatttggatgttagaaatgctcttcctggctgggcacggtggctcacacctgtaatcccagcactttgggaggccgaggtggacagatcacgaagtcaggagatggagaccatcctggctaacacgttgaaatcccgtctctactaaaaatacaaaaaattagccagg

SEQ ID NO: 270551 - DNA, 240 bp, Homo sapiens
ccctgggaatggaatgtctcagtgtaaagccgaccattcccattcgttctattctaagataggagaaaaccgctctgtggctagaggcaagatatgctggcagcaatactgctctgttactctttgctacactgagatgtttgtgtaacgtgaaacaaatctggcctacgtgcacatctgggcatagtacctttccttgaacttattcatgataaagattcctttgctcacatgtttccc

SEQ ID NO: 270552 - DNA, 404 bp, Homo sapiens
tgctcttctctgctagactctgtgcctcagaaggtggaatttttcataaactattccagctggggtctcatgccagttggttttgaccaatgggtaacaccatcagtagattggaggatggaaaaggaaaaaaggttaggatatgtttcaccacctcttttcctgcttctggctgggttctgatggtggctttgtcccttgaaggctcctcctgcaaggcagccctgctccactgtgccagccttcactgggctctactaacgtgattccctccccttatttcttcaggcctagctgtgctaactcctaggtacctccatgtttcttgtttcctttcatccaaccctaaccctaacttctataaatagttcccgcaataaagtctcttcagctgaaacatctga

SEQ ID NO: 270553 - DNA, 438 bp, Homo sapiens
acatcttagggtcttgaaaaaagaatcgacccctggaacgtcttaatatcttccatcttgaagccagcacttaaggagcgggaccctctgggcccacctccttccagccccaacttctaagaccccagtgaacctggcacctgaagctatagcaggagacagaagtcagtgctccttgtggtttcgatgggcctgggaaccaccaccttccctgcccagtggccacacaggccctgagtccgcctggattccgcaagttgtttagaaccgaagaaccgcacagatccgcttgctcggtgccttctctacgtgtgctcttgcttctgccttcggtcccccaggcctttggaaagacacaggcttatggtagagctcaagctcaacctgtcaacccagtgatcatggcgattaaaaactatctggtcacagcaagacctg

SEQ ID NO: 270554 - DNA, 88 bp, Homo sapiens
tcttcctcggcgctgcctacggaggtggcagccatctcctcctcggcatcatggccgccctcagaccccttgtgaagcccaagatcgt

SEQ ID NO: 270555 - DNA, 502 bp, Homo sapiens
gaggattcgaataatcagggagtgcttgagtgtgttgggggaacgagagatttggacagaattgtgatgtggaatttgaggtggcctttggagaaggtatacaatttagctgtatctcctcaaggagagagagaatcaaaactttgaaacattaggatgagataaaaaaaatcagggagagtggtttcaatagtaattaaagagtcattaaaaagtgtttgaggctgggtacggtggctcatgcctgtaatcccagcacttcgggaggccgaggcgggtggatcagctgaggtcaggagtttgagaccagccttactaacatggcgaaaccctgtctctacaaaaaatacaaaaattagccgggcgtgatggcaggtgcttgtattcccagctactcgggaggctgaggcaggagaatcgcttgaacccggcaggcggaggttgcagtgagccaagactgagccattgcactccagcctgggcgacaggagcaaaactcctc

SEQ ID NO: 270556 - DNA, 559 bp, Homo sapiens
cagaagatacctgttacgattatggctagtggcaacagattatttcaacactgtcttctttatcatttgttgcatatattccacaatgtgtcaatactgagaaaaacacaagcattttaaaatcagaaaataataaacattttccaagtgcattttatgattgcaatacttctgcctacaggtttgggctggagggaatttatgaagcgacgaagtctgttatgggagactgcagcatggtgcctgattttcctttgctttccaaagtgggtcttttcaccattaactttaaaaacacacacagagaaaaagacctcagaggaataagaaatcaaaacttaaactatgagccaagggtccatcttctttcttttgcacccttttggtaccagaagctccaagggcagccaaggaatctggcctgacctgtactttctcatggaaggtctgcactcggttctggacaaacaagtccccaacaggaagtgaaagcccacatccgttgtctttcttgattttatgcagcacgtgcaagacacactccaggaggctggtctct

SEQ ID NO: 270557 - DNA, 168 bp, Homo sapiens
cacagttggaaagagaacaggctctgttatcagactgcttgcactttggatgttagctctgtttcctaatttccttatctgtaaattgaaactgttaataacatctatgttctaaagttgctgggtgagttgaataaaatgaatatatttaaagtgcttagagaagca

SEQ ID NO: 270558 - DNA, 421 bp, Homo sapiens
aaggacggtgtctccattcctggggtgtagcactgggtgggatgggccttccaggaagcagaattgtgacaaaatatacgttcagttttagacaagttgaatttgacaggtgtttggggcagccaagttaatatacgtggctgccagtttgactgaaattaaccaataagcacaagaatttggacagaaatccaagccctctgactccaaataattaatgggtatactttagagcccttgaatctagacaatgcttttgtatttgtctacccttgaaagagtactagaaactgtatgcatattccagcagagggcaatattcaactaaagtggaaacattcaattagtttttgtccattcatgagtctggaggagactcaactgaaagaacaaaacattttgagcataagagcttcctctt

SEQ ID NO: 270559 - DNA, 661 bp, Homo sapiens
atctaaagttctgttgccgcctttaaaaaattttacaattgttaaaaagtctgggttgtgttttttgtttgtttttattttattaaatgcctcttgagtcataagaactgtgttgtttatctgtggaaaagacaggttcaattattttctgaaatattccccacattctggattttcctgattgcattcccatcgcgtcatttgaaatattcttctgcccctatatttcctgtaaattggtaactgggaatacagatttgattagatgcaggctttattttttgacatgaaaataatatacatagatggtgttgtaaattgcatctcatcacgtggcacacaatgtctgtttctctttttgtgttattaaaattgatccttgggtccagatgttgtcagcttgatctgttgtaaagtttcacatcagcttttttcctaatgattttaatagccattgataattattgcctgggtgtaatatagatgttacatgcagaatttagaagcttctgaatttggaaaagctcacctatttccaccttctcactcctgatttgttctggcatcttgaccatttattgtctctttcttaatctttaatagacttctaattcttgaatgaactattctccagctatgttacatggaacacaacgctgtc

SEQ ID NO: 270560 - DNA, 350 bp, Homo sapiens
taatcagtttcttaatacagaaaaggtgcataatcatttgtaccacacagggctgtgataaaaagtaaatgctatagatgtgtgttttgtaaacaccaaagtgttacataaatataagacacctctatgaccagttccttttgttacatactttattttttattaaatatttccgtctaaagcaatttcgtggaaatgaaagtctggttcagaatctctgaacggctgaaaattgtagactcacttttatagttcatgttcttttgtttatttgatcctaccaactcacaagattaaaaaaaaaaggtacagttccacaccaaataaaaaagtgtactcaagtctctcta

SEQ ID NO: 270561 - DNA, 410 bp, Homo sapiens
taaattttgccctcaaaaagctcttaatgtaagaagaaaagtatagtagcccccttatctacaatttcacttacagtggtttcagttacccatggtcaaccatggtccaaaaatagctgaggacagtacagtaagatactttgatagacagagtgggagagaccacattcacataacttttattgcagtatattgttgtatttgttctaccttattgttagctatttttgttaatttcttactgtgcctaatttataaattaaactttatcataggtgtgtatatatgggaaaaatgtataaataggatttagtactattgatggtttcaggcattccctggggttcttggaacataccccctgggggaataagcagggactactatatatgatattttaactttaatat

SEQ ID NO: 270562 - DNA, 398 bp, Homo sapiens
ggaagagagttgcagagatccccaagagtcagagcagtaaagcccaggtccagaggagagattcggaggcctgaattctaagacagaagcagattctagaaggggctgagaagcccatcaggctctgcagcagagccggctcaaacctctaaccctgcgtgggagcaagacagcgtgtcccacaagtgtccagctgtggttatccctcagtcatgtaaggaaatctgttccccattaagtgcatctgtttctgcacttcttggttctgttgtctttccctttcatttttcagcaaagttttgggattaaaaaaaaattccatcctatcctttttcccccctaattcattccatctacaaatattttgtatgtatctcagaaagataaagacttttaaa

SEQ ID NO: 270563 - DNA, 489 bp, Homo sapiens
ttaaaatgagggtcaccagcctgggtcctagggtaaacgtttaattctgacatcagagtttctgtttgaaggaagtagcatatgaaaattttcttttttaaaaaattcagttaaataaatgtattaatttagtatggagaggttttggatggtttagcaagatataccacaaataccaattaagatacacaatatttaaagcaatgtccaagaacaattttccaaaacataagcccttagctcttcaaagtagaggtttttttttctccactctgtaatgtcttacatggggataatgtaaagaaaaaaggagactccttggttttgctgtggggtgaaacagagctaggagctggccaggcagacatgttctctgtgatttgcatgttatcaggaagcctctggcttgctgaaattcttcattagaaactccaactccaatttgatacatttcagacgtcacaattttcactaataaagagattgaag

SEQ ID NO: 270564 - DNA, 440 bp, Homo sapiens
agttccttaatgtctctgagtcctgatcttttcatctctaaacttgggaccacgtccgatcttttgaggaggctttccaaagtggaggctttggttgcccccgtcctaatgctctggcagtggggtgatgttgaggtttgtaggaataaggttgtagatgcctggctctgctgaggttcagcctgtcagatatttaggttacaggctctagacctgcacagtccagtacagccactgacagccacacgtggctactgagcttttaatatgtggctggtcccaattgagacgtgccgtgagtgtaaaatgcaccctggatttcaagacttagtatgaaaagaatgtaaaatacctcgttactaattttatattggttatatgttaaagtgataagattttagatctgttgggttaaataaaatatactattaacattaaaa

SEQ ID NO: 270565 - DNA, 482 bp, Homo sapiens
caacattgctccaccctgggtctgtagctccacgaccctcagactagaacaagacctctcctccctgggtcgccagcttcctgaccctcgaattacaacaaaattgctcctccctgggtctgcagctccacgaccctcacactagaacaagacctctcctccctgggtcgccagcttcctgaccctcgaactacaacaaaattgctcctccctgggtcggcagctccacgaccctcaaactcgaacaagacttctcctccccgggttgccagctaccagaccctcgaacttacaacaacattgctcctccctgggtctgcagctccacgaccctcagactagtacaagacctctccctgggtcgccagcttcctgaccgtcgaactacaacaaaattgctcctccctgggtctgcagctccacgaccctcacactagaacaagacctctcctccctgggtcgccagcttcctgaccctcgaa

SEQ ID NO: 270566 - DNA, 475 bp, Homo sapiens
ctgcagctccatgaccctcaaactacaacagcaacacaggctcctccctgaatctccagctcaacaactctcagacttgagaggcagaaacgtctcctccctaagtctccagctccaacaccctcagatctgagcagcggcagcaccagctcctttctgggtcttctgtttcacgatccttaaattagaacagcagcaccatcttctccctgggtctccagctccacgaaactcaagctagaatagcagcaccggctcctctgggatcttcagctccacgaccctaagacatcagtggcagcaccggctcctcccctggactccagctccaggaccctcaaacttgaacagaaacaccagctcctccccaggcctccagctccttgaccctcataaacaatcccttctcatgaaatgtagcagtcaggaaaactgtagaggaagtaaataaataaatgttttcctttcaaattga

SEQ ID NO: 270567 - DNA, 360 bp, Homo sapiens
aatctaattccactgtgaactatgctgacatccatcaaggcctttacctcctacctcttggtttgaaatgggtctccaagacttccaccatccacaactgatccagaaatggctctggcagtacccaagggttccttgaaggcaggtctgggtctggttctccggatcccaacaccacgaggtactttattttaaaaggattaaaaaagccactgcttgtcaaatcttgaactaaaggactaacaccaattctcataacatccttaagccggccatgtgaaatgggtgctgtaattaccatcctaatcttaagggcatggaaaataaagcacagagggtaaatcctatggctaatcagga

SEQ ID NO: 270568 - DNA, 496 bp, Homo sapiens
tgcaatggagcctttgttattttcttgattccctgaagagttctagattccctgaagagttgagtctaagtgattgatttatatacaaaattgattttgcctttttacgttattttgggatcttatagcataaaataaaacttactaataggcatattaagcaaaatgttttttgtttctttcaattttgtgccttttattacttttcctatcaactttatagacgttgaaagggaagacatctgttttcattgagagaagatcttttaaaaaacgagctatttcagagttcctattataatagggttctacctattgtaaataaaagaagttaatctgggccagatgaggtattaaaaataacagataactatgtgaatacactaaaatctattgagttgcatactttaaatgggtgctttgtatggtatgtgaaatatatctcaacaaagctgcaaaagaaaaaatacataaataggtaaaatggaaaaaaaaa

SEQ ID NO: 270569 - DNA, 392 bp, Homo sapiens
tggaattacaagtgtgagcctctgcacctgataagaatattgatagttcatacagcaggacataaagtcatttttattttatttcacatatttttaaaaagagtttgaccaggccgggtacggtggctcacgcctgtaatcccagcactttgggaagccaaggtgggaggatcacttgaggtcaggagttcaagaccagccttgccaacatagcaaaaccctgtctctactaaaatacaaaattcagctgggcgtggtggcatgtgcctgtaatcccagctactcgggaggctgaggcaggagaatcacttagacccggaatgcgaaggatgcagtgaaccaagatcacaccactgcacaccagcctgggcaacagagcaagactccatctc

SEQ ID NO: 270570 - DNA, 404 bp, Homo sapiens
cgtgtttctctgtcagagcactggttacataggtggttcaagtttataaaattcaccaagctgtaccttgagggcattacactaagtgaaatgagttcatcacagcaggaccaaatctgtatgattctattacatgaggtacccagagtagtcgaatccgtagagacagaaggtacaatggggattgccagggcctgggccaggggacaggggagtgggggatctgtgtttaatgagaatgaagcttcagcctgggaagatgaaaacgttttgagatgaatggtggtgtttgcacagcaatgtgaatgtacttgataccactgaactgtgcccccaaaatgattaaaataataaattttgtgttatgtataatttatcacaattaaaaaaattaacctgcgtat

SEQ ID NO: 270571 - DNA, 485 bp, Homo sapiens
gaaatccactaagaaaatcattcacatattggttcactcaacaagcatttattaaatatatattcactattctagactaatagcaagaccggggatcttgtttaggaagaagcagtccctgttctccagaatttgcaaaaccattaaaaaagcacctactttaagccattttttttcagcaaggagtcattctgccagaaaaatgtagtacacaaatacaggataatataacaaatgtaaaatttctcatttctagtgaattaaactttccagtaattttacatctcacctcattcttatgatgctcagtttgcttaattattggcaaacataatggtaaaatgtttgtactgtattagagctttactgttcgattattaagatatttatccagtatcttagagatgctggacttcaattttccttattttatctttttaaaataaaatatcatgcatgcttctgatttgttatagaaatatttt

SEQ ID NO: 270572 - DNA, 485 bp, Homo sapiens
cattttccggctatgtcactgaggattctctactatgattactttgatcaatttacccccaatcccctagaatatttccatatttcaactcaaccaggagtgtcctgaacatgatttcaatgaattctatgagggttgaccaactcttcgctacactatcaccaatgtagcaacaactaaactcaaattaaagaaaatatttaagccgggcagggtgactcacacctgtaatcccagcactttgggaggctgaggtgggtggatcacgaggtcaggagtttgagaccagcttggccaacatggtgaaaccccctctctagtaaaaacacaaaaattagccaggcgcagtggctcatgcctgtaatcccagctactcaggatgaggcaagagaattgcttgaacctgaaagatggaggttgtcatgagccgagatcaagccactgcactccagcatgggtgacagagtgagactctatctcaaaaa

SEQ ID NO: 270573 - DNA, 428 bp, Homo sapiens
tctcccgaaaatgagacgacgttaagcagtctgtgctaagctgtacaatgctgtacaagtttggaggaggaagtatcggagtagaccagacgacgaagaaaggcttcttaagagagagaggccttgaagagtctgaggattcagataagaaaacagggaacatgatggcactttaggcaggatgggaatatcgtaggtaaagacagaattaagaggccttaaggtaggagtaaaggttctatattggggaggaatggaattacagctgccagaatgagagtttgatttctttatacatgtcacaatgataagtacttataacagggaacctaccatgtgcctgccaggggctttcataaaaaataccaccaatcctcatgctatccttgtgaaacaggtgttattttagatgtacgaaaactgaggct

SEQ ID NO: 270574 - DNA, 308 bp, Homo sapiens
tcatgttttaatgtggtctgtgtactggtgccagacggtgaactttgccaccagcttttgatgggataaatacaaacagtgcctagggcagggcttgtggcagcagagatgatcagtaagaatctggcaggtgaagacaaccctagctttgagtccctctcggcctctactggccactcccagaagccggtgccatctaatgttatggaatgtctagcagtgcccttgcctttaaagatgtgaacatgtttccatgagagggaacctctatgactaataagacaaataaaagaataaccccttatgtt

SEQ ID NO: 270575 - DNA, 326 bp, Homo sapiens
tctcccgaaaatgagacgacgttaagcagtctgtgctaagctgtacaatgctgtacaagtttggaggaggaagtatcggagtagaccagacgacgaagaaaggcttcttaagagagagaggccttgaagagtctgaggattcaggcaggtgaagacaaccctagctttgagtccctctcggcctctactggccactcccagaagccggtgccatctaatgttatggaatgtctagcagtgcccttgcctttaaagatgtgaacatgtttccatgagagggaacctctatgactaataagacaaataaaagaataaccccttatgtt

SEQ ID NO: 270576 - DNA, 403 bp, Homo sapiens
ggcagctgtgcagttggcttgagtagttgagtattatgcacaaaatgcttagaatgataccttgcccatggtaagcttgcaaggagtattgtccagatgacaccataaaggaaattagagaggaggggtgctggtcactgtggctcatgcctgtaatcacagcactttaggaagccatagtggaggagcatctgaagccaggagttcttgagaccactgtcggcagcgtagtgagacctccatctctatatacaaagaatttttaataaattagcgaggtgtggtggtgggtgcctatagtcctagctactcaggaggattgcttgagtgcaggagtttgaggctgaagtgagctatgattgagccactgcactccagggtgacagagtgagacccaatctct

SEQ ID NO: 270577 - DNA, 333 bp, Homo sapiens
aagtcagaggtgttaaggaaaattatctaacacttgcaaataaggggaaaagatgactgaatatattttcagtgtcatgctaatgcagtgcttctccaagtatgggctgaaacactagggaatcccaaaaccctttcaggagctcggtaaggtcaaaactagttcttaataacaggaagatgttacttgcctttttcactatgttgacatttgcacactgatacaaaaccaacagtgggtaaaactgcttgtgccttggtacaaatcagggtagggcaggaaactttgctattagtcgttgtatacttcccctaccaccacctctcagcaaaa

SEQ ID NO: 270578 - DNA, 327 bp, Homo sapiens
tgttttcaaacaaactttgaaacaatgggtgccttggcaaaaaacgatggtgtgaccctcttcaataaatagtgtgggaaaattggatatccatatgtagaagaatgaaattggaccctcctctctccctatatacaaatatcaactcacaatggattcaagacttaaatgtaagacctgaaactgtaaaactaccagaataaaacataggggaaacacttcaaaacattggtctaggcaaagatttcattgctaagacctcaaaagcgtagacagctataacaaaaatagacaaatcggattatattaaactaaaaagttttggca

SEQ ID NO: 270579 - DNA, 139 bp, Homo sapiens
tcagcgcccactggtctacgttccagcctcctggagtccctctgagtgtgtctgtggctgcagctggacccagttttgaattcttttcaagtttcatttcaaatgggatttcagaataaaaacgactacaccctgccct

SEQ ID NO: 270580 - DNA, 453 bp, Homo sapiens
ttttttaataataatagatttcaaactcttgagatcaaaaccaaagaaaatgactgggcatggtggctcacgcctgtagtcccaacactttgtggggctgaggatctcttgagggcaggagtttgaaactagcctaggtcacatagtgagacctggtctctacaaaaaaaaccaaacaaacaaaagacacaaacaacagaaaaattggccaggtgtggtggcatccacctgtagtcctagctgctcaggaggctgaggcaggaggattgcttgagcccaagagtttgagactacagtgagctatgtgtgggccactgcattgcagcctggtgacagagcaagaccttgtctcttttaaaaaaagaaagaaaatgagatcatacaagtaccagctaggaaaaaaaaaagagtaaattgcttcccctcaacccagcccctgccaacaattgataa

SEQ ID NO: 270581 - DNA, 571 bp, Homo sapiens
gaggtactgagccctctgccttagtggatgacaacggtagtgaggaggacttcagctatgaagacctctgccaggccagccctcggtacctgcagcccggcggggagcagctggccatcaatgagctgatcagtgatggcaacgtggtctgcgcagaagccctgtgggaccatgtgaccatggatgaccaggaactgggcttcaaagccggggatgtcatccaggttctggaagcctccaacaaggactggtggtggggccgcagtgaagataaggaagcctggttccccgcgagcttcgtcagattgcgagtgaatcaggaagagctgtcggaaaactccagcagcacccccagtgaggagcaggacgaggaggccagccagagccgccacagacactgtgagaacaagcagcagatgcggaccaacgtcatccgggagatcatggacaccgagcgggtgtacatcaaacacctcagggacatctgtgagggctatatccgacagtgccgcaagcacacaggaatgttcaccgttgcgcagctagccactatttttggaaacattgaaga

SEQ ID NO: 270582 - DNA, 407 bp, Homo sapiens
cgcatatctgagctgcagagtgttcttatattcaaacacccatccctatggctcctctgggatactggagatgactgccggcaggataacaggtgtgggagccagggacaaggcgggaagagggcttgctactcagggaatagagtaccccattgatgctggtcactcttcctttcctaccagggatgctcaggcattccactccttcacagacagcaaccttgccctgagaaaagaaaggcttatgtgtgattattcactatggaaaataaggaggaaacagatcaggagaaacaggaaaaataaagtttcacttgctaaagtgaaactgcaaagaggcaccagcctgaaaggcaaaaccaaggcctagatagacaagacagcagcaggcccaaaatgcccactga

SEQ ID NO: 270583 - DNA, 458 bp, Homo sapiens
aaggcaacagaggccagaggaggttcagtgatgcacccagggccacataaccagtgaatgttggggatcagattagagtgcccacgtctccagcctccttctgccattgacaccatcacatcgaccatccgggcaagacccccgcaccgcccccaagggcgcaggcttgatttcactgccaagccaataatgtcagcaacagcacttatggtgctggaccataaatgaaacaagctttgagaactaactgccaccccagaggcctcagggaggaggtggctgccctcaaaggctcagtctcgtattctgtaacctctctaccctgaagaagatcccaccagctgcctcttcttccagatcctgccaagaattaggcatctcccaaccccactcctgggcctcttctccacattctccctgccaatcatcccctttaataaaaaacggtgaataatttt

SEQ ID NO: 270584 - DNA, 392 bp, Homo sapiens
tcccgcctataatcccagcactttgggaggatgaggtgggcagatcacttgagcccaggagttcgagaccagcctgggcaacatggtgaaaccctgtctttacaaaaaatacaaaaattagacgggcatggtggcaggcgcctgtaatcccagctactcatgaggctgaggtgggaggatcacctgtcacctgagcttgggaggttgaggctgcagtgagccgtgcttgtgccactgcactccagcctgggtgacagagtgagaccctgtatattaaaaagaaaagtatggagctagaagctagtctgtgaaaaagcctctcagtcctcagatgctcaaaacctaccgaggtcttctgttgcctaaagcttacataattttgggatcccttt

SEQ ID NO: 270585 - DNA, 654 bp, Homo sapiens
ccttcctgtgttgttcagtgggcagttacattgattgtggataggttttaaaaagcaaggccagttcttgtctgtgcatttgactttgtatgtgatatactgactctgtagcaaggaaacatactttcttggtcttcttcctttgaccgccagtcattatttgtcttcattgcaaattaagggcagttatttccaatccattccagaattacagaaaattgaaggctatggaatctgaaaccatagctgctgtggaataatcctgagctgctgccactgtgtgagttggagggcagtggaacagggtacatgatggggcctgatcaggtggtctccggataagtcaacccctattcattttttcctccatccctaaaacagaggccaaaccataattgtactcattggactaaagttctcaagaaggatcttgcttcattcatttttgtgtgtttggaacctagcacaaaacctgacacatatccacccgcctcagcaaatatttgatgaaaaatgttgaaagacggaatagattgatattcatatagatatatgcatcaattaattctgtattttctatatatatattctaattacaaagggttatatgttcattttagaaactatagatcatacataaaagtccaaaggaaa

SEQ ID NO: 270586 - DNA, 300 bp, Homo sapiens
ggcagagctggctgtctctgaaggttgggccttgggaaggacctgcatcacagggaggctgggctttcctgggagcggcagggcaggcttggtccagggcgggggacggggctgaccagcttccttcctgcacggggaccagtagctccgtcccacaatacatcgctgtgccctgagccaccagggaccccggtcacctgatctccgggagagcctgctcccctgtctacaccagtgtgcctgtgctggcggctcagaacaaagaggccatccccaccctgcctctctctcccactggct

SEQ ID NO: 270587 - DNA, 483 bp, Homo sapiens
gtcgggacgttcttagtaaatatttgtggaatatatgaatgcatgatgaacaaatgaatacatgaaattgcaacatctttaaagcacattagtctgagatgggtgaccaatcccggtggtgttctggcccattgcagtccccctggcctctgttaaagcttagagaatatgcatggtttttcttcaaagcttccttcaaattgagcccattattatgggacattccactcagtcactagtaattttctcagcacagcttgaaactcgcttctcctccagtaggtattttgctttcctttcactcctcagagctatttttctaaatgggattgcttttcacatgaactgtgtgtgtcctgcagtgtgtggggcctgctggggaagacttacggggagtggagattttccacagccccttacctggtgatgccaactctgtgttagttcctagtggcatcgtgacttagtcttcctacatttaaa

SEQ ID NO: 270588 - DNA, 599 bp, Homo sapiens
tacactcaagacaggtatctccagatttcttgtgggctatttttctcccccagccccagcctattagtagtattgtttacaaacctacattgccattaatacgtgtgcctgcatgctgctcaactgaaagtcacatgggtgataagagaaaaccagtctgaaagtctcttagcggttcttcaccttcccaccttcacgagagctttctggagttggcctccagacatttcaagatatattaaaggctagccaaccaaataacacatctggagcagagagctaaaactgtgaatcactagaaaaatctgcaggtggctggatgcggtggctcctgcctgtaatcccaacactttgggaggccaaggcaggcggatctcttcagttcaggagttgcagaccaacttgagcaacatggcaaaaccttgtctctaaaaaaaaaatacaaaaaattagccaggcatggtggcacatgcctgtagtcacagctacttgggaggcttaagtgggagggtcacctgaacctggggagtcaaggctgcagtgagccgtgattgcgccaatgcactctagcctgggcaacagagtgagactctgtctca

SEQ ID NO: 270589 - DNA, 418 bp, Homo sapiens
ctgtactttgcagagctggtcacagtaaaaatttgtttttaagtttaaaaatttaaaatactggactttcttccacctatcgtgggacagaatttgcatcagctaggttggaaagttttttaatagcctatagtagcagactgcaattggtagtgataaaatggagagtccatttgggaggccgaggcaggcggatcacgaggtcaggagatcgggaccatcctggctaacacggtgaaacccagtctttactaaaaatacaaaaaaattagctggacatggtggcacatgcctgtagtcccagctacttgggaggctgaggcaggagaatggcttgaacccaggaggcggagcttgcagtgagcagagatcgtgccactgcactccagcctgggtgacagagcgagactccatctca

SEQ ID NO: 270590 - DNA, 389 bp, Homo sapiens
aaaaaagaaagaaaaaagaaaagaaaagaagaagagactcccaagttattcaattttgtatgacttctgcccctaactaaacccaaagccagcagaagaaaagaaatgacaaagatcagacctgaactaaatgaattgaaacaaaaaaaatacaaacgataaatgaaattaaaagctggttctcagaaaacataaacaaaactgataggccattagcaagattaaccaagaaaagaagatccaaataatcgaaattagaaatgaaaccggagattttacaactgataccacagaaatacataatataattcaaggctactatgaacacctttacactcacaaactagaaaatctgaaggaaatgaataaaaccctcctacattaaatca

SEQ ID NO: 270591 - DNA, 529 bp, Homo sapiens
gtttgggaattaataaaacaaagtcatacaacacattttctttgtaattgagaactagataacatggtaacagagaattgattttcatatgaatcttaactccacagtaaaatagttgacatcataatatgaagagaaagaaaaggaaaaacagaaatgtaaaagttgtttaattcttggtttgcctaattcgttttcctatttcttttcatacaaataaaggatacctggatttatttaggttattaagactgccgttagtttgttttgttctagtgcacttcatattccatgttatctactgcatcaaaaaacccctctgattggagggtggtattttctgggtttaaaataatcacatgaaatgcagtgatcaatataagccagaatgagttcactaaaaacctttttgaaacaaggctgctaaattcaaagaacttccataggcttaaactgtctcaaatattttcaagatgtggtaattttgtttcttaatatatagttaggaaaattaaaaataatttgtgta

SEQ ID NO: 270592 - DNA, 388 bp, Homo sapiens
cagtagaaataatagactggaagccaaatcctcagtctacttctggctctcctaacatcatacttcctaccacctatatctgtggcaagtgatgctgagggtcaatatagtgtttaaagtcaactcgatttcctctttaattgacaaactcttgtgaaatttttaaattttactctcatgggaaacagtagtaaaggtcattatctgtgcactattttgacagtctcacccagccttcagtccctggttcatcctcctcccctccctctctttcaatctcttaaggcctcagctcttccagggaatcttctcagatctctgttttctctcttctttgggctctgataatcaaaccgtaatcccttcctgccagcagaagtgtgcaaaa

SEQ ID NO: 270593 - DNA, 178 bp, Homo sapiens
ttagtagagatgatgtcacattatgttgcccaaactcatagctggtcttgaactcctgcccccaagtgatcctcctgccttggcctcccaaagtgctaggattataggcatgagccattgcacctggccaatgctttctgaaattaccgtttcaataaactgctttttatccccatta

SEQ ID NO: 270594 - DNA, 347 bp, Homo sapiens
ctcgcaatcatttactcatttaacaaatatttattgagtacccccagtttgccagactcttgtagtctcagtgcttattaaacatctgtggaaatgaagtgaagttataagcctgtctttaagtccctggcaacacactcccttctctgcttagttactgctattttcaggtacttggaaacacatccgtgtcctcaggttcctagtgcctactggagcccacacagctaatatttctctttccccctctctgacccaagactcacgtcaatgttcctgcccagggctgattctaggttctaattgttatatggatgttgttcagaggcctctgaaatgcccctcag

SEQ ID NO: 270595 - DNA, 399 bp, Homo sapiens
gcagctattataatttataaatgtttgttttccctcttggattaatcccagagtgtcagggagaatgaactttaactaagcatgcactggtttactaggagggctggtggaattataaagagagcaagggcttgagaaactatcccatggattttgaatgctatttctgccactttacatcggacaatctcgggcaaattgcatattccttaaatctcagttttcttgaaagaaaacccaactctaaaatgagcaaaaaattttcacattttcccaaaaaagataaacaaatggccaaaaagcacataaaacatgttcaactttgactggtctttaggaaaatggaaataaaaccaaaataatatatcattttatatccattatgatggctactattaa

SEQ ID NO: 270596 - DNA, 197 bp, Homo sapiens
catgcctataaacccagctactgtagggggctgaggcatgaaaatggttttaactgggaggcagaggttgctgtgagctgagatcacacccctgcatactagcctgggcaacagaacaagactttgtctcaaaaaaataaaaataaagaggagtcctgaaacttgcttaaagtcaatttagtttatcaaacagctcc

SEQ ID NO: 270597 - DNA, 308 bp, Homo sapiens
tgagagatgagctctctatagagtgaaggcagagacgttctaggcaatgagaatagcacgtaaaggtatcataattttgttggcacaatttgtagcagagaaaagattagtaaggtagctgagtcttctgatgagaggccgtatactcaaaatataaggtataaagtacatacttcagacatttatattttattaaatggacagcagtaggccccagggggttttgagcaagtgacagctatgatcagaagggcacacatgggtaattaatttttcacaaaagtatctagttgtgctggagatgactc

SEQ ID NO: 270598 - DNA, 348 bp, Homo sapiens
taatatagctttatttacaaaaccaagcatcaggctgagtttgaccaagagcccggatttaccacctctgaattaggacataggaccctccgagggattttacaagccattctgaggaacattttgggtcttgtgctcaaggaaatggcttcttcaaggattccacaagataagttataccctcagttctttgctttacatggacaagagctttgacctccaaaactgggtgaaatgagacatttgcttttatttgtttttattttaagcagctcttcatatgtataatttccttttgccccattgagaagagtacattataatttccagagaattcaaactttcttt

SEQ ID NO: 270599 - DNA, 216 bp, Homo sapiens
tactccactatcttgctgatgttacatctacctaactctatttagtatttccatagtctctatatgtttagacagtatctattgactcttagatatgagcaatgcagatttagtgtattttttcttcttttcctcctattatctagcctacttacagcaatatcatattatttttcttactgcttatccttatatatttaataaatttaaacttaa

SEQ ID NO: 270600 - DNA, 545 bp, Homo sapiens
agttttgtatcttaagacagaagagaatggcctcttaatcctcactactgcccagcaaagaggaaatataatatattcgggctgatattgaggcccaagacttaaaaagatttaatattataccttttctttttaatttcctaactattgtctcacccccaccccatcctcttttctctggtttgtttctgatatagccactgaatagcatcgaagtggttataaataaactgatttggcatagtcattctaccactgactggtgaaacgttgagcctgacactttaggaagtgtaaatgatctcatggcagaaataaagattagacttggtttccaactgggcagagaagagattttgtgaggaaaagtgctgatattctttgtatgtttcagtacacaaaataactttatgacatctgtaagttagagccacttacttctagaggtaccttcttagttctaggagatttaactttgggattccttgtgccttgaattaaagtctttattttacaaaaagtagaatatgtaagagaggacagtc

SEQ ID NO: 270601 - DNA, 517 bp, Homo sapiens
cagagccaaaaagagcttagtaatcacctgtgtgtccctttgctgcgcaatgagggtgctgcggcagaggccgcacctcttagctgtgtcacctctggagctggaccgccctctctggcctgctgctggtggtgctcctgcgtgttgacgcttggacactttttgaacaacatttcttccataactgcagtggcccctgtgagtaaaatctccctgaggcaggttctatgccttctcttgtccattccccttgggcacccagtatgccctgagtgtccttgtgaccagagccactcctgttttgcagtaagggaagccaaacaaggagcagagtcaaggcaaacgttccagtgcgttctgtattgggattcttcccttcaggcacagaaattctcatttgcactccccatttgccctggtgggcatcccagctgtacctgagtatcaggtaaacctgccttggctacatcaagtccagggatatgatgaaccatctagaactaaccacattcaatta

SEQ ID NO: 270602 - DNA, 428 bp, Homo sapiens
cttccaggtactctctggagccctgggctcccatgtaagatgtttggctaccctgacgtcaccaagttgaagaaaccatgtggagagaccacaaagaaatagaaatagaaagagatacctgagtggtcccagtgattccatcactgagagttttggcctgtgcaccagaggtgtaagtcctgtaccagatatgtgaggaaatcttcaaagttacccatctgaaaagcaacctcctctgagaccccaaaccagaacagtccagccaagccgcccctgcatctggaaactgtgagagatgagaaataacgattgttgtttgaagtcactaagttttggggtgatttgttaggcaccaataggtaactaatgcacatacccatataacttgctgctggtagagtaaagtgctacatcctcaaagaagatta

SEQ ID NO: 270603 - DNA, 462 bp, Homo sapiens
aaaaaggaaaaaagttgtcatcggccttcctctccagtcccactggtatcagattttgagtccctaggaggatctgaaagttctgggcagcaaaaccagaagattccacagctgccgtctagccctgagaacctggtgtcagagatcccacctccccagcttggttatgcagtctctgatgagaacttgactttggggaagaaagctgagctacagcatttcccgggtatctggaaggtgctcaacagtgagatggtgctcttcctccaaatctgttgacatgacaggacagtgccgcttatgaatctctgacaaatagcaaagtggaaaattcctgctcttggcagctaaaacttggattgatcacaatatttcaggaaacagagaagaaagacagtatttcccagttagcaagatcttgagtcttatgatttttttctgacattaaatctgcagcataaa

SEQ ID NO: 270604 - DNA, 359 bp, Homo sapiens
aaaaaggaaaaaagttgtcatcggccttcctctccagtcccactggtatcagattttgagtccctaggaggatctgaaagttctgggcagcaaaaccagaagattccacagctgccgtctagccctgagaacctggtgtcagagatcccacctccccagcttggttatgcagtctctgatgagaacttgactttggggaagaaagctgagctacaggtaagcaacaacgcaggagaagatacaactgaggtcaacacagaccctttccctgagacttggcttgctattcagccttccttgtctcttgctctgccttcttcagaaacagatctaacccagggagcaaatcctcagttgga

SEQ ID NO: 270605 - DNA, 258 bp, Homo sapiens
ttctcactcggaaccttcttttgatgaaccagtgtgcagcataccaggatgagttggatttgggtgggatccacacagtcattttcaggcagatttgctgcaatggagctgagataagaagccttgattagagacaattaattcgaaattcagtatataaatattatctggaaagaaaggattagttgtctctaagcagtgcttaccacatgcccagcgtacaccatatatcagctattttttttttttttttttttt

SEQ ID NO: 270606 - DNA, 561 bp, Homo sapiens
aggccatggcccctcttgactccacctcctgggggcccagggttggatgggaagctgaatctggccacactcgttctggaactcccttacctctgtatctttgcccctgctaggcgttgcccacccgtgagtctacacttcctctgagaatctcagtgtgtctgaggcctggtggcactttgggaccctccagggtgggcacacagcagaactcagcattggtctttggtgcccgacatgcttagaaaatagtgactggaggaatcttctctccctccctaccttttaggtctctccccacctgcagcacagccaggcagcggctggcagtggtgatggtctttgcgtggggtcaggcaggtatgatgccccactctgctgcttggcggctggtaggccttgggagttctgccttatctctgcagctcagctttctttcctatcaatagtaacacccacttcactggattattgggaagattaaatgagatccactaagcagtgcttaccacatgcccagcgtacaccatatatcagctattttttttttttttttttttt

SEQ ID NO: 270607 - DNA, 398 bp, Homo sapiens
aggccatggcccctcttgactccacctcctgggggcccagggttggatgggaagctgaatctggccacactcgttctggaactcccttacctctgtatctttgcccctgctaggcgttgcccacccgtctctccccacctgcagcacagccaggcagcggctggcagtggtgatggtctttgcgtggggtcaggcaggtatgatgccccactctgctgcttggcggctggtaggccttgggagttctgccttatctctgcagctcagctttctttcctatcaatagtaacacccacttcactggattattgggaagattaaatgagatccactaagcagtgcttaccacatgcccagcgtacaccatatatcagctattttttttttttttttttttt

SEQ ID NO: 270608 - DNA, 419 bp, Homo sapiens
tttaaattccgcaatataacatcagtgttccaatgtgaaacttcgaagctgtccctttcagatttagcatgtgctcccatcctcctacctgtaaccgtcatcacctctcccaagtaccttaggtcttgtatattttgtgttattattattattaagacagagtcagaccatgtctcaaaaaaaaaaaaaaaaaaaaaaagaaaaaaaaaagtttctagcagaagcaaatgcatatcatgaagtttcataatatgaggacctgctatgggtccttttaatacttataagagaccatattgaaaaccatttgtacagtgtcttcagaatgaggcctctacataactctggaagctatgggacaagtagctttacccaaaacagcttgggcgacagagtcagaccatgtctcaaaaaaaaaa

SEQ ID NO: 270609 - DNA, 575 bp, Homo sapiens
ctctgtgaagcaggcacatcggtgtgtgctgtggagctcaggagtgccccttgaatctactggcgcttgagggtaggggtttacggctccaactgcccgacgaactaaatccttaaccaaatccttccccccagcaagcatgaggggagcgctcggaaaaaaagctccttccagctttaagctgtgtggccgcaggcgactcgcggaacctctcccggggcccggcacacagtaggtgctctataattactaccgactgagtggatggatgaatggaccaacacggaacggagctccagttcttttcacaaaacagaatgaggggcctgggttagattcatcccagaggttccttcgcgtttaagcgtccatgcggtagctttagccaacttcccctctcagaacctctctccctttctgtagaagaggagccgggactggacccgggcgatcccttccgagtctcacggaccacgccggccagccccgaccgagtcgccccagctctgggaacctcttgcatgatgaggtgggggaggggccgcgccgtggctctccccagcctggcggccgct

SEQ ID NO: 270610 - DNA, 470 bp, Homo sapiens
tgtggagggagatacaactggtaagtgaaatttagccaaggatacctatgaattttggtcatgtatagaatacgtgtaatttttgcctccatatatcttaaggtaagggagtcattttgatacgtgaatggtattttttgtcaaaatatgaattttgatatttagatccttatctaaaagtaattgcataatttatcgagaatattttattgaatccttgatttaaagcttaatattttaaaaaggtattttataaataggtgctaaagtacacattctgcaggagttgtatcataaaaatgacactcatgctgggcgtggtatcatgagcctgtagtcccagctatgcaggaggctgaggtgggaggattgcttgagcccagaaattcaaggctgcagtgagctatgatttcgcctttgtctagccactgcactccagcctgggcaacagagggagaccctgtctctat

SEQ ID NO: 270611 - DNA, 456 bp, Homo sapiens
atacaacactatcaaatgactcctagggatttccacatcagcctaaactaatatgtgccacgagtaatagtatgctttagtcctacttacaaatggcatttcatctaaggacacacaaagcagtacacttgggaaatataaattatagacatgtaagacacggaatgactgactgaactttacaagagaaagaagaaaactggctaggcacagtggctcatacctctcatcccagcactttgggaagctgaggcaggtagattgcttgagctcaggagttcaagaccagcctgaacaacatggcaaaaccctgcctctacaaaaaatacaaaaattagccaggcatggtggtatgcctgtagtcccagaaggtggagggtgcagtgagccgagattgcaccactgcactccagcctgggtgacagagcaagaccctgtctcgtaaaaaaaaaaaaa

SEQ ID NO: 270612 - DNA, 831 bp, Homo sapiens
aaagaatggacctggttgtccatgaaactctgccactaattagtttccccactccctttctagttcacagctctgaattcttgtggcgtgccagggactgaacaagtcagacatggcctctgctctcatggaacttaaagtctagcagggaagacataatgaactgtaatgacaagagtgatgaactttcctgaaggggaagttcaggccactgtgaggctctgacagagggatttcacctgtcctcaggaattagggaaggctttcctggggagtgacatttgaatgtgaagatagaaagataagtagatgttaattaagggaaggaggattttatgtcccccagccacacccatctgtgccatatcaggctttggagagatgagaaaaaccagataggggtagaagcaaagttggaacattgtttttatcattaaaacaaagatgacagaatcaaaaccattcaaattgtgttgccccaaacccctgcgcctggtcctggggtcagccttaagggaaccaggacccagcagtaaggggtatgtggagaagggattgtgaagattttatacagtttaagggaatcaagaagcttgttgggtaaaggagttccttcttggcccccatgcctttgcttatgcctttttgcctctccctagaacacacagtcatattcctccctcttgaaaactctatttgaagcatgggctctggagtcagacgtccacgttgattcctggcgccaccctttaccacctgtttcacttgagcaggttgcttaagctctctgtgctgctgtttcctcatctataaagtggtgataataatagt

SEQ ID NO: 270613 - DNA, 976 bp, Homo sapiens
tagctttctcctttatctatcagtctcttaacgagtttggtaggaactaggtcacaggacctttaataaatactccctggtaaattatgaaaggttgaatttctgaccctgcaaaatgaaagaccagagctttaatagtgagtgcactaagttggacttccctttgtgttaatttggaccctcggttagacatgcaggagagttggagagtttgtgggggatgtagtaggggagggtcgaggagtctgggaaagctgtcagactatgatacagatctaacctctggagaagaaataggaaggaggggtgggtaggaaaagtcttgtgcagttctaagatggtttcagctagaccaaagtgagttgagccagagtcacctgtcagaggagccctgctacatcagccatcataagcagttcatgctattgcctcttggcctccatctcagccatcgtggctgctgtgctcatgtgcccattatgccattgctgtggtagccagtgacaaaggcctgtgaaccgggttaagtcatttcgtctgcttgcttttatatgtggcaaggaattggatcacacaattatgagggctggttaggcaagcctaaaattcatgaaacaagagctgacactggtgggatttcttcagggaaatctgttttcctcttgaggctttcaactgattggttgaggcccacccacagtatcaatggtaatcattacttaactgatcgtagatgttaaccaaatctacaaaatccactactcccccgttatcaacgggatatgttccaagacccccagtggatgcctgaaactggctaatgctgaaccctacatatactatgttttttctgtacatatatatgataaagtttaaattataaatgaggtacagtaacaacaataacagtaaaacaacagttataacaatatactgtaataaaagtcatgtgaatgtggtgtttctcaaaaaaaat

SEQ ID NO: 270614 - DNA, 479 bp, Homo sapiens
cagaaatgtttactctgatattagtattgaagaaaccagacaaatctaatatataacacaaatggtcttgactcagatgttaatgctgtgaaagaatgaaaaatctgggaattactttagcttaaaagagattgatcggtgcatatccctttgttaggttttggattgggggaaatagttttaggtggtactaggaaaattggaatatggaatatgttagaaactctatttgttagtaataccacatcaggtagttttataaattacactgattaaaagtctctactactcagatttttaattaaaataataaaaacttatttttggctgagctctgtggaagtattagccagcatacacctgtagtcccagctactgaggaggctgagcccaggagttcaaggttcccatgagctaaaaattgtgctaatgctctccagtctgggtgatagagcgaatctctatctcaaaaagaaaaa

SEQ ID NO: 270615 - DNA, 997 bp, Homo sapiens
agccgttcgggagtacccgctgctttcggggagctgggttctctggtgtctttttggtaccagagccctcactgtacgggccaagctgaggtggaggctgaggctgacccttcccttggcccggacgcgtactctgcagcgtttcccacggtgtctgctcctcggttgacctgccctcctccgcgccagtccagcgtcccggggccgcttttatttatgaggcgggcgggagggacttggggctggggttgtcgcacgctaactggttgctgggcggtgcggaagaggcggaataggtggttactgaagcttctttggagccaagaaacacagggcctgtaaggccctttactaagtggtgtgtaaggattacagctctgtgcagaaaagctgtgtaaaagatgcgtgaacaaatgtgattctcatatgccactctacatttagttttcttcttaaacccgggtttccagtttcttttccttttagtctagtctctgtcccactccttctcaaaacacattacacacacaacacaacttctttcttactccctactagtagtttcttttctgaagggaaaaataactaattaactctgggctacgtaagtgcttacgtgtgatggtcacttttccctatccttagttgatctagagtgggatatgttctttaaatctgggaacagccaaaccttggatcaattctgtgtgcttaagaaacttgagtttcattaaggcgtggaatttgtgtaattggaattcatattcccagcatttaacataatacaggagacttcagtagctaatttgcttaacgaatgccttcttgggatgttttaataatgacctgaaaacatgtggaccgaaagttgtattttctgttttatcgtgaataaatatatcagttattataaagttgtaaatccgttacaaataaagcaaaatttctttgtacttgaactgaattaaatgatttattgactttatggcctctagca

SEQ ID NO: 270616 - DNA, 409 bp, Homo sapiens
tttcctcaaagctgagcataaaaatacacaagttttcatctgtttctctgggtcttctttgccttatgaagtctcccatatcacataaaacctatattaaataaatttgtattttttttcttgttaatttgtcttttgttatagggacctcagccatgaatctaatgatggctgaagaagaaaaatattttcctaccctgcattaatagtataagactcaataataatactaataacattagctgacaataatctgcatttactttttactagtcactgtgcaaagtgctttcattgcacttattaatcaatttttaacatgcattacatctcaaaattgcccgaaattccattttttttgacagccacatgttggacaagtgagtcaagcaatattattagggttctt

SEQ ID NO: 270617 - DNA, 331 bp, Homo sapiens
tcaggttatgagggctccaccctcatgaatgaaattagtgcctttataaaagaggcttgatggaaacttttggcccttccagcatgttctgacacagagaagcagctataaggaataggccctcaccagacactgcatctgctggtgccatgatcttggaattcccagtctccagaactgtaatacatttctattgcttataaattacccagcctaaagtattttttatagcaggctaaatggattaagataggaagtaaatctcaaaactgatttttaggaattgttaatcttgagaataaaaaaaacaaattattcactggttctcaaa

SEQ ID NO: 270618 - DNA, 1071 bp, Homo sapiens
gaacagattgtggcaagggtggatgtgagtcccttctgctcaggatctacatacagctacaggaagaatacgttctttctgctgcttcccacaggtggccttggagtgtctgtaccatcgagagaagaggattgggattgatttggtccatgacaacgtggagaaaaaccttatccgggaagtggatttgctaaaatgttgccaagaacagatgagaaaattagctcaaagaattgatatccagatgcgggataaccgggatgctcagcacgtgctggagagggacctcgaagacaaaagctcggcccagtgtatcgatgagaagtgctttaacctgagaaatacgtcagactgcatcagcttcttccacggcatggagaaaattgacggcacgatctccgtacctgagacctgggccaagttcagtaacgacaacatcaaacactctcagaacatgcgggccaactccatccggctgcgggaggaggcggagcacctctttgagaccttgtcggatcagatgtggaggcagttcacagacaccaacctggccttcaacgcccgcatctctgaggtgacggatgtgaagaataagctgcagacgcagctggcgaagacgctgcaggagatcttccaggccgagaacaccatcatgctgctggaaaggtccatcatggccaaggagggcccgctgaaggtggcccagacaaggctggagtgccggacccggcgccccaacatggagctgtgcagggacatcccgcagttgaagctggtgaacgaggtgttcaccatcgacgacaccctgcagaccctcaagctgcggctgcgggagacacaggacacgctgcagctgctggtcatgaccaagtgccggctggagcacgagctcgccatcaaggccaacaccctctgcatcgacaaggagaagtgcatgggcatgcgtaagaccttcccctgcaccccgcgcctggtgggccacacctgagcaccgccctggcgcctcattccgcgctggcgtaaaattggaaaaggctgagaaacaaagtaaaacagtattttgtttgaaag

SEQ ID NO: 270619 - DNA, 1078 bp, Homo sapiens
tgtaaggcccagggttaggtggcagggttgtcttgaccacttccccaaactgtccctccactggaagatctgcaaagaggggttttcatgcatattcacaggtggccttggagtgtctgtaccatcgagagaagaggattgggattgatttggtccatgacaacgtggagaaaaaccttatccgggaagtggatttgctaaaatgttgccaagaacagatgagaaaattagctcaaagaattgatatccagatgcgggataaccgggatgctcagcacgtgctggagagggacctcgaagacaaaagctcggcccagtgtatcgatgagaagtgctttaacctgagaaatacgtcagactgcatcagcttcttccacggcatggagaaaattgacggcacgatctccgtacctgagacctgggccaagttcagtaacgacaacatcaaacactctcagaacatgcgggccaactccatccggctgcgggaggaggcggagcacctctttgagaccttgtcggatcagatgtggaggcagttcacagacaccaacctggccttcaacgcccgcatctctgaggtgacggatgtgaagaataagctgcagacgcagctggcgaagacgctgcaggagatcttccaggccgagaacaccatcatgctgctggaaaggtccatcatggccaaggagggcccgctgaaggtggcccagacaaggctggagtgccggacccggcgccccaacatggagctgtgcagggacatcccgcagttgaagctggtgaacgaggtgttcaccatcgacgacaccctgcagaccctcaagctgcggctgcgggagacacaggacacgctgcagctgctggtcatgaccaagtgccggctggagcacgagctcgccatcaaggccaacaccctctgcatcgacaaggagaagtgcatgggcatgcgtaagaccttcccctgcaccccgcgcctggtgggccacacctgagcaccgccctggcgcctcattccgcgctggcgtaaaattggaaaaggctgagaaacaaagtaaaacagtattttgtttgaaag

SEQ ID NO: 270620 - DNA, 505 bp, Homo sapiens
ctcctctgccttccaccatgattgtaaggccttcctagtcatgtggaactacgctgcaggagatcttccaggccgagaacaccatcatgctgctggaaaggtccatcatggccaaggagggcccgctgaaggtggcccagacaaggctggagtgccggacccggcgccccaacatggagctgtgcagggacatcccgcagttgaagctggtgaacgaggtgttcaccatcgacgacaccctgcagaccctcaagctgcggctgcgggagacacaggacacgctgcagctgctggtcatgaccaagtgccggctggagcacgagctcgccatcaaggccaacaccctctgcatcgacaaggagaagtgcatgggcatgcgtaagaccttcccctgcaccccgcgcctggtgggccacacctgagcaccgccctggcgcctcattccgcgctggcgtaaaattggaaaaggctgagaaacaaagtaaaacagtattttgtttgaaag

SEQ ID NO: 270621 - DNA, 440 bp, Homo sapiens
gtgtaaaagacggctaaacatttaaattgcctttatttacttagcttaattgcattttagatgctacgtatttctagcttcccctgtgctaaccagcttcacagtccatagagatgagatgtgagttggaagatctaagtctggtcaaagtccttgaatccaggagaaagaaggctcatgtcatcttcaacacaagattagcaatctcaggaagcaatgtgccctggagaactgacagctattctgaggatgtggatcaagtacagagcaccctaaatcaaagcatcaggagaactgtatttctgtgacagcttaatgggcaagtggcacacaatatatttatttacaccctggctacttttaagacgaacccaccaggtgatttgcagctgttcacttatggttatacaggtttggattaaatattttttcattcttaa

SEQ ID NO: 270622 - DNA, 1108 bp, Homo sapiens
tattaagtaaaacttatattcttacaagacttcctccaggtccctgttacaaccagattttctttgcagacttttaaattatggaagttctggtgctgccactgagttgtgtagattattattagatattcaataaataaagttggtagatgtgaagaggtactagacaatagtcctattttgttttggtttgtttgttttgtaatttattctgaaaaaatgtttatgtggagagaaaagggaaaacatacagaaatacacagcacacaaacaaattcttacttttttttggtagtctttctaattttccaaggtcaccagctaatagcaaatgagagttgtagggggtggggtgaaggctggggtcttaatcggggtctatctgattctagatagaccagattctagattttccactcggttactcaatcttcttagtggtcagtttaataacctggaatttaagacatgactgtgtgatgatgggcaaatcacagcaggactgaatgggagctggtaatttctcagaggttgtttgtgtgacatatgcatgtaagttcattcacctgatttagctacttacatgaaccattgtgcactgagctgcttctatatctttagcatattctgtatctatgtaaaattcacataagattgtatgacttttataaaaaacaaaaagacatctttgattaatttgtcttcactatgaatactgatgtgatgtgttacaatcatcctgaaaaggaggctaacaaaggacaggactgagtctgtcttgaggtgagtgatatgatggaaagaatggattttcccccacccaactcatttttgatattacataaagtgaaaaacattaaataattcaccaaagtatctagatttttttttgtttttgaagtgcaagggaagtaacttgacctttgttaaacactttgatcatggaaaacacataaggttctcatcttattccaggaagtgtagacactagataatcttttcatagtcatccaaaaagcatattaagtgaaccaggtaaatccatcctacactttttattccagagacaagttggctaaactttgaggagactaaaacaaaacaaaaa

SEQ ID NO: 270623 - DNA, 408 bp, Homo sapiens
caattctgaagtattactgtaactaccaacatgttatagatgaggaaacaaagagaagttaagcaacttgctccagtgacgcagctggtaagcagcagagctgggattaaaacccaggcattctgattccaccacctacacacttagccattccgccccactgagaatgaaaatgtcaaaaaatactaggccagtaagtgttagcaaggcaagaaatttccacaccaaaggtgagtatgttgtttggaaagattgggatggaaatgagtaaagtatgtttctttttaaaagtcttttagtaagctttaaagctctatatgtaagaagcagatgaaaataccaagtgaatttttagatttgatgttatgtaaggttttgttttgttaattaaaatttggtcattttgtg

SEQ ID NO: 270624 - DNA, 518 bp, Homo sapiens
cactatgggttttataaattttgtgataagtctaaactgcctttgcagaagctttgcaacccaataaatgcatacatacacacttatttcactgagttgtgattatcaagggaaattatatgcaaatgcctgccatagtgcctgtggcattcctattaacctcaataaatgctgattctattgagcaatttttaggaaagttaattattttgttagaacatctcagaaaatcagacttttcaagcccaggtagggaagaaaaccatccattttcagaaaaggagctgatgtttactactgcagatgattttttgatgtctgattttctattaaagtaggtgtgtgagttccagggtcagattctggagaaaattaggaagactgattaaacagtaactttggtagaaggcatgctccctagtaaccgttcccaagttttttctgtatcagttgcctcattcatccatcttttcattcaagaaacacctactgtatgtcaggtacaatgtttgctgcta

SEQ ID NO: 270625 - DNA, 463 bp, Homo sapiens
ccttcattatgctgtattttccttcttttcctagttggtagagtgttttatgaaaaaatgttgactttgtcacatgctttatctgcatcaattgagatgatcataaaattttttttcccttcattatgtgaatgtattgtatttattgacttttgtgtgttgaaccatcctcgcattccagcaataaatctcagttatggtatataatttttttttaatttctctttttaagagacatgatctcactcttttacccaggcagtagtcctatggctgttcacaggcagagtcatggtaataatggtaataatgctgctatggtaataatgctgctgtgaacatcagtgtatgaatatccttttttacacccctggcctcaaatgatcctcctgccacagccttccaattagcaggaactacagatgggtacctctgcacctggctttaattgcatttaactaaa

SEQ ID NO: 270626 - DNA, 393 bp, Homo sapiens
attgtcaaaggttttgtaagacagacaaatgtcttttcaaggattgtgttttcagcctgtaggatcccagcctggttgctatagttagtagtttagattcataatgttattcacagtacactccactgtctctcttataataatacatgttgatgatggaacacgagttgtaagttctctttctgtttcattttcctgggtttgcaaatcagcttaggctcgtcatagcttctgagttagttagcatagggttgttgtttgtcagcagtcttgagaagttggtgtcaaattgggtgttgagctggcgtttgttttagagggattatggggagaggggccaattcagtaagttatctttccttaaagtctttgttcctttgaccattgcggcct

SEQ ID NO: 270627 - DNA, 828 bp, Homo sapiens
catctggattcaactagtcatggttcacaaatacccagggctgggtgcagtggcccacacctgcaatttcagcactttgggaggctgaagtgggaagatcacttgatcccaggagttcgtgaccagcctgggcaaaagacggtgagaccgtgtctctacaaaaaaatttttttaactttttaaaaagaaaaaaaaaatcaaggaaaaaacaaacaatttaaagataatacaaatttttaaaaatacagtgcaacaaatatttacatagcatttactttgtataaggtgttataactaacatagagatgatttaaagtatgtgggaagctatacataggttatatgcaaatactatgctactttatcggagggacttgagcatctgcagattttggtatcgcagtgggtcatggaaccaacccccatggatactaaggggatgactatgtgtgtgaagtgtccagcacagcacctaatacatagtgggcattctataaatggtaaccttcagattttacctcctgagtttaacataatgttttccactgtaatctaggcacctctgagatctttgtttcctcccattaaaacaggacagtatcacctagctcatagagtggttgtcagatttcattgaaatagttcttgtgcaggtggtttgtaaattataagaaactatccaaggctgggcatggtggctcatgcctgtaatccaatccaagcattctgggagaccgaggtgggagtttgagctcaggagtttgagaccagcctgggcaacataatgagaccttgtcactaaaaaaaaaaaaaaaaaaagaaactatc

SEQ ID NO: 270628 - DNA, 442 bp, Homo sapiens
ataaggacattttaaatgaagctaattcttgcctgacttcaaaacagaaataggaaaaaaattgttcatattatgacctgggaaacagttgttatgaaacattaaaacttattaaattggctgagagaggtggctcacgcctgtaatcccaacactttgggagaccaaggcaggaggattgcttgagcccaggagtttgagaccagcctgggcaacagggagagccctcatctctgggcaacagagagagaccccagggcatggcagtgggcctgtggttctaactacttgggaagctgaggtgggaggatcatttgaacccacgaggtcaaggctgcagtcagccatctttgtgctactgcactccagcttgggcaacagagcaagaccctgtctcaaaaaaataaataaataaataaataaataaaacaagtattaaata

SEQ ID NO: 270629 - DNA, 398 bp, Homo sapiens
gggaagacaggatttgcagggacacacctatgaggagggattcccctgcgatggacaggggaggggtttaggtgcaggtagcaccctgggcgcagggaagaaggcgtcacagtgagggcagaaaagacactcctcagatcctggaagcagcaacctgacccccaggggccactaagaccaaatcatggccatctcagcagcagcgtgtgtgacagttactggaaaaagatacctcacacctggcactgcctaacccccgagaacctaatgccactctgagaaagctcagtacgggtgcaagttggattaagtaattgcagtgcgagttttcctgtgttttattggtgtaatgctccttttggacattaaaaaaacttgacatatacaatgatcattta

SEQ ID NO: 270630 - DNA, 498 bp, Homo sapiens
gaaagtccctaggcagagaagcgctgtgtgggcagttggcagtcaggctggtgtgcactaaagtagtaagggctggggggaaagaggtgagtacaaattgagttcatctgtgaggcaggaaatgcttatcaaaccccaaattaatcatttttaaataacccatgatctattgacttgtaagagtgcagaaatttaaaatgaggctacattattttaaacatgctcctgtttcacttttactgatcaataaacagtaagtccttaggaaagggcaaggaccccgaggctatagttccagcccattctcatatcataagacatgtcacggtctatataaaatcaaacaacagctaaccccatctctactacacatacaaaaaaattagccaggcatggtggcacacgcctgtaatcccagctactcgagaggctgagacaggagaatcacttgaaatcagtagatggaggtcgcagtgagccaagatcacgccactacac

SEQ ID NO: 270631 - DNA, 570 bp, Homo sapiens
ttcattaagttttcttctctccagatttgggattatttttaggaattctcaagagttttgttgacttaccaactaggtttcttgaagatggtgagtgaggataggaacttggcctggtttggctcacctctcagattcattggaagaggcaagttcattagcacagtttcagtccaccattacagcatttttttcctgaattattataagtcttagtcaatatttccagataatcatcattatctgtttaaattactgcacagtattctattttactgatgtaccattgtgcaaatactatgatgttttattatttttaagttttgctataacagataagtctgcagagattttattcagctctgtattgttttgcttctgttgcattgtttcctcagattgaatttctaggagtagaattgctatgtcaaagagaataacaagtatctctgagccttgccgcatactgcttttttcatttttaaaggttataccaagttagagtctcactagaactgaatgagtgtactaattttactgtagctagtttctttttttttaaaaaaaaaa

SEQ ID NO: 270632 - DNA, 438 bp, Homo sapiens
gggaccgtggcaggtgctggccacagataccaatgtggtgtgttcccatgaagcagggaaaatctggagaataggaattaaccaccctcacctctgcctccttttctccctgctgttggcaaactttgagttccctaggcctgtttatgccatggagtatggtcttcttccatgggttgagggtttagtctacaggaactgatgctacccatttacattgtgcctgtggcctggctttggatccctccagcctggtctttctaaggtctcagcctgaagcttggaatcaggattgggactgaaaagatatttcagagactctttctatttagatagtgtctcaaatgagtgctgctgaatttggttatcagccagcaagggatttcctttgttaacttccctatcagaaataatgttgggaagagggagtcctctcac

SEQ ID NO: 270633 - DNA, 532 bp, Homo sapiens
tgtttttcctcctgtgagtggacaactaaagccgcgtgatgatgcggatgaaaatattctggtctgtgtgtatacaatgaattgtcagtcttcagacctcatggtcgttaagaaaatagggaactcacaaaccctgctgcgcactacatttacttctttatctgcaagtacagggagtccatacagtcaagaaacacacagatacacataatgctattgaggacattgtcattctgtaagaaaacagaatattatctagatttccagagttagtgcagaccctgtgataacagtctgtgggtttgtggccagcgccaaaggtgtgtgtattttcagaaatggtccctatttgtcagtgatagtgttttttttttcttaagtttgacaaagggggtggtaatatcacattctttagatttgaaataattatcagctccaagaatctgtgaacatagtaataacaataaaaattcaacatcgaccctccctaacctgctcaccatacctccccaccccatgcctctgaagaaag

SEQ ID NO: 270634 - DNA, 612 bp, Homo sapiens
tcatgaacatactcataagagctgattttaaatccttgtctgctgatctgattacatcatgttgctttttatcttgtgtatacattacattttcatctttcttcacacatttcatgaattttaatgtgttctatgagtttctggtggttatagagactctaaattctgctgtattcttttgaagagcattgttattatttgaagaaggggttaatttggctggattcaaactgcaatacctgtctctcctgcagtgggcacagctgaaatcctcattcagttcttatgcacatatatgtattttatatagatgtgtgattctatgtaactgtatatactatgcagattttatcacagttacatgtgagagtgttagttcaacaatactccagtactactggaagccagaaccttagttttgtttgcttactggattttatataaatgaaataatatagtatggatacttttacacctactttcttttacatgtcattatgtttgtgatattcatctttgctgttgcagattgctataatttgtacactttaaaaagcattgtttacactgtggtaaaatatacataaaattaaccactttaaccatttttaa

SEQ ID NO: 270635 - DNA, 457 bp, Homo sapiens
ggggatagaaggtgggttcctttttaacatcgacaagcatttttgttgctgttgttattgctgtttggagatttggaagggggaggttgtttttcatgttcaattgtatttctttttaaatggataatatatttgcatgaatcaacattcaaaaagaagactaaagagacatgatgactaaacacagtctgggacctgggttggatcccagaacagagaagggacattagtagaaaacaggtttgatgaaatccaaatagagtctggagttgagttaatagtaacatatcaacgtgggtttcttagctttgacaaatgtaccacggtaatgcaagatgatgacattaggggaaactgaaacccagtgaggggtgtactgggattttctgttctatctttgcaacttttctgtaagccttaaattattccaaaataaaaagtttactttaaaaaaaat

SEQ ID NO: 270636 - DNA, 387 bp, Homo sapiens
gtacatctaagcaagaggggaaaaagagaagtactaaccaccctgcccaacttgctttaacccttaacacactagtactggagagaaaagtaggcttagaaataatcagccaaacacccaagtagagccttttctttcccttttctgcagagtaaagtgcttttgtattatcaaagacaattccatgacaagggaagtttcactcactttaaaataaatgtggatggaaccatccacaaaatcttctgagaacaagagttctaaccacaagagctgcttaatatgtacttccttgaccttttaaatgaaaatcagaataatgatttgtacaaaaactttcccaggaattgtcatggcccctcatgtcagataccttcatttacgaac

SEQ ID NO: 270637 - DNA, 206 bp, Homo sapiens
agaaaaatatctgggggataaataaatatctaggcttagaaataatgccaaaagcattaagtgaaatgaacatgaagcaaatggaaagttccagtgatactgtttaggctctaatctattcacattttattataagcccttaaggtttttaaagtaaatcactttgcaaatatttattattcatctaccaatgccatataatgcat

SEQ ID NO: 270638 - DNA, 364 bp, Homo sapiens
agctttattataaaagacaacttctattgattttcaagggggtgggtggttgtcaagctcactcctttctatgcactgagggaaaattattgtaagcgatctgtaaaacaatagatgaaaaaagaggagataaaaattaaataaaatttaaataaaaactaggatcctaagtggaaaaatagctttaaattagaaattaataccaaaaaataatgatatgtaatctaaggtgaaaatattttgaagactatcaggatatctcccttaaatgttatttagttctgaaaaatatgtattgaagaactgttatattttactttacgtcatattaaatgtgctaaaattaaagagaaacaagtagata

SEQ ID NO: 270639 - DNA, 404 bp, Homo sapiens
ctttttatgttactgctttcaggatgctgttggcatagttgaaatgttaggctttatttgtggctatgtattttgtgtattctacttgggatctcgatttccccaactatatagaaatgtaagtacgttatttgctctgtttgttctgatgaatcaaaagtgcttcttatgactttgtgtctacctttggaagagatcttggaattctgagtagtgcttttgggaccaaaatatggaagtcaaagtcacaagaatcgattcttgatcaattttttgtttgtttgttaagctccttcaagtttaggcagcagaatttagatcagctggaattgttgtctaaatctgttttcctgggtttgcatattaatggcagagtaatgaagtcacaataaattatgcaaagc

SEQ ID NO: 270640 - DNA, 365 bp, Homo sapiens
attggagctaataacaactaaccacttaagtgccaactgatccacaacgtatcagacattgaattttataattctgatttaattctcacatcaacctggcaatatgggcagtgttatctttacagatgatgaaattgaggctcaatgaaattacaaaacttgtccaagcacaccactagaaagggaccataacagaaaatgtcagaattaggaattcaaaccactatggtccaactccaaaccccacgctccttctactctaccattccttcacacaaacatttctttatgtctagctgacagctaattaggtctcaaactggtagtttttcaaaagacactaaggctatcaaactacattttag

SEQ ID NO: 270641 - DNA, 416 bp, Homo sapiens
tgcaccgtccacttgcacgtgtaccttaggaacaccgtgcagtgtgttgtttactggctgccctagaagctcatgttttggaaagctcactgagcagaggaagatgcgttctgcaagtggcgtgtcctaccccacagcagggcctgagcccgtgccgagcatggagcctgccagctagaagggcagccactttcctctgctgtctttgcattactcatctcaagggtagaatttcttactcgtgctttgaaaggctaaggagagtgttcaccccagagaaagagcaggtcaaactcttttgggctaggcccatgcctggtagtgcataagctatttttgggtttcatctgggaccatgggtacccaggaagagcaccctgggcttgggtcccctccttatcttcagccacacctgg

SEQ ID NO: 270642 - DNA, 640 bp, Homo sapiens
tctctaggcttcttagctatgaaggtcatggaagctcaaggctgctggagaccacccctgctgtcacttagaactcatcctgcctgatcatgaagccaactagcaaaaaggagagccaagagatgtcaggaggaaaataagtcctactgttgtgcagtaaggccctagtcaaccaaggaacatcactgtgtgtcacgtgtccaccttcctttcccttgcctcgcatgccctgcctcatccaggcacagcctggaaggtagaggtgagtgacaagcacgcaggaagctttatggaacatccaacacctcaagactcagctcagacaccacctcctccaggaagcctcgcctggtgccctagtgtgccttctcaggctggttcatagcccatctctgctggtccacagcctttattgagggcagcaccatgcataagggctagactctggaacccagatgtccctgattggaatgtcagctcttgccagctgtgtgaccttgaacgtacgagtaacctatccgttccttggtttcatcacctataaaattaacatcagtctctctacctagtcctactttgttgtgagatttgtcactgagttagaacagaggccagcacatggctactcctcaggtatgaa

SEQ ID NO: 270643 - DNA, 499 bp, Homo sapiens
aaaagagtagacacatagattaatgggacagaatagagagtacagaaatagacccacataaataccactgacttatctttgatacaggagcaaacaaaggctattcagtgaatgatcttttcaacaaatggggctggcacaactagacatccacatgcataaaaatatagacacagaccttaaacctttcacaaaaaaatcttactaaaaatggatctggactgggcgcggtggatcacacctataatcccagcactttgggaggccaagatgggcggatcacgaggtcaggagatcgacaccatcctggctaacatggtgaaaccctgtctctaataaaaatacaaaaaatcagctgggcatggtggcgggcgcctgtagtcccagccactcggtaggctgaggcagaagaattgcttgaacccaggagcagaggttgcagtgagctgagatgttgccactgcagtccggcctgggtgacagagcaagactccatctc

SEQ ID NO: 270644 - DNA, 656 bp, Homo sapiens
tcactcagctggtaagtagcacagtcagtattagaacttgagccttttttattccaaagcaggggtaccatcaagtctacccgagtctgacaaagaattaagagcagtggtgggtactgttgtagttcagggtgggagaaggcctctttggactggagatgcaaaaagtgttttcctggaggaggtagcttctaggcctggtccttgaaggacaggtggcatgtggcaggcagtatgcttagtggttaggagcttggatcctggtcagattgcccaggtttgaatcctggctcccaatttactagctttgtgatcttgggcaagtaacttaatctctctgttcttttggttttgtgatctgtgaaatggggatacagtacctgcctcatgtgttgtgatgattaaatgatataatgtgtgttactttgaacaatgttcacatgtattgaagacagtatggtatgaacgtgataaatattagctattataattgggctaggccaaccgtttgcagtcatttcagacccagtgccccctttttataaccaatgtatatatttaaaaactctcattacttttctggaatgaaactcacatataataaaacctttttatgcccataatttaaaaagaatcaatattgtctatgatgtgat

SEQ ID NO: 270645 - DNA, 158 bp, Homo sapiens
gaacctcaatgtcagtctcttacttaatataaatattaactcaaaatcaatcacagatttaaatgtaaaacattaaatgacaaacctttttgaaaatctttgtgacctagcattaagcaagatattcttagatatcatcaccaaaacacaaatcataa

SEQ ID NO: 270646 - DNA, 707 bp, Homo sapiens
gtgggagcgacccagtgggagctaatttaaataatgggtgtggttccccatatagttctcatggtagtgaataagtctcacaagatctgacagttttatcaggggtttctacttttgcatcttcctcattttctcttgctgctgccatgtaagaagtgactttcacctcccaccatgattctgaggcctccccagccatgtggaactgttaagtccaactaaacctctttttcttcccagtctcaggtatgtctttatcagtagtgtgaaaactgactaatacagtaaattggtaccagaagtgggatgttgctgaaaagatacctgaaaatgtggaagtgacgtaggaactgggtaacaggcagaggttggaacagcttggagggctcagaagatgacaggaaaatgtggaaaagtttggagatccctagagacttgttgaatggctttgcccaaaatgctaatagtgatatggacaataaggtccagtctgaggtgttctcagaaggagatgaggaacttgttgggaactagagcaaaggtgactcttgttatgttttaacaaagagacttgtggcattttgcttctgctgcagagatttgtggaactttgagcttgagagagatgatttagggtatctggcagaagaaatttctaagaagcaatgcattcaagaggtgacttgggtgctgttaaaagcattcca

SEQ ID NO: 270647 - DNA, 482 bp, Homo sapiens
ttagttttaaaaatcttagtgatcatcatatgtcttgaagtctaaatgatccagtcttcaatatgcttgaatgcactatcattggaggagtacccaagaaactgtaacagtggttgtcaaaggtggcagtgggggagatattggacagagggataggagaaatagcctgcctgctttttacagtataagcttctgaattttctatcatgtccgtgtactacttatgtaaaaattatattaaaaataaaaagaactgtgtgaagaaaggaaccagggaacaaacccagtcctatctgtctctacaacctacttccttcttatagcactgtgctttagcactaatgctccacatgtctacctttagctgattatgagcgtggacaaataatttattcactttaggccctagttatattatgaaaagtaatgttggatctgttgatttctaaaattatgataaatgatcagagtgcaattgaaat

SEQ ID NO: 270648 - DNA, 356 bp, Homo sapiens
  misc_feature (289)..(289): n is a, c, g, or t
catggatcccagcaatgcaagaagatcccaccctaaatccaaacacagagggaggggatagagggaaacccttgaggaaatgaatcaagaagcagcgaggcaccaagaaggaagaaaccaaagaggaggcgacagactaagggcttgaggggagagaaagccaggagagaaactacacacagtcacccacaagcaaacaaaacctgcacatacacacagtcaaaggagaagcatcagccgagaccacagatgaaatttaaagttgttatggcaaccagaacaggtgggntgggcacttatgcccaccgaatttacaaaattaaagtaagcattgcatttgctaactaattaaataa

SEQ ID NO: 270649 - DNA, 1486 bp, Homo sapiens
ggtgtcggagggcgggccccgcgcggtgctagggttccgtctggactggcggtggtgggtcccaaccggcggtaccgggttccttcccgaccagcggtgctaggttcggttcggacgcgcgctgctggatctaaatgggcagtgctgggtccgatgggtggtgctgtgttgggtccggacgcgcggtgcagagtccggacgggcggtgctggatccaaatgggcggtgctggatctggacgggcggtgatgggtccgatgggcggtgctatgttcggttcggacgggcggtgctaggtctaaatgggcgctgctgggtccgatgggcggtgctgcgttcggtccggacgggcggggacgggcggtgctgggtccaaatgggtggtgatggatctgtggacgggcggtgctggttccagacgggcggtgctgggtccagacgggcggtgggtccgatgggcggtgctaggttcggttcggatgggtggtgctaggtctaaatgggcggcgccggatccgatgggcggtgctgggttcggtccggactggcgggtccgggtctggacgggcggtgctggatccaaatgggggtgcagtgctggatctggacgggcggtgctgggtccgaacgggcgatgggtcccatgggcggtgctaggttcggttcggactggcggtgctgggtctaaatgggcggcgctgggtccgatgggtggtactgggtccggacgggcggttctgggtctggacgggcggtgcagtatccaaatgggcgctgctgggtccggacgggcggtgctaggttcggtccggacgggtggtgctgggtctaaatgggcggtgctaggctcagcaggggaccggtgggcgtggcggcacaggtacggagcgcagggccggtggagcgccctctccgaagggccctgcgctccccgcgctcgctgctcctcctgcccgcgcattgccccggggctgctgcgtgtttcttccagggtgattcctttccgctgggtcacttcaaagccgaccttttcaagctgttttcttccgcggaggacacgttgttaggctttgtgtgcatttcaagggtcatgttttctgaaccgcgctctgccgctcttggggtgttcgagcccccacactgctgtgcggtgttcctctcacagagtgaggttggagggtcccactccctttgtgtgtctccttagaaaacgcctcttctctcagacacatcgttatctgccaattcttcgcagacgtagagaacggactgcagagttaataaacgtcgaggggaagctttgatgcgccccatttggccctgagagatgccacgtgatcgtcattttaaatcctagcgccatctctgcagtctccccacgccgggttcagtcaggcgaagttgcgttatctgtgatgtgttgtaacaaaaagcgtttatctttgaaacactaagacaattaaagaattctgtcatcccaaaaaaa

SEQ ID NO: 270650 - DNA, 360 bp, Homo sapiens
atgtggaaataatttttctctccaccaactggatttcctcttttgcagacaattaaagaattctgtcatccccactgggttctgtcttttctaccgcacttgtccagtacagctacataaggaggcttctcagcagaggagcctggggtgttgaaccagtgccatgagggaatgaattattcaatagatcgctagtctcctttcttaaaattaaagtgtggtgacttgcagaaaagcatctgtgtctaaatgtcatcttcgtgttctagcactcggtttctttatgcctttcagttcctgggcttcccgatggactcgagtttttactatgtgagcatcccggtgcctgcacagcaagga

SEQ ID NO: 270651 - DNA, 2272 bp, Homo sapiens
  misc_feature (2272)..(2272): n is a, c, g, or t
ggtgtcggagggcgggccccgcgcggtgctagggttccgtctggactggcggtggtgggtcccaaccggcggtaccgggttccttcccgaccagcggtgctaggttcggttcggacgcgcgctgctggatctaaatgggcagtgctgggtccgatgggtggtgctgtgttgggtccggacgcgcggtgcagagtccggacgggcggtgctggatccaaatgggcggtgctggatctggacgggcggtgatgggtccgatgggcggtgctatgttcggttcggacgggcggtgctaggtctaaatgggcgctgctgggtccgatgggcggtgctgcgttcggtccggacgggcggggacgggcggtgctgggtccaaatgggtggtgatggatctgtggacgggcggtgctggttccagacgggcggtgctgggtccagacgggcggtgggtccgatgggcggtgctaggttcggttcggatgggtggtgctaggtctaaatgggcggcgccggatccgatgggcggtgctgggttcggtccggactggcgggtccgggtctggacgggcggtgctggatccaaatgggggtgcagtgctggatctggacgggcggtgctgggtccgaacgggcgatgggtcccatgggcggtgctaggttcggttcggactggcggtgctgggtctaaatgggcggcgctgggtccgatgggtggtactgggtccggacgggcggttctgggtctggacgggcggtgcagtatccaaatgggcgctgctgggtccggacgggcggtgctaggttcggtccggacgggtggtgctgggtctaaatgggcggtgctaggctcagcaggggaccggtgggcgtggcggcacaggtacggagcgcagggccggtggagcgccctctccgaagggccctgcgctccccgcgctcgctgctcctcctgcccgcgcattgccccggggctgctgcgtgtttcttccagggtgattcctttccgctgggtcacttcaaagccgaccttttcaagctgttttcttccgcggaggacacgttgttaggctttgtgtgcatttcaagggtcatgttttctgaaccgcgctctgccgctcttggggtgttcgagcccccacactgctgtgcggtgttcctctcacagagtgaggttggagggtcccactccctttgtgtgtctccttagaaaacgcctcttctctcagacacatcgttatctgccaattcttcgcagacgtagagaacggactgcagagttaataaacgtcgaggggaagctttgatgcgccccatttggccctgagagatgccacgtgatcgtcattttaaatcctttcctgggcttcccgatggactcgagtttttactatgtgagcatcccggtgcctgcacagcaaggactctcattgggttccacacgtgctgcgcagatccctgacgcagcgttcactgaacctcaactgcaggagcttcattcctgaggacgctgttaccaagaatgacttgcctcttgaagaatgagtttgcaaagccggcagttagattgctgatgtccaaagtaagtatgtgtagcatcactaaagagaaaattcaggattcctggaaaacagttatgggctctctgcagtgttatttttgtaataaaaaacatatagcatatgtgaaatacctactgggtgatgcaggacacatagaaggctcgaaattaatgtgaatcattctcgtttttctgactgtcattaaaagtccccatttgtattatgtatgagtggtatatcaatatctaaactacactttattgtaggtcccaaccaacattagtttattgacaaatgtttaagagcagccaaaaattcatagaatacctatgattcttaaatcatgaacactcccataactggtatatgtttaggacatgaaaatttccaggctgacaaataatttcgctgtcatcggtcaagactccaggatgatattctgagccatatgttaattttgataaccacctagaacaataaaaggtaaacatgctaccatcttctattctcattgcaccactggattctggtacatctaaaaattgtacttaaatgatatccaagaaatgctgtaaaaaacaaaatagggccgggcgcagtggctcacacctgtaatcccagcattttggaggccaaggcgggcagatcacgaggtcaggagatcaagaccatcctggctaacacggtgaaaccccgtctctactaaaaatacn

SEQ ID NO: 270652 - DNA, 1918 bp, Homo sapiens
  misc_feature (1918)..(1918): n is a, c, g, or t
ggtgtcggagggcgggccccgcgcggtgctagggttccgtctggactggcggtggtgggtcccaaccggcggtaccgggttccttcccgaccagcggtgctaggttcggttcggacgcgcgctgctggatctaaatgggcagtgctgggtccgatgggtggtgctgtgttgggtccggacgcgcggtgcagagtccggacgggcggtgctggatccaaatgggcggtgctggatctggacgggcggtgatgggtccgatgggcggtgctatgttcggttcggacgggcggtgctaggtctaaatgggcgctgctgggtccgatgggcggtgctgcgttcggtccggacgggcggggacgggcggtgctgggtccaaatgggtggtgatggatctgtggacgggcggtgctggttccagacgggcggtgctgggtccagacgggcggtgggtccgatgggcggtgctaggttcggttcggatgggtggtgctaggtctaaatgggcggcgccggatccgatgggcggtgctgggttcggtccggactggcgggtccgggtctggacgggcggtgctggatccaaatgggggtgcagtgctggatctggacgggcggtgctgggtccgaacgggcgatgggtcccatgggcggtgctaggttcggttcggactggcggtgctgggtctaaatgggcggcgctgggtccgatgggtggtactgggtccggacgggcggttctgggtctggacgggcggtgcagtatccaaatgggcgctgctgggtccggacgggcggtgctaggttcggtccggacgggtggtgctgggtctaaatgggcggtgctaggctcagcaggggaccggtgggcgtggcggcacaggtacggagcgcagggccggtggagcgccctctccgaagggccctgcgctccccgcgctcgctgctcctcctgcccgcgcattgccccggggctgctgcgtgtttcttccagggtgattcctttccgctgggtcacttcaaagccgaccttttcaagctgttttcttccgcggaggacacgttgttaggctttgtgtgcatttcaagggtcatgttttctgaaccgcgctctgccgctcttggggtgttcgagcccccacactgctgtgcggtgttcctctcacagagtgaggttggagggtcccactccctttgtgtgtctccttagaaaacgcctcttctctcagacacatcgttatctgccaattcttcgcagacgtagagaacggactgcagagttaataaacgtcgaggggaagctttgatgcgccccatttggccctgagagatgccacgtgatcgtcattttaaatcctttcctgggcttcccgatggactcgagtttttactatgtgagcatcccggtgcctgcacagcaaggactctcattgggttccacacgtgctgcgcagatccctgacgcagcgttcactgaacctcaactgcaggagcttcattcctgaggacgctgttaccaagaatgacttgcctcttgaagaatgagtttgcaaagccggcagttagattgctgatgtccaaagacatgaaaatttccaggctgacaaataatttcgctgtcatcggtcaagactccaggatgatattctgagccatatgttaattttgataaccacctagaacaataaaaggtaaacatgctaccatcttctattctcattgcaccactggattctggtacatctaaaaattgtacttaaatgatatccaagaaatgctgtaaaaaacaaaatagggccgggcgcagtggctcacacctgtaatcccagcattttggaggccaaggcgggcagatcacgaggtcaggagatcaagaccatcctggctaacacggtgaaaccccgtctctactaaaaatacn

SEQ ID NO: 270653 - DNA, 448 bp, Homo sapiens
aaattttaagtgcatcatttgatgagttttgacagatgcatttacctttgtaaactacctatcaagatacaggacatttctgtcaccccggaactttcttttatcacccttcccaatcaggctctgtcccaacacaccctcagaggcaaccactatctgatttatttcactctacattggctttgtcttcatataagtgaaagtatacagtttatacccttctgtggaaggctgtttaactcagtatacagctttgagattcatctttagtattatactcctttttattgctgagtactattacgttgtatgaatatgtcctagtttgtacatctactctcctatcatgaataccttggatttgggctaatgtgaataaagttactatgaaattatttcttattttagtaaaatatatatagcataaagtgtgccattttaaactgat

SEQ ID NO: 270654 - DNA, 571 bp, Homo sapiens
aaagagaaaacggttggaatatggctagctagagattctgtggtctctattccctttaaaattaccatgtccatgtccatgtgtgattgggcacatacacacatgtgcatgagtgtgcacatgcacacagttttcttttatatgtaatacattttttaaagggatgaacttggattagaagaaagaaaacgagatggcaaagagagatactaaatgtgactgcctctggggagcaatccttaaatatgccctcttcctccacccctactcatccctctctaaagcagagtgagaggcaccttttccctgttcttctagcactttggtgaaatctctctgtgcatcttatactatgtgatactgtttgcttatatatgtctcttctcttcttgtctgtgatccacctatatccgggatgtcccttttgtttactttgagtgagatggacagatcacaccgtgacttccagtgtccttagaacatcttatgttaaagaatagactgtaggaagtctgagattgttctactaaaaactcatgataaaatgatgtatgactcattctgtatcata

SEQ ID NO: 270655 - DNA, 514 bp, Homo sapiens
gttgataagtagttgtagtctagtctaggtgcttaaggctagaatctaatagaggaaatgaatacttaactaccagacaaaagaggtaagaacaaaaatgttatttgggaaacccagaagaagaagcagtaagtaagaaatcttgtcattatttgtggagttggatctttttacaactggcaaagtcatgtttaggccaatcatgtaataatttagcctatctgtgcttcattttccccatttatagtactaggttttgcctgtttaatgccttgccactttttcacttgaatgtctggcttctttgaccaaattcctgcttttaatttctggaaggtttaacatactttcattaatattatttaagaaaaagttagaaaatttagaaaatgatgaccaccgttcaatatttttaacttttcgttgatttattgggatctaaccccattgtaaatagagcagcatctgtacataaaatataacctggaagttgttgctatgggggaaaaacagt

SEQ ID NO: 270656 - DNA, 310 bp, Homo sapiens
  misc_feature (236)..(236): n is a, c, g, or t
  misc_feature (271)..(271): n is a, c, g, or t
  misc_feature (287)..(287): n is a, c, g, or t
aagaaaaacacaagtggtggtgatgacatgattttgctttatctgttagagtttcttaaattaaaaaatgtggtaaaggagattcaaaagaagatgagatataaaaggaagtgctactagttcctaaatatgggaataaaaattaacatatgaaaagcaaaatgaaagttatataaatttactgtgctagtcttagtatgttttaatgactttcaaaaatgtttgaaacttttctnagtaggggtgtcactctgtcacccaggctgcagtnagctgtgatcgtagcnctgcactccagcctgggtgacaa

SEQ ID NO: 270657 - DNA, 631 bp, Homo sapiens
aataattctgttcattagcagctagccatctttgatgagtgctgacttctctcctttcagcacagagcaggaaatgcctgcctcccatgactctgggttggagtgaaggggaatgcataccagccaccctcttgcagaggtggggcaggtgctggcacagagcctcaggttaggccgaggggatgcaatctcagatcagcagccagcagtgtttgtaaacaacaggagggagattgtgctggtgatgtccaactcacaccaatgaagatcaaccggtttgtgctttgggcagcaggctgcagatggacagtgcctcctgagggcatcgccatgttttagggatccatgttgcaggatacctgtctgcaagagagagtcaaggagggctttttaagcccctggggttcaggcctggcatctgggtgttaagtagagtgaatctcctgaagtccaaactaacatatgacattttaaaatgaggaaaacaaatggctctgaaaaggtctataggattataggtaagtggttaatacggaagatgttataaaggtctcaggaggagatggggtgatccagggttggttgaagtcgttgaaatggaattaccctgtcttttacctgtctgtgggaa

SEQ ID NO: 270658 - DNA, 375 bp, Homo sapiens
ctccgtctcaaaaaaaaaaaaaaaaaaaaaaattaaaaagaaggcaagtcttttttaatttggtgtatagtgaagaaaagacgactttgggccagaatgaaccgttctaaacctagcaatgtgactgtaggcaaataacccaacctctagaaaaatggagataatgcctacatcccaagatgatgaggattaaatgagttgatgtaaaaatggcaaaatgtggcacctagcgtatacaattggtgtctgaaaaatgttagtttccttttttttttttctggcctgtgttatttagagttttccactagaatagtttgtggcgtaagacttctgttttccttacataaaagcagtgtttttgggtacccactttga

SEQ ID NO: 270659 - DNA, 660 bp, Homo sapiens
atactctgtcaacccaggctggagtgcagcagcatgatctcggctcactgcaacctctgccttctggattcaagcgattctcctgcctcagcctcccgaatagctgggattacagacgtgcatcaccacgcctggctaatttttgcatttttagtagagacagggtttcaccatgttggccatgctagtctcgaactcctcacctcagatgatccgtccgcctcagcctcccaaactgctgggattacaggtgtgagccaccgcgcccggccggaattttttacatcgttttctacaaggtcagtacatagaaatgcattatagtgctccaaatataaagaattcacatactgaaaatgttttgcttttgtccagccttcttaacatacatatttaattacaaggcatgaggattaatggggctttgaatatttaaagctcttttcccaagatgaatttgatttagctactgagatgggcatctgcagtgctggtgacttgccatgtggctgggagtttgagagcagaggaggtgagaccaggactgatgtcaggttggcttctggtgttttacttccttttccactatgccccctcccctctcacttttagctcaccgctttgtcttttcagtttgctgaggaaagaggaaaaagtaat

SEQ ID NO: 270660 - DNA, 474 bp, Homo sapiens
aaagagcgaagaaactatttctgagtagcttcatatggcagaactaaaatgagtgtcaatttttactttaagtaaattttatgtcaaatgatttcataggtctattacaaaaatattattcaatttaacatgtttgttgaagacctactatttgcagtcgccccagatagatatgaaatatgtgcatgggtggagggacaagtagcataaggatgatgagaacaccgttaggaacatgcgctttggtagccagtgagcttccacacctgcaaatgcatttagaagtgcccccagtatggcgtagtgcaggtgttaggtcagtgtgttcaattcattcaactagaataaattaaacatttttttcctaaatagttttgataactctctgatttatgtgcatattctcactatatgtttaacttttagtaagggtaaatggttttatgagatatacactggtgtttacttccaacc

SEQ ID NO: 270661 - DNA, 327 bp, Homo sapiens
gattacaggcgtgagcccatggtgcctggccatgtgtgtttacatttaataaacctttattaaatataatcttactgtatttatgaatttatactgttttaattatagcttcaaaataacgcctgtagctttttcccttaggattattttttaaattgacaaataaaatttgtatatatttttggtgtacagcacgatgttttgaaatatatatatatgtacacattgtggaatagctaaattaagttaattaacatatgcattaccacacatatttattcatggtgggaaatctctcttagcagttttcaagtaaacaacatgttg

SEQ ID NO: 270662 - DNA, 144 bp, Homo sapiens
gtcagttccttcagaataatcatgaaattttcgagttagaaaaaggtgatgggccaggcgtggtggctcatgcctgtaatcccaacactttgggaagcctaggtaggaggattgcttcagcccaggagtcggagaccagcctgg

SEQ ID NO: 270663 - DNA, 360 bp, Homo sapiens
ccaaaactgcaaacagccacagcccttctgacagatcactaaacatgataaaattatgtaaaaagtaggcaatgccacctatgatctctaacatcagtgaacttccacttaaaaagaaagaaggaaaagaaaaataagtgatacgcactcttggactgcccaagatacttaaaacattctaaataaatcccactcctctatagtattagaatacagaaaggtaacttttcattgtttttgcccatgaaatattagtctctccttcaaattctaagatcaggccaggcgcagtggctcacacaatattctttttttgtttgtttgttttgagacaagagtctcgctctgttgcccaggctg

SEQ ID NO: 270664 - DNA, 429 bp, Homo sapiens
caatttcgtaatatcacctaggaaagccatagcattgagcttaagtatttggtgactgtatcagtttcctgtgactgctcttacctccttgcttatttcaaagtctgaagggtttcatgttgggtttagaaaagctgtagagcggcgccacctgatggttactacccagagtgcctgaactgaccttgcaatttcaaacgcagtatcttggctagctcagaagacttcttcctaatgctttacatgaaaagagcaaactgaaatacgttcctcttggaaaatcagaaacataaagaaaatgttttaaattttgacagaagcaaacccactcatatacagaataatctaccaccaaaaaagagtttgtatatgatattcattgaatactattagatttcaaataggtaataaataagattttattatcca

SEQ ID NO: 270665 - DNA, 748 bp, Homo sapiens
cagtgctgtgctaagaacttgggggacttcaaaaagttcaccagttcctgtgtccatgggtgaaaagattttctacatctttccttgactagaaacagaagtcctgaaacaaggtacaccttcttgaggcttacttgaatataacgtcaggaggccagaggctttgtcctgcctaatgtgttatttccacactgaataaaagcacctgagtcctggttctggagattggggcatgatatcttccttgggccattacttgtcctgccacttggaataggtgcttataagccacctctaagataatgaataacttgcaatttgatccgtgatttacataacgtgtatgtttttcctgtttgcaaaggcatatggcaagggagtaaagccaaactttttaccacatggcaaaaataattgtattttgcaacagactaaaagcttaatgctatacagactttgggttggtggagttacttgaggatttactccagcaaaacaaaaaaaagaatgaaagaaagagaaagataaaaatatgaaagaagcaacagacctattccagaaatgtaatgaaaaaaggccacgaagtttgacaactatgtattaaatttacaatcagtccaaattagactggtagtcagattgatatgagaagtacattttcaaaaagatgtactataccaaataatatgagtgcaaaactctggatgattttagtaataatgtgaagacacatatttcttttgacaat

SEQ ID NO: 270666 - DNA, 480 bp, Homo sapiens
gaatctgtagtactgtcactgcaaccatacgctctagaaatatattgctttagagaaaaagcagcaaggccaaataaattgatacagaagaaatgtttagatatgtttttgcaagtttctgcatatctgaaatagaaccaatacatcacatggaaagccaatggctgtgttttgagtttatggagagccatatgtggcaaggaactgagggtggcatccaggcaacagacttcaagaaactgaggctgtcagtccaacaacccacaagaactgaatctgaccaacaatcacaggaacaaacttagaagtatactctttcccagacaaaccttcagatgagaccacagccccagccataagcttgaaaacaatctcatgagggaccttgagccacaggcatgtagtaaagctatgccaggaatcctgcctgccccacagaaaatgtaaaaaaaataaatttttattgttttaagccaaaaa

SEQ ID NO: 270667 - DNA, 712 bp, Homo sapiens
cagtgctgtgctaagaacttgggggacttcaaaaagttcaccagttcctgtgtccatgggtgaaaagattttctacatctttccttgactagaaacagaagtcctgaaacaaggtacaccttcttgaggcttacttgaatataacgtcaggaggccagaggctttgtcctgcctaatgtgttatttccacactgaataaaagcacctgagtcctggtaagtctaatttgctaggtgtggcaatatgaccagtgaaaaacaacaagggcagcatttcctgcagttcggtggcacagtatggttcaaagaggtataaaaggaagtcacaggcattttaaaaaggttgtacatctagcaatacctaacaaaataggaaatcaacttggaaagccaatggctgtgttttgagtttatggagagccatatgtggcaaggaactgagggtggcatccaggcaacagacttcaagaaactgaggctgtcagtccaacaacccacaagaactgaatctgaccaacaatcacaggaacaaacttagaagtatactctttcccagacaaaccttcagatgagaccacagccccagccataagcttgaaaacaatctcatgagggaccttgagccacaggcatgtagtaaagctatgccaggaatcctgcctgccccacagaaaatgtaaaaaaaataaatttttattgttttaagccaaaaa

SEQ ID NO: 270668 - DNA, 609 bp, Homo sapiens
gtgtgtgtgccatgtgtacatgactgtgagtgcatgtgtatatgacagtgtgtgaatgcacatgtacatgaaggtgtgtcgtgtacatgatggtgtgagtgcatgtgtacatggtgtgtgctatgtgtacatgacagtgtgtgtgccatgtgtacatcacagtgtgtgagtgcacgtgtacatgacggtgtgtgtgtgagtgcattgtacatgatggtgtgagtgcacgtgtacatgacctcatgccatgtgtacatgacgtgtgagtgcacgtgtacatgatgtacatgacagtgtgtgtgagtatacgtgtacatgaaggtgtgtgtgccatgtgtatatgatggtgtgtgtgagtgcacatgtgtatgtgaaagtgtattgttatgtgtacatgcgtacgtataactgcatgtgcatgcatgactgcatgtgagtgcacgtgtgtacataaatgtatgtggctgtgcacatgtgtgtacgtaacggtgtctttgcatgcatgtatatgtgatcatgttgtgccatgcctgtgtggtaacgatcacagtgaggccaggggctctgcgggcactcgggggtcttcaggctgacgtggggtggggtaga

SEQ ID NO: 270669 - DNA, 431 bp, Homo sapiens
gtatttttagtagagacggggtttcaccgtgttagccaggatggtctcgatcttctgacctcgtgatccaaccgcctcggcctcccaaagtgctgggattacaggcgtgagccaccgcgcccggccttatttatactttttgtagacacggggtgcttgctatgttgcccaggctggtcttgatctcctggcctcaagtgatcctctggtatcagcttctcagagtgttgggatgacaggcgtgagccaccgcgccctacccagtttcctcatttgtaaaatactttctaaggttgtcaccatgagcaaattaacaaagaatgcacgtgtagctcgcagcatacagcaggcgctcagtgagtggcaggttattattccgttttgttttgttttgtgcgccaggttattattcccacttagtgtcagcaccc

SEQ ID NO: 270670 - DNA, 1197 bp, Homo sapiens
ttttgcagatgaggagactcggacttaaacctccccagcattaaggcaagaaaggtgtctctgttttttccgaagtgtgcctgcttgactcctttgatttttctctgggattcttcatcctccatcaagttgatcgatccctctggatcttggtcagtttcctgacatctctatgaagttcagtgacccagactgagtccacgtctcaaataaggttctgactaatgcagagtctaacagaaagattactgaacatgtcatgcactattaataactcctgttatcgaggatttttttttcacaataggaatgaacagagttctgactcactctaggtttgtggtaaattgcagatcactttctgctttatttagcgggagtccctgttgtcatctttctccttctctcttggccctcataattatcatatcttccccaaacgttcttcagctgtgaatagccctaagcactattcagagtgagtgacagctctcttatttcgtgctgggggacatacaaacccttggacaaacacttgtcactgtgtgccaagaagctgaaaaattcttcttgcctcagagccataattacacttttggtagcatattctaaggaagtcatcccatgtacaggaaaagctgcaatgtgtcaggatgttcattccagcaatatttatagtagtgaaaaactgaaagcaaccaaatgcccaagaaaaaaattacagtatatccactggatggaatagtatgaagccatttaggacagattgtgaaaaccctgtggcagtatggggaatgtttgctaagttatatgaaaagatgaggacacaaaatagcataacatacattccccagggatatagtcagcaaagtctagaatgaagaaaattaggacaaacacccaattcccttaacaaataaaactggggccaggtatggtgactcacgcctgtaatcccagcactttgagaggccaaggcttgtgtccaggagttcgagaccaacctggacaacatggtaaaaccccgtggtctacaaaaaatacaaaaattagttgggcatggtggtgtgtctatagtcccagctactcaggaggctgaggtgggaggatcaattgagcccgggaggtcaaggctgcagtgagctgtgatcgtgccagtgcattccagtctgggcagcagagtgagatcctgtctca

SEQ ID NO: 270671 - DNA, 515 bp, Homo sapiens
cctttacatctataaatactatcttcatcagacagtgatgacctctgacccatctgacagctggatgacctcactatctgaaaggacaattagcttcttctgatttggtttactactcgaagattccaaattcccagagttctttttttcatgttcttcctccctgatgacatcatcaagatcttgggcataataaattcggctatagagttgaaattccacctcactatcaacactcagttcactagataactcgtccctataaagatcatcttcatatgcttctatagtctcatagccaccaaacatcataaaaaatcggtaactttgatgtgctgcagctgcaaacctacttttcttaataaattataatgatgtaatattcatcatttatccattatatttcaaatatattttgccagtttgtcattttaaaaattttatttatgactttttaatgttctgaagttttaaatgtttatgtcatctattaaaaatagtatctattattcttc

SEQ ID NO: 270672 - DNA, 1146 bp, Homo sapiens
caattgtgtaagccagttccttaaaatgtatcttttaaattaatttcttacatgaatctctctttcctttctctcttgctatatatgtatacatagacatatatatttaatacagatagaaatatatacatatctatgtatatctacataaatatatatctttgttgatatgtagacattgatcaatatacatagatacatagatgcatgtctttatagatgtatagatatctatatgaacatagatatgcatatagaacatgtatgaacataaatatagctatctgttcctatatatctatacccatagatatatagatattgatatttatatatatagagagagagatttatatatatgtagttatttacatatctatctgtttatctggagaaccttggctaatactgtagatattattatctctacatttttgatggagaaactgaaattatgtaacctttccagggttacacagctgggaaatagcagttctctaaatattaataactctaaaatctgtgtttttgccactcactgccattcctcttaaagtgaggctgaacggaaccattttccctgcttctctctacccctaaattctctttagatgaccatatataaaataaatacattcctgaacactgactataaagtcaaattcttgggcacaaacactttttttatttacttaaatttaaaaattacatcctggtcttactgaatgctgcagtttctgtggcagcaggaagtctaaactttgaaatagaattttaaggcaaatactacaaacaagtaacttagataaacaaatcagagaaggtacagattttacctcaactgtttatcttgtataattttaatctagctctttattcacaaagcattttgatacttatattggttttatcagctccatcaataaaaataagtcaaatgaagaattggactgacagcttctggactggcttgaagaggtgaagtcagttaaaataatcaaacaggtttgtttatgttgatgatacttgaacgaaatagtggatagttttatttcctttcagtttttttactatatatattggaaatatatacagatcacatttctctatttcacatctctctaagtgttagtaaagtgttaagca

SEQ ID NO: 270673 - DNA, 372 bp, Homo sapiens
tttaatttttatatcatgaatatatttgtataatattacatattcttttactgaactattttttgaactgtaaattagacacatagcaatgtatttaacccatcttcagttttaggatgtttaaaacatttctcatactttaaggacatccttgtagttaaaactgtgcaaatgtcccactaaacctttaggataaattactgagtgtgaaaaatgtttataaaacatatataaaaactaaaaactttttataaaaatgaaaaatttctcttcagaggtttgtacaaatttgcatacctaacagaaatttggattcgggttgtctaaatacaccctggtgggttattgtgattaaatgattttaaaaaggga

SEQ ID NO: 270674 - DNA, 888 bp, Homo sapiens
agaaagggcaaaatcagccaagttataaccagggcatgtaataagcaaaccacatggaatgcaataaacagaaggcaagaaaagtagtttaattccctcccatcatttctattttgaagcaagttgatctctgcaattttataaaagtactaaatttagtacagcaatatcatgaggaccagaatctatctaaccatctcatcctttccatgtcaaatacatggcctttgcatgtattttcatcagtatcttcagggcagtgaccttggtaagtcattaaggtggtaagtggagcagcaaagccgatatgtcactaggtagtcagcagacccagactgaagcctgaagagtgaaacaactttcctgctgggtggccctctgttcgttctattcctattttatcctgatggggagaagtgctttttaaaaatgatctttaatatttccagagtggctaacttccaaaaaacataacctaaagagtaaaaacattcttttctaaagaatgagaatcatgatatgctcttgacaagtatatgagccatcaactacagaagacttaaacaggttccagcgccctgcctcctgggcactgggttcactgatgtaattcatatttggaactgtcttgccatgtatattacaggaagctatgacccctgaccttagattgtacttgggagctacaaacaacatagcttatattggttcttgctagaatgcttttctcccagaaatctcgagtactttacaaagcttcctttagaacagtggttctcaaattttacatgagaaattattgaggagcccaaagaacttttgtttatatgggttacagccgtcagtttttatgatatttaaaattaaaactaaaaaaattttcaacta

SEQ ID NO: 270675 - DNA, 268 bp, Homo sapiens
ttcctgctagcatactggcaaagactattggaaaaaaaaaaagtgtgtaaaatttgattttattgctaccctaaggtggcataattagccataaggtggaaatgtgagaaatctcccactttgcaaaaggatgtcagcgtatcggacctctgggctctatggaaattggtaataaattcttagaactttgtacctaatgcagagaattgtttagttagttgctatcataaaaacagagaggcatgcccttctttttttgttctttttt

SEQ ID NO: 270676 - DNA, 484 bp, Homo sapiens
caaatgtatacaaccacacaaccaccattttaatcgagatatagaacatttccatgaccaccgagaaaatttcttgatacttccttccagacaatactatccccacctcctcactccaccctccttccttgtgcaagcaaccaataagccttatttcactatagattagcttaacctgttctagaattttatataatcggggtcatataatacattatgtatctagtttttcttgcttagcatgtttttgaaattcattcgtgtggctatgtgtataagtagttcagtccttttcattgcttggtagtatttcattggataaatagatcataatttgtttttctgttcatttattttttggcatttaggcaaaatatgtttttctgttcatttgttttttggcatttgtttataatgctttttactattgtgaataaaactgcttaaaaattaagcagtgcacatttgtgcacaagtctttctg

SEQ ID NO: 270677 - DNA, 470 bp, Homo sapiens
tattattactgtaatgatggaatgaatttcagatgctgggacataaacctctgacccctttttaaattatgtcagagagagattcctagaaatgggattagcagatcgaagagctgaatcctcctcaagtcctatgcacaattgagctgcttgccagaaaggtcaagcatgtttcccattctcatcagcaacacgtgagaggactcagtgagctgaaacacggccagcgctgcaactggtcatttaaaaactctgccaattggggccaggcctggtggctccatgaggctttgttgtttctatgaaaaagtggggagacaaagttaaagtgtagagtttttactagttttcttcttgcttgttagtttgtgcaagcagaattaagttgttatcagcttaaaataatgggttataagatagtatttgcaagcctcatggtaacctcaaattgagaaacacaacagatacac

SEQ ID NO: 270678 - DNA, 418 bp, Homo sapiens
caaaaaaaaattttttttttaaaggtcgtttttccaggactgggtttaaatcctagctttgctggtagctctgggcaagtgacttcacctttctggtcctcgggtttttttgcatctgtaaaatgggcacaatgatggtctgaaggccgggcgcagtggctcacacctgtaatcccagcactttgggaggcctaggcaggtggatcacctgaggtcaggactttgagaccagctggccggcatggtaaaaccccatctctactaaaaatacaaaaattagccgggcatggtggcagatacctgtaatcccggctactcaggaggctgaggcaggagaatcacttgaacccaggaggcgaggttgcagtgagccaagatcactccgctgcacgccagcctgggagggagaccccatctc

SEQ ID NO: 270679 - DNA, 387 bp, Homo sapiens
ggacattgttctagaatgtatcagttaaaagctgctgaaagatctcagacatgtgttctgttaagtgcctacaggttcaccaaacttattgaaaatagttaaaatggtccttgacttcagcttccagaactgttgtaagttccttagttcaaacacaaagcaataaaactggccccaataaaacacattagcctcaattctaagcagtttctgataaccataatcatagactaatgtgcacagcctttgaacttagcaattgcaacactaatgtacatgagactatttatcaccaaaaatcaagtaatctagggagaaaaaatgggagagggtatgtgtagagatttgagggaaacccaaaatatacacaaaatagtttatgactta

SEQ ID NO: 270680 - DNA, 415 bp, Homo sapiens
caaggaaactacagtctgggagacatttctcaggctacaaaccagttttgaggctcgcctgccctgcgtcactatcattgtttccttgggtttcccaggaatgtacatgtgtgagactgctgccctgcttatagatctgtttccctgcaggaaacaggagtatcttgcctggggcttccagagttggagatacatgtagtttcactactgagtgctaacatttaattttggaatcaagtgatgcattcagactggctgctatcattctgtggtatacatgtagtgaacacatttgtgactgagtttcctgcttttagctggagcaagaaagttttgtaattgtgatttgtacaaaaaaatcataggcaagagaatgtgtgtaaaataaactttattgtcagaggtttctaaaggc

SEQ ID NO: 270681 - DNA, 222 bp, Homo sapiens
cctcagaatcctgctgctggatgacaccacaggcaaagttcagcagcttcacttacagactctgaaacaaaagagaaaattatcaagaaatacagagaagcagagactcaatctccagaatgaatgagaagcagaatcatgaattccaacactttctctcccttaggattcttgtctatttggcattaatctgggaacaataaaattcagttgacaaggcac

SEQ ID NO: 270682 - DNA, 531 bp, Homo sapiens
gggtagtatctgagaaggcttcatgtgctgtgagggacatctgtgttgtcaaatagaagaggaattctctcacaacaaggggaaacattgagcgcaccctgcatagtgatttctcacacagccccccacatgggatatcttgatgctgtcatgcaacaattacacacatgcctaagacaaatactttgctctagtgaggaaatttgggaagaactcttatcataaggcttccattagcccctttcattttagggagtagaatttgctgttcccacattaggaatcgattccattctctccaagatcttaagagctaccaattggctgtttccaatgcctagttgtagcttaatcctacatcagtatctcccagaacttgttacagcctaacccagcgatgtggaataggttttatctcgcatatgtactctgatagccatagaaacactgaagcttagaagatgccgaggctgtgttcaagggaagggaggaggaagaaaacttacattaatcattgccattaaagtcttt

SEQ ID NO: 270683 - DNA, 440 bp, Homo sapiens
agactaacagcatagatgtcaattcttttataacatactgcaaatttactaacatgcacgtgtttccataattttgctttatattacttatatgaaaataaaaatatattaagcaccctttatatttgaaaagctgatggagtttgagaaggaacaaagaaattgtgacatcttaagaagtataattgaggatggaatagaaacgtgaagagttttaactgggaataatggttcagtcagtaatatttgtatgtgattgctaaatatacagaattttttttaattcaaaggaggaatactttctacattggacctagattgcatgtcccccaccgactttgttattattgctataattttttggtagtatggcccattgcacattctaggaggacataaagaggatgaaatccacttgtggattattagaagtatttgtt

SEQ ID NO: 270684 - DNA, 197 bp, Homo sapiens
gccattgtgtttccagctcaccaagctcctgtatctactggaaaatggaagtccagccttaccaacttgtgaaccttgtctgaagggagccagggcctgccaatggaaccacctccaggagctgcaactgctgttgtcattaataccattgtgtctattttttgagagagataaacttttcatggtgttacattttg

SEQ ID NO: 270685 - DNA, 331 bp, Homo sapiens
gtactacaagtagactctctgggctgaacattgagtgaggggcatagacagatattagagtaacttactaccagagattttgggggttgagtcatcaagatcttgagagaaaatgtttggcattgtaattcagctgaagattctgggatcccaagggcaccctaaggcatgacttggaaacgaagatacagtcattcacaatgacacatgatcacggctgaccggaagacttgagtattcatgaattttggtatacatgggagccctggacctaatcccctgtgtataccaactgtatttctgaaagaataaatgcttgtattaaactaca

SEQ ID NO: 270686 - DNA, 420 bp, Homo sapiens
ggtgagaccgtgtcaaaaacaaacaaaaaagcaattctgatgacgaactcaggtccacagaagggagcccaaataattctgctgatcattgagtgagttgtggtactttcaacactttagaggtttaaaggactgctttaggctgggtgcggtggctcacgcctgtaatcccagcactttgggaggccgaggcgggcggatcacctgaggttgggagttcaaaactagcctgaccaacatggagaaaccccatctctactaaaaattcaaaattagctgggtgtggtggcacattcctgtaatcctagccactcgggaggctgaggcaggagaattgcttgaacccaggaggtggaggttgcggtgagccaagatcgtgtcattgcactccagcctgcaacaagagcgaaactccgtccc

SEQ ID NO: 270687 - DNA, 490 bp, Homo sapiens
tagaaggagtctcactctgtcaccaggctgaagagggattgcaatggcacgatctcagctcactgcaacctccacctcccaggttcaagtgattctcctgcctcagcctcctgagggactacaggcacatgccaccatcccttgctaatttttgtatttttagtagagacggggtttcaccatgttggccaggatggtctcgatctcttgacctcatgatccacctgcctcagcctcccaaagtgctgggattacaggtgtgagctaccacacccggctaatttttgtatttttaatagggatgggtttcactatgttggccagaatggtctcaaactcctgacctcaagtgatccactggccttggcctcctaaagtgctgggattagagatgtgagccaccctgcctggccctaattttaaatacatttaaaaataatctactcaattcctaaagctttagagaaaagaaaatggtaccacatttctt

SEQ ID NO: 270688 - DNA, 535 bp, Homo sapiens
gcactaggtgactctgtgcttctctgaggaaaaataactaaacttggtaaaagaagatcctaagaagccaagaggcaaaaggtcatcatatgcattctttgtgcaaacttccaggaggagaacaagaagcagcactcatgcttcagttaacttctcggaattttctaaaaaatgctcagagaggtggaaagccgtatctgctaaagagaaaggaaaatctgaagacatggcaaagggggacaaggatggctattaaagagaaacttacatccctcctaaagaagaaacaaaaaagtttagggatcccaatgtacccaagagggctccttcagtcttttcattttgccctgagtactgcccaaaaatctaaggagaatatccaaacctatccattcgtgatgtttcaaagaaactgggaaagatgtggatatggtgcatatgacaagcagccttatgaaaaggctgtgaagctgaagaaaaactaagaaatggatattgctgcatactgagctaaaggaaggcctcatgcagcaaa

SEQ ID NO: 270689 - DNA, 608 bp, Homo sapiens
cagttgttttaggaattccaggagctgtgtgggtcacaggcctgctaattgcctgactactgggaaccttcgggtatgacactattgaaatgagacattagaccttcacagggtggagctgtgggccatgctgggctggaagtaaggagtagggtttgagaggggaaaaaaagtagcttggaggaattagcaataaaggtgggtggaagtcttacatttctagaaggtcattcgaccaaataaggctggtgctagggttgttggaagggtaaatgacataatctctgtgcagcacttagcacaggccctcatttatagttagtgctcagtaatttgcagctgttattcctattattgttatggcctctgtcatattacttatgtgaagtacactagactgtaatttcctgtggtgtggctgtgtcgagccacatgtataccaatgaagtggaagacattctggagctaactccgtcttctcgtggggtctcctctcttcctgctcagcctgttatactcccagcctctcaaccttctcaggatcctacctaggcaagctacaccaagtataactgagatatgctttgaagcactgcagaagccccttt

SEQ ID NO: 270690 - DNA, 553 bp, Homo sapiens
taaggaaattacatataagctgaaacttgaagaccacatataggaaggaagggagacggcagggatagatcgtgcagatgaatagtttaaaataagaaacttgctgtatttcagagatgtcatgaggacctatgtcatgttaattcccagggcaaaatactttgtgcagagtcagggaaatattttgttttctaagttggttaatttttttctgccttacattatctcatgccttaaagggcatggacaagtccccactgttaagggagcagggccggacgtggtggctcacgcctgtaatcccaacactttgggagtccgaggcgggtggatcatgaggtcaggagattgagaccatcctggtgaacacggtgaaaccccatctctactaaaaatacaaaaaattagccgggcgcggtggcgggcacctgtagtcccagctacttgggaggctgaggcaggagaatggagtgaacctgggaggtgcagcttgcagtgagcccagatcacaccactgcactccagcctgggcgacagagcaagattccgtctc

SEQ ID NO: 270691 - DNA, 718 bp, Homo sapiens
tgatattttttgggagaaaaatgtattttctggctcttctctctctctctgcatgtatgtgagtgtacttaaaactgccactttggcatacaaactcaagaacatgaataacattgcaacttttttttttttaatttaagattggctgggattctgtgattagaatcttgtcacattacttaagatttcaaaattattttcaccccaaagctcacagccagagagacaagatccattagcagatgaatagtttaaaataagaaacttgctgtatttcagagatgtcatgaggacctatgtcatgttaattcccagggcaaaatactttgtgcagagtcagggaaatattttgttttctaagttggttaatttttttctgccttacattatctcatgccttaaagggcatggacaagtccccactgttaagggagcagggccggacgtggtggctcacgcctgtaatcccaacactttgggagtccgaggcgggtggatcatgaggtcaggagattgagaccatcctggtgaacacggtgaaaccccatctctactaaaaatacaaaaaattagccgggcgcggtggcgggcacctgtagtcccagctacttgggaggctgaggcaggagaatggagtgaacctgggaggtgcagcttgcagtgagcccagatcacaccactgcactccagcctgggcgacagagcaagattccgtctc

SEQ ID NO: 270692 - DNA, 491 bp, Homo sapiens
gtggagatggggtcatgctttgttgcccaggctggtcttgaactcctggcctcaagtgatcggcactccttttcgtcccaaaaagttggaattacaggcatgagccactgtgcctggctcagttttaaaatatgctcatgtatagtataagtctgcattagtggggactgatacaggttggctatatgtccccattcaaatatcatcttgaattataatccccatgtgtcaaatgagggacctggtgggaggtgattggataaccgggatggatttccccttgctgttctcatgatagtgagtgagtccttatgcagtctggttgtttgataggtgtctggtgcttcccccttctcactctctcctgccaccatgttaagaggtgccttgcttccccttccccttctgccatgattgtaaatttcctgtggcctccccagccatgcggaactgtgagtcaattaaacttcttttgtatgtaaattacccag

SEQ ID NO: 270693 - DNA, 262 bp, Homo sapiens
ctgggaagcggaggctgcagtgagccgagatcgcgccactgtacttcagcctggacaacaaaaggagactccatctcaaaaaataaaaaaaaaaaaatgaatgaatgaaattaaccttggtatactactattaagtgaggcctggcgggatgttgtggctcacactgtaatctcagcactttgggaggccaaggtgggtggatcacttgaggccaggagtttgagaccagcctagacaacatatcaaaaccctgtctctaca

SEQ ID NO: 270694 - DNA, 933 bp, Homo sapiens
gtcatctctgtaggctttatcctttaattaattatggatttttatctgcatatatgtgaagctaatgattgacttggttcggacactgaattgtcggcttaaacctgccattccactgggcttcatcactatgttctatgggtgtgaagcctttgttttttcagagacccatttccaccagcgggtttgcactgtaagtgtttccacaggaactctgccctttgccagtgtcactgttgtggctatgcagcagaacccacagggcggaggtgtttcagccctcactgaaaatgcaacagatcttaacatctcttgctgcaaattttccagtgtgttctggtctaccttggtatcttaaaaccaggctcactgactaccacatgagaaatgacagtggggtgtcttaaatgatctgttgaagaccagcagccaaaaagattgcccttagtgtttctctctaccggctaacattagacaatgccatgtagaagctgctgttagggtttgagaactgtgtcgcctcattctcaagatagccaaggaagtgtcatctctggagaaggcagttctgtctctttcagtttctccatggatccgatattgttctgaaagaggtggttttaccaattcgtctcacacagacttcttgcctttacttttatctgactgctgacagggtgggctggaatataatcgctacttaactggacttgactttcaaggcctgattggcgtttccagtatagcagttgcctgagtcatctagttttggaactgataaatcaaaggactggcttggaggctagtgtcctgtctggagaatgggcttaatgtaacttcagttaagaaattaatgaatctgaaatagttataacccaaggaagagattttcctaaagaatgtccctttagagaaataatgaccagttccctc

SEQ ID NO: 270695 - DNA, 813 bp, Homo sapiens
ggctggggggggagacaagatggcggctgcgggagggggtcctcgcttctcagctcccccgctcacccgccttctccttccctgccgccgccctcgctccaggagagagctttcgcaccgcccccgccctgctcggtgcctgcacgactcccagaaagtcgcgtctcccctaacccccatgcccaggacctgaggacaaaggtctagcgattgtccatcccctcccccagtgaggacagccgggaaagacctgcctttgttgtgtacaggtggtatctcactgtgttatccagactggactcaaatttctgggctccaatggtcctctcacctcagcctcccaagtagtcaggactacagaactccatggcaatgttttgaggattaaagaggagagtgatgactatccaaacgtcagagaacgcaactatgagactagagacactggaaaactaaaaaagtaacgggcctttgctgactcagggagatgatttcccaagagggaagaaaactggaacctgagaaataagtgatttagtaatgtggctgctaaaatacggaaaaactagaatgaatggcttacacatttttgaaatgaagttagaagagggttatactgtgaagaagaatgaaaaagccaaacatttcattcaggtaagcatatcacataggagaaactctaggtgactttggtttggcagtgagtttttagatacaacaccaaagcacaatccataaaagaaaagaaagatagataagttggacttcattaaaatgaaaaacttctgctctgcaaagacactgttaagagaa

SEQ ID NO: 270696 - DNA, 597 bp, Homo sapiens
ggctggggggggagacaagatggcggctgcgggagggggtcctcgcttctcagctcccccgctcacccgccttctccttccctgccgccgccctcgctccaggagagagctttcgcaccgcccccgccctgctcggtgcctgcacgactcccagaaagtcgcgtctcccctaacccccatgcccaggacctgaggacaaaggtctagcgattgtccatcccctcccccagtgaggacagccgggaaagacctgcctttgttgtgtacaggtggtatctcactgtgttatccagactggactcaaatttctgggctccaatggtcctctcacctcagcctcccaagtagtcaggactacagtgttgctgtcctcattttacagatgaagaaactgaggccccagatcacagggctggtgagaagaacgtgatatctccagagctaacacttaactactatagtgtaccacacaaggagagagcagcattagagaggggtgccacttcctctgatggaagataaaaaagaaagattgccagcctgggcaacatagtgagaccctgtctctacaaaaaataaaaataaaaaaattaaaaa

SEQ ID NO: 270697 - DNA, 607 bp, Homo sapiens
tttcctggcttcctttcctccctgtctccctggcctacccttcctcttccctcagctgttccttccctttctctccagtgaagactaagggccaagcatgagcctttcttcctgctcttttacccttgaggcagcaggagaggatattcacctcctgacatgacagattctgacgctatctgctcctctgtgactttgggaagcggggtatgtgctgctcctgggctgatgggggaaagtgcctctcccagcaatgctggtgccacttggtgtgctacggccccccagggcagtgcggagccatctgggacagttagacaatgagagacgtgaagccatttcaaggtgcttccttgaaaatgctccagaaaaacagcagaggcggcctctctggggatccggtccagcccttgaaaagaatctgtttgtttcaccactgaactcaaataagccaacagattgaaggaagggagtttccacgcgcccctccccaccaagcagttacctgagttccagagtccagtccgatggatcccattttaccctggtttaaattgtttccttagaaaaaaataaacagaacctcttctctcactctccagtggaa

SEQ ID NO: 270698 - DNA, 468 bp, Homo sapiens
tgtaacaaaatttgatttgaactacctataaatgaaaagtcggggtttattactttatatgtaatgctgagaggagactgttgggaacagttatgtcaatgagcaaactagaaattggcttcaaagtctgatacttttaaaagcatgtgttttgtgtatatgctcacaaaatgtctgtgaagagatttctttcagcttttgctcagctttatggtggggtgtactgttttatctgggcggtgagggtattgatttacataaaaactgtagacaaacacagtacgagtctcagcacgttttgcatttattgtactgcccaaattgtttttatgttaaaagtcacgtttcataatctgcaatatttttgtcaaagtgcacactgtactttcttcttaaaaacgtgattaaagagatcactttgtccggatgaagcagctgttggcattatccgctgaggcttgaacacca

SEQ ID NO: 270699 - DNA, 419 bp, Homo sapiens
agtccataaaatattgcacctgataacagtgtctgtggatgtctgtagccttgggacatgcggtacaagtttaatcagtgatttatagtgaatgtctacttttgttttgctggagagggctgtcgtctgagtattgtggtcagttccccaggtgttccatagtctatgattcattccccaaacacagccctggacaagagagctcagcggcactccccttgttgtcaacacttcacacaagccatcttacctcacagctgaacaattacacatgtgtagaaggctccactgtgagaggacacctgagagcttgtgcctggattctccagggcttcactccttgtgccttttgtctttacttattttaaattgtatcatttttctgtaataaactgttcctgtgaatagaacagttatga

SEQ ID NO: 270700 - DNA, 623 bp, Homo sapiens
agatcactcccaagcggattggagattgtcccaatacttagacctatagcaaggccttgggagaaatggtggtgcagcaggagagcaggaacctaaccattgccatcctaaggccctccattgtgcggagcaacgtggcaccagcttttcctgggttgggttgataatctaaatggatgtagccgactcattattgcggtatgtatagggatgaagaagtaactgtaatgtagtggaggaatagtaagaaaattcttagtgctggcttagcttcattgatccaaaaacataaatgctactttactatcaattgaagcatattatttcaattattctggttataatatggaggcaggatgaaattgtttttattcttttagaattttttttatcaggaaaacagaggtaaagtgctatcaattactatttaagagttctattttgaaaagtctttaataaggatttttcttttctttttaaaaaagacttttttaaaaattaaaaataaaagaagcaaaagtcttaggaaaatgaggcaagtagccctgccactctatgtacagtaataacaatatctgtcccagttattatgtacaatattataaaaaatgtcgcagacagta

SEQ ID NO: 270701 - DNA, 710 bp, Homo sapiens
cattcatgactcctgctacaaacaacaatcctggccaaattttaattcttgcacaaactgcagaaaatagccaacgctttgccattgatctttgggatcttaatcatactgaattagatagttctatcggctggagtctcagtgcccttgtttgaaatttattaagattagacggcagatgttccaaagatacaacaattttctgaaatgtgtaaccaatggaaattttctttcttttagggttgggttgataatctaaatggatgtagccgactcattattgcggtatgtatagggatgaagaagtaactgtaatgtagtggaggaatagtaagaaaattcttagtgctggcttagcttcattgatccaaaaacataaatgctactttactatcaattgaagcatattatttcaattattctggttataatatggaggcaggatgaaattgtttttattcttttagaattttttttatcaggaaaacagaggtaaagtgctatcaattactatttaagagttctattttgaaaagtctttaataaggatttttcttttctttttaaaaaagacttttttaaaaattaaaaataaaagaagcaaaagtcttaggaaaatgaggcaagtagccctgccactctatgtacagtaataacaatatctgtcccagttattatgtacaatattataaaaaatgtcgcagacagta

SEQ ID NO: 270702 - DNA, 824 bp, Homo sapiens
  misc_feature (528)..(528): n is a, c, g, or t
  misc_feature (538)..(538): n is a, c, g, or t
  misc_feature (684)..(684): n is a, c, g, or t
ttctttgtctgcatttgtgaatataccacacatgatggtgtctctgagccgaccagattatggaaactcaattgtcagaggacccaaaacaaaacttagagtgatttggatattgcctctctgtcaatgctgaaccttaagacattttaagtaaacatcctcctcctctctaccccccaggatttgtgcgttcaccccacccaagacttcaggaagtgtcatagcactcgtggactaggtttcatgggacaaaggcattctgcaagaagtagaagcttgtggccgggtgcagtggctcatgcctgtaatccaagcattttgagaggccaaggaggtggatcaattgaggccaggagtttgagaccagcctggcaacatgggagaccccatctctactaaaatacaaaaattagtgagcatgttgacacacgcccgtaatcccagctactcaggaggctgaggtgggagaatcgcttgaacccaggaggtgcaggttgcagtgagccgagatgcgccactgactctagnctaagcaatngagcaagacctatccaaaaaaaaaaaaaaaaaaaaaattttgggggggcgggccggaaagttttaaacatctgtgggccggccctagtaatggaacgtgcagctgtgcagagatcggctgaggggggttcccccaaaaagccgggnacggggttcgaccatcaagggtccggtcctcgtcccacagtcagacctactccccccgcggcgcgcggattaaaaaccaaaaaaaagagacagaagaaaccaagaatacgaaaagaaaaggaacaacacgatagagacgg

SEQ ID NO: 270703 - DNA, 1401 bp, Homo sapiens
catctgccagccaagaaacaaatttaagtcccacctagtttagttcctacagaaatgggtaggaataggctaggcatggtgtttcagacctgtaatttcagcattttgggagactgagttgggaggattgcttgtgtaacatttagtacttaaccatatgtaattatgaatgcaagttttttgtcctaggtgcaagattatatttatttgagcgtatcaagtgaacaagtttacatttaaaggcaaaagttacaggtcagcactggcaacatagcgagaccctatatctacaaaaaattaaaaaaattagctgggcgtcgtggctcatgactgtggtcccaaatactcaggaggctgaggcaggaggatcacctgagcccagaagttcgaagattgctatgaatgtgccagtgcactctagcctgggcagtagagggagacgatgtctcaaaaaaaaaaaaaaaaaaaagtatgggaatcatttaatcatcttgttagatgcctgatcttattacttattaggactaattattaagaaattaaagcacaactcatttgctgttgtcttcagcgtagttggtgactttggaaggtggcagatttagcccagtgattgtcgtcttttctcaaaatgttttcagaactccttttttactattacaacaacataatatccattgttggaataagcatatcattccctttaaagtcatactctcagtcgtgatattaattctggtatatttattaaagtcagctcgtgctttactctttttagaagtattcaacttccataggctaacattgccccaacaaagtaaaaatataggtcacgagaagggcatcttttactgaatccattttgctagatttcgtgtgagctgtttctgaagtctcccaagaaaattttctgaaatttcttgaatttttaaatatgctccttttcgatgaccttttgatagttatatccttctttaaatctgacctacagtaacattacctttctaaagaacagaaatccttggtgttgggggaggagcggcttttatatagttgcttatgaggtttgttttgtttttttcctaaggaaggctgggttgcttttgtgattttatctgtttcaaatggttaatattcagttccattcacttctcctgtatacagcttcataaaggtagatgagatgaaccttagaacatacaatctttttctgcagacagaatttcttaatcattacataaacgttattctgaaaagttttcagtaatttcatggccctccccaatagtaactttcagtatttatactgaatagctctttgcaactagcctaaaagagtcctttatttttgttcttttttctctcttatctgtggagattgaaaatatatagccatccttc

SEQ ID NO: 270704 - DNA, 391 bp, Homo sapiens
tgtcacatataattattatggcgggatcagtgattttatatagttgcttatgaggtttgttttgtttttttcctaaggaaggctgggttgcttttgtgattttatctgtttcaaatggttaatattcagttccattcacttctcctgtatacagcttcataaaggtagatgagatgaaccttagaacatacaatctttttctgcagacagaatttcttaatcattacataaacgttattctgaaaagttttcagtaatttcatggccctccccaatagtaactttcagtatttatactgaatagctctttgcaactagcctaaaagagtcctttatttttgttcttttttctctcttatctgtggagattgaaaatatatagccatccttc

SEQ ID NO: 270705 - DNA, 460 bp, Homo sapiens
ctaaagataaatttggtatcctatgaactatgttttccgtcaaggtttgcacaacggcataaaacaatccatcacatttttctggccaatagatacatgctttatttctgaatgtcaacgtttaagagactgaagtctgtgactactgttaattttgctagtaaaaataagttctccctgattttggttattatccattgaagatgttatcttcaatagttatccatgcctatgtcatgatatcttcacttcttcccaaatattatcttcctcagatattcaattgtgaatgaaaagtcaagctccttgtccatttttactgtacctcagccttcaaaggcctaaattaccatttcatttctgttgctgatcatcagcaactagaagacagaatttggatattctcacaccaatgtactattgctgcagaaatcctttgggctaactgagaggaccgaaa

SEQ ID NO: 270706 - DNA, 977 bp, Homo sapiens
caagcccctgggagcaggtgtgggagctccgggccagccctggcacgggcacctcccaggatgttcgtaagacacacgcttcctgcccgcgcatcttgccctgtggcctcaggacagccggtccgagggagggcaggtgcagcagccacgtcccagtcgctgcggcctggcttctccaggtgcagctcgccctccttgcacctgcagcgcggaaggcagagccaaaaggcgccccctgggctcccggagctctgagccacttcaggagttcgggcatgtggggttttgtctccggttttagtctggccatgtttgttggttccaattcctatgctctgttacctgaacctgtttgattcttttgattttcttctttctgaaaaagacttttcacggtttcctattctgcctttcttccgtatgcctctcaacgggacgagcagctgaaattaaaaagatagtagcaggtacgaacccaaaggagtgtgctgaagtcaagagcctgtctggcgggccacagacctgagcgcagcccctcggtggcacacctgccccagggacagccctgcatggggacacgtgtcaggccccagacctgcgcacgcacccaggctcagccacagcccctcaggcagggtcccgatgcccactctgctcccttgtgttacaaatgccgtggtccttctcagccctgctgtggccttgcctgtcatcagagggcagctggtctctgcaagcgtctgagtgcaggctgcttagggcaccagccaaggggggatgctgcctgcactgctgcctcatgggccaccttgacagatctgcatgggtctcaacaggtgggtggcttcgtgccttctgcagcccagtccccgtggtcttggtgggctctggctgtaggaacagcctgtctcctccacggtgcttcacatgtgtcccacgtggcttctggctggacgtggcatggctccttcccccct

SEQ ID NO: 270707 - DNA, 471 bp, Homo sapiens
tgccctcgtcaggaggcccagcatgtagcaggcaagcagcaggcagcaggcaggtgctgagtgggtgtggaaggtgtggcccctcacacctctgtgtcctatgctcagcgctgtgcttgggcatggcgaggcctcagcagatactgtgcagcacagtgacaccaatggaacccagtaaaaagacagtttccaattttcctcgctgctggggcccacccagatcctggagcagagcatggcctgcaggaagcacaggctggtggactgtggctgtgtcacggcgagcttccagtggctctcgcagaactcaattggcacggtaaagggacaaatgaagtttccagcttttttcttttaatagctcagatatcaattttatagctctgatggacataatttataaaataagtctatatcttactgtaaatttgagacggttaacctttaataaagttaagaaggggcttgtca

SEQ ID NO: 270708 - DNA, 432 bp, Homo sapiens
ccatactgtgggcagcttttcccaagatgatggaacataactccccatcctaatgacactcttgcccctcttaattcttccttgtttatgcctacctctttgatttggcaggataatttcacaatcggtagatattgtgggtgacttgacagaatctgacttcataaatcctttagtccacccagggggtaatactggcaacatcctcagtaaactttttgttcaaattgtactaatggtcttttttaaaacagagttagctctctctgctttaattcaagccagtcatggaatgctaagtaataggattgctgtgtaccagctaaacaaagagatgtctgtgcttttgctcatactacatgctgtacctggatacattcctttggggaatttatatacacaaaataagaaaatagcccacatggtaaaaaa

SEQ ID NO: 270709 - DNA, 313 bp, Homo sapiens
cagtgtgttactatcttttactggattgtgatgctttaaatatccaagattttgtcattaagctagcttctgtggccttttgacatgacaacatcattctttgagcatgtcattacttcctggcacaagaagatattccaggctcatatgtgctttccctgccccaagcctggaatcagtcatttctcttagggtacctggttctttttagtgtagaatgatatttagatttgggtgctatggtgatgttaatacagatgcttcttcacttaaaataagattacgtcccaataaatccatcgtaaattgaaaa

SEQ ID NO: 270710 - DNA, 442 bp, Homo sapiens
tgtccatttatttccctgtctctcatacagacatgaatgccacccagtcccacataaacccttttactttatgtattattcttatcattttattcatgattttattacatattgcgttttatctatttgttttacttctttgtattttcgtagcaccttctacaggctattgtatagtgacatgtttttatagtgctaaaccgaagctatgtctgcctcctaaaggttgtttatgaaactatcattcattgttcacacgcagagtcattcaataatatttcatataaaacctccaagaccagtctatataatgaatgctgtaaaaaatatcatggaatgttctacctgtgggggggaggaaaaccacaaactactgttaaagttagaatactgcatgaaaataaaaactttttttctacattaaatgaaactaaaatgaaag

SEQ ID NO: 270711 - DNA, 402 bp, Homo sapiens
gagaggacatcaaagttggattctgaaagacaaatgggaatttaatgcaaataagtactcatacatggaagtatgcaaaatgtagtagggaaactataagcaattcagtgttcctaaagcataaattataggggcagttaaggaaggtggggaatgaaatttggtaagatgagaaatatttaaaaggccagatcatgaagggctttgtaatccacgttaaggagcgtggattccattttgaggcagcagggagctaacgaatgttttaagcagtgcagtgatttgacatgacccttggattttaatgaaagatcacttttgctagaatgtggaagatagtgcttgcatataagattaagttaaccagtctgtttaattcacttgattataatctttagaatt

SEQ ID NO: 270712 - DNA, 170 bp, Homo sapiens
tgtgtgacactgagccagtcatttaacttctccagggctcagttttctcatctgaaacaaagagacaatgattatatataactcagagtgtggttgtgagtatcagtgagttaatacttaaaaaataacatatatttgttgtacaataaaaggtgccaaagagataattt

SEQ ID NO: 270713 - DNA, 372 bp, Homo sapiens
ctattttttattattattattttttgagatggagtctcactctcttgcccagctggaatgcaatggtgcaatcttggctcactacagccttgacctcctgggctcaagcaatcctcctgcctcagcctcccatgtagctgggactctaggtgtgtgccaccatgcccagcgaatttttttattttttgtagagacaaggtttcactatgtttctgggctggtcttgaactcctggcctcaagtgatcctgtctcagcctcccaaaatacttggattacaggcatgggctagtggctcagccacttccatatatattttagaaacagcattgctgaaacgtatttaaattaaaaactttattgatattttggt

SEQ ID NO: 270714 - DNA, 498 bp, Homo sapiens
gttcaaaacttagtaaatggtaaaaaaaaaaaaatgaataaatgacttaaataagctaggtgcggaaatatcataagctaggtgcggtagctcacacctgtaatctctccagtttgggaggctgaggcaggtgaattgcttgggcttaggagtttaaggccagcctggacactgggcatggtggctcacgcctgtaatcccagcactttgggaggctgaggcaggcagatcacctaaggttgggagttcgagaccatcctgaccaaccccatctctactaaaaatacaaaattagccaggcatggtggtgtatgcctgtaatcccagctactcgggaggctgaggcaggagaatcgcttgaacctgggaggcggaggttgcagtgaaccgagatctcgccattgcactccagcctgggcaacaagagcaaaactccatcccaaaaaaaagaagaccagcctgggcaacatggtgaaacctcatctctacaaaaaaata

SEQ ID NO: 270715 - DNA, 448 bp, Homo sapiens
tagtagaattttcttttgttcgtctaagaatcaattgattcttaattctaagcttgaagtgtaactgcatttttatgggcaaaacaatcctggacctggccagtaacccaaccaaaccaggggcagaggagatgctggtcagccagaggatacaggggaagaacagaaaaggcataacaagagggaagaagaggtgactggagaaagagagacatattcacgccacagaaagaaaacaataaaaagtcatctgatttcctcatactgagtagctccccatgtgattcgggtgttgtgggtactcatgtcctggtgactgtacctcccagctcaagctgccaatcacggtattttccctaaaatgttcccttcccaaaatggaaacctcatgttcgttgtcaagataataaaagttgcacattagcggcacatttacaatcttgctaaa

SEQ ID NO: 270716 - DNA, 672 bp, Homo sapiens
actcagagttcagctgactctctcctgtcccttaagattagtgtgtgtccctaaaactgtaacctggggtagtagagaaccttctccaatgtctgcacagtcactaagggcttccttcttgggtcccttctggctgaaggctcctttgagcttttctggattctactttctatcacatcaccttctgccagtgcctttccacacatcattctgaggttaccaaatctaagggctactttaaaagacagaggtaaagttttaaatatacagatggaaggtgttttcacatgacaaaaatgtaaaccatttgtttctaaacatgaagaacctcttaagattttagttagcttcccactaccactaccaacagccctcacacaatatgatctcactgggtctttttttttttccatgtctctctcacttatagtttttctcttatttggtataggaaagaaaacaataaaaagtcatctgatttcctcatactgagtagctccccatgtgattcgggtgttgtgggtactcatgtcctggtgactgtacctcccagctcaagctgccaatcacggtattttccctaaaatgttcccttcccaaaatggaaacctcatgttcgttgtcaagataataaaagttgcacattagcggcacatttacaatcttgctaaa

SEQ ID NO: 270717 - DNA, 353 bp, Homo sapiens
tggtgggccaggctggccgtgtcccaggggccaagccccatgctgggctgttctaacaagaacttgaactgaaccgaaccatgacccccaaattggaaaacactgccctgattcactgaacccgaaaccgaatccaagtattattattttttgactgaactctgaattgaactaatgttttttcttaaatacctaccaaaccagttcgaactagacacaaacatatgtgttttctgaaactattgaacctgaacttcaaaataatctcctatccgagggcaaagtgagactttatttacttgagagtgttctgttcacagcaggccaataaagcctcctttatggcagaagta

SEQ ID NO: 270718 - DNA, 497 bp, Homo sapiens
caaaaaaaaagctaagcaataatacaaatgcatatgaaaatataaattgtagtatgaaagctaaacataaagacaaactcagaaaattgtaatactgtaatcatgcaccttaacatttaatacttacataaattagaaaacagaagtagtcagaataactgtatccacaaatatttttcaatttaaacataatatagaaagaagcaatatctggctgtgtgaggtgactcacagctataatgccagcactttgggaggccgagatgggaggactgcttgagcccaggagtttgagaccagtatgggcaacatagggagagctcatctctattaatttttttaattagccaagtgtgctggtgagcaccagtggtcctagctactcaggaagctaagtagagaggatcccttgatcccaagagttcagtgctgcagtgagccataattgcaccactgcactccaacctgagtgacagagtgacaccttgtctctcaaa

SEQ ID NO: 270719 - DNA, 376 bp, Homo sapiens
ctcacagtatatttattatttatgttgagacaaaatagtagctttagaaacctggaagacaccacctcaaccaagtaaccccacagaacatcagcgataatggacagatggacattgtgtggctcctgatagggagcactgagatgggctcaacatcgtgcctgtgttatttccctcaaaaatgcataacctcagtgcaatcacgaggacatattaggtaaccctcaagtatgagggatattctacaaataactgactagtaatcttcaaatgtcaaaattatgaaagaaaaaaagaaaccaaggaatagttccagaatagaggggagtaaaaaacaagcaaaataaaacaatgaaacaattaaatgcgacatgca

SEQ ID NO: 270720 - DNA, 307 bp, Homo sapiens
ggtagttatcatttttattacccacctttatcttctccatcctcataactaggatggagacactgaggctcagagaggacaggttgcttgctcaagaccatatagctcctaagtaccagagtcaatgtttgaaccgagtcttacctgaagtaggagaattatctcagcatgactttgaaactctttctgtgagctgcccaatatgttttgcctgggcactttgactacagtgagatttctggttagtattgtgaagcagttaaataacttaaatttacattaaacatttctggttttactttgatga

SEQ ID NO: 270721 - DNA, 511 bp, Homo sapiens
agtagctaacagaactacttgagttgactacagagtcgtgccatgatcatcattacctgttttcagaacattttcatgatctcaaaaaggaaactcagtatcctttagtagtcacatcccattccccattctctctagtgcctaacagatatgaagaagctatcagatcaactgtcccagtagaacagtgtttgttcaatactggctccaatatgtaagagtagagatgctgaaaattcagatgtgcaatggagaaaccttaaagtgtttcctttaagtgaaaatgtgaaagttcttcacttaataaggaaagtgaaactgaagaaggaaaaagaaattcttgctaattttgctgctgcacctcaaactgcaaaagttacagccatagtgtgaaaagtgctaacatagggtgtggtattatctgtggtttcaggcatcaactggagatcttgaaaagtatgcccacagataagggagcctactatagtctttttatgccaattccaatatc

SEQ ID NO: 270722 - DNA, 6814 bp, Homo sapiens
gaggcgcggcggcgcatgcggatcaggctgagccgcgggccggcggggccgagctgagccgggctgggccgggccgggccgggccgggcagcggacgccgacagggagggcggtcggtcgcggcgagcagcggagacagcgacgctggcggccgcgggcccaggcctcaccttccccgatggcgcaggtaccaggggaagtggacaacatggagggcctgcctgctcctaacaacaaccctgctgcccgctgggagagtccggatcggggctgggagcgggagcagccggctgcgtccaccgcagcggcctcgctctttgagtgctcccggatcaaggccttggcagatgagcgggaagccgtgcagaagaaaaccttcaccaagtgggtgaactcgcacctcgcccgcgtgggctgccacatcggggacctctatgtggacctccgggacggcttcgtgctcacgcggctcctggaagtgctgtctggggagcagctgcccaggcccacgcgcggccgcatgcggatccactcactggagaacgtggacaaggcgctgcagtttctgaaggagcagcgcgtgcacctggagaacgtgggttcgcatgacatcgtggatgggaatcaccggctgacgctggggctggtctggaccatcatcctgcgcttccagattcaagtcatcaaaattgagactgaggacaacagagagacacgctcagccaaggatgctctgctcttgtggtgtcagatgaagacagctggttaccctgaggtaaacatccagaatttcaccaccagctggcgggatggcttggccttcaatgccctcattcaccggcacaggcctgatctcgtggacttcagcaaactcaccaagtccaatgccaactacaacctgcagagagccttccgcacagctgagcagcacctggggctggcgcggctgctggatcctgaagatgtgaacatggaggctccagatgagaagtccatcatcacctacgtggtctctttctaccactatttctccaagatgaaggctctggctgtggaggggaagcgtatcgggaaggtcttggaccaggtattggaggtggggaagatcatagaacgctacgaggagctggcggctgagctgctggcctggatccaccgcaccgtgggcctcatcagcaatcagaaatttgccaactccttaagtggggtgcagcagcaactccaggctttcacggcctattgcacgctggagaagcctgtcaagttccaggagaaggggaacctagaggtgctgctcttcagcatccagagcaaactgcgtgcctgcaaccgtcgcctctttgtgcctcgggagggctgtggcatctgggatattgacaaggcatggggtgagctggagaaggctgagcatgagcgggaggctgccctacgggctgagctgattcggcaggagaagctggaactactggcacagaggtttgaccacaaggtggctatgagggagagctggctgaatgagaaccagcgtctggtctcccaggacaactttgggtatgagctgcccgcagtggaggcagccatgaagaaacacgaagcgatcgaggcagacattgcggcctacgaggagcgggtgcagggtgtggcggagctggcccaggcattggcagccgaaggctactacgatatccggcgggtggcagcccagcgtgacagcgtcctgcgccagtgggccctgctaactgggcttgtgggtgcccggcggacacgacttgagcagaaccttgccctgcagaaggtcttccaggagatggtgtacatggtggactggatggaggagatgcaggctcagctgctgtcccgggagtgtgggcagcacctggtggaggcagacgacctgttgcagaagcatggactgctggagggagacattgccgcccagagcgagcgggtggaggctctcaatgccgctgccctgcgcttctcccagccctgcgacccgcaggtcatctgcaaccgcgtgaaccacgtgcacggctgcctggcggagctgcaggagcaggcagcgcggcgacgcgcggagctggaggcttcgcggagcctgtgggcgctgctgcaggagctggaggaggccgagagctgggcgcgcgacaaggagcgtctcctggaggctgcgggcggcggcggtgcggcgggcgcagcgggcgcagcgggaacagcgggcggcgcgcatgacctgtccagcacagcgcgcctcctggcccagcacaagatcctgcagggcgagctgggcgggcggcgagcgtcgctgcagcaggccctgcggtgtggcgaggagctggttgcggccggcggtgccgtcggcccgggagcagacaccgtgcacctggtaggcctggcggagcgcgcggcgagcgcccggcgccgctggcagaggctggaagaggcggcggcgcggcgagagcggcggctgcaggaggcgcgggcgctgcaccagttcggcgctgacctcgacgggctgctggactggcttcgcgacgcttaccgcctggcagccgccggtgacttcggccacgacgaagcttccagccgccgcctggcgcgccagcaccgcgcgctcaccggggaggtggaggcacatcgcgggcccgtgagcggcctgcggcgccagctggcgacactcgggggtgccagtggcgcagggccactggtggtggcgctgcaggtgcgcgtggtggaagcagagcagttgttcgctgaggtgaccgaagtggcggcgctgaggcgccagtggctgcgggacgcgctcgctgtctaccgcatgtttggcgaggtgcacgcgtgtgagctgtggatcggcgagaaggagcaatggctgctctccatgcgtgtgccggattcactcgacgacgtcgaggtggtgcagcaccgattcgagagcctggaccaagagatgaacagcctgatgggccgcgttctggacgtgaaccacacagtccaggagctggtggaaggaggccaccccagttcagatgaggtgcgttcctgccaggaccacctcaacagcaggtggaaccgcatcgtggagctagtggaacagcgcaaagaggaaatgagcgcggtgctgctggtggagaaccacgtgctggaggtggccgaggtgcgcgcccaggtgcgtgagaagcggagagctgtggagagcgcgccccgggccggcggcgccctgcagtggcgtcttagcggcctagaggccgctctgcaggcgctggagccgcgccaggcggcccttctggaggaggcagccctgctggctgagcgcttcccggcgcaggcggcgcggctgcaccagggcgcggaggagctgggcgccgagtggggcgcgctagctagcgcggctcaggcctgcggcgaggcggtggcggcagcagggcgcctgcagcgcttcctacatgacctcgacgctttcctggactggctcgtgcgcgcccaggaggcggcgggcggcagcgaggggcccctgcccaacagcctagaagaggcggacgcgctgctggcgcgccacgctgcgctcaaggaggaggtggaccagcgcgaggaagactatgctcgcatcgtggcggccagcgaggcgctgctggccgccgacggcgcagagctgggcccgggcctggcactagacgagtggctgccacacctcgaacttggctggcataaactgctcggcttgtggaaggcgcgcaggaaggcgctggtccaggcgcacatctaccagctcttcctgcgggatctacgccaggcgctcgtggtgctgcgtaaccaggagatggcgctgtctggtgcggagctcccgggcacagtggaatcggtggaggaggccttgaaacagcaccgtgactttctcaccaccatggagctgagccagcaaaagatgcaggtggccgtgcaggctgcagagggcctgctgaggcagggcaacatctacggggagcaggctcaggaggctgtgacccggctgctggagaagaaccaagaaaaccagttacgggcccagcaatggatgcaaaagctacatgaccaacttgagctgcagcacttcctccgagactgccacgagctggatggctggatccatgagaagatgctgatggcgcgggatggcacgcgggaggacaaccacaagctgcataagagatggctccggcaccaggcattcatggccgagctggctcagaataaggagtggctggagaagatcgagcgggagggccagcaactgatgcaggagaagcccgaactggcggcctccgtgcggaagaagctgggcgagatccgccagtgctgggcggagctggagagcaccacccaggccaaggcacggcagctctttgaggccagcaaagcagaccagctggtgcagagctttgctgagctggacaagaagctccttcacatggagagccagctgcaagacgtggaccctggaggagacctggccactgtcaacagtcagctcaagaagctgcagtccatggagtcgcaggtggaggagtggtaccgcgaggtgggagagctgcaggcgcagacggcggcgctgccgctggagccggcgagcaaggagctggtgggtgagcggcagaacgcggtgggcgagcgcctggtgcgcctgctcgagccgttgcaggagcgccgccgcttgctgctggcttccaaggagttgcaccaggtggcgcacgacctggacgacgagctggcatgggttcaggagcggctgccactggccatgcagacagagcgaggcaacggtttgcaggcggtccagcagcacatcaaaaagaaccagggcctgcggcgggagatccaggcgcatgggccgcgcctggaggaggtgctggagcgcgcgggcgcgctggcgtcgctgcgcagcccggaggcagaggcagtgcgccggggcctggagcagctgcagagcgcctgggccggactgcgggaggctgccgagcgacggcagcaggtgctggacgccgccttccaggtggagcagtactacttcgacgtggctgaggtggaggcgtggctgggcgagcaggagctgctcatgatgagtgaggacaagggcaaggacgaacagagcaccctgcagctgctcaagaaacacctgcagctggagcaaggcgtggagaactacgaggaaagcatcgcgcagctgtcgcgccagtgccgggcgctgctggagatggggcacccggacagcgagcagatcagccggcggcagtctcaggtggaccgcctgtacgtggcgctcaaggagctgggtgaggagcgccgggtggctctggaacagcagtactggctgtaccagctcagccgccaggtgagcgagcttgagcactggattgccgagaaggaggtggtggctggctcacccgagctcggccaggactttgagcatgtctcggtgctgcaggagaaattctcagagtttgccagcgagacaggtatggcagggcgggaacggctggcagctgtgaaccagatggtggatgagctgatcgagtgtggccatacagcagcggccaccatggccgagtggaaggacggactgaacgaggcctgggctgagctgctggagctcatgggcacacgggcccagctgctggccgcctctcgggagcttcataagttcttcagtgacgcccgagagcttcagggacagattgaggagaagcggaggcggctgccccgcctgaccaccccgcctgagccgagacccagtgccagttccatgcagcggaccctgagagcctttgagcatgacctgcagctcctcgtgtcccaggtacggcagctgcaggagggggcggcccagctgcggacggtgtatgcgggtgaacatgccgaggccatcgctagccgggagcaggaggtgctgcagggttggaaagagctgctgtcagcctgtgaggatgcccgcctgcatgtcagctccacagccgacgccctgcgcttccacagccaagtccgcgacctgctctcctggatggatggcatcgccagccagattggggcagccgacaagcccagggacgtgtcatcagtggaggtgctcatgaactaccaccagggcctgaagactgagctggaggcgcgggtgcctgagctgaccacctgccaggagctggggcgatctctgctgctcaacaaaagtgccatggctgatgagatccaggcacagctggacaagctgggaaccaggaaggaggaggtgtcggaaaagtgggaccgccattgggagtggctgcagcagatgctggaggtgcaccagtttgcccaggaggcggtggtggctgatgcctggctgacagcccaggagccgctcctgcagagccgggagctgggcagcagcgtggatgaggtggagcagcttatccggcgacatgaggccttccgcaaagcggctgcagcctgggaagagaggttcagctctctgcggcgcctgaccacgcctaggcgggaggatcacttgaacccaggagttcaagaccagccttggcaacatactgagaagccgtctctaccaaaaccaaaagcaaacaaagaaaaaacagccaggcgtgatggcacgtgcctgtagtcccagctactcagaggggtgactgagactcgaggatcacttgagcactggaggtcaaggctgcaatgagctatgatcttgctgcttgcactccagcctgggcgacagagcaagactgtctcaaaaataaataaataaataaataaataaataaataaataaataaataaagtcttaaagtcctgg

SEQ ID NO: 270723 - DNA, 8833 bp, Homo sapiens
gaggcgcggcggcgcatgcggatcaggctgagccgcgggccggcggggccgagctgagccgggctgggccgggccgggccgggccgggcagcggacgccgacagggagggcggtcggtcgcggcgagcagcggagacagcgacgctggcggccgcgggcccaggcctcaccttccccgatggcgcaggtaccaggggaagtggacaacatggagggcctgcctgctcctaacaacaaccctgctgcccgctgggagagtccggatcggggctgggagcgggagcagccggctgcgtccaccgcagcggcctcgctctttgagtgctcccggatcaaggccttggcagatgagcgggaagccgtgcagaagaaaaccttcaccaagtgggtgaactcgcacctcgcccgcgtgggctgccacatcggggacctctatgtggacctccgggacggcttcgtgctcacgcggctcctggaagtgctgtctggggagcagctgcccaggcccacgcgcggccgcatgcggatccactcactggagaacgtggacaaggcgctgcagtttctgaaggagcagcgcgtgcacctggagaacgtgggttcgcatgacatcgtggatgggaatcaccggctgacgctggggctggtctggaccatcatcctgcgcttccagattcaagtcatcaaaattgagactgaggacaacagagagacacgctcagccaaggatgctctgctcttgtggtgtcagatgaagacagctggttaccctgaggtaaacatccagaatttcaccaccagctggcgggatggcttggccttcaatgccctcattcaccggcacaggcctgatctcgtggacttcagcaaactcaccaagtccaatgccaactacaacctgcagagagccttccgcacagctgagcagcacctggggctggcgcggctgctggatcctgaagatgtgaacatggaggctccagatgagaagtccatcatcacctacgtggtctctttctaccactatttctccaagatgaaggctctggctgtggaggggaagcgtatcgggaaggtcttggaccaggtattggaggtggggaagatcatagaacgctacgaggagctggcggctgagctgctggcctggatccaccgcaccgtgggcctcatcagcaatcagaaatttgccaactccttaagtggggtgcagcagcaactccaggctttcacggcctattgcacgctggagaagcctgtcaagttccaggagaaggggaacctagaggtgctgctcttcagcatccagagcaaactgcgtgcctgcaaccgtcgcctctttgtgcctcgggagggctgtggcatctgggatattgacaaggcatggggtgagctggagaaggctgagcatgagcgggaggctgccctacgggctgagctgattcggcaggagaagctggaactactggcacagaggtttgaccacaaggtggctatgagggagagctggctgaatgagaaccagcgtctggtctcccaggacaactttgggtatgagctgcccgcagtggaggcagccatgaagaaacacgaagcgatcgaggcagacattgcggcctacgaggagcgggtgcagggtgtggcggagctggcccaggcattggcagccgaaggctactacgatatccggcgggtggcagcccagcgtgacagcgtcctgcgccagtgggccctgctaactgggcttgtgggtgcccggcggacacgacttgagcagaaccttgccctgcagaaggtcttccaggagatggtgtacatggtggactggatggaggagatgcaggctcagctgctgtcccgggagtgtgggcagcacctggtggaggcagacgacctgttgcagaagcatggactgctggagggagacattgccgcccagagcgagcgggtggaggctctcaatgccgctgccctgcgcttctcccagccctgcgacccgcaggtcatctgcaaccgcgtgaaccacgtgcacggctgcctggcggagctgcaggagcaggcagcgcggcgacgcgcggagctggaggcttcgcggagcctgtgggcgctgctgcaggagctggaggaggccgagagctgggcgcgcgacaaggagcgtctcctggaggctgcgggcggcggcggtgcggcgggcgcagcgggcgcagcgggaacagcgggcggcgcgcatgacctgtccagcacagcgcgcctcctggcccagcacaagatcctgcagggcgagctgggcgggcggcgagcgtcgctgcagcaggccctgcggtgtggcgaggagctggttgcggccggcggtgccgtcggcccgggagcagacaccgtgcacctggtaggcctggcggagcgcgcggcgagcgcccggcgccgctggcagaggctggaagaggcggcggcgcggcgagagcggcggctgcaggaggcgcgggcgctgcaccagttcggcgctgacctcgacgggctgctggactggcttcgcgacgcttaccgcctggcagccgccggtgacttcggccacgacgaagcttccagccgccgcctggcgcgccagcaccgcgcgctcaccggggaggtggaggcacatcgcgggcccgtgagcggcctgcggcgccagctggcgacactcgggggtgccagtggcgcagggccactggtggtggcgctgcaggtgcgcgtggtggaagcagagcagttgttcgctgaggtgaccgaagtggcggcgctgaggcgccagtggctgcgggacgcgctcgctgtctaccgcatgtttggcgaggtgcacgcgtgtgagctgtggatcggcgagaaggagcaatggctgctctccatgcgtgtgccggattcactcgacgacgtcgaggtggtgcagcaccgattcgagagcctggaccaagagatgaacagcctgatgggccgcgttctggacgtgaaccacacagtccaggagctggtggaaggaggccaccccagttcagatgaggtgcgttcctgccaggaccacctcaacagcaggtggaaccgcatcgtggagctagtggaacagcgcaaagaggaaatgagcgcggtgctgctggtggagaaccacgtgctggaggtggccgaggtgcgcgcccaggtgcgtgagaagcggagagctgtggagagcgcgccccgggccggcggcgccctgcagtggcgtcttagcggcctagaggccgctctgcaggcgctggagccgcgccaggcggcccttctggaggaggcagccctgctggctgagcgcttcccggcgcaggcggcgcggctgcaccagggcgcggaggagctgggcgccgagtggggcgcgctagctagcgcggctcaggcctgcggcgaggcggtggcggcagcagggcgcctgcagcgcttcctacatgacctcgacgctttcctggactggctcgtgcgcgcccaggaggcggcgggcggcagcgaggggcccctgcccaacagcctagaagaggcggacgcgctgctggcgcgccacgctgcgctcaaggaggaggtggaccagcgcgaggaagactatgctcgcatcgtggcggccagcgaggcgctgctggccgccgacggcgcagagctgggcccgggcctggcactagacgagtggctgccacacctcgaacttggctggcataaactgctcggcttgtggaaggcgcgcaggaaggcgctggtccaggcgcacatctaccagctcttcctgcgggatctacgccaggcgctcgtggtgctgcgtaaccaggagatggcgctgtctggtgcggagctcccgggcacagtggaatcggtggaggaggccttgaaacagcaccgtgactttctcaccaccatggagctgagccagcaaaagatgcaggtggccgtgcaggctgcagagggcctgctgaggcagggcaacatctacggggagcaggctcaggaggctgtgacccggctgctggagaaatgcctcattatccatcctgctcttctgcaccctccttgggaacccccatacctccccagatccagcagctagaggccaggcacaggaaccaagaaaaccagttacgggcccagcaatggatgcaaaagctacatgaccaacttgagctgcagcacttcctccgagactgccacgagctggatggctggatccatgagaagatgctgatggcgcgggatggcacgcgggaggacaaccacaagctgcataagagatggctccggcaccaggcattcatggccgagctggctcagaataaggagtggctggagaagatcgagcgggagggccagcaactgatgcaggagaagcccgaactggcggcctccgtgcggaagaagctgggcgagatccgccagtgctgggcggagctggagagcaccacccaggccaaggcacggcagctctttgaggccagcaaagcagaccagctggtgcagagctttgctgagctggacaagaagctccttcacatggagagccagctgcaagacgtggaccctggaggagacctggccactgtcaacagtcagctcaagaagctgcagtccatggagtcgcaggtggaggagtggtaccgcgaggtgggagagctgcaggcgcagacggcggcgctgccgctggagccggcgagcaaggagctggtgggtgagcggcagaacgcggtgggcgagcgcctggtgcgcctgctcgagccgttgcaggagcgccgccgcttgctgctggcttccaaggagttgcaccaggtggcgcacgacctggacgacgagctggcatgggttcaggagcggctgccactggccatgcagacagagcgaggcaacggtttgcaggcggtccagcagcacatcaaaaagaaccagggcctgcggcgggagatccaggcgcatgggccgcgcctggaggaggtgctggagcgcgcgggcgcgctggcgtcgctgcgcagcccggaggcagaggcagtgcgccggggcctggagcagctgcagagcgcctgggccggactgcgggaggctgccgagcgacggcagcaggtgctggacgccgccttccaggtggagcagtactacttcgacgtggctgaggtggaggcgtggctgggcgagcaggagctgctcatgatgagtgaggacaagggcaaggacgaacagagcaccctgcagctgctcaagaaacacctgcagctggagcaaggcgtggagaactacgaggaaagcatcgcgcagctgtcgcgccagtgccgggcgctgctggagatggggcacccggacagcgagcagatcagccggcggcagtctcaggtggaccgcctgtacgtggcgctcaaggagctgggtgaggagcgccgggtggctctggaacagcagtactggctgtaccagctcagccgccaggtgagcgagcttgagcactggattgccgagaaggaggtggtggctggctcacccgagctcggccaggactttgagcatgtctcggtgctgcaggagaaattctcagagtttgccagcgagacaggtatggcagggcgggaacggctggcagctgtgaaccagatggtggatgagctgatcgagtgtggccatacagcagcggccaccatggccgagtggaaggacggactgaacgaggcctgggctgagctgctggagctcatgggcacacgggcccagctgctggccgcctctcgggagcttcataagttcttcagtgacgcccgagagcttcagggacagattgaggagaagcggaggcggctgccccgcctgaccaccccgcctgagccgagacccagtgccagttccatgcagcggaccctgagagcctttgagcatgacctgcagctcctcgtgtcccaggtacggcagctgcaggagggggcggcccagctgcggacggtgtatgcgggtgaacatgccgaggccatcgctagccgggagcaggaggtgctgcagggttggaaagagctgctgtcagcctgtgaggatgcccgcctgcatgtcagctccacagccgacgccctgcgcttccacagccaagtccgcgacctgctctcctggatggatggcatcgccagccagattggggcagccgacaagcccagggacgtgtcatcagtggaggtgctcatgaactaccaccagggcctgaagactgagctggaggcgcgggtgcctgagctgaccacctgccaggagctggggcgatctctgctgctcaacaaaagtgccatggctgatgagatccaggcacagctggacaagctgggaaccaggaaggaggaggtgtcggaaaagtgggaccgccattgggagtggctgcagcagatgctggaggtgcaccagtttgcccaggaggcggtggtggctgatgcctggctgacagcccaggagccgctcctgcagagccgggagctgggcagcagcgtggatgaggtggagcagcttatccggcgacatgaggccttccgcaaagcggctgcagcctgggaagagaggttcagctctctgcggcgcctgaccacgatcgagaaaatcaaagcggaacagagcaagcagccgcctaccccactgctggggcgcaagttctttggggaccccacggaactggcggccaaggcggcgcccctgctgcggccagggggctatgaaaggggcttggagcccctggcccgccgagcctcggacacgctctcggccgaggtgcggactcgggtggggtatgtgcgccaggagctcaagcccgagcgcctccagccgcgcattgaccggctgccggagatcccggggagggtggagcccgcggccctgccggccgcaccagaggacgcggcggagacccccgcgacccccgcggcggcggagcaggtgcggccacgaccggagcgccaggagtcagctgatcgcgcggaggagctgcccaggaggcggcggcctgagcggcaagagtcagtcgatcaatccgaggaggctgcgcggaggcggcggccggagcggcaggagtcagcggagcacgaggcggcacacagccttaccctgggccgctatgagcagatggagcggcggcgcgagcggcgtgagcggcgcttggagcggcaggagtccagcgaacaggagatgcccatcagaggagacctggtcaaggggaaggccaccctggctgacattgtggaacagctgcaggagaaagaggcaggcccagggctgcctgctgggccgtcgctgcctcagccacgcgagcttcccccaggtcgcctgcccaacgggcttgagctgcccgagcggacacctcggccggaccggccccgggcgcgggaccggcccaagccgcgacggcggccgcggcccagagagggtggtgagggcgggggaagccggcgctcgcgctccgccccggcccagggcggctccgcccccgcgcctccgccaccgcccactcacacagtgcagcacgagggcttcctactgcgcaagcgcgagctcgacgctaaccgcaagtcgtccaaccggtcgtgggtgagcctgtactgtgtgcttagtaagggggaactgggcttctacaaggactccaagggcccggcatccgggagcacacacggtggggaaccgctgctcagcctgcacaaggccaccagcgaggtggctagtgactacaagaaaaagaagcatgtcttcaagctccagacccaggatggcagtgagtttttgctccaggcaaaagatgaggaggagatgaacggctggctggaggctgtagcttcctcggtggcggaacacgcagagatcgcccgctggggccagacactacccactacttcatccacagatgagggcaaccctaagagggaaggcggagatcgcagggccagcgggcgcaggaagtgacttcccacccccaggacctgacacatctcgtctcccctcttttccgcactgtgggcacaaagacactttttcttccgcaggggcgggagcccctagttccaacactgaggacgcgtgacatggtgggcaccggaaaggaggggacttctcctgcaccccaagaagtggtggggagattgctgcccctatagccatatctcggccccttcccactcaccacccccaccccaggtgctgggggtcccttatttttatgcaataactgagcttgatgggggtgggcagggggccagttgagccaagcccccagccccgatctgcagatcctgccccaagaagctggggtggtgggggcagtaattcctgcccccctctctgccctagggatgggcacgggggcgctggtgaggtcccctggaccatccagggtgctagggggcagggaggggacaccccctccccgcctttacctcacttccaatgctgccttgatctctgtctgggaggggggagtgaaggggccctagccccctgcactccgccgcctcagagccatgcggttaattcctgacttagtttatttttgcaaaacgtcgatctcctcctcccccgccccgcatccgcgaaggcttttaatgggaggggcgtcaaagctcaaaactgttttcctctctcctcccccctccagttgtaaatgccacttcatgaggggaggggcgaggggaagcccacccctgcatgcttctggctggagcacctccctggggagtcgggggattgggttgtgggcagtccccatggccgcctggagaagccgctggggcccgggggtgtggggcggtgtggcgggcgcacactgtatgtacctataataaaccctttggctttg

SEQ ID NO: 270724 - DNA, 384 bp, Homo sapiens
tgggaggtggaggctgcagtgagttgtgatcacaccactgcactccagcctgagcaacagagcaagaccctgtctccaaaaaaaaagaaaaaagaaaagaaaacagagctctacctggggacacagccgtgtctgaagattccaaggaaacacagcccctgtcctggggagggggtttaggggggtcacgctctgccccagaagtctcaggggtccatccctgcccctccatgtcccccttcagcgagcagatcagccggcggcagtctcaggtggaccgcctgtacgtggcgctcaaggagctgggtgaggagcgccgggtggctctggaacagcagtactggctgtaccagctcagccgccaggtgagcgagcttgagcact

SEQ ID NO: 270725 - DNA, 8747 bp, Homo sapiens
gaggcgcggcggcgcatgcggatcaggctgagccgcgggccggcggggccgagctgagccgggctgggccgggccgggccgggccgggcagcggacgccgacagggagggcggtcggtcgcggcgagcagcggagacagcgacgctggcggccgcgggcccaggcctcaccttccccgatggcgcaggtaccaggggaagtggacaacatggagggcctgcctgctcctaacaacaaccctgctgcccgctgggagagtccggatcggggctgggagcgggagcagccggctgcgtccaccgcagcggcctcgctctttgagtgctcccggatcaaggccttggcagatgagcgggaagccgtgcagaagaaaaccttcaccaagtgggtgaactcgcacctcgcccgcgtgggctgccacatcggggacctctatgtggacctccgggacggcttcgtgctcacgcggctcctggaagtgctgtctggggagcagctgcccaggcccacgcgcggccgcatgcggatccactcactggagaacgtggacaaggcgctgcagtttctgaaggagcagcgcgtgcacctggagaacgtgggttcgcatgacatcgtggatgggaatcaccggctgacgctggggctggtctggaccatcatcctgcgcttccagattcaagtcatcaaaattgagactgaggacaacagagagacacgctcagccaaggatgctctgctcttgtggtgtcagatgaagacagctggttaccctgaggtaaacatccagaatttcaccaccagctggcgggatggcttggccttcaatgccctcattcaccggcacaggcctgatctcgtggacttcagcaaactcaccaagtccaatgccaactacaacctgcagagagccttccgcacagctgagcagcacctggggctggcgcggctgctggatcctgaagatgtgaacatggaggctccagatgagaagtccatcatcacctacgtggtctctttctaccactatttctccaagatgaaggctctggctgtggaggggaagcgtatcgggaaggtcttggaccaggtattggaggtggggaagatcatagaacgctacgaggagctggcggctgagctgctggcctggatccaccgcaccgtgggcctcatcagcaatcagaaatttgccaactccttaagtggggtgcagcagcaactccaggctttcacggcctattgcacgctggagaagcctgtcaagttccaggagaaggggaacctagaggtgctgctcttcagcatccagagcaaactgcgtgcctgcaaccgtcgcctctttgtgcctcgggagggctgtggcatctgggatattgacaaggcatggggtgagctggagaaggctgagcatgagcgggaggctgccctacgggctgagctgattcggcaggagaagctggaactactggcacagaggtttgaccacaaggtggctatgagggagagctggctgaatgagaaccagcgtctggtctcccaggacaactttgggtatgagctgcccgcagtggaggcagccatgaagaaacacgaagcgatcgaggcagacattgcggcctacgaggagcgggtgcagggtgtggcggagctggcccaggcattggcagccgaaggctactacgatatccggcgggtggcagcccagcgtgacagcgtcctgcgccagtgggccctgctaactgggcttgtgggtgcccggcggacacgacttgagcagaaccttgccctgcagaaggtcttccaggagatggtgtacatggtggactggatggaggagatgcaggctcagctgctgtcccgggagtgtgggcagcacctggtggaggcagacgacctgttgcagaagcatggactgctggagggagacattgccgcccagagcgagcgggtggaggctctcaatgccgctgccctgcgcttctcccagccctgcgacccgcaggtcatctgcaaccgcgtgaaccacgtgcacggctgcctggcggagctgcaggagcaggcagcgcggcgacgcgcggagctggaggcttcgcggagcctgtgggcgctgctgcaggagctggaggaggccgagagctgggcgcgcgacaaggagcgtctcctggaggctgcgggcggcggcggtgcggcgggcgcagcgggcgcagcgggaacagcgggcggcgcgcatgacctgtccagcacagcgcgcctcctggcccagcacaagatcctgcagggcgagctgggcgggcggcgagcgtcgctgcagcaggccctgcggtgtggcgaggagctggttgcggccggcggtgccgtcggcccgggagcagacaccgtgcacctggtaggcctggcggagcgcgcggcgagcgcccggcgccgctggcagaggctggaagaggcggcggcgcggcgagagcggcggctgcaggaggcgcgggcgctgcaccagttcggcgctgacctcgacgggctgctggactggcttcgcgacgcttaccgcctggcagccgccggtgacttcggccacgacgaagcttccagccgccgcctggcgcgccagcaccgcgcgctcaccggggaggtggaggcacatcgcgggcccgtgagcggcctgcggcgccagctggcgacactcgggggtgccagtggcgcagggccactggtggtggcgctgcaggtgcgcgtggtggaagcagagcagttgttcgctgaggtgaccgaagtggcggcgctgaggcgccagtggctgcgggacgcgctcgctgtctaccgcatgtttggcgaggtgcacgcgtgtgagctgtggatcggcgagaaggagcaatggctgctctccatgcgtgtgccggattcactcgacgacgtcgaggtggtgcagcaccgattcgagagcctggaccaagagatgaacagcctgatgggccgcgttctggacgtgaaccacacagtccaggagctggtggaaggaggccaccccagttcagatgaggtgcgttcctgccaggaccacctcaacagcaggtggaaccgcatcgtggagctagtggaacagcgcaaagaggaaatgagcgcggtgctgctggtggagaaccacgtgctggaggtggccgaggtgcgcgcccaggtgcgtgagaagcggagagctgtggagagcgcgccccgggccggcggcgccctgcagtggcgtcttagcggcctagaggccgctctgcaggcgctggagccgcgccaggcggcccttctggaggaggcagccctgctggctgagcgcttcccggcgcaggcggcgcggctgcaccagggcgcggaggagctgggcgccgagtggggcgcgctagctagcgcggctcaggcctgcggcgaggcggtggcggcagcagggcgcctgcagcgcttcctacatgacctcgacgctttcctggactggctcgtgcgcgcccaggaggcggcgggcggcagcgaggggcccctgcccaacagcctagaagaggcggacgcgctgctggcgcgccacgctgcgctcaaggaggaggtggaccagcgcgaggaagactatgctcgcatcgtggcggccagcgaggcgctgctggccgccgacggcgcagagctgggcccgggcctggcactagacgagtggctgccacacctcgaacttggctggcataaactgctcggcttgtggaaggcgcgcaggaaggcgctggtccaggcgcacatctaccagctcttcctgcgggatctacgccaggcgctcgtggtgctgcgtaaccaggagatggcgctgtctggtgcggagctcccgggcacagtggaatcggtggaggaggccttgaaacagcaccgtgactttctcaccaccatggagctgagccagcaaaagatgcaggtggccgtgcaggctgcagagggcctgctgaggcagggcaacatctacggggagcaggctcaggaggctgtgacccggctgctggagaagaaccaagaaaaccagttacgggcccagcaatggatgcaaaagctacatgaccaacttgagctgcagcacttcctccgagactgccacgagctggatggctggatccatgagaagatgctgatggcgcgggatggcacgcgggaggacaaccacaagctgcataagagatggctccggcaccaggcattcatggccgagctggctcagaataaggagtggctggagaagatcgagcgggagggccagcaactgatgcaggagaagcccgaactggcggcctccgtgcggaagaagctgggcgagatccgccagtgctgggcggagctggagagcaccacccaggccaaggcacggcagctctttgaggccagcaaagcagaccagctggtgcagagctttgctgagctggacaagaagctccttcacatggagagccagctgcaagacgtggaccctggaggagacctggccactgtcaacagtcagctcaagaagctgcagtccatggagtcgcaggtggaggagtggtaccgcgaggtgggagagctgcaggcgcagacggcggcgctgccgctggagccggcgagcaaggagctggtgggtgagcggcagaacgcggtgggcgagcgcctggtgcgcctgctcgagccgttgcaggagcgccgccgcttgctgctggcttccaaggagttgcaccaggtggcgcacgacctggacgacgagctggcatgggttcaggagcggctgccactggccatgcagacagagcgaggcaacggtttgcaggcggtccagcagcacatcaaaaagaaccagggcctgcggcgggagatccaggcgcatgggccgcgcctggaggaggtgctggagcgcgcgggcgcgctggcgtcgctgcgcagcccggaggcagaggcagtgcgccggggcctggagcagctgcagagcgcctgggccggactgcgggaggctgccgagcgacggcagcaggtgctggacgccgccttccaggtggagcagtactacttcgacgtggctgaggtggaggcgtggctgggcgagcaggagctgctcatgatgagtgaggacaagggcaaggacgaacagagcaccctgcagctgctcaagaaacacctgcagctggagcaaggcgtggagaactacgaggaaagcatcgcgcagctgtcgcgccagtgccgggcgctgctggagatggggcacccggacagcgagcagatcagccggcggcagtctcaggtggaccgcctgtacgtggcgctcaaggagctgggtgaggagcgccgggtggctctggaacagcagtactggctgtaccagctcagccgccaggtgagcgagcttgagcactggattgccgagaaggaggtggtggctggctcacccgagctcggccaggactttgagcatgtctcggtgctgcaggagaaattctcagagtttgccagcgagacaggtatggcagggcgggaacggctggcagctgtgaaccagatggtggatgagctgatcgagtgtggccatacagcagcggccaccatggccgagtggaaggacggactgaacgaggcctgggctgagctgctggagctcatgggcacacgggcccagctgctggccgcctctcgggagcttcataagttcttcagtgacgcccgagagcttcagggacagattgaggagaagcggaggcggctgccccgcctgaccaccccgcctgagccgagacccagtgccagttccatgcagcggaccctgagagcctttgagcatgacctgcagctcctcgtgtcccaggtacggcagctgcaggagggggcggcccagctgcggacggtgtatgcgggtgaacatgccgaggccatcgctagccgggagcaggaggtgctgcagggttggaaagagctgctgtcagcctgtgaggatgcccgcctgcatgtcagctccacagccgacgccctgcgcttccacagccaagtccgcgacctgctctcctggatggatggcatcgccagccagattggggcagccgacaagcccagggacgtgtcatcagtggaggtgctcatgaactaccaccagggcctgaagactgagctggaggcgcgggtgcctgagctgaccacctgccaggagctggggcgatctctgctgctcaacaaaagtgccatggctgatgagatccaggcacagctggacaagctgggaaccaggaaggaggaggtgtcggaaaagtgggaccgccattgggagtggctgcagcagatgctggaggtgcaccagtttgcccaggaggcggtggtggctgatgcctggctgacagcccaggagccgctcctgcagagccgggagctgggcagcagcgtggatgaggtggagcagcttatccggcgacatgaggccttccgcaaagcggctgcagcctgggaagagaggttcagctctctgcggcgcctgaccacgatcgagaaaatcaaagcggaacagagcaagcagccgcctaccccactgctggggcgcaagttctttggggaccccacggaactggcggccaaggcggcgcccctgctgcggccagggggctatgaaaggggcttggagcccctggcccgccgagcctcggacacgctctcggccgaggtgcggactcgggtggggtatgtgcgccaggagctcaagcccgagcgcctccagccgcgcattgaccggctgccggagatcccggggagggtggagcccgcggccctgccggccgcaccagaggacgcggcggagacccccgcgacccccgcggcggcggagcaggtgcggccacgaccggagcgccaggagtcagctgatcgcgcggaggagctgcccaggaggcggcggcctgagcggcaagagtcagtcgatcaatccgaggaggctgcgcggaggcggcggccggagcggcaggagtcagcggagcacgaggcggcacacagccttaccctgggccgctatgagcagatggagcggcggcgcgagcggcgtgagcggcgcttggagcggcaggagtccagcgaacaggagatgcccatcagaggagacctggtcaaggggaaggccaccctggctgacattgtggaacagctgcaggagaaagaggcaggcccagggctgcctgctgggccgtcgctgcctcagccacgcgagcttcccccaggtcgcctgcccaacgggcttgagctgcccgagcggacacctcggccggaccggccccgggcgcgggaccggcccaagccgcgacggcggccgcggcccagagagggtggtgagggcgggggaagccggcgctcgcgctccgccccggcccagggcggctccgcccccgcgcctccgccaccgcccactcacacagtgcagcacgagggcttcctactgcgcaagcgcgagctcgacgctaaccgcaagtcgtccaaccggtcgtgggtgagcctgtactgtgtgcttagtaagggggaactgggcttctacaaggactccaagggcccggcatccgggagcacacacggtggggaaccgctgctcagcctgcacaaggccaccagcgaggtggctagtgactacaagaaaaagaagcatgtcttcaagctccagacccaggatggcagtgagtttttgctccaggcaaaagatgaggaggagatgaacggctggctggaggctgtagcttcctcggtggcggaacacgcagagatcgcccgctggggccagacactacccactacttcatccacagatgagggcaaccctaagagggaaggcggagatcgcagggccagcgggcgcaggaagtgacttcccacccccaggacctgacacatctcgtctcccctcttttccgcactgtgggcacaaagacactttttcttccgcaggggcgggagcccctagttccaacactgaggacgcgtgacatggtgggcaccggaaaggaggggacttctcctgcaccccaagaagtggtggggagattgctgcccctatagccatatctcggccccttcccactcaccacccccaccccaggtgctgggggtcccttatttttatgcaataactgagcttgatgggggtgggcagggggccagttgagccaagcccccagccccgatctgcagatcctgccccaagaagctggggtggtgggggcagtaattcctgcccccctctctgccctagggatgggcacgggggcgctggtgaggtcccctggaccatccagggtgctagggggcagggaggggacaccccctccccgcctttacctcacttccaatgctgccttgatctctgtctgggaggggggagtgaaggggccctagccccctgcactccgccgcctcagagccatgcggttaattcctgacttagtttatttttgcaaaacgtcgatctcctcctcccccgccccgcatccgcgaaggcttttaatgggaggggcgtcaaagctcaaaactgttttcctctctcctcccccctccagttgtaaatgccacttcatgaggggaggggcgaggggaagcccacccctgcatgcttctggctggagcacctccctggggagtcgggggattgggttgtgggcagtccccatggccgcctggagaagccgctggggcccgggggtgtggggcggtgtggcgggcgcacactgtatgtacctataataaaccctttggctttg

SEQ ID NO: 270726 - DNA, 2426 bp, Homo sapiens
gcggccgccggagcctcagccttcgccgccgctgccgctgccgtcgcagttgaggggcgagcacccgcccgcccgctgcagggacgccccgccaacgccactgccacttcagctggatggctggatccatgagaagatgctgatggcgcgggatggcacgcgggaggacaaccacaagctgcataagagatggctccggcaccaggcattcatggccgagctggctcagaataaggagtggctggagaagatcgagcgggagggccagcaactgatgcaggagaagcccgaactggcggcctccgtgcggaagaagctgggcgagatccgccagtgctgggcggagctggagagcaccacccaggccaaggcacggcagctctttgaggccagcaaagcagaccagctggtgcagagctttgctgagctggacaagaagctccttcacatggagagccagctgcaagacgtggaccctggaggagacctggccactgtcaacagtcagctcaagaagctgcagtccatggagtcgcaggtggaggagtggtaccgcgaggtgggagagctgcaggcgcagacggcggcgctgccgctggagccggcgagcaaggagctggtgggtgagcggcagaacgcggtgggcgagcgcctggtgcgcctgctcgagccgttgcaggagcgccgccgcttgctgctggcttccaaggagttgcaccaggtggcgcacgacctggacgacgagctggcatgggttcaggagcggctgccactggccatgcagacagagcgaggcaacggtttgcaggcggtccagcagcacatcaaaaagaaccagggcctgcggcgggagatccaggcgcatgggccgcgcctggaggaggtgctggagcgcgcgggcgcgctggcgtcgctgcgcagcccggaggcagaggcagtgcgccggggcctggagcagctgcagagcgcctgggccggactgcgggaggctgccgagcgacggcagcaggtgctggacgccgccttccaggtggagcagtactacttcgacgtggctgaggtggaggcgtggctgggcgagcaggagctgctcatgatgagtgaggacaagggcaaggacgaacagagcaccctgcagctgctcaagaaacacctgcagctggagcaaggcgtggagaactacgaggaaagcatcgcgcagctgtcgcgccagtgccgggcgctgctggagatggggcacccggacagcgagcagatcagccggcggcagtctcaggtggaccgcctgtacgtggcgctcaaggagctgggtgaggagcgccgggtggctctggaacagcagtactggctgtaccagctcagccgccaggtgagcgagcttgagcactggattgccgagaaggaggtggtggctggctcacccgagctcggccaggactttgagcatgtctcggtgctgcaggagaaattctcagagtttgccagcgagacaggtatggcagggcgggaacggctggcagctgtgaaccagatggtggatgagctgatcgagtgtggccatacagcagcggccaccatggccgagtggaaggacggactgaacgaggcctgggctgagctgctggagctcatgggcacacgggcccagctgctggccgcctctcgggagcttcataagttcttcagtgacgcccgagagcttcagggacagattgaggagaagcggaggcggctgccccgcctgaccaccccgcctgagccgagacccagtgccagttccatgcagcggaccctgagagcctttgagcatgacctgcagctcctcgtgtcccaggtacggcagctgcaggagggggcggcccagctgcggacggtgtatgcgggtgaacatgccgaggccatcgctagccgggagcaggaggtgctgcagggttggaaagagctgctgtcagcctgtgaggatgcccgcctgcatgtcagctccacagccgacgccctgcgcttccacagccaagtccgcgacctgctctcctggatggatggcatcgccagccagattggggcagccgacaagcccaggtgcccctcatccctcctcgggcttcctgcctccccctggtggcctaccccagccacccccagcccattgacagcccccttctcaatggaatgacaacagccaatatctgtgtggcgcctctgtgtgctaggcactgttctaggtgcttcgtgtgtatcagaccccttttttaggcctgtcattggggacttcggtcatggggcatccttctgtccgctgtccttcccagttgcctattattaccctctccatgggatgtcacagcatgaaacaggctaaagacaggatgggcaagggaggtgtgggactgtatttgtgagggtgggtgaagaattctaacaattcc

SEQ ID NO: 270727 - DNA, 752 bp, Homo sapiens
caaaaaccctacactttactcccctccacttatgttttttgatgtcagagtttctttctttgtatattttgtaattatatttatttgtagtattttttgtcttttaaccttttaaaagttaaagtgattatactgcatcattacagtattaggagtattttgaatttgactgtatagttaccagtgactttttataactgcatatggtttcatgatactaattagtcttattgcatttcagtttgaggaactccctttagggtttcttataaagcagatctagtgacagtggactcccctagattactttggggggtttctgaaaaagtctgtaagtcctagccagagcaattaggtaagaaaaagaaataaaaggcatccaaattggaaaagaagtgaaagtgtctctatttgaagatgacatgatctgtatagaagtggaataaagagtagctgacaacaatgctgaaatagttacacatgaagttttaatgagctatttcatattaagatacatattgagaattcaaaccagagagaccagttaattgatattttcccaactctgttttagggtgatcatagaaatgatatccacaagttagtcacagtggcctgcatccattttgatatatcagtgatgtattttgattggcagtgatcacccatactgactgttaaatattttgttatcactcctatgcatggtgaatttgagttctggttttctttagccttgtgttattatgtgt

SEQ ID NO: 270728 - DNA, 1013 bp, Homo sapiens
tcttcgtcgccgctctctctctcacctctcagggaaagggggggacataggggcgtcgcggggccccggcgaatgcgccccccgccgcctctcgggctgcgccgcctcgcggggatgaagcaccggccgtgaagatggaggtgacctgccttctacttctggcgctgatccccttccactgccggggacaaggagtctacgctccagcccaggcgcagatcgtgcatgcgggccaggcatgtgtggtgaaagaggacaatatcagcgagcgtgtctacaccatccgggagggggacaccctcatgctgcagtgccttgtaacagggcaccctcgaccccaggtacggtggaccaagacggcaggtagcgcctcggacaagttccaggagacatcggtgttcaacgagacgctgcgcatcgagcgtattgcacgcacgcagggcggccgctactactgcaaggctgagaacggcgtgggggtgccggccatcaagtccatccgcgtggacgtgcagtgtgagttgaggccccctctctccccgggccctgacagcccagcccgggccagagggcgccccagggatgaggtgaggtggggaagtgggcatggggtggaacggagaagctgaccttggtggaggagcctaagaggtaccaggcggtgtgtaccaccctctaccatctacaccttcgcacctgtaatctcatatgaaccttgcaacttcccttgaggtgagcagggagggcaggatgggttgatttacactccttctgcagatgagaaaactgaggtcccatgtgatttgcccacaggcatggagcggggtagcctcagagctgagaggaagacacagatctcttccccattgtccgctgcccttcccacagtacctcatgtctctgcttttgtcctgctgcagctctgagatttccctccttactacattacatataggaccaagccccactccccaggtcctagctgctagctgcatgagaagctgccagtccct

SEQ ID NO: 270729 - DNA, 338 bp, Homo sapiens
acgagtctgtctgggttcgtttcctaggcctgcgtgtgccccacgtgcgcttgtgaaaaagtatgggagaaagggggtgccgttgcagggcactcagcgctgaggcccccaccccgtgtgagtctgacagtctgactctgccccgcctggcggcccaggtacggtggaccaagacggcaggtagcgcctcggacaagttccaggagacatcggtgttcaacgagacgctgcgcatcgagcgtattgcacgcacgcagggcggccgctactactgcaaggctgagaacggcgtgggggtgccggccatcaagtccatccgcgtggacgtgcagtgtgag

SEQ ID NO: 270730 - DNA, 513 bp, Homo sapiens
ggagctccattggctgtgagagccgttacccctgtctcaatagcccatggtacagccgtaatgagactatcagtgcctcctcagcaggcatctgggcagactcctcctcgagttatcggtgtagtcatacaggggccggaggttaaatcaaaagcagtggcaaaaaagcaagaacgtgatgtggaaactttgcagttcgtagaagaaaaactggctgatggaaataagacagtgacccatgtagtggttgtcagtgtgccttcagctactgcccttcctgtaactatgaaaacagaaggactagtgacatgtgagaaataaaatagcagccccaccatggacttcaggctgttagtggcagtactgacataaacattggcaagggaagtcatcaagaaaagtcaaagaagactttaaaacatgtttaatgcatgtaagaaaacaagcgaacttactggaaataaattacctatcccatgtttcagtgggaaataaactatgtattgagatgct

SEQ ID NO: 270731 - DNA, 395 bp, Homo sapiens
tttacttataggaaatttagaaggaatatttttgcctaagtattttgatttcagtaataacttttggtaaacggtcatttaaccttaaatgtcaacccttgctaatggtccaaattaacataagtctaattaagtattgctttaattaagagaaaatctgaacagtgttcttcctcccagataaagcataataatgctatgattcctggccactttccactgtaaaaaattatcccactcttagagctcagaaccttatggtgttactccacaggtcttggctgaaatatacacaataagattcatccttgggatgcaagaaccttcatttaaccccttcttcctgtgtgtgctgattaagcagcaaattttgtgtcccctaagaagctgcatga

SEQ ID NO: 270732 - DNA, 893 bp, Homo sapiens
aaataaataaataaataaataaaaattgattgtagtgacagttgcacaactctgttaatatactaaaaacaattgaacttacattttagatgggcaaattatattgtgtgtgattatatctcggtaaagctgaagaaaaggaaatatctaattcaccaatgaatctgccaagctagttaaataaataaaactagtgaatgaatagctgtttcccatgcagttgacaaaaatatgccctagttccaaagtctaaaatgaattcccttgactgtctcaggggcatgcttgcgcctagctctcgggaacccattagtgtactaataagaaacctgataattcagtcaataattcctgaggttgtcagtgccactccggaagaagagagaaatgcacagactatttctttcgatacaagctgtgggattgcagagcgaggggccgccaggatgttctgcctggaaaagggcccctggagatctcactgtggtctgttcccacttggctaatcttgagtcatttatgtgggcttatctgactattcctgtttttcccctcaccctggacattcagaaggactgttgtagttaaagctccagaataaagtaactcctgaggttctgtgggaataatttcactgtgaaggacacaaacacttcaatggatgtcaatcacatgtcagggaaggagtgcttgtttaaaataaagattcttgggccccattcctggagattcaaattttgtaagactaggataaggccatgggctctgcattttaaataaagcattaggccaggtgtggtggctcatgcctgtaattccagcactttgagaggatggcttgaagccagcagttcaagaccagcatgggcaacatagcaagacccctctttcta

SEQ ID NO: 270733 - DNA, 464 bp, Homo sapiens
aggcacactgcactctcttggaagaaaaaaatgtgctccctctaaatataagctcacaacaaaaaattgcaaagcaaacgagaaaaaagtctactatgagagagcagccagcagacacaaaaacaagatgaactccccatcggtgatggaaaaatagaacaacgtgcacaagattataccatagctgtgtttaaagtgactaaaaacccattaaagtacaatttttttaaaactaaacaagctggctcaaaagttcataaaagaaaagaaaaattaagaaagaagagttggaaattctgaaaaaagaataatgaaaaggaactaatactataagatatatcaatggaatagtacagaaaatccagaaacagatatacatctcccaaatatttactagaatttggtatgcagtaattttaggatttaaagtaaaaaaaagtaagttatttgataaatgttataac

SEQ ID NO: 270734 - DNA, 326 bp, Homo sapiens
tgtggcagactgtattttcctagaattcccacgacaagatttctagtcctatatgctcttcaacaacctcgtgactcgctaccaaaaggtggagttcactgcttgaactgcctaggactgccctgacaaatgctgtgaggcagaagtgatgctgcgtgactgccaaggctaggtcataaaaggcagtactgcatctgtctggttctctccctctctctctctctctctctctctctctctgtgtgtgtgtgtgtgtgtgtgtgtgtgtgtgtgtgtctgtgcatattttactttgtgattgtctatgtttggtttcattaatctac

SEQ ID NO: 270735 - DNA, 334 bp, Homo sapiens
atattcttggtgggttgaatgaagctgcatgtggtggcaggctgtctccagtgatggatggggaagggcaggatgaacccaggagggagtttaaaaccactgttgggtgggggagtagaagaatcttgcccctcagaaaagcacaagtagactagaaatggtgcagactgtgtggcgtttgtgatggcttcagggcttcccccttgccacacagccactgagacttggcactttgagagccatgggcttcccttgggtatggtaactggtcacagagcagcaagctgccccctgcttttctgattggcaggatacatttattaaaatagttgga

SEQ ID NO: 270736 - DNA, 1638 bp, Homo sapiens
  misc_feature (350)..(350): n is a, c, g, or t
  misc_feature (359)..(359): n is a, c, g, or t
  misc_feature (365)..(366): n is a, c, g, or t
  misc_feature (383)..(383): n is a, c, g, or t
  misc_feature (392)..(392): n is a, c, g, or t
  misc_feature (444)..(444): n is a, c, g, or t
  misc_feature (452)..(452): n is a, c, g, or t
  misc_feature (472)..(472): n is a, c, g, or t
acaaaaggtagagctaaaatccgtaagatgaaggtgacaacgaaaatcaaccatcatgacaaaatcaatggaaagaggaagaccgccaaaaaacagtaagatgtttcaacgtgcgcaagagttgcggcggcgagcagaggactaccacaaatgcaaaatccccccttctgcaagaaaggctctttgcaactgggtcagaatggcggcagcggagcatcgtcattcttcaggattgccctactggccctacctcacagctgaaattttaaaaaacaggatgggccaccagccacctcctccaactcaacaacattctataattgataactccctgagcctcaagacacctnccgagtgtntgctcnntccccttccaccctcancggatgatnatctcaagacacctcccgagtgtctgctcactccccttccaccctcagctcnaccctcancggatgataatctcaagacncctcccgagtagctgggattacaggtgcctgccaccacgcctggctaattttttgtatttttagtagagacggggtttcaccgtattagccaggatggtctcaatctcctgacctcgtgatccatccgccccgccctcccagagtgctgggattacaggcgtcagccaccgtgaccggctcagactgtactcttatagccatctgaaatacgttttctaggtagagatagattgtgtaagggtacagttgtgaggataacagaaacatggcagattatttaaaatcatcctgaaagtggtgctttatctgatgaaagtgattgtaatccataggaaaatgtttcaacgtgcgcaagagttgcggcggcgggcagaggactaccacaaatgcaaagtaaggagcttcctccctgcagttgcaggatagttcagtgctgatgcagatgatgccacggcccttagactctctcaacattcaatttctcatgtgttggctttttcagatccccccttctgcaagaaaggctctttgcaactgggtcagaatggcggcagcggagcatcgtcattcttcaggattgccctactggccctacctcacagctgaaactttaaaaaacaggatgggccaccagccacctcctccaactcaacaacattctataactgataactccctgagcctcaagacacctcccgagtgtctgctcactccccttccaccctcagcggatgtaatctcaagacacctcccgagtgtctgctcactccccttccaccctcagctccaccctcagcggatgataatctcaagacacctcccttagctactcaggaggctgaggcagaaaaaccacccaaacccaagaggtggagagcggctgagatggaatcaccacccgaacccaagaggcggagggccgctgaggtggaatcaccacccgaacccaagaggcggagggccgctgaggtggaaccatcatcacccgagcccaagaggcggaggttgagtaagctgagaacaggccattgcactcaagcctgagcaataagaataaaactgagtagaacaaaataaaaaaatcaaaaaacaaaacaaaacccacactccaaaaacaaactaacaaagaataaataaataatataaaaataaaataaatactgca

SEQ ID NO: 270737 - DNA, 1529 bp, Homo sapiens
  misc_feature (350)..(350): n is a, c, g, or t
  misc_feature (359)..(359): n is a, c, g, or t
  misc_feature (365)..(366): n is a, c, g, or t
  misc_feature (383)..(383): n is a, c, g, or t
  misc_feature (392)..(392): n is a, c, g, or t
  misc_feature (444)..(444): n is a, c, g, or t
  misc_feature (452)..(452): n is a, c, g, or t
  misc_feature (472)..(472): n is a, c, g, or t
acaaaaggtagagctaaaatccgtaagatgaaggtgacaacgaaaatcaaccatcatgacaaaatcaatggaaagaggaagaccgccaaaaaacagtaagatgtttcaacgtgcgcaagagttgcggcggcgagcagaggactaccacaaatgcaaaatccccccttctgcaagaaaggctctttgcaactgggtcagaatggcggcagcggagcatcgtcattcttcaggattgccctactggccctacctcacagctgaaattttaaaaaacaggatgggccaccagccacctcctccaactcaacaacattctataattgataactccctgagcctcaagacacctnccgagtgtntgctcnntccccttccaccctcancggatgatnatctcaagacacctcccgagtgtctgctcactccccttccaccctcagctcnaccctcancggatgataatctcaagacncctcccgagtagctgggattacaggtgcctgccaccacgcctggctaattttttgtatttttagtagagacggggtttcaccgtattagccaggatggtctcaatctcctgacctcgtgatccatccgccccgccctcccagagtgctgggattacaggcgtcagccaccgtgaccggctcagactgtactcttatagccatctgaaatacgttttctaggtagagatagattgtgtaagggtacagttgtgaggataacagaaacatggcagattatttaaaatcatcctgaaagtggtgctttatctgatgaaagtgattgtaatccataggaaaatgtttcaacgtgcgcaagagttgcggcggcgggcagaggactaccacaaatgcaaaatccccccttctgcaagaaaggctctttgcaactgggtcagaatggcggcagcggagcatcgtcattcttcaggattgccctactggccctacctcacagctgaaactttaaaaaacaggatgggccaccagccacctcctccaactcaacaacattctataactgataactccctgagcctcaagacacctcccgagtgtctgctcactccccttccaccctcagcggatgtaatctcaagacacctcccgagtgtctgctcactccccttccaccctcagctccaccctcagcggatgataatctcaagacacctcccttagctactcaggaggctgaggcagaaaaaccacccaaacccaagaggtggagagcggctgagatggaatcaccacccgaacccaagaggcggagggccgctgaggtggaatcaccacccgaacccaagaggcggagggccgctgaggtggaaccatcatcacccgagcccaagaggcggaggttgagtaagctgagaacaggccattgcactcaagcctgagcaataagaataaaactgagtagaacaaaataaaaaaatcaaaaaacaaaacaaaacccacactccaaaaacaaactaacaaagaataaataaataatataaaaataaaataaatactgca

SEQ ID NO: 270738 - DNA, 1740 bp, Homo sapiens
  misc_feature (350)..(350): n is a, c, g, or t
  misc_feature (359)..(359): n is a, c, g, or t
  misc_feature (365)..(366): n is a, c, g, or t
  misc_feature (383)..(383): n is a, c, g, or t
  misc_feature (392)..(392): n is a, c, g, or t
  misc_feature (444)..(444): n is a, c, g, or t
  misc_feature (452)..(452): n is a, c, g, or t
  misc_feature (472)..(472): n is a, c, g, or t
  misc_feature (1316)..(1316): n is a, c, g, or t
  misc_feature (1357)..(1357): n is a, c, g, or t
acaaaaggtagagctaaaatccgtaagatgaaggtgacaacgaaaatcaaccatcatgacaaaatcaatggaaagaggaagaccgccaaaaaacagtaagatgtttcaacgtgcgcaagagttgcggcggcgagcagaggactaccacaaatgcaaaatccccccttctgcaagaaaggctctttgcaactgggtcagaatggcggcagcggagcatcgtcattcttcaggattgccctactggccctacctcacagctgaaattttaaaaaacaggatgggccaccagccacctcctccaactcaacaacattctataattgataactccctgagcctcaagacacctnccgagtgtntgctcnntccccttccaccctcancggatgatnatctcaagacacctcccgagtgtctgctcactccccttccaccctcagctcnaccctcancggatgataatctcaagacncctcccgagtagctgggattacaggtgcctgccaccacgcctggctaattttttgtatttttagtagagacggggtttcaccgtattagccaggatggtctcaatctcctgacctcgtgatccatccgccccgccctcccagagtgctgggattacaggcgtcagccaccgtgaccggctcagactgtactcttatagccatctgaaatacgttttctaggtagagatagattgtgtaagggtacagttgtgaggataacagaaacatggcagattatttaaaatcatcctgaaagtggtgctttatctgatgaaagtgattgtaatccataggaaaatgtttcaacgtgcgcaagagttgcggcggcgggcagaggactaccacaaatgcaaagtaaggagcttcctccctgcagttgcaggatagttcagtgctgatgcagatgatgccacggcccttagactctctcaacattcaatttctcatgtgttggctttttcagatccccccttctgcaagaaaggctctttgcaactgggtcagaatggcggcagcggagcatcgtcattcttcaggattgccctactggccctacctcacagctgaaactttaaaaaacaggatgggccaccagccacctcctccaactcaacaacattctataactgataactccctgagcctcaagacacctcccgagtgtctgctcactccccttccaccctcagcggatgtaatctcaagacacctcccgagtgtctgctcactccccttccaccctcagcggatgataatctcaagacacctcccgagtgtgtgctcactccccttccaccctcagcngatgataatctcaagacacctcctgagtgtctgctcactcnccttccaccctcagcggatgataatctcaagacacctcccttagctactcaggaggctgaggcagaaaaaccacccaaacccaagaggtggagagcggctgagatggaatcaccacccgaacccaagaggcggagggccgctgaggtggaatcaccacccgaacccaagaggcggagggccgctgaggtggaaccatcatcacccgagcccaagaggcggaggttgagtaagctgagaacaggccattgcactcaagcctgagcaataagaataaaactgagtagaacaaaataaaaaaatcaaaaaacaaaacaaaacccacactccaaaaacaaactaacaaagaataaataaataatataaaaataaaataaatactgca

SEQ ID NO: 270739 - DNA, 1349 bp, Homo sapiens
  misc_feature (350)..(350): n is a, c, g, or t
  misc_feature (359)..(359): n is a, c, g, or t
  misc_feature (365)..(366): n is a, c, g, or t
  misc_feature (383)..(383): n is a, c, g, or t
  misc_feature (392)..(392): n is a, c, g, or t
  misc_feature (444)..(444): n is a, c, g, or t
  misc_feature (452)..(452): n is a, c, g, or t
  misc_feature (472)..(472): n is a, c, g, or t
acaaaaggtagagctaaaatccgtaagatgaaggtgacaacgaaaatcaaccatcatgacaaaatcaatggaaagaggaagaccgccaaaaaacagtaagatgtttcaacgtgcgcaagagttgcggcggcgagcagaggactaccacaaatgcaaaatccccccttctgcaagaaaggctctttgcaactgggtcagaatggcggcagcggagcatcgtcattcttcaggattgccctactggccctacctcacagctgaaattttaaaaaacaggatgggccaccagccacctcctccaactcaacaacattctataattgataactccctgagcctcaagacacctnccgagtgtntgctcnntccccttccaccctcancggatgatnatctcaagacacctcccgagtgtctgctcactccccttccaccctcagctcnaccctcancggatgataatctcaagacncctcccgagtagctgggattacaggtgcctgccaccacgcctggctaattttttgtatttttagtagagacggggtttcaccgtattagccaggatggtctcaatctcctgacctcgtgatccatccgccccgccctcccagagtgctgggattacaggcgtcagccaccgtgaccggctcagactgtactcttatagccatctgaaatacgttttctaggtagagatagattgtgtaagggtacagttgtgaggataacagaaacatggcagattatttaaaatcatcctgaaagtggtgctttatctgatgaaagtgattgtaatccataggaaaatgtttcaacgtgcgcaagagttgcggcggcgggcagaggactaccacaaatgcaaagtaaggagcttcctccctgcagttgcaggatagttcagtgctgatgcagatgatgccacggcccttagactctctcaacattcaatttctcatgtgttggctttttcagatccccccttctgcaagaaaggctctttgcaactgggtcagaatggcggcagcggagcatcgtcattcttcaggattgccctactggccctacctcacagctgaaactttaaaaaacaggatgggccaccagccacctcctccaactcaacaacattctataactgataactccctgagcctcaagacacctcccgagtcccaagaggcggaggttgagtaagctgagaacaggccattgcactcaagcctgagcaataagaataaaactgagtagaacaaaataaaaaaatcaaaaaacaaaacaaaacccacactccaaaaacaaactaacaaagaataaataaataatataaaaataaaataaatactgca

SEQ ID NO: 270740 - DNA, 1240 bp, Homo sapiens
  misc_feature (350)..(350): n is a, c, g, or t
  misc_feature (359)..(359): n is a, c, g, or t
  misc_feature (365)..(366): n is a, c, g, or t
  misc_feature (383)..(383): n is a, c, g, or t
  misc_feature (392)..(392): n is a, c, g, or t
  misc_feature (444)..(444): n is a, c, g, or t
  misc_feature (452)..(452): n is a, c, g, or t
  misc_feature (472)..(472): n is a, c, g, or t
acaaaaggtagagctaaaatccgtaagatgaaggtgacaacgaaaatcaaccatcatgacaaaatcaatggaaagaggaagaccgccaaaaaacagtaagatgtttcaacgtgcgcaagagttgcggcggcgagcagaggactaccacaaatgcaaaatccccccttctgcaagaaaggctctttgcaactgggtcagaatggcggcagcggagcatcgtcattcttcaggattgccctactggccctacctcacagctgaaattttaaaaaacaggatgggccaccagccacctcctccaactcaacaacattctataattgataactccctgagcctcaagacacctnccgagtgtntgctcnntccccttccaccctcancggatgatnatctcaagacacctcccgagtgtctgctcactccccttccaccctcagctcnaccctcancggatgataatctcaagacncctcccgagtagctgggattacaggtgcctgccaccacgcctggctaattttttgtatttttagtagagacggggtttcaccgtattagccaggatggtctcaatctcctgacctcgtgatccatccgccccgccctcccagagtgctgggattacaggcgtcagccaccgtgaccggctcagactgtactcttatagccatctgaaatacgttttctaggtagagatagattgtgtaagggtacagttgtgaggataacagaaacatggcagattatttaaaatcatcctgaaagtggtgctttatctgatgaaagtgattgtaatccataggaaaatgtttcaacgtgcgcaagagttgcggcggcgggcagaggactaccacaaatgcaaaatccccccttctgcaagaaaggctctttgcaactgggtcagaatggcggcagcggagcatcgtcattcttcaggattgccctactggccctacctcacagctgaaactttaaaaaacaggatgggccaccagccacctcctccaactcaacaacattctataactgataactccctgagcctcaagacacctcccgagtcccaagaggcggaggttgagtaagctgagaacaggccattgcactcaagcctgagcaataagaataaaactgagtagaacaaaataaaaaaatcaaaaaacaaaacaaaacccacactccaaaaacaaactaacaaagaataaataaataatataaaaataaaataaatactgca

SEQ ID NO: 270741 - DNA, 277 bp, Homo sapiens
tgggaaagggagggcagatgactcacagagagcatcaaagcccagagagaatgaggagggtgtccagagtatgtgcgctggcacctgacgtggcatgtcggagcccaggctgaggaaagtgaccccgcaggggtctggccagcatgtggttccttttgcccattcccatttctccttcagtgcactgctcttcctggagtaaggaacgaatccggagaagcagaaggcaatgagccggcttttagagcagccaaggcttggtccatggcagagccat

SEQ ID NO: 270742 - DNA, 462 bp, Homo sapiens
accgatactggggtaagaaaacctaaactgtaattaacatactgctggaggctcactacagagaagtctgagagttaaaaactgcaggagtacccagtcatgagaagtcgggggctctccacacttttgttagttttacttccaggagcttgactgggtcctcacgatggatgtcgaagaaaaatcttgccctgattctgacagagggaggaaaaaagtagccatttgaaacacacaaaagcattctgttcttttcagcaaggcctgccctcaggagaaactatattgtcagaacttaactgactttggtaagggaaatactcaactctagccccctctagtcttccatgtggaagaaggggagtacccaactccagcccatcctagatattctgttccacctaaggagggggaaagactgagaagcacttgtgaaactcgtagcccaggagcacaggccta

SEQ ID NO: 270743 - DNA, 421 bp, Homo sapiens
gcacagatgggggctgtaccggagatgctgatcctttctgtgcagagggaaagaatgagggctggattggaaggaaggaggcacaagactgccaaggaggaagaagactatcgccatgaggccaccaggtcctactcagctgccctcccctcctcaccaggagacagccctgtaaccacccaaacattacgggaatgtgggctggctaatagaagagggacaactcagggtcagaacacagaggcctactcaccaggaatgagcatctagttggggacaaagacagacttttccacaatcactcccctctcacattaacgttctccacagaagacgccacttgtatctcctcagcccctccttcccaccacaatatttccctgaactaataaatacctatgttccttcaaacagcactgaa

SEQ ID NO: 270744 - DNA, 295 bp, Homo sapiens
catacagattaataagtgaaaactgcttttatttacagacatattttttttaggtaggaagttctaaagtgtcaacaaaataacataccagagctagtaaacactttcaataagttgcagaatatactaggccaatacgcaaaattcaattatttatataagttgcaatgaacaattaaaaactaaaacatgaaaaacaataccattaataacagcacgcaaaaacctgaagtacttaggaataaatttaacaaagtacatgcaagaactgtacactaatacctgtttgtcgacg

SEQ ID NO: 270745 - DNA, 529 bp, Homo sapiens
tgctaattttattttcttttgtagagattggggtctctctatgttgaccaggctgattttgaactcctggcctcaagcaatcttcttgcctaggccttccaaagtgctgggattacaggcatcagccactgtgcctggctcctggagagttttagaacaataaaatagaattgttactccatggcagaagtgtagagaacatgcctgccagattccagccagatgactcctataaacacaacatacagtcagtgtaaatgaacctaaacagatttaccagtacctgtacattactaaacagatgtaaatgaaaagatacactatgcattgaacttaatgctacttttttgttttttgttttttgtttttctagtagatgtgagtttaaatatagcaggaataggattttcatcttctcttgttgaaagtcttcgtggaagtggatttaagttctagcatattcagtaggagaaatttgagctggaatgaaggacatcacagcctgcataatttgttaaatgtctcttta

SEQ ID NO: 270746 - DNA, 469 bp, Homo sapiens
cagaaagctgaagcagtggaagtattctatttaagagaaccagacatgacctgcccccgttatgatgcagtggaaagtacacaacaccacctatgaagttgatttgtcaaaaaaagaaagaaaacaaaagaaaatcaccctacatgtaatcaagcctctagacctatcttcagtttagaggcaagagctccaaagaaagaaacatgttaaacaacaccattttatgactggggaggtgctgcccagtcaaacccagtaaaatccagtttctccaacaaataaacacatgaggtgggggggaaatgtgtacagaggatgttaaagattaaaagacacttaaagttaatcctcaaataaaagtttgttgaaaaaagaggactgaagagatacatcaaccaaatgcaatgtgcggactgtgtttgaatcttaattaaacaaagcaaattataaataaaagcttttttaagaa

SEQ ID NO: 270747 - DNA, 556 bp, Homo sapiens
ctgcatacatgagggatgccagaagaaagatctgagagccactcttcctggcactgaaggaaacagggcccatcagagcaaacaagtaccttttgcctctctcatctccttggaggcaaatgtttataatctctggttttgtgtaaagtttataacagtatttttcattcaggttgctacctattagtggatggtgaaattaatttggtggatcacattcagaatatttttttaaaatcaaaagaatacaagctgggctcagtgactcacacctgtaagcccaacagtttgggaagaccaggcaggaggattgcttgagaacaggagttcagaatcagcctgggcaacatggcgagaccctatgtctgcaaaaattttaaaatatgccagatctggtggcatgtgtccatagtcctagctactcaggaggctaaggcagcaggattgtttgttataaggagttcgaggctgcagtcaaacttctggtcgaaatcctggtcatgccactgcatttcagcctggacaacagagtaaaaccccatctttaaaaaaaaat

SEQ ID NO: 270748 - DNA, 441 bp, Homo sapiens
catagtagtgcatgcctatagttccaactacttgggaggctgaggtgagaggatcatttgagcccaggaggtcgaggctgcagtgatccaagaaaactatacttcatcctgtgcaatagagcaagaccctgcctcaaaaacaaaacaaaaccaaaacgcatatgtcagccataaaaaatgatgagttcatgtcctttgtagggacatggatgaaattggaaatcatcattctcagtaaactatcgcaagaacaaaaaaccaaacactgcatattctcactcataggtgggaattgaacaatgagaacacctacccttactatatacccatgaaaattaaaaatctaaaaaaaaaaaatttaaaaaggaggtgattggaagctgttacagaacagatcatgaagattttgattgtgatctctgatcctgggggaaaaaaaaa

SEQ ID NO: 270749 - DNA, 496 bp, Homo sapiens
tctgccctgggagccctacactccacttggagtctggatggacacatgggctgggggctctgaagcagcctcactcttaacttcatgttcacactccatggaaaccccagactgggacacaggtggaagcctaggggagccgaatcagtgtttgtgaagaggcaggactggccagagtgacagacgtacggtgatccaggaggctcaaagagaagccaagtcagctttgttgtgattcgatttttttaaaaaactcttgtacaaaactgatctaattcttcactcctgctccaagggctgggctgtgggtgggatactgggattttgggccactggattttccctaaatttttcccctctttactctccttctatttttctctccttagactccctcagacctgtaaccagctttgtgtcttttttcctttcctctcttttaaaccacacattataactttgaaaaaaaaataaattagaaaaagggcagccaact

SEQ ID NO: 270750 - DNA, 172 bp, Homo sapiens
tttttctgacaatataaatacatttctgactttataattttcataagcaaataatccataatcttaagcatgccagaggagttaatacaaagtgttgagaagggatgaagctggagctacacctgggtaaggattattccccaaacctgtctaccatcaaactggatttgta

SEQ ID NO: 270751 - DNA, 646 bp, Homo sapiens
gacatcaatcaaataccctggaaacgtggaaggcaggggaaagaacaaagggagagcaaaatcgccccaatcccacatcacccgcgacgtgaaaggatttgtccttccagctgcgggactcctatttgtttatttcaaccccgcgccagctccaggcacagccgttcagggtgatgccaaagggaaatgagaacgcctggtttcgagtgccagcctgaggccccttaagccctagcctggctccaaaaactgcagcctgtttccctcaacaaaaatgacgtcaagaatacctagatgtgaccacaccgaacttgcttgcccgttttgggaaacccaactttcttcctgaatagtcagaacctctggctttcctggtctcttaagaaccgcaaactattgaaaagcagatgcgtctttcagcctctttaataaatgcagtaaggagagttgggacagagttactttcagactgtggggctcccccgtgccaaagcattcagacgaaatgtgggggatagcggggggaaggcaggcaattatctgaatgttaaacagctgaatatttggaaaccccaatctttggctgatttttaaaaacctttttcacacgtgttctcatgtttaaaaaacgccttgaacagaaaaa

SEQ ID NO: 270752 - DNA, 144 bp, Homo sapiens
aaaagagacatgcggactaaatgcagtacgtgattctggaccggatagtggactatgaaaccctgctctttttttcttttgctataaaagacactactgggaaaactggcaaaggtttgaataaagtttgtaattacagaagca

SEQ ID NO: 270753 - DNA, 226 bp, Homo sapiens
gtgttttgcaactttctggatggaacagaggcttttggtgatcccttcttgcacagagaagggaacctcacttgtaagaggttggggtcttaaaacagaggtcagcaaattttttccataaagggcgacataatacatgttttaggctttgaagcccatactatttctgtgccaactgctccactttgccattgtagcacaaaaacagctgtatacaatatgcagg

SEQ ID NO: 270754 - DNA, 647 bp, Homo sapiens
cgcccagactcttcttggactttagatgttctattatattcttctgtccataacttcttgacccaagccttcataggtctgcagtatcccttaagctttcatacgtcatggtacctaccactgctttctatgacttctgtcagcttgaaatctgagctatgtcaccattcccagtgtgagctctgaattaggtgagacaaaccagtcactaagtagccaacagacaggttagaatgttgtaaatagtttctattctgctccttctggctgagggaaagaatgcacaattgagcttttgcctgtggactgtggtctgccactccagggcaaaggtaaataaaatggattagaaatttatactgtttgaaagtggctttttcttgattgggcatttggttgcttgctgtgtatctttgactggttttcaaaactctacggagtcatttgagtcagtctccagttgattttcaaatgtttctctgaaagaacaagggcatgcggctgctgattaacattattgctctgcttcttttgattttatataatgattttataattacaagaaaaacaaagctgttttcagtttgttaattgagatggtagttcaggcagtgttatgctggatggaatcaagttatcctacacaa

SEQ ID NO: 270755 - DNA, 354 bp, Homo sapiens
acgccgcagccgccacgccaacaccgattcctcgtggccaacaggtttctcgcagccctccgagtcggcagcgccgcccgcgtccctcttccagccgggccggcgggacgccctcagagcttgtgctctctcgaggccgccgagcccactgagcccggccggggcgctggttcgcgtgggccgcggggaacaggtcccgcttctccaacgaccacggccccggcggctgcgaaacggccacctccgacccttgagtccgccagagtcgctctccctttcacatttgcaagcaaaacaacatacgtaatagtgacatcgaggcacttttccaaactaaaatgatcctaaaataat

SEQ ID NO: 270756 - DNA, 407 bp, Homo sapiens
tatcatttttttcaggattagtcccaaatactcaagtttaagttatcctaaatctttctttaggaacgcctcacaaataaaatataagaaatttggatattgtactcttggcaaagtttggctctgcttccctaatctaatgggacagtgacagcttacaatgaaacattttcaaaaacattccctgctaaatcaaactgaaatgcaggggatttacatggacatttgagatcgtttggtgtaatagagcatggactgtcaagtaagaagtttcacatggactacggagtaagaccagtccttctaccatcttggaacttgacctttttttgtaaaattggaaacataacagctcaccatcttgttgagaagactaaatgaagtaatgtgaaagttccttaaggaag

SEQ ID NO: 270757 - DNA, 472 bp, Homo sapiens
ttagggcaaaagaaataagtacaattggcatgttaatgttggttcacaaaaaatcatttaccaaatacctggtaacttccataatgagctcagacagacgccagcactcacactggcatcgtctctgggggcagctttgtttctgggggcagcattgtttctgggggatggcactgtttctggggaggcctccttcagcacaagcagctacaaaccgcagtgacacccagagccaagaagtggttatgaatagcctcttgtggctgaagctgtttgcagcctggtgctttttaaaggacttttctttaaataatagagctaaaacacaaacagccttcattcaaaataagagaaaatcatatcccgagttaaaccttcatatgagaatcaaacatgctcttccaagccccaggaaaagtaacacttagcttttatctctgatcttaaaaaatgagtattactttaaaaaaaa

SEQ ID NO: 270758 - DNA, 595 bp, Homo sapiens
agaactgggtggtgatgggttctgacagatggccaggctgtggggtcacacggttggcggtggcgggctttggtccagctgcagggctgcatcgggagccctgtgtgtttggagggaattcctgcccctgcagcaaacgtgttggtgcgggtgtaacctgtttcatggaaggtgaagaaagcctgcactaatttaacatccaagtttgccctgctgagcccagcccagatgccaacccacagagccatgagctaaatgaatgtctcagtgttgtgagccgctggggtttggggtagttaatgacacagcaagagctactgctgccccagcctcaggtggctcacgctgccttccattgctctaaactccatttacattgattcacttacctgcttactatctgtcttccccgttagaatatcagattcaagaggacttgatctttgtcaccactgcatctcaacaatactagcgtctaaacaaataataagagttcacatttattaaagatttacaatacaccaggctttgctctgtttgtgatttaatattttaatctctagtggcaataaatgggtcaacctgttaaaaaaaa

SEQ ID NO: 270759 - DNA, 397 bp, Homo sapiens
ccaggggatgagagaccatgtgattggagtcccaggtgacccggccatcccctcagcctgtatcagcccctgcagattacacatgtgtgaggggtccagccatcattgccacatcctgtcttgggccaaaagaactgccctgctgagcccagcccagatgccaacccacagagccatgagctaaatgaatgtctcagtgttgtgagccgctggggtttggggtagttaatgacacagcaagagctactgctgccccagcctcaggtggctcacgctgccttccattgctctaaactccatttacattgattcacttacctgcttactatctgtcttccccgttagaatatcagattcaagaggacttgatctttgtcaccactgcatctcaacaata

SEQ ID NO: 270760 - DNA, 244 bp, Homo sapiens
gataataaactagtttgtgacatcagcctcaaagtacctgactgtatgagacggataccaaaccaaactgtttttcttgctctgaaactcatcacaacacacttctgacaccaggcaatcagatgcaccccatctccgatgtatacatgtgacctttgtatctctcttttttcacttagcataatgtttttgaggtttatccacattttagcatatatcaatacttcattccttttcgtggctg

SEQ ID NO: 270761 - DNA, 447 bp, Homo sapiens
gtgaagctgagctgtactctctgcagcccaaatatctctggttgaacaaagaacattagcacctaaggccaacaactctcaaagtttctgtactgtgaatggtccaacagctgaaaaaactcaagttcatctcacctccaatgtctctcttgaatctattcctttctgtccatctacacagttagatactaaccatcagccatgccatctcttgccaccatacatcatttgtaatataattagtctcacacttatctcagtttcccatctcactcctctcttatctattttccacattacaaactgagtgattgttttgcttcctacaacacagttcttatcatcaccattgtcatcattgaaattatattatcataattatcataagtcaggtcttaactgtaagcaaaaaaataaactctggctaattaaagcagaaataatgaa

SEQ ID NO: 270762 - DNA, 302 bp, Homo sapiens
cactggcggcacagcatggagggcctgcgccaccacagccccctgatgcggaaccagaagaaccgagattccagctagaggagctggccttgcccagtggcctgtggcgcccaaagctggcaggtcaggcaagcagcctgcaccaccctgccactggcgaccagggagctggcttcccaaggacaagggaaaattgtagtcacctttgcacttgctgaatctgtctttgtttctgcactaattaatgcacattgagttttgtcaggttttgttttcagggggtgtaccaagggcaaggaccc

SEQ ID NO: 270763 - DNA, 386 bp, Homo sapiens
catctgctacatcacttggtgtgtcttaaatatttgctataaagtgaatcttaaaaccattgaatcaagagatcagaagaatgattggcagaatcagcatagattaggaaacagtagagaccttttataacaatgggagatgggctttgcctttcttcttgattgtgagtcacaaatctgtgtaataagccatttcatatctaattggttgtatctagacaatttaaaccttatgtcctggcaaaagaggtcaatcagatcactaatgactaagaaatatacttttttattgctgcctatggtgaaatgtctttcagaaaaatcttcatagctttttgctttgattaaaaataatggcatcattaaagctcaataacttcaacaaa

SEQ ID NO: 270764 - DNA, 453 bp, Homo sapiens
gctatttcattcttacagctctggagtaaaatggcgatgatctttggtctaccccaaaactgtcttaaatttcgcttgctttggctaactctgataggaaatagctatgggagagtaggaagggaatggggcttagagcccataattcaaaccctactaccacttctaggtatgagctgtgtaaccctgcacaggttacttatctccgttttctagattttatgcggtccatttggcatgtcctaagcacccagtacatgttcattaattattttttctcttctcaccaggtctggtctatgtcatgttcatctctatcctcattagcgtgatagtctctttgagattatttgatgaccaaattaatggggctggagtgtaacagcttaagagcaggtacattctgaagagtgagaataaactttgtctgtgtattatttactgtttaagaaa

SEQ ID NO: 270765 - DNA, 462 bp, Homo sapiens
agatggaatcattacattatcagtgtagtagagttggtaagccctcaagtgccctgtgcttaatttgaattctgatttttaatactttttagttatgtgattttgaacaagaattaaatctcttcatctgtaaaatcagaataatgcttattttatttggatgttgcgaggattaaataacatacagttcttgacacctataagttacattattagtaatatcactgccatcaaagtgagaatatgtccagcttgctgctgttgagcctcggtgagagggagaaatcatttacagcatcaagtaagagtgcctgatttattgtcttggatcatgctaaagaatggactaacccccagttattgtgcatcccctgggtgattcgatttaccacgtagaaatacgtgtcttccctattctaatttcctttagagaaataaaatctgattatttagtcaaggaaa

SEQ ID NO: 270766 - DNA, 805 bp, Homo sapiens
atcctaatacaggagtgtttatggttgggttgagacacattcagtagctgagtgattgacagcaagaggagcaagacatgaggtagatttgtattatattctcagtgaaacgggatagctttagaagctttttaataaaaaggatatatgatctaaatttcctactgttaataattatcaaatatatggcaatgctggactttagctgatcatcgtgcttctggaaaacaacaaaaattgagatatctgttcaccactttgtgtgtccaaggaccacctactttttacatgtgacaagaactacccacctccactcttcaggatagaacatgctgaagaaaagagttgcaatgagaaaatatatgggaacaaaatacctatgcaatgcagaagtctgcataactgaaccactcagaggaaaaagtttccctcccaggctggagtacaatggcgcgacctcggctcactgcaacttccacctcccagttcaagcaattctcccacctcagcttccttagtagctgggattacaagtgcctgacaccaggccaagctatttttgtatttttagtagagacggggtttcaccattttgaccaggctggtctcaaactcctgacctcagtccatcggtccacctcggcctcccaaagtgctgggattgcaggcatgagccaccgctcctggcctcaagtttaattcttaagtgagtcaatcagttatagttctgttcaaagctttcagtgcacctaaaatttcatccaacatctattatctttcatcatatgctaaaacagcttgaaga

SEQ ID NO: 270767 - DNA, 433 bp, Homo sapiens
atcctaatacaggagtgtttatggttgggttgagacacattcagtagctgagtgattgacagcaagaggagcaagacatgaggttaataattatcaaatatatggcaatgctggactttagctgatcatcgtgcttctggaaaacaacaaaaattgagatatctgttcaccactttgtgtgtccaaggaccacctactttttacatgtgacaagaactacccacctccactcttcaggatagaacatgctgaagaaaagagttgcaatgagaaaatatatgggaacaaaatacctatgcaatgcagaagtctgcataactgaaccactcagaggaaaaagattgccatttcaggacacctcctacatctgaggaaatatgcattgatcttgcagtacttttctcctccaaataaaagtcagtatgataacaac

SEQ ID NO: 270768 - DNA, 551 bp, Homo sapiens
ttttttcttttttttttttctgagacagggtctcattcttttggtcagactagggtgcagtggtgcgatcacaactcactgcagtttcaacctgccggactcaaggctgcagtgatccttcagccttgacttcctgagtacctgggactacaggcatgcaccaccacacccagctaatttttaaaattttgtagagatggaggtcttgctatgttgcccaatctggcctcaagcaatcctcccacctgggcctcccaaagtgctgggattacaggcatgagctactgcttcctaccaacttgtgtgctttaaaggacaccatcaagagagtgtaaacagctgggtgcggtggctcacgcctgtaatcccaacactttaggaggatgaggtgggaggatgtattagtccattctcattctgttatgaagaaatacctgagactgggtaatttataaaggaaagaggtttcattgactcacagcgatcctctcatctcagccttccaagtagctgggactacgggtgcacatcaccatgaattgtccatttta

SEQ ID NO: 270769 - DNA, 415 bp, Homo sapiens
tcctttggttctacttctccctttgtacccagatcaaacccagatccaatcacaaatcagcctgtaaaaattctaaaacctgtacacactgtaaagcccattccactatgccatgtggaagcagaaaggagttaactccactctaccgtgaaagctctagcaccgtttcactttttcttttttgctttttttgttctttctttcttttctttcttctttctttctctttctttttatttcattcctttttcacctttctttctttgtctctgtcttttctttttctttgctttctttctttcactagcatctcctagcattataagtcgtatgtggcaggttgtatttgaatgaattaataaatgaatgaatatacagaggaataaattaaacagtaatggagtaaacaaatgag

SEQ ID NO: 270770 - DNA, 945 bp, Homo sapiens
cggggcgggcggggcgcgtcccggaggcggaccggcatacagggtaacttcctgatgttgccatggcatttgtaaactgtgatgacgctggtgggagtgcagcagcgaggacgaccagaggtcactctcgtcgccatcttggttttggtcagtaccctagagtccatgggtccactattcctctgcgtctcatttctctgaagtgggaaactccctggactacctattcctgcacttattaccctcattctacagtgtactgaagaggatcttcggtggtctgggagttttgtttgtttgagacagggtctccctctgtcatccaggctggagtgcagtggtgcaatcatagctcactgctgcctcaacctcccaggctcaagtgattctcctgcttcagcctcccaagtagctgagactacagttgcctggacaacatacagcctctggaaacccaaccttccagccctcagtcctgccctcaagagaaatttgccaccaaggattggctcccaggacccaggccccgcctcaggctcctcgctagttgggccttctctctgccactccccacgagtgggtcactccacggggagccccaacgctggcaggagaggatcctacaggacagcaaggagatgccacctaaaaacaaagaaaaagggaagaaatctggggcacacaagaagaaaaagaactggggtgagtcatggtgggtggaggtgccccctgcttctccatgttctgccatgaagaccacgcagagctcctccagagagaattcagccttctgcaggacaggatggagctctcttgacctacctctttcatgtcctcacagccagatccagggagctgaggaagtggggaaatggtcacccacgctctcctttaagccccatctagctctgtgccttcctaatatatttgtcatgtgtattttgc

SEQ ID NO: 270771 - DNA, 452 bp, Homo sapiens
gtaggttctcgtcatcaggagcatgacgtacagatttggtgtgagtgcagtcctgctaacctgctgcgggatccgagtacccgctttataggagctttctccaagtacccactttataggagtgggaagcagtgtaggaagtaagtacgaaaagcacttttaaaatgctgttaaagggctagagacagaactaaccacaatcagggcagtccctgctgtagctccggcctggcctccccattcttgcctgactcaagacactaacttagttcctggttcggtgccctgttggtgctcctctgtccagtagcttagctcccacggtgggggaggaatcgaaggggctctgcagcccccaccagctgccctcgaatcccatccaggccagttccagattctaaactgaattttcttcatattgtcaaaacgggaaacaaaaaaaccctaaagca

SEQ ID NO: 270772 - DNA, 631 bp, Homo sapiens
ccagggactgcggggctctccaaggccatgacctgcacactgccctcagccacaacagagcctggggggctcgctgcctcctgtgtcacaaatcttgaggagtgcggcacaggccacttctgctcccagagggtctactgtcctttgttgtgtagaccgaaagtgactgaggcagatctgcctcgatccgagatttattttgcccaggtcgaggatgtacgtgggaaaaagaaatacaagttccagtgctatctgtgacctgtgcttttcctaagagggtttaggggaacttcagtatttaaaaaggaaagagcgagcaggtggggaagaaagaaggaaggagggtaggcaatgaggcaatgaggcagaggtcaccctcgtgtaaggctctgaccagcactcagtgaatctatgtgttaaatgtgaaaagaaaggcgtggagagaaagtcaatcatgcattcatctcgcgctcagtaaatctacattttacatcggataaagtgcacatgtgaaatcacagcttctgtttgggaacaaaagaaaggcagttaactttccctttagtatagtaagtttggggtcccaagaatctatttttctttcacagttgtcacatatactcaaaaaaaa

SEQ ID NO: 270773 - DNA, 287 bp, Homo sapiens
cagaactctgcattttgaagaagctttggaagttgaggcttgaacttggcctttaagaacaacttcaggcacgtctcagcatgcctccctctcatggaagttcccaggaagcccaccatgtacgtgtctgtacgtgtctgtagaagaggaggaaatttttttccgggagccggctgattacacaaagaacaaaggtatttctatgtttggttttgctcccttatctgtgcagctgcagcttgatttttcaggctgtttctatgtttaaaagaattctaccaagaacc

SEQ ID NO: 270774 - DNA, 444 bp, Homo sapiens
ggactcatcatcgaatggattcgaatggaatcatcgaataaaattgattgaaatcatcatcaaatggaatcgaatggtatcattgaatggaatcgaatggaatcatcatcagatggaaatgaatggaatcgtcatagaatggaatcgaatggaatcatcgaatggactcgaatggaataatcattgaacggaatcgaatggaatcatcatcggatggaaacgaatggaatcatcatcgaatggaaatgaaaggagtcatcatctaatggaattgcatggaatcatcataaaatggaatcgaatggaatcaacatcaaatggaatcaaatggaatcattgaacggaattgaatggaatcgtcatcgaatgaattgaatgcaatcatcgaatggtctcgaatggaatcatcttcaaatggaatggaatggaatcatcgcatagaat

SEQ ID NO: 270775 - DNA, 811 bp, Homo sapiens
acgttgacacttcaggaatgggatccctttattctgataattgattctaacagaagacttctactcaatgtgataatggaatgatttggagcaactctactatcaaatcagggaaagctagcctccagggtgatccagaggttctgctgtcaccttacaaacccaagacaagatttttcaccaggactgggctttggataacatatacgttccataacaatacctcgaaggaggcatgtgtttacatggcctagtgattttctctggttgcttttgtggaattcagatgctgattttatcagtgactaaccatgacatgtggggacattgtaagataattggtaagttttggaaaatctcacagtggctgggtaattcgatttcctttttgtgcaggatttggggatgagaatggcattcttttcttcttcttctaaaagctggaatcttgctatgttgccctggctggactcgaactcctgtgctcaagcagtcttcctgccttggcctctgagtagctagaactataggagcataccactgctcctggtgaaagtggccaggagttgaaataacagaaattttgttggcagagtgatttgtgctgtctctagcaggataacactgagcgagtaacttgacctctctgaatttcagtttctttatttgtgaaaagaaactaatattggccaggtgcagtggctcacacctgtagtcccagcactttgggaggccaaggcaggaggatcccttcagcccagaagttcaagattggcctgggcaacatagctagatcccatctctaaaaaaa

SEQ ID NO: 270776 - DNA, 691 bp, Homo sapiens
atgatagaatcgagctcggtacctggaacgtgttatccaaacccaagacaagatttttcaccaggactgggctttggataacatatacgttccataacaatacctcgaaggaggcatgtgtttacatggcctagtgattttctctggttgcttttgtggaattcagatgctgattttatcagtgactaaccatgacatgtggggacattgtaagataattggtaagttttggaaaatctcacagtggctgggtaattcgatttcctttttgtgcaggatttggggatgagaatggcattcttttcttcttcttctaaaagctggaatcttgctatgttgccctggctggactcgaactcctgtgctcaagcagtcttcctgccttggcctctgagtagctagaactataggagcataccactgctcctggtgaaagtggccaggagttgaaataacagaaattttgttggcagagtgatttgtgctgtctctagcaggataacactgagcgagtaacttgacctctctgaatttcagtttctttatttgtgaaaagaaactaatattggccaggtgcagtggctcacacctgtagtcccagcactttgggaggccaaggcaggaggatcccttcagcccagaagttcaagattggcctgggcaacatagctagatcccatctctaaaaaaa

SEQ ID NO: 270777 - DNA, 471 bp, Homo sapiens
ggaggctctcggagggaggcgcccggagaggccgtgggagctccacccgcatccccataccttgccctgagcatctctgctggctgagttgtttcctttagtaataagccagaagtggccgggtgcggtggctcacgcctttgggaggccaaggtggacagatcgcttgagttcaggggttcaaaatcaacctgggcaacatggtgagaccctctctctacaaaaaatacaaaaattagctgggcgtggcggctcatgcctgtagtccgagctacttgggaggctggggtgagaggatcgcttgagcccaagaggcagaggttgcagtgaaccaagattgcaccactgtgctccagtctgggtgacagaggcagacctgtctgcaaatgtaaaataaaaatagatatatataatataaaacattctgctgagagagagcatgacagaaaaaaaattcagtagtaggaaaca

SEQ ID NO: 270778 - DNA, 203 bp, Homo sapiens
ttgattctacaactacaggatcgttctctcaaaacaacttttgtaacccatccattttcacttcataaacctgtgaattgacatcctggagttactgctgcatttgttgataacgttaaataataaggccttttgacaatgtttgaagctgcttttttctgatgtctcttctaaaataaagaatttccaagttgatgacaata

SEQ ID NO: 270779 - DNA, 599 bp, Homo sapiens
agaaagctgagccttattgcacccttttctgaccaccttcctgaatcaccttaaagcatgtcacttaccttctttggactgtgccttggtcctcttatctatacagtaaaaatactaaaattataagtattgaaattgaattaataatttaactcttggattttgagactaacatcctactttttaatactgtctaaatgaacatgtttctaagcacacaagattttaatttacagtcagatatgaaaatttgtttattgctgcaaagtttgattttgatgtctgtcatcttattggtatttgttctgtcgtttgggtaaaacggatgtgtttgacactgccttactacatagattgtttatcttgaagttttgttgcatttttgtttgtttgccagaagaaaatttgtctactaacaattccagcccaattttggagtcagatacacaaatctaggtagttttttatctagtgattgcatgatttttctcttttactgtaggccttttcatatctccagtcaccaaatacttaagtgcttactatgtggagggctgtctgctaggtgttaggatgaataaaagaactgtagttttaaa

SEQ ID NO: 270780 - DNA, 1005 bp, Homo sapiens
cccgtcaggtatttatactttcttccttgcaaaatgtgttccagaaaaggaagcgtactgctaattatgaagttaataaaaagtgaaaaggtctaaaactatgctgtgttttggtcagaaaaatagacagttggatcaactaaaaagtaaaatgttaaacttcatgataggtgactatgacatgaatgacctatcatgaaaagaaaaagagacttcttatacattcagtgactgccctcattagtgctaaaaccacctaacactgaaaatggaaaggtggctaatttgtgctataagaatatacaaaggaaacacaggattcttgagaccaagtcaggagccttggtccaaaagcaacagatggtgaaggcaacagtgtgcctagtgacctaaactttactatgaatgaaggttgatttacgaattttaaaaggttccttcacctgatccagcattagtaggtcatatttccccttgagctaaagaaaggaccaaaggataataaccttgaacaggatgtcaacacacatgaaaccagcccatattataataccgtttctgcctttatatccaaaagggcacaggtctcattaccattcttcactgtttctttggttttaggatttcagattaactaatggttaatattcctgcagtaatgacagtgtaagctagagtggttttttgtggcagaattaaagagtttcagaaattaatttggtcctgtattttacagagtcattaagtatgggaaggattaactgtaataatgagtaaaagtttattgtactttaggggaaatttatgtctatggttatcatgacatagaatattcaaaaagctcttgcaaatggcaagagtggtcccaatgtcttctttcgaatacagagaagacaatatgctgaggctttgaagacatctctttccttgtcttttccaccataagatgtgagactactgaggagatcgtctttttgttgttgttaagtttcttccagactaaac

SEQ ID NO: 270781 - DNA, 490 bp, Homo sapiens
cccggccaggtgccctccaggatccgccttccccacccctcctgggaagcctggaccagcatcccttcttgggtggatggagcctcgtcctcatctccagctacatcagtcattctctgcagggcaaaatctcctccccctaccccagctgtttctgcagaagggcccctggctgtgttggcaggacttcggtgtccagggtagatctcccctccactgaggagtgaggtcccagaatcctgttgggtcccaggcctcagccctgcacagatgtgatgtggggcgatggctctctgggaaccctctacagatctatttttatatggaacttgttcactggacagaggtggcctgcaagcccccattaccctggtctgagctcaccctgggagggagggggccagtcggagggggttccttctggagatgtttttatatttcttgggttctctatgcaggataataaaaacttgtctgtgaaatggtgcct

SEQ ID NO: 270782 - DNA, 663 bp, Homo sapiens
ccgggcaggcctctgtcacacaggcacagcgtcctccccatggctcctcctcaggccagagcatgcttggggatcagagcagctctcgcagtggcttgcagcctgacaacgcggcgtgagccatgccctgcagagaagaagagcccctcagtgagggaagaggcgcccacaaaactcaggacacgcgcagaaacccgcaggaggtgggggcgctgcctaggggccgtgccgctcccacccctcaccttgcagatgacggaactgcggcccagagctgccaagtggcttgctcaaggccacccagcagggacaggaaggaagtcacttccccagggactgtgcgggagttcagtgacaattaaagaccagcgctaaagtttgcccaggacgagaacctcattaagggaaacagctccgggactgtcgtgttcattcggaaggcagccagtttacaactgagtttctaaaaatgtacgttttcttacatgaaaacacatccgaatgggattttgtagaaagcatctttcatcaaggcacagcccgaggggaggtccccgcttcatccctggctgtgctgtcctcagccaagggcagcagggatcagagtggtctctggggcacagcactggctgctttcaaagagtgttttgttcagttcatgaa

SEQ ID NO: 270783 - DNA, 661 bp, Homo sapiens
  misc_feature (62)..(62): n is a, c, g, or t
agaggttaccgtgcagaatcacactcaacagcaaataatgggagacaatttcacatggactntggaaatatttttttcctttgcattcatctctcaaactcctggactcaagcgatccttctacctggtcctcccaaagtgctggttccactggcgtgaaccactgtgcccgtcccggtattttcttcatatttgtgaataaatacagttttatttatcttttttcagtctggactgccttcttttttattattggactggctagaacttccctacaatgctgactagaaatggcaagagcaaacatgcttgccttattcctcatcatataggaaaagcatgcagtatttcaccattaagtatgatgttagctgtaagcttcttagagatgcactttattagactgaggaaggtgccttctattcctaatttattgagagttttttttttatcatgaatgggtattggattttattgaatatcttttttgtatctaatgagataatcacataaattttgtcctttctcctattaatattgtctattatattaattgattttcaaatgttaaatcaaccttgcattccacagatacatcccacttggtcatggtatataattctttttctctgttcctgaagttgtttcgctaatcttttgt

SEQ ID NO: 270784 - DNA, 822 bp, Homo sapiens
cgcaatcttggctcactgcaacctccgcctcccaggttcaagcgattctcctgcctcagcctcctgagtagctgggactacaggcaggggttgcagtgagccacgattgcgccactgtacggccagcctggcgaaagagtgagactccatctcaaaaaaaataaataaaagtaaaatgaatagtaatgtattatttaaggatacataaaggcgataaagtttttaagaagaaatgataaatataaaattaaacagaatggtttcatctgggtaggaggccagagaaggaaggaattcacacggcaaatacagtgatataggtaatgctctagttcagcagtgtccagtagatctttttgcaacaatggaaatgttccatatcggtgctgttcagtatagtagctaccagctttctgtggctattgagcactccagagagtggcttgtgtgactgaggaactgaatttttaattctctttaagtttaagcgggcacatatggctagtaactcatattggatagtgcaattctagttctagtggcaaatagacctatgtttattgttaggcatgaaaatttacacgtatgttaaaatagtcttaggtatatctaaaatgcagcataatcttaaaaagccatttaaaacaaaaagtaagcttcagaactcactttggtaactatagttctgctgcttccgtaggatctcagcatgacccagttagtccccaggccagcacagcaggtgataattaacccttctttacatttagcctcagaaaataccaggcatcagaacaaggatccctgaggagtaagagaaaa

SEQ ID NO: 270785 - DNA, 454 bp, Homo sapiens
agcaggatatatgtggccttgaggataacctgcactgtcctagcctaaacacaattcttacttactgccttatgtttttgtattttcttggtagactgggtaatttttgttttaaaggacaggaaactgatattttaaagaccaatctgttctacctagcattttcactagtttttctgccaggtatgttgaatgcacaaattctgtcacacatgttcattcgctgctacataatttggttcttctggaatatttatatagctcttggagtacagctatgaaaattaacaactgttaaaggaaacacttttttttttcgtaattttttccttgaagaaccaaagtattttttcagctgtttgttgaatagggttaagtctgcttggattagctgtgcctttcattactttgttacagaaatgcagggacttgtactaagacaatccatcgttta

SEQ ID NO: 270786 - DNA, 368 bp, Homo sapiens
cacatatgtctcttcattccaagtttccaatttgcaaaggcaggtgtagtatggtacctatatatttatttgtacagtcacaaaaataaaatacagagtcatatatacatactcatatattaagcacttactgtatgccacatgatatattaagacctcatatttatatctcatttctcctttataaaagttccatgaggtaaattttaatcatatccttttacagatgaagaaactgagactgactgggcatggtggcttatgcctgtaatgccaccactttgggaggccaaggtaggaggatcacttgagctcagcaatttgagaccagcctgcacaacatagcaagaccccatctctactaaaaa

SEQ ID NO: 270787 - DNA, 325 bp, Homo sapiens
cacatccatagattcaatcaatggcagatcaaaaatattcagaaaaaaataattgctgtgtattgaacatgtataggtgttttccttgtcattatcccctaacaatataacaactatttccatagcatttacattgtattagctattataagtaatctagagatgacttaaagtatacaggaatgaacgggtacaatgtacattattccaacgataaatacactcacagcctcgactttgaccactatgcaatacatccatgtaacaaaattacacttgtaccccacgaatgtatacaaataataaaaaaaattatatggtaaga

SEQ ID NO: 270788 - DNA, 1587 bp, Homo sapiens
agtcacaaaccctatgggtggagagattataccttcctatctggcctggacagtccagattatgcctctagtctcatcataagtgttaataatgctcccatctttctcaaagtatcccagtttggacaatcaattatatggtcaccctatctctagtgaacctagaagtcttgggtgatgtataagcccagataacccagaatatgtagtgaaatgatgtctgaagccttcagttaaagggatagaggatttagaactgcactgtccaatatgataaccactggctacttgaggctactgaggctatttaaatttgaattaattaaaatgaaatacattttaaaatttagtggatcagtcgcaccattcatatttcaactgttcgatagccacaggtggccagtggctacttcattagacaaagaaacgaaagatttcccatgtcacagaaaattttattgaacattactggtctagaagtcaccttgaaatttttcacatgttgagtatatccataaaagaccctaaagtaaaggtgggacaattcagtccacgaattaatctgacttgcaacaagtatggaaaatcttatctagtgagagcagattaggcttcctaaaagtcatacttaacccagtttatgtcatttcccaagaccttctgaagctttctgcttttgctttacaacctataaaaaggattgtgagctgcaagaaagaaaatgaaataggtttattctgctagctaagcacttcagcaacagcttaagatttactttgttattcttgaaacttgactgatttttgtgaagtctttgcagaattcccttgcttttcagaattctttcttggttcttatttttaatggaactttactatttacatgtctatctttttgtggattcttgacattttctgcttgctgcattgtggtacctgagggggatgtttttctcctccatatcctgattctgcctagtggtttttcatcacttctaaattccatttcaaattaacagattgtgtcgcttgaacccaggaggcagatgctgcggtgagccaagattgtgccactgcacttcaccctgggcaacagaacaagactctgtctcaaaaataaaaataaaaataaagagaatacaattaaattaacagattctgtaaaaacctaatagatacactcaatagcttaataacctaattgaaaatattttactcatggtgtacttaatttctaaagatacataatttaaaaaccaactaatacaattagcagctctaaaaagaagtttgcaggtataagtcctaaatcttatgcagaagggttcttttcctaaggtgtttaattatgttcgtaagttcaacatcagttgccggagggtttttgccagaacatgcccacctcttgcagctcccctgaagcagtatgtatatgtatattacagattgcaggtgtgaaacatctattattcatctcaaaatagtaactttgggcatttttcttgttattttttaattgttagaatatttaatacgaatatttaaatatgccttttgtatttcagtaactcttgcaatagtagttttt

SEQ ID NO: 270789 - DNA, 467 bp, Homo sapiens
aatacaactatgcacctccactatcttctggcatctaatatgaggatgctttttgagaggcttttcttcctgaaagattgcaaatgcttcaaaaactgaacaagttgataaattataccgggacgagctcacccaccactgaagtgcaaccatctttggggtagctccctacagctgtttaccaccatgctgtggtgcctaggagcagtctgtcataaagaaaagaagaatgcacttggaatataagcaacaggcaatttgcagaagagaagatataattatctagattggaatatgaccaggacaaccataccattcccacaaaccaccaagaaggcaaaaagtaagcaagagaggtttgggtatctggtatctgttaagagaggtttggatatctgataattgtttgaatcacaatctaatgtttttatgctaccaaaaaagaatgaaatttagaaacctttttg

SEQ ID NO: 270790 - DNA, 495 bp, Homo sapiens
gcgagactctgtctcaggaaaaaaaaaaaaaagaaagaattaccccagaatctcccccttcatgtcttcttctagccattaacctccaaagagtaatcactattctgacgtctgtcaccatacattagtttttcctgtttttgtacttgctataaatggaatccaactgtgtatcctcttcggtgtctagcttcttttttgtaagtcctttcattgtggtaaaataaacatagctaggcacagtggcatgcacctgtagtcccagctactctgaaggctgactcagcagtgtcacttgagcccaggagttaaaggccagcctgggcaacacagggagacctctatctctaaagataaatatatacatatacgtaacataaaacttaaaaccattttaactatttttaagtttgcaattcagtggcattaagtacattcacaaagccgggcacagtggctcatacttgtaatcccagcactttgggaggctgaggc

SEQ ID NO: 270791 - DNA, 496 bp, Homo sapiens
gaaaggaatagtaacagtcagtctgtgcccccataccttaacatatgctattccatctgactggaatccctttcctccatctttcaaatcctacttaagtctctgcaaatcttctgacccttttatcctacagatacaatcattctccatgctgtagtacttccacaaagcgtacatacttctattacggtatatgaaatggcaagaggcagtacaaatgaacgtgaaatccggcaccaaactgagtttgacactcagctctactgtgtgaccatgagcaagttatttaacctcatgttgccttaatttctttataaaatggtgatagtaataatacctaatagagttgtcataaaggtgaaatgattggctgggcacggtagctcacacctgtaatcccagcactttgggaggccaaggtggggagatctcttgaggtcaggagtttgagaccaacctgcccaacatggcaaaaccccgtctctactaaaagtac

SEQ ID NO: 270792 - DNA, 469 bp, Homo sapiens
gtccggcgtggtgacctctgcttctgcgcatccgaagggggatggactgggccgcgccccgcgcaggctgtactggttgcaaagatttcgtttcaggtttgtagcccaagtggaaagtggagtgaacaggtgttccacccagccaagtggtaacgaaaggcagcccagaggaagatacattcccgcattcatgtatactgtagcaagattaagcatattccctgtatgaagatataggtttacaaaacaggtgttgctccctaataccatagaattcttttaagtaaccaaaagcttcgttatgtttcaaatgtttgaaaaacttaactgtaagccgttgaaggcatgaagagtgtctgcgtggtccttccatgtagccccagagcttaatatccagtaaatagcgggggctgaatgtatgtcttttgaatcaatgaataaaaagtcatctacacattttgttaggcac

SEQ ID NO: 270793 - DNA, 337 bp, Homo sapiens
ggaatgaagagaccataaatggaagaatgcattcatctataattgtgtggagacttgaggaatgatgaagcttcgaggtgggagcagtcacaggtgtctctcggggggctgtcatccaggtgcgccagcaactttcctggctaggagaactccctttgtccctcaagaaagccctggcctctggactcaggacaagggtccacctgcctaagacccagcggagcttctcaggttcctgtctcctgtctcctccctcttcccctctctcctatctgcagtttctgctcggggaaatacaataacctaatatttaaataaaattctctcagatgccaag

SEQ ID NO: 270794 - DNA, 611 bp, Homo sapiens
ggaattaagactcttccatcattacctggaattattttttctgctttccctcattcctgtgaaaactctgaacaacactttttcataaaccatttgatatggtttggctgtgcctccacccaaatctcatcttgaattgtggttcccataatccccacgtgtcttgggaggtaattagattatgggggtgttccctcatgctgttctcatgatagtaagtgagttctcacaagatctgatggttttataaggggcttttccccactttgcctgcatttttctctcctgccaccttgtgaagaaagacgtgtttgcttccccttctgctatgactgtaagtttcttgaggccttcccagccatgcagaactgtgagtcaattaaacctatttcctttataaattacccagtctcgggtattaataacaatgtgagaagggactaatatgccattactataatggatgtttattcttcaagacagagttgtataaactccagggataaataaaataataaatacgcaaaagaaagaaatgaacactctgaagcaagagcctagacctattaaatttttaccaatggatcatttcagtaacatgaaaaataaaa

SEQ ID NO: 270795 - DNA, 577 bp, Homo sapiens
ggtttttttctctagcagctaaacaagcactggcctcaagataagcaatattacgacaattacagctcatcacagttcacagatgttgactgcctgagccgctgttccaccagccatagctacagctttgattgggcaagaggctgattttggtagcgttctcctgataagttggccaccgaccatggaccgactctggtcagtttacagagattgtgcattcatgcacctttgtgtcctgaaaagcccctttgacctatagggcctaatgggaatacacttccatattaaatctccaccccaatgcaaacagaggtcatttgtaatatacatgtttgttcaatatacatgtgtcagggccaccttcatgaatactcacagctctttctcttcctgtaaactgatgaatgtttatgttcagccaaccctttcagcataaagctcctaccccagcctctccttctttgaaatacctgtctctggtcttggctggaggctgtgcttctgagcccgtgggaaggccaccttgcagttgtaatcctttacaagaaataaagtcaccttctccttttccaaa

SEQ ID NO: 270796 - DNA, 706 bp, Homo sapiens
aggtatgaggtagatgacattgatgaagaaggcaaagcgtgagtgtccaggccagggcagggcatggagcctgggggcagcctaccagctgggaaggagcatccccacccggccacaggttgacacaagcccctctaccaccaggagacacaccgtgagcttgcgccggatcatcccgctgacccggtggaaggccaaccccgagacagaccccgaggccttgttagtcaaggagaaaaccatgttctcaggatgctgtgaccttggtgacagcacggccaacacaggaagcctcggcattcacctggtcactgagctcattcaagcaaagctatctccagtagggactttcccttttgagaacatgtgcaaagggtcagcaaactgacactttgctcattttaatagtaaaaaccatacccctgggtggagatttaagatgctaatgagacatgagtcctaggagcaagcatgtatagcaaatgcgcatgtgcacccagaggaccacccagaacatgcttactagtgatgcctcttcccacccattatgaagagttgtgtgagactcccataaagggagtttttcctgcagtaatcaacaccgtcccaacctgacaagcagtcccttctgaactcgctcaaggtgtattgtctattctgcaattaactttcaatatactgttttcttttgcaataagttattcta

SEQ ID NO: 270797 - DNA, 476 bp, Homo sapiens
gccgggcgggcatcgcgccagacctgctactctggataatccactctcctggataatccactaccctggataatcggctgcccgcttttgcgcatgttagggagttgacggcctgtagcattctgatgcagcaaaatatttcgcagggtctgtcatagggatctccggtgagaggaggttcccttcgaaggcagaactggaaaccttgctgctaacttggtagggttgttgagataattacatgagatggcatatgaagggcggcttagttcaatacctggcatgtagtaggtgttcagtgggcgtagttaccggattgattcagatagtctgaacgccagtgtctcttgaaagaaataaactggccgggcgtggtgactgtaatcccagcactttgggaggccgaggtgggcgaatcacttggggtcaggagtttgagaccagcctggccagcgtggtgaaaccccgtttctact

SEQ ID NO: 270798 - DNA, 500 bp, Homo sapiens
acagactctctagtcttaccatcacaccttttcaattttaattccaagaaagaaatattttattcccctcacctctataacacagaagccttgagtatcccctgaatgtcaggggtttagagtgaaaagcaaggagaaaattataagtacataaagccctgcccagttggaacatcactatccaaaaaaggaaacagacaagggaacatgtaattataagtcaacatgataaacccaataacagaaatgtgatatatagtatagggattaacccagtaagagtataaggaccatacaagcagggattatatttgattcatatctgtatatccaatacctaacagagggtctagtatttaatagattcaacaaatcagttaaatgaatgagattaattctgccttagagataagaaacaagaaagtcttcctaaatggggtgtaatctgggttttgaaattcaaatagcttagaagaagaaaaggacaaagaaaacaagtt

SEQ ID NO: 270799 - DNA, 1001 bp, Homo sapiens
ttctgtttggatggttggcctcttggttacaagcatgtacattatggctctctccttgcctggaactggatatgagaaatgcttgaattaagatctgtgaattatcttattttcttgtcagaaggatgcagattgcccatacttcatagcagagcaacaggagggacttagggacaaaaagctcaaaggcaaggaagactgaggaagctaagttactggccatatgtttaataaatataagcttaatggcagtgaatgtattaatgtcagcgaagacaagtctatgaagttaaacaggcacagagaggctaagagtcttgccaaaggccacagaggaaggaagagactaaatctggaacaaactttctattctccatttccagaagaaaccactaaaccatgcttcctcttgtcatggaagcttaaaatatttggactgtctgtggatccagggaggaatttcagaagagccaggattagtcaatcaaattaaactcaatatcacccaaataaagttggtcagatcaaactacgtttaaataagaattaaaatgccatttgtccatcacctaatggctcaatttgctcctgccttgggtgtgcacaccctgctctggaacagaccagagctctaaagaagtgactggaagttgtgaatgtcattgttatgaagcttcaaatttgctctcctctttaggacacagacatggcattagagaagggcagaaaactgcacttggctgtgcatagagaacactagagacctcttgtgcaagagaggggactaggttgcgtagtgtaatgagagaagcatgggttttgagaccgctacaatgtctgtgtcttcttggccaacatttcagtaagagtagtaagcatatctccacaatagggttaagagaaccagtgtcttctgaaaaacacatgaaatcatcgtaaccctgctaagtctgtgctttgcaaaaattaaaactaaaactaattttcaaagactctgttat

SEQ ID NO: 270800 - DNA, 489 bp, Homo sapiens
ttctgtttggatggttggcctcttggttacaagcatgtacattatggctctctccttgcctggaactggatatgagaaatgcttgaattaagatctgtgaattatcttattttcttgtcagaaggatgcagattgcccatacttcatagcagagcaacaggagggacttagggacaaaaagctcaaaggcaaggaagactgaggaagctaagttactggccatatgtttaataaatataagcttaatggcagtgaatgtattaatgtcagcgaagacaagtctatgaagttaaacaggcacagagaggctaagagtcttgccaaaggccacagaggaaggaagagactaaatctggaacataagcatatctccacaatagggttaagagaaccagtgtcttctgaaaaacacatgaaatcatcgtaaccctgctaagtctgtgctttgcaaaaattaaaactaaaactaattttcaaagactctgttat

SEQ ID NO: 270801 - DNA, 498 bp, Homo sapiens
ttctgtttggatggttggcctcttggttacaagcatgtacattatggctctctccttgcctggaactggatatgagaaatgcttgaattaagatctgtgaattatcttattttcttgtcagaaggatgcagattgcccatacttcatagcagagcaacaggagggacttagggacaaaaagctcaaaggcaaggaagactgaggaagctaagttactggccatatgtttaataaatataagcttaatggcagtgaatgtattaatgtcagcgaagacaagtctatgaagttaaacaggcacagagaggctaagagtcttgccaaaggccacagaggaaggaagagactaaatctggaacaaactttctattctccatttccagaagaaaccactaaaccatgcttcctcttgtcatggaagcttaaaatatttggtatggtcatcttgcctttttttttctttccagtgactgtataaaggctttcgagatggtagtg

SEQ ID NO: 270802 - DNA, 494 bp, Homo sapiens
agctctaaagaaagagtagctctttgatggggcaatgtgtgtgaaaatgtgtatagagaagcaagaaggcctaaccttttaagtagtaacaatatgtccagacccagtgataggatccatgtgggccagaatcagtaaatccatatgggtgcagcattaggtctttgaggaatgtagtggagatcaaggttagaaagagacaccaaagccaagcgcaggggctcacgcctgtaatcccagcactttgggaggccgaggcaggcggatcacctgatgtcaggagtttgagatcagcctgaccaacatggagaaaccccatctctactaaaaatacaaaattagccaggcgtggtggcacatgcctctaatcccagatactcaggaggcagaggcaggaagatcgcttgaacccgggaggtgggggttgtggtgagggtgagctgagactgcaccattgcactccagcctgggcaacaagagcgaaattccatctc

SEQ ID NO: 270803 - DNA, 407 bp, Homo sapiens
taagagctaaaatagagtaattgttggtttctatagtagtacataagagaggtcctcaacccagatttggcatgggaggaggctggggttgctggaagtttatttaggggaacagctaagctaaccctttcatgatgagtagcaattagccaggtgaaaggaaagcgaagtacttgcaaatagatgagggcatacccggcaaaggtatcaatatgttcaaagagatgggcatctgagagagtgtgctatattcaagcactgggactaaaaaatggtctagagctagagagtataccagtccttggtgggagagatgaggaggtatataggtagaaagcagggtaagcagaaaggggtttgtgaagggcatctctcgctgggaaaccattaaaaggttttacacaaga

SEQ ID NO: 270804 - DNA, 452 bp, Homo sapiens
cccgtgatgacaaccaggcaaccactgatgcctcttggcctagctgcaaggcactctctttgcagagctccatgcaggagatcaataaaaagctgtttgatgggtccaactactccatctctttggatgaagggcaggtataccatgccaccgagcatatctagcactgggcttgggtgggagtgggcacagagaggtctttgcagacagggatcagaggagacaaaagtgggccgaggacaaagacctgaatatgtagacaccctgggatctgtcctagggcttttccactagggtaactcaccattctttcccaaaggagtctggctttcatgagtcctaaatggcaaatggttaggcgcaaatccctgttcacatacttatagaaatatcagagaagacatttttctgttgtcgacgcggccgcgaatttagtagtagtaggcggccgc

SEQ ID NO: 270805 - DNA, 515 bp, Homo sapiens
ctaagctgatgaagatgaggatgacatggcccacaccccatatggcatttgtgggatgatgcaggaaaacatgagttggatggtagaaatgtcagaagatttgcagctggggaaacgaccatatcttaaaagcccagtctgcacaaagggaggccccaaataagtgaccacaaggctttgtccttagggtgttccctctaatgttttaagagcaagttggatggccaggagtggtggctcatgcctgtaatcccagcactttgggaggctgaggcgggcagatcacttgagcccaggagttcaggaccagcctgggcatgcaacatggagaaaccccgtctctactaaaaatacaaacattagcaggctaaggtggtgcacacctgtagtcccagctacttgggaggctgaggtaagaggatgacctaagcctgggatgcagaggttgcagtgagctgagatggcaccactgcactcgagcctgggccacagagtgagactctctgtctcaaaaa

SEQ ID NO: 270806 - DNA, 582 bp, Homo sapiens
acttccgaggggtggaaaaagaggcggctccaggtgcgtctgcaaagcctcactacacactactgggacaggctgggcaggtcactggtctctgcctcaatttccttgtgtggaaaatatgaattgccccaccatttcccaatttacaggactggactgccacgaggagaaagaaaaaagtgtatccaccagccaaggaagaaaaacatatgcgactggggaaagatggaagcttctcatccttaatccccaacccagtattgtgccttcatttccttgtctgtgaaagagggtgtgggagcaggcacggtggttcatgcctgtaatcacaacactctgggaggccaaggcaggagaacaacttgaggccaagagtttgagatcagcctggacaacacagtgagacctcatctctacaaaagtaaaaaactagccagacatagtggtgtgttcctatggtcctagctacttgagaggctcaggtgggacgattgctccaacccaggaggtcgaggctgcagtgagctgtgatcactccactgcactccagcagagcaacagagcaagaccctatctctcaaa

SEQ ID NO: 270807 - DNA, 442 bp, Homo sapiens
caggggaatcgcttgaacccagaaggtggaggttgcagtgagccgagatcacgccactgcactccagcctgggtgaaagagcgagactccgtgtcaacaacaacaaaaacaacaatatctccataggtatttggtagtaaaaatgaaaaaaagagagaaaaatgtctccagtggatcctccatgagattttcatgaagaacccaggagtgctggtctgtggtgggagcttcacccgggaggagtagagagggctgggagagggtgatgtctggtacctttgggcccctctccataaaaatgtagaaaaaattagattatatgactgcatagatatacagatgaatgcaattcaggctggattccttattttagattcattgttattatgttcttttattcttctgattttaaaataaattaaaattaaacatttaaaaggcc

SEQ ID NO: 270808 - DNA, 1424 bp, Homo sapiens
aatgaaattcattcagctagaacgattgtatcatgagcaattgctcgcaaatctttctgccattcaagaacagtgggaaacaaaatggaaaactgtgcaaccacatacagttacggctctaaggaattcagaaaagggatttaatggtgaagattttgaacggcttacgaaaatttgtgcaacacatcaagatcctcttttatccaaacataagatagcagctgtggagaagtcccaggaaaggaaatgctccacgcagttactagtgtctgaagatccaaaggaaggaggagctaccaccaaagagtcagagagtaaaacttgtctcggcacagagtcaagtaaagaaagccaacatacagtggagcccctggggagcagtccctgctgtcatcagatggacgtgcaaacagattccccaagcctttcggtaactgcaggaaaggaccacatggaggagctgctctgcagcgctgaagccacgttagcgctccacacccagtcctccgagacagcagggagcccgtctgggccagactcttctgaggatgcttgtgaggatgacagtcgcttgcagctggctcaaacagaggcctgccaggatgtggccagaatagagggcattgctgaagaccctaaggtgtttctttccagcaagtcaaagacagagccgttgatttcaccaggctgtgaccgtatacctcctgcattgatttctgagggtaaatattcacaggctcagaggaaagaactccgtttgccacttcgggatgcttctgaggcgttgcccacagaccaacttgagaacaatgaattaaatgagctgcagcagcctgatcttacagacagtgatggaaaatcaccacaggcgcaggctgactcagacggttctgagaatgtgctctgtggaaataatcaaatatctgacttaggcatactgcttccagaggtgtgtatggccccagaggaaaagggagataaagacgaccaactcaacaaagaaacagaagactatttgaacagccttttagaaggatgtttaaaagatactgaagattccctttcctatgaagataaccaagacgacgactccgatctccttcaagatctctctcctgaagaagcatcctatagtctccaggagaatctgccttctgatgagagctgtctttctcttgatgatcttgccaaaaggatagagattgcagaggttgttcctactgaaggattggtctccatattaaagaagaggaatgatactgtaggagatcatcctgcccaaatgcaacacaaaccatctaagcgaagagtgagattccaagaaatagacgatagcttggatcaagaatcacttggatttggagagctgcgcactttaaatgaatgcagttatgtacataagtcatacctcaataaagttgtta

SEQ ID NO: 270809 - DNA, 1407 bp, Homo sapiens
aatgaaattcattcagctagaacgattgtatcatgagcaattgctcgcaaatctttctgccattcaagaacagtgggaaacaaaatggaaaactgtgcaaccacatacagttacggctctaaggaattcagaaaagggatttaatggtgaagattttgaacggcttacgaaaatttgtgcaacacatcaagatcctcttttatccaaacataagatagcagctgtggagaagtcccaggaaaggaaatgctccacgcagttactagtgtctgaagatccaaaggaaggaggagctaccaccaaagagtcagagagtaaaacttgtctcggcacagagtcaagtaaagaaagccaacatacagtggagcccctggggagcagtccctgctgtcatcagatggacgtgcaaacagattccccaagcctttcggtaactgcaggaaaggaccacatggaggagctgctctgcagcgctgaagccacgttagcgctccacacccagtcctccgagacagcagggagcccgtctgggccagactcttctgaggatgcttgtgaggatgacagtcgcttgcagctggctcaaacagaggcctgccaggatgtggccagaatagagggcattgctgaagaccctaaggtgtttctttccagcaagtcaaagacagagccgttgatttcaccaggctgtgaccgtatacctcctgcattgatttctgagggtaaatattcacaggctcagaggaaagaactccgtttgccacttcgggatgcttctgaggcgttgcccacagaccaacttgagaacaatgaattaaatgagctgcagcagcctgatcttacagacagtgatggaaaatcaccacaggcgcaggctgactcagacggttctgagaatgtgctctgtggaaataatcaaatatctgacttaggcatactgcttccagaggtgtgtatggccccagaggaaaagggagataaagacgaccaactcaacaaagaaacagaagactatttgaacagccttttagaaggatgtttaaaagatactgaagattccctttcctatgaagataaccaagacgacgactccgatctccttcaagatctctctcctgaagaagcatcctatagtctccaggagaatctgccttctgatgagagctgtctttctcttgatgatcttgccaaaaggatagagattgcagaggtaaatcagagatgaagtacaattaaaagtaaaatggcatttaaaaaacatatatatgtattaaatattgccttgtttttgtaagttttcccttgtctcaaacatgagggaaaattctagttaacgtaagcttttaattattagtagtttttacatttgtatgtattgaataaaatgacttttaatcattgcaatgt

SEQ ID NO: 270810 - DNA, 379 bp, Homo sapiens
taatttaaagattaaatctaattttggaattgtttgcttaatataaaaatgtaaacattataaaacatggatagaccaaatgttctaaattattcttatgctaaaactaaaccacccatcacctgatttgcagaataatttggtagaaacattaataagatttatacatgatgcataatactattaaatttcttcatttcttaaaggagtctttcaactaagaaattctgagttttgtgtaagatctatgatgacatcaactagacaagctgaagcattttctgaacttctatctttttctccgtggtcttcccatgggaaatgtttcattgtatcctctggctaaaaacagaaatcaaactctactacaatgaatacc

SEQ ID NO: 270811 - DNA, 488 bp, Homo sapiens
ttagctgtatgaaattgattgggtaatgtaagctctttagacctcatttctccgtctcttaaagagtggggagaggaagcaggagactgttagacgagttgatcttttaatatctcttccactactgacagtctatgatcatataggccagagacggcaaactcagatgcctaaattagggactaagaaagtttcataagtgaggaaatggactgaatgtgacaaaagcaaggagtgatagagattggaatgttagagttgattgagctgtcccatctaaaactccagccaattcttgcaaaaataaggactcagtgttgcctgatttttcaggagaaacaggaaaatcatatttttgataatattatacaaaacaaaacacttctactagctagatacaatttgtgggtcactaattttcaacctctgctataggtgaaaggacctcaacaagagggataattgcttgaattaaagaattaaatatg

SEQ ID NO: 270812 - DNA, 265 bp, Homo sapiens
gaaagaccagcctggacaacatggcaaaaccccatctctacaaaaaaattacctagagactaggcacggtggcccatgcctgtagtcccaaagtgctgggattacaggcgtgagccacccgcacccagtcccagccttctttctgattcactcttgttttgtagttgtggacatttaagaagactttttatttttttatttgtatttttttttttattcaaagggcttgtgctcaaataaagtgagagtaggtagagagaaaggc

SEQ ID NO: 270813 - DNA, 403 bp, Homo sapiens
aaatgtcgcagccaagaatacagaattggaagatgtcccaacacctatgcatgctgtttgagaaaatgggatgagagcttactgaatcgtacaaaaccctgaaacgcagtagtgctggtccctagagtcgctggaagtaggacctcagtagctttccttcctgcggcctagcagcaaggacatccccattgcaaccacgggttcagttatcaaagaaggtttgctgagcttccactcaatgcaaagccaatacaggagattgaagaagaatacaggctggaaagccgcctctggttgtgataatggagaataacaatgggagttaagcatgagtttcaacactttataagttgaacaaaaaatatgtctacctaatcagctataaacctaagaaaaacatcat

SEQ ID NO: 270814 - DNA, 362 bp, Homo sapiens
cttgttaaatgctatacattgatcttttaaatttcatagggaggtaactgactaatttgaagttctcataaatgaatcaatagggttgctacattatgaaagaattttactaagtttcttctataatgcagactgaaatataagaccattttaatttatcaccaccatacagtaaaaattagcttatgatatgtaggttcctccaggattctgaacaacttgccacatagcagatgctcagtaaggcatattaataaacctacactttatgaacatactttgtaatgaaatttttataaatgctgtattttatttacaatgagaaaccttattagaataaaaatgattcataaatcttaatc

SEQ ID NO: 270815 - DNA, 498 bp, Homo sapiens
agttaatgcaagtcaaggacttcttagcatcatattcgatgagtagtaaacacataaatgctagctattattgtttgtagtctcaggtcttatgattttagttttaggttttttttgttttgctttagtgttcattaaagagaagaatgggaaaagcacttgctaactttttcattctttttatatgttgatttttactttttcctttataaaggaagtcaagtatgagtgaaaactgataatataacttgtttttgactgtctatatattttttgtggaaaaatagatttgcttctaccttaaattctgttatgttgtcagcatttgccacttaattaattagatcaatatgaaatttttacattaaagaattattagaagaattataagtgaaatgaaagattgaatgtattctcaaatgtgtcactcttaattccagataaaaatgaggaaaacagtattgctgtattaaaaataaaaattatattttaaatata

SEQ ID NO: 270816 - DNA, 425 bp, Homo sapiens
cagccttcggtgaccacaaatatttacattcaaactcaataccacatacttgttacctgcttcctgtctggttgatgaaatgccaaggtgaaagggatggccaattggatcagagcgcaagtgccactccagtcgtttggcagtgtacccaatattggtcccccacaataccaccacacatccactcagggatggatagggccgactgactgaaaaaagtttgaaaaagggatagagaaggagaggtccttgtctccaacatagagcataatctatctcctcttgagaaactggacttttatcattgacatattggatcaggagttggcatatccagtccttgttcaacccaaactttggccaaaagaccaaaggtctgaggatgggttccttagtccaaataaaacagcaatactttatcattt

SEQ ID NO: 270817 - DNA, 152 bp, Homo sapiens
tttaaaaagtcagtacaaaacagttttgtgagagagtgtgtgtgtgttgtgtgtgtctgtgttttagaataaaaaagaaagtaaagatttgattattactgatacatttttctgatggttgggaaaaatacatttaaaaacagcattatcag

SEQ ID NO: 270818 - DNA, 534 bp, Homo sapiens
gccacgtgctgggggagtgcccccttgctgccatactcctcattttatcagggcaggacttcgtttgatcaaagagtctcccatctaaagaaatatttggaaaccaggagcccatttcctttattttattcaggacataggctcagcaaggtctctttttaaatgcagccaagatccacaacaatccaggactgcattctgccttcaggttttggggtgctctggacacagaattcctctcctagtaaatgaggggaacggaaggagtgagggcctgggaggccaagggaggaggttcaccagggaggagtcaggcctgtttctcctcatttcttctcttcctcattcctagcttcttccacacgtctgtgaggacagatctttctaaaacagcacatctcgaggccaggcatggtggctcatgcctgtaatcccaccactttgggaggccaaggtgggcggatcacctgaggtcaggagtttgagaccagcctgacaaacatggtgaaaccctgtctctactaaaaatacaaa

SEQ ID NO: 270819 - DNA, 526 bp, Homo sapiens
tgtttacctatgaatatgagagattgtattatgtatgttttttcttgtaatgtgcttgtgagattgtttaggctggcttcacacaatgagcttgaaaataatactcctgtctttgcaccaaatgggtcagatttgtttattgtattcttgaaatcatctttatcctgttacaatttaatcaacttgcataatcaattactgagagacatgtgttaaacttttccactgtggttatagatagatatggttgtgtcaaattttccttttatttttatcagtttttgccttgtatatttattaagatatattttgaggctaaatttttctaataaatcttttatcattataaaatgcttttctttattttaataatttttttttgcctgaaacctatgttatcttataatgtaaagcaatactagctatactttggcatgtataatatgtcttttttaattcttttactttcagtgtttatgaatcctcctatttaagggtatgtcttttaaaagcaacatgtaaattt

SEQ ID NO: 270820 - DNA, 422 bp, Homo sapiens
tgttaagccactgcaccccagccaaggaggacaaagcaagaccttgtctcaaaacaaaacaaaacactatctccaaaaacatcagcctgtatacatcatttacagctttttgtatgtcagtcagtcatactgtcaacaaagcgatttaaataatagagggccagcacagtggcttacgcctgtaatcccagcactttgggaggccgaggtgggtggatcacgaggtcaggagattgagaccacggtgaaaccccatctctactaaaaatacaaataattagctgggcacggtggcaggcgcctatagtcccagctactccagaggctgaggcaggagaatggtgtgaacctgggaggccgagcttgcagtgagccgagactgtgccactgcactccagcctgggcgacagagcgagactcca

SEQ ID NO: 270821 - DNA, 414 bp, Homo sapiens
aacctaccctcatgaagcttacattctagagggggtagacagttaattaacaagaacaagaagtaatatatatagtaagtcagatggtgacacatgctaggaaaccccagtagggacttcaggtaagacagagatgtgtgtgtgtgactgtgtgtgtgtgtgtgtgtgtgtgtgtgtgtgtgtgtgtatccatgcaacatccaatgatctgggatacctatttggcaacaagagaggaaaatctctttggcaatagtgatttggatgttagtagtgtaggaggaatgagaaagccatactgcaattatcaggacaggaaatgattcaagtttggatagaactttttaacaatgaaaaatgaagagaaacaaaaccactttcacatggcaataattaaatttctgagtttacgta

SEQ ID NO: 270822 - DNA, 399 bp, Homo sapiens
catatcttaattattcaatacagaagtaatgccattgttctaacataattattcatttttatcttgcaatctatttttacattcatatttacatgaaattatagacacaatatataatacagttgttttctattttttcactatgtgttcttgtgttctatcataatctttaccatattactatatagtctctataactcttgcatcatattccatcaagttgatgaaccatactcgttcattaattatggaacttttgcttttcatttttcactattacaaatactgttagatttaataactctatatgtataactttttaccttttcttattttgaattattttatatattgattttaagttttaaaaatgtatagcctcttccatgcttttgctat

SEQ ID NO: 270823 - DNA, 444 bp, Homo sapiens
aaaaatagtacatctaaaatatgcctttatattatttatacttaacagatttacttaaattacttgaagctctcaaagcaatttaagagttggaactagaagaacaggtttccatcacagactagaataaacagaactgctctctattagccattcagtgtttctccccagcagtatatgggttatatagtcctgggttcactgttgtctaaagcagtgttgccaagaactacatttaaatacttcttttggcccatcaaacatggtgctctttcagtgcaatcacagacttccaccccatctccctcagttccaatgaaccaaatagttatttggtatgaaggtctaaaaattgtatggttatgatagttcaggatgacaaattggaacaatcattaaaaaaattacataagcagagttaaagttcatttaagcaaaaaaaaa

SEQ ID NO: 270824 - DNA, 131 bp, Homo sapiens
agcaaggtccatgccatattttcagtttgaacactttgaccttggaagctaagtgtgtaagatgcaatgcctgggttcctgaatcactggttggagaagagctgccaggtgataatgaacaactatttttg

SEQ ID NO: 270825 - DNA, 387 bp, Homo sapiens
gaatgtgcagcagtgcctgctgtgctgggtgctggggcagtcctccccagagtggagaaaggacatcagttttagctggcatgatggattaacatgttgatttttatctcaatatttatgaattcattttcatggatattagaaaaagataaaagctagcatattaaatacatcctttcccagacattgttggtactaaatttccttttgcttgaaataaatttaagtagaaaaagtctgaaggaaaatattaggtcagatgcagtggcttatacctataatccaagtgctttgggaggccaaggcaggaggatcacttgaggccaagaagaccagcgtgggcaacatagtgagaccccatttctaaaaaacaaaaaaaagaaagaa

SEQ ID NO: 270826 - DNA, 347 bp, Homo sapiens
cacagaggccagaggggaaaaggactcaagctaaactcatagaaatggcaatttaaccatttttgatggcacttgacatttcttagtgagccctttcatggatatttccttcttgttgtcagcaggctagaaagccacattggcttacttggtgagatcggagtcgttaaagggaggtagatgacctggcttatgggatggtgtccccagccatggtgaagctgctccatcatagatccccctctggctgtctgttaatgttaaccagattcaggacatctcacctagacagttggacagactttgcctcaactctgtctgtaaaaggaggcactgacacattttgg

SEQ ID NO: 270827 - DNA, 309 bp, Homo sapiens
ggcttactgcaacctccgcctcccaggttcgagcaattcttttgcctcagcctcttgagtagctagaactacaggcatgtgccaccacacccagctaatttttagctaatatttagaagagacggggtttcaccatgttggccaggctggtcttgaactcctggcctcgtgatccacccgtctcagcctcccaaagtgagccaccacgccctgcccaacccagcctttgcaatttctaccttaagttatgtagtcctctgttctccactttaacagatgagcaacaccattgcttttaaactattcgat

SEQ ID NO: 270828 - DNA, 639 bp, Homo sapiens
tgagatgaaattcaggcctggccccatttaaatccagcccccacctccccctccttcccaattcggcctcctcatcctgcccaacctgcttcacaccccgactcagccagcaaacagaggtctccctttccttcctccaaaagggaaggggctcccccagggcctccgctggagtggttctgggtctccaaagtcggaagtgcaatcgtgaccaactctcagctgcaccctctgctgcctgcagcgggtgtttcacttgctcagcaggaatcctgcccctggtgacacctccaccccaggaggccagcaagcccctcagggagcaaaaccagttgctctgggagacctgggccttccccaccgcctccccctgtccacagagaggggcggacatgcggcaccaaaaaccgtgtttctgactctggcatcaaaggtcatcccttgtttcttcctcaagcgacgttcagtgagccctggctaggggccaggtactgtgctgggacaggcaccggtgccacagcagcaaggaaaacagacaaaaatccctgcccttctggatattacatcccggcagagagacagagacagcgttccagttacttaataagtaaataaaaatacagtgtgtctggtgacaag

SEQ ID NO: 270829 - DNA, 450 bp, Homo sapiens
cattgaacaaatatatactgaatctaattaaaagccttagattaaatgaaagagatagtcagaggtagtttgatatgtagtctcgcaaaagaaaaagatacttaaaaagaaacaataagaaactaccaaggaataaaaaactatgaaggaataggaaggaattgaagcactttaaatgtttccaaatatttaaaatatagcatatacaatactaaaaatgaaagcattgctaagagctatcctggtaagcacaacagaatgactatgtttcagtttgaacagcttatatgacagaatttggatagtttttgcaaattaacatttactgatgaatttgagatatgtacaatggatactttaaaggtactccgtcatgtctacagtgtgtttttatgtatacccattttatatatgcccactgaatatacccatttttgggtaatggttcac

SEQ ID NO: 270830 - DNA, 378 bp, Homo sapiens
tcaccctagaatctcctctcacagaactaattaaaggagatcagaaatttgagtggtgactcctgctgcctctcctgcgctggtgcccccaatttcctgcaaataaaaagcagataaatgggagcaaatagttatctatttgtgggccacaatttctttttcattgaagccatagagacatcccatctagcaacctgttttttatttttgcatatccagtagttgctctacaaggcacaagaaagtcaatataaataccaaaaaatccctctgaacagttcatcctttctttctgtatccctttcatctgtctatacagcttttattccatacattttctttttaaggtaaataaatttaaaaagtgaaagaaaaaat

SEQ ID NO: 270831 - DNA, 1111 bp, Homo sapiens
tctttgctttaaaaggttggaatttgtgtctgttttatgtgctgcctgggtcatagtatatgctcagtgaagcaattacacattaacccatttagcagtagaaagcaagggtatcagacaaagtctaatgacctttatcttcccagccaagtgtctgcaacagagtgagtgctcagttttgaattacagaattaataaaagcacagaggaatgagaagaaagtttaatttacagatgttcacaaactctgtcctcattagaataaatgtttttgatatattcagacctcatttagaaacaaagccatcaaatgtgattctttctaaatcagtacaaatttttccttatattcactctggcataatcttcaaactctattaaggttttagaatgacaggttctgaaaattaataccaaatgactatctcagcagtgttttcccattatacaaataccttccctcatctctgatgtcagtttcctgttgtcattttcataatggcagtaagttagaaatataaccattttgtattactacatatgaccaattttaatatttttttgccataggaaaaacatcatagttattggaaatttgttttataactggaaacagaaagccttactttatatagttgaattcagctttcaggttgagggaagtgctactggtactctttttcaagtcatggatagcattctgccattcctgcacagcagcgcaatcggcaattgagatgtagcactcacacatgctttatttcctaaataatttataacctcaggggaagagcatccctgtcctgtgccagttttcaaagggaatgcttccagttttttcccattcagtatgatattggctgtgggtttgtcatagatagctcttattattttgagatatgtcccatcaatacctaatttactgagagtttttagcatgaagtattgttgaattttgtcaaaggccttttctgcatctattgagataatcatgtggtttttgtcattggttctgtttatatgctggattacatttattgatttgcatatactgaaccagccttgcatcccagggatgaagcccttgatcatggtggataacacgtcgcga

SEQ ID NO: 270832 - DNA, 433 bp, Homo sapiens
tatcaaactacttttatcagacgcagaaagagagagaactgggaaggaacaaaggagaaaggctcaggtttaacatgtctgagataagaacctgtttccaagtgctttctaaaaaccccacaagaaacccttttgcatccttcacacatctcctttgattaggtttattactagatattctttaggactgcaataattcagatgaaatatttgaagaacacttgcgtctccactgataaactgacaactctggctctgaacctctggaaccaatgacctctgtttctaagcagcttatgtacgtctttttgctaataagtgcttctctaccctttccctcactaaattcactagtggcttgccattccatgccttccagattgtaatatccttgtttctcattctcaaataaacacattctctagtgtttaga

SEQ ID NO: 270833 - DNA, 432 bp, Homo sapiens
ccaactaaccacttcagtcaacccttgtgaggcgcatgattttacctagttggttggatgggcgtgaggccaggcatttggtagctgcttagtatggttttaactgccttgtttctgaactaccaccatggtgattccaaggcgagtccaacagaagttgagcctgtgggagtggttcacagcatatgccacagtgcttttccagatgtccaggggaatccggagaggtctctgtctacattcacttctcctctggagacaaaaccagtgtgcaaaaggagggaggaaagcaagcagaaagcctacttaattactctctgtatgcctccaaactccctgtctttggatcctcatctgtagagtgaggagtacagagttggctactttgcaagaatagagtgctgttttgcaagttacagcttttcaagtccc

SEQ ID NO: 270834 - DNA, 366 bp, Homo sapiens
gtatcttcaccagcccctgagttgctgcactgtgaactgggtatacagactgctaatgctttgttaggagttctttcaacatggaaactacttgatacatcagctttgaagcaatgcggcatacgcatgctctagaaaggtaaaatgctaaggtctgtcctgctgaagagtccagtggccacaccagtttcacattacacagaacacagcttcttcacaacctctgaccatctccatcctctgaagtggtccactggatctaatgtcccaacatgctgtgctatttgtaacatgctgagcgtctgccccacttacattctttacctcttctatatgatgcattaaaatattttgtgatccataaaa

SEQ ID NO: 270835 - DNA, 409 bp, Homo sapiens
acaaatttggagatggagttctcactgaaataatccaccctcaaatgacctagcttcagaaagtgatcatccccaccacgtaaatgatgtgtatcccaatcactgaagatttaagactgtgtgtgtaccccagtgactaaagtataggttccttcctttcacatagtaacaacccattgctaactggatgctaaacatcacccctaaatacttaatttgctcctgttatctgggcctacaaaaagatacttgaaagtcggtatacagaaaatttctggaagaactgcttaagaaagtgataacaatagttacctctggggaatgggactagatgacttgaggatgacacactatttttgtaccatcggcatttatttttataataaaaaaatacactgggctcctatca

SEQ ID NO: 270836 - DNA, 312 bp, Homo sapiens
aacctggattggttggttttatatcaaaagcccacccactggagaattgtttgctattcagtatctaggaattagctagaccctccaggatcaagatccaaaatgccagggcatccagaatatagaaaacaagaaaatacagtcaatacacagtttattgcatatcaattattccttaataataaagctgtttaaaaatacattagagagcccttttcagcaaaatcctatgatgctccaatttaaaataaagcaacttgttacaactactaactaaatcaaatagcccataactatttaggcaaactaaaa

SEQ ID NO: 270837 - DNA, 566 bp, Homo sapiens
aaacaagttagctcagactctgtccttcctgtggcatgttcttaaagttctccccaaaacatccaggctttgggtggggttgggaaagatagctggccttttagagacaaagggatttaggagggcagggagtgagtctctcccaggcacatggctggttccctgattcaggggcatccccagcatttctataccaggtttgcatcacctgggcagacaggtttctactctgggcaatggtttcttggtgagaaaggagggggatgggaaggcatctacagaagcctgacctgtttccagcaaggacccaccctcagtcagtcagtcagtcagtcagtcagtcagtcaagcagttggcccaagatttaggccacccagaatttgcacagggtgttgccctgttacccagaacaacctactgacagggagaacagatctcagatcaaacatgcacacccacacacacagcattcacactcacacacaaacatgcagtctcactcatagtcatagaatcacacacacacacacacacacgtgcacacatacataactgaccagagctt

SEQ ID NO: 270838 - DNA, 373 bp, Homo sapiens
ctggagtgagtcagccagccctgaggatggtggtgagtcagaaacagctgggattatccagaactgcctgggtctgggccactgaccttgtgagtaaatgagagagggagtgagagagagagatagaaagagagagagagagaagaagagagagagagagagaaaataagagaataagaatgtgtgtgtctcagagggccatggcaatggaatctttttcagtagtatttttctttagattattttctccctggccctggatgtttgagatgcatcagaggcacaatctgcaggttctggatttttttttttttttttttgaggtggagtctcactctgtcacccaggctggagtgcagtggcgtgatctcgg

SEQ ID NO: 270839 - DNA, 387 bp, Homo sapiens
gttaccaatattcttttctgtggtctagcttaggggttggaaaactgacccccaaggccaaatctggcccaacagctgtttttttaaataaagttgtagtaaaatgcagccacacacattcactcgcatatcatctagaaccactttggctctacaaagccagagctaagtacctgcgacaaagacctgtggcctgcaaagcctaaaatatttactatctggccctttacagaaaaggtttactaactgctgttctagattgatcatcgtttgcttaatttgaggtggtttttttgtttttctctttccattttgaaactaaggctggagatcgcatcactgcactccagcctaggtgacagagcaacactccatctcaaaaaatta

SEQ ID NO: 270840 - DNA, 385 bp, Homo sapiens
cttcatgtaacttgctggttctcctccaagggcgcagatgggaaagtggaatctttcagctacttatcaaaatctgatagactctgggggctggatgttccttacccctggtacatttcacccattttcagtgccaggcccaagcctctgacctctgggcaagtggctaggacttcagggaaagcctgcagcctcctcgcagatcagtgttctagggcagtgctccctagaactgtaatgtgcacacaaatccccagagatcttgttaaaatgtaattctgatttcttaggtcttggtgggggtgggggcaaagatctgtgttgttaataagcttcaggtgacactgaagctgctggtccaggggccacaccttgagtcacaagg

SEQ ID NO: 270841 - DNA, 476 bp, Homo sapiens
caccacggacgggcttacgggtgaaggcgaccacagctgagccagtggggctggttccaaccaggctacgcaccatgaaatttcaattcttaaattatcacatcataaaatacgctgcttttgattttttccaactatttaaaaatgtaaagaaacattcttagctcatgggatcctcctgcctcggcctcccacagtgctagggttacaggcatgagacactgtgtccggcccccacgtttctaaagcaagaggtgacaggcatgttcaggatccatggaaagaggactggtgagtgcgtgagccccacagccctcaccaggaacggacaggagcctggcacaccaaagaccatgacacgcccaccgagtgaaagagcccagagtgggctgagactgagaatggacactttgataaatgttttaaacatgttgcctctacgaagacaggtttctaaaataatttataaaaacaaa

SEQ ID NO: 270842 - DNA, 231 bp, Homo sapiens
tctcaaaaaaaaaaaattttttttcagataatctggaacggtaaaaagaagagagtaaaattacctaaataaattaccaaattcccatcatctggaggtaactattgatagcacagatttttaaaaaatgggttatcatataatgctttctattttttatcctgcttttttaaacttaatttttctacttacattgttttatgctaataaatatatatcttcatttaaata

SEQ ID NO: 270843 - DNA, 417 bp, Homo sapiens
ggtgttgccgggttttttctttaataaaaaccgtaattgagggggctcttgagcagccgcttgctcaagcccaatcccactctgaattttcttcaataaatctgtgcccacactggcattttgttcagttccttgcccaatacaccaagaacagcaggtgcagcatacaggccacatcctggctggacaactcacatttaggacactctctccggcaacaggtgacatcatcctcttagcctgtcaaaatgttggtattacaggcatgagctgccctgcctggcctataactttttttgctgaaaaatattcccttgtatgcaggtattacatttagccattcatcagctggtggacatttgaactgtttccacttttgtttactatgaataaagctgctatgaacacctgtgtaaa

SEQ ID NO: 270844 - DNA, 784 bp, Homo sapiens
ctgctattcctctggtgttatccttcaggattgttccaagtttatttttcaaaatatttacttcacattattctatataagtgattacttgtcagtattcacatgtatcttagctaaaactagagaatgccctaatttagatggtttttgaagcctgtatatttggtattgtttgacccttaggtgtttttacatctcttagcacggaagatgaagaaagctgtacattgttgtttgtttaagagtctgtacatttagaccagatttgtatctgcactgtcagtatggcaaatgagtgaaaaacgtttaatacagtattggatttctttctttttttttttttcagcttataccagggcttaaaacctcaatttatgttcatgacagtggggatttttcttgatgtccacattctttctaataaactgttggaagacttcttggctgtccttttaagtgtctggcttactgtaatttttatgtatttaccacttactggaatggagtttttatttttaattgaggaaaaatttgggattatttctctgtttgaaaaaagaggcttgctgtaatgtcataggaaacctttttaaagtggatctgtaatagaatattgtagatgcactttgcagcaattggaaaagaaagtgttgtgatttgattgaaataaaactaaatgtgttgtcctcctctaaaatatatatagcaataattagtagttatgctgaaattaataatttgaaactatgtttatgtactgaaaggatacatttataatgctgtt

SEQ ID NO: 270845 - DNA, 306 bp, Homo sapiens
ttttgctatatagtgactgttagccagtaaaaacagggaagattgattaatttagaagaaattgaaagaaaatatatttattaatgttgcttttaaatgcaaattatcagattgaggagaattttgagaccattgacatttttctaattatgactaaaatttaatcactatacttaataaacatactctattcaaggtcttgtaataaaattatagggaggaataaaacataattgaccccagcgacatcagcaaaaatgggtggactaggaagctgcaagcttttgtttgcctatcaaaacatta

SEQ ID NO: 270846 - DNA, 728 bp, Homo sapiens
gagccaccgagcccggccggtccttattttatacaagtgattaagccaaaaattttcttgaatttctgataccaaagagctttaggtaaataacttcacactctaatgcaatgtaattctttctttgtgctttcagatttccttacacttcctgtccagttctctcttctaaatccaatattactcactagataatttcagccacttaaataaaaatatctatttttaagtcctggttcaagggttccaaactcacataatttctcaactttttgccagaaagttgagcatttattcatacttattttcaatcctaagtgttctcccatgggcagcagcacttcttgagctgtttagtactgccacacctttttatgtctttactatgtcagcctctgatcattttcactttgaacttcctaaagatcacaatttcctatcccttcaatctgcgatccctcttcttcctttcttactagattatggtgtagtttgtactagactgactcattaagaccttgtacgcttcctgagtctgcttgttactggctttgtaatcaagggtgagtctttttacttctctaggctagattttctcatttatgaaatgaggacatttttctagatgctgtaaagccctttccagctgtaacattctatgaatctgtaattccctcgaggagctaaggaggattatgctactttaataaaaagctgctttggtgaca

SEQ ID NO: 270847 - DNA, 488 bp, Homo sapiens
ctcttctctttgtttcagtgatcatcaaataccagatgcctcaatttagactaattgaatagaattttcatgatggagtctggatatatactttttactttaaataaataaatatgtatatattttgtgcatatatgtattttaaaaagctctgttgcccttttgggttaatttacaaatatttcctcctaagaaatatgtaatctcagccaggtgccgtggctcacgcctgaatcccagcattttgggaggccaagcctggcagatcacttgaggccaggaggttaagaccatcctggccaacatggcgaaaccccacctctactaaaaatacaaaaattagccaggcatggtggcatacatccgtaatctcagctattcgggaggctgaggcacaagaatcacttgcatctgggatgtggaggttgcagtgagccaagatagtgctactgcactccagcctgggcaacagagcaagactctgtctc

SEQ ID NO: 270848 - DNA, 463 bp, Homo sapiens
cagccagtgggaggggccacaggctgccctggggtgtggagaagcaccccctagctccccatcccatgcactctggtctatttcttcctacatcccagatggactcacccgattcaagaggcccccatcacatcagcttcagccttcatcttgggagtccttaaatgcaggactcaagagtctgcatttgttcttaaggacaggagatttgctttaactcagacaatttctccttatagactcctttcttcatagtagaaagagaaggagcccccaaaggcacatcctcctagcaggtggttctggcccctgttctgccagtcatctgcatgcagcccaggcgtgccactcagccacactgattctcaagggcctcaccaggaacgtttttatctttgccctatcctccaggatgatgagaataagagaaaaataaagcaagtatcgaaatttctcctagaaa

SEQ ID NO: 270849 - DNA, 411 bp, Homo sapiens
gaggggttgaaagtttccatattgaaaatgcctaccacttgccaggaggaagagctgtcctaggctgcccatattcaaacagcttgctagtaatggtataccaaatgtgtaaaaacattaaaaggtagaattaagtccaatttcccttaaagcccttggctcccttttattctttgctagttggaaataagcattcatttgccagaagctgattcttggatctcagggattttattgttgacaaacaaaaacttacttgtttatctcagggactgggagggtggtagatgtcagggaatggaatctgcatgtgcccagaacctaatccaaacccataaagaagcaagaaaaataatagagtggtacgttgactcagtaaaaatatattttgtgggtcaaattggggtcaaa

SEQ ID NO: 270850 - DNA, 459 bp, Homo sapiens
atttcctgcctgctgcctgccctgtagataacagacattccagtcctcacaattgcatcagtcaattacttaaaataaatcacaagtatctttcaaaatagatagactagataggtaggtaggtaggtaggtaagtaggtaggtcagtcgatcccagatcttattagtctgttttttgggaagatcctgaagagatttacttccagaactaaatgtaaagagaaatgttaatagaaaaaatagagcttctacgatttaaacggtaatttcaaaatgtaaaaagtatgcatttttaaggtaccagaaatagatgaaagggagaatggacaaaaagaaatatttgaagcaataatggctgaaaactttccagaagtggtggcagacaacacagcacagatccttgaagtgcaaagaataccatgccaattaaacaccaaaataacaacgataataactaaa

SEQ ID NO: 270851 - DNA, 324 bp, Homo sapiens
tcttgggatgctcacccctggaaccttaccatcgtgccaagagcaaactgaagtagcctgtggaatggaactgagggccctggttgagctttcagctgagccagcactgtcttgccagccagtgagccatcttgaaggtggatcctcccacacccagtggagcagccccaaatgataccacatggaacagatgagctgatctcactgagtcctgcctgaggtgtagtgtgagcaaaacagatgactgttactttaagccactacattttttaatggtttgttacacaacagcagataaaatgatacagtcaccccactgcattc

SEQ ID NO: 270852 - DNA, 493 bp, Homo sapiens
atagaatccattaagcatggtggggtattggtgtgaaaggagatgtaaattatccatgatcatgcttgaaatgcaaaacctgatcatgtttggcatcaggccagctcccattaaagtaattatttttaatcatcagcacttggtgacatgaatactcatatttgttgatttactgagaaaagcactttatattgtaaataaaaaggatggaaaatatacatttggattttagaacaaatgataatgattattctcgctttctgagggtctttccttggataaagccagaaaaaagtctgtttccatgtggctcatatgtggcccccatataaatgtcaatggcggcatgtgtgagcttatttttatgtcccattttcaaatgggatagttggttctattcttaaatgaagatcggggaataggggatttctgatgatttctttcatggcaaccaaaggagacatagaaaatggctattaaaatgtatcctaac

SEQ ID NO: 270853 - DNA, 532 bp, Homo sapiens
atgttactattataacttgtggttttataataggctatgaattaatgatctcattttatcttaactcatactaccccaagaggcattatcattatcactaggttacacaagaaaatgggcctagaaatgccaaaagtatgtgcccaagatcattacacaggttccagttctaaattgacacacacttgtttaccaaaatgtttccttttataaagcattttgattgcatgatggtagtcacttctttttcttttgatatactttggtataatcatgattgtccttattgtatagaaaggaactcgtctgaagcaaagagagttcaagaaagtggccatactcagacaggttaataaatgcatccaaacttttaacttacgacactgtattttgctttttcctaccttataggaaagaaattaaaagtgtggtattgaaagatgtacaactgactttggaaaaaggattcctctctaattggtgtttgtaagtgatcgaaataaacatttttaaactatcatttgtggaatca

SEQ ID NO: 270854 - DNA, 570 bp, Homo sapiens
ccctcctttgtaacggagagaagcgcggccccctcccggccgcccccgcgctcctcccccgccccgcccgcgcgcgggaggatcacgaagggaccggggtgggagcgggcagcgtctggggacagcgtgttgggctgtggggaggttaccgaaaggaaacgggccgagtccagttgtttgagcggttttctccttccacgagcgtgtgtgaaaaagcgcggagttgggtggagggcagctgccaggactgcctcctggactgggtaattgtacattttttcatcctacatctcaagagaccaagggacctaagtaaattgatctacttgccaatgactgtaagaaagacaaagaagttgtaaaaacatccaaatgatgttaaacataaattagctcagaatagtttgcagaagataaactaccagcgtcaaagcatgcattaaaaactggaaagaaattaaaagtgtggtattgaaagatgtacaactgactttggaaaaaggattcctctctaattggtgtttgtaagtgatcgaaataaacatttttaaactatcatttgtggaatca

SEQ ID NO: 270855 - DNA, 363 bp, Homo sapiens
ccctcctttgtaacggagagaagcgcggccccctcccggccgcccccgcgctcctcccccgccccgcccgcgcgcgggaggatcacgaagggaccggggtgggagcgggcagcgtctggggacagcgtgttgggctgtggggaggttaccgaaaggaaacgggccgagtccagttgtttgagcggttttctccttccacgagcgtgtgtgaaaaagcgcggagttgggtggagggcagctgccaggactgcctcctggactgggtgcggtaaggccttagggatgcattcagatgtagggtgccttattttgggccgagaaagctgtcaagtgaaagatccaaggggaaaggtgggcctggat

SEQ ID NO: 270856 - DNA, 398 bp, Homo sapiens
ggaaaaaagaattgatatttaaagccatttctaattataattttgctataacttgaaagggtgatactttcctatcttgtgtacctgggaaatttggtggtcgatttaaacacccatactaacaatagggaaaatgtatctttccagtgattttaaggactgaagagaagacttctctgagtcaaacattcttttccatttagaagtaaattgttctatacaaaatccaaagatacttctttgctatttttatttttattttaaaagaccttaaatctaatgtattaggcaaaggaagcaagcacaaagtaacttgggaaagtgtttatagaaatgaggaatataaagctgttaagaacataaagtgggaaacactgctttatttggaaaagaaagaa

SEQ ID NO: 270857 - DNA, 423 bp, Homo sapiens
ccttacctgtactctttccgtctcattcaccacactcttgaaaaccaataatttataaaattctgttaaataaacagatgaatgttaaaagaaatgaaggtaactgaattatttgaacattcaatacaaaggctagaaagcaggaccacgaaatggaattctagttatgtgaatgctgatgctgtgtgccagcatttgaattggtagatctcttcatattaaatcttttttacaatattccatcagagaacattctacttcagttcaggttagattaagcacaccacctttgctttggctttttttggtattcttatcactttaagaaattattttattatttacctatttcttaaaacattaataattttctactacatttcatattttaatttattccttaaaaagttaagtgtttctaaa

SEQ ID NO: 270858 - DNA, 441 bp, Homo sapiens
cattccaaagtgctggggttacaggcatgaggcaccacacccagccttacaatagaatatctaaaacatttaagggatttttttctctttggataattaatgatagtttctatttatgttacaagatagtttctacttatgttacaataattattctatggatagaattctgttacaataagtatctctatggataaagctacattgatatgttgttgctggcccatgtgagagaggcatttcctaggtaatgcttgctgccactcacaatctcaaagcatgtgcttcagttgaaacaaacaaattacatatcatggatctttaaataagtcttgactgttcaaaacagtgaaggtgaaattcttagttgctaaggtctattatgtttctacttatttgtttacaatacttatttaaataaaaagagtacaagtgttttag

SEQ ID NO: 270859 - DNA, 457 bp, Homo sapiens
tatcatcataagagtcattttctttctggtgctagcagcattcttctgttaaggtaggtcccctgtgtctgtcttcttgaaagtgggagttcaaactttctctcttttctttcttctcatcatgactagagtatacctgagcagatatttgtgtttgtacattctagttcagtgatattcatgttttaatcattggaaagctttaaagaaatatcagtgcatgtatcatttttttaaaagccccccacatgattctaatatatagccaaggttgacactgttcaagagcagtgtttatcaaactttaatgtgaaaatgaatcatctggggatctcgttaaaagatggtttctgctttcagtagatccaggatagagcctaaaattctgcattttcaacatgcagaacactttgagcagcaaattccagaacaatggctctcaaactggtatacaaaa

SEQ ID NO: 270860 - DNA, 438 bp, Homo sapiens
aaattgtaatatcctcccacccttgatatctgaaaatttcctgattttgatactttcactgtggttttgtaagacagtgcccttagaaaaagtaccctgtagtatttagggttaagagaggcaatttactttcaaatggttcagaaaagaatacagatataggccgggcgtggtggctcacacctgtaatcccagcactttgggacaccgaggtgggcggatcacaaggtcaagagatggagaccatcctggccaacatggtgaaactctgtctccaccaaaaatacaaaaattagctggacgtggtgactcatgcctgtagtcacagctactcgggagattgagtcaggaggatcacttgaatccgggaggcagaggttacaatgagccgagatggtgctactgcactacagcctggcgacagagcaagacttcatc

SEQ ID NO: 270861 - DNA, 453 bp, Homo sapiens
accacaatctgaagtgttattcttgcttatgcatgtacatctgcatctatgtatttgattgttgctatgatgcctctcactagatgtgagcatcaggaaggtgtccactgctatgttctagaatagctgctagcacataataggtgttcaataaatatttgttgaataaatgaatgcatgaatatatgtaagaggttaacattcgtatatgcattataataaaattatctagtgatattccattagaaaatctcttcagatacagtgtctttaaaagagtaatttaaaagataaacctcaaatgactccaacattctgtgtaaatttctgaagttgtgggcaaatgagagtgttataaaatgaagcccattttgaaagaatttaaaggaaatttacttgaagatgtgaaaaacctttactgatcaagtgaattatcacactcattattctgtt

SEQ ID NO: 270862 - DNA, 402 bp, Homo sapiens
cagtttacctctggggaaggaggctgcttttggggctgcgggcgatggctgggcggatgatatggaggctcagggtgcacaggtgcccagacgccctgagcagattaaacactcccccggcaatctggttttttgctgtcctgagccctggactttgagccctgagcgccgtctccaagcaaatctttgctccttcccccacctcactttgttttggggcacgtgacttttttcctgggagctgtatcttggagggtgggggtgccccagggccctgcaatatcttggaaagggactagcacttccttttcccagtttctgttctcctgcttcccctcaccttctccaggccctggaccttaccctgaacaatgaccatttctcttttatttgagatggagt

SEQ ID NO: 270863 - DNA, 507 bp, Homo sapiens
attcaccattgcactccagcctgggcaacaagagcgagactctgtctcaaaaacaaacaaacaaacaaacaaaaaaagtcctataacaaatcataacctggctctgcttgttaaagagaagtcttatactctctttagttacagaaaggttcaaagggaaaagtggaggcttaaaattagattgtgctgcatatcattatgcctctattatttgttacagagtaatttaatttcttagtcactgcagcaataagaaatatattctaaactgtagttgtccctcctgcctcagtaaacagagaataatagagaaaaattaagctttctttaaaaatccaagctgtatcagtgtcttagagtagtcataaatggcactaggatttttgagtactcgacttgttggaggtgtaggaacttgagctgaatatgaattgaccgagactatattttgaaatattagatttgagtcaatatcagattttttcttgtgatttaccattttattca

SEQ ID NO: 270864 - DNA, 333 bp, Homo sapiens
tccgagagagctgcctgggctgtcaccccagtgcttgggacacagtggaacattcctgactacctactttttgtgattaaatagggacattgttaccagagggctaaaacttccagcctctcagattcgccagtggacagatgaggtagtcagagaaagcacaggaatgaggctggccttgactgggaataactaagcagcatttgcataaggcaagaaggccctttttcaaactatggctcatcacccgggatgatgctgtcgtgaacaatttagtgggttgtacataacatcttgttaatgacagaaactacttgttttgtggattgcaaa

SEQ ID NO: 270865 - DNA, 448 bp, Homo sapiens
gttgcaatggtgcgatttccgctcactgcacttccaccttccgggattcaagccattctcctgcctcagtctctggagtagctgggactacaggcatgtgccaccatgcccggctaatttttgtatttttagtagaggcagggattcaccacattggtcaggctggtctcgaactcctgacctcaagtgacctgcccgcctctgcctctgaaagtgctgggaatacaggcatgagcaaccgcacccggcctggattaattgaaaattttcttctgtagattgtaatatattactattgttatctattttattgccccaattttctcaaatttggctatggaagtttattcaaagtggatctgtttccctttcacattttccccattttgtgagcatttccttacttcctaacatgacaaaatatttcaaactaatcttgtattttccc

SEQ ID NO: 270866 - DNA, 417 bp, Homo sapiens
gacaggagaagacagatccatgatcttaaccatctcagccccagacaggggaccgcgtcatttccacccaccttccatcagcaagaaccagtcacatgagcacatctaacagcaatgaaggctgggaaatacgtgcccaggaagggaggaatcagtttctttgcagaggagagagggaacagaagagagggaaagggggaaaatagagagacggagggagagaaagagagaagaactaatgagcacagaactaagaaagcccaggcacagtggctcacatcagtaattctagggccttgggaggcaagacaagagaatcacttgaggccatgagttcaagggcagcctaggcaacatagtgggaccctatctccacaaaaataataatattattattattaaataaaataaaaggaa

SEQ ID NO: 270867 - DNA, 317 bp, Homo sapiens
aacttggacttaatccctttggcttcagtcccttttccctgctcatacttcactctgaccagtgcccctgttccagagcttctcatacctaataattcaactagaggttaagacattggtatcctgcagagtgaaaagtcagaagaaaacagggaagaaatcagttagcttagggttgtgagacaggaaacaaaatctgggcacctagccactttcaaccattctccttgttttcagcaaacttcactaccaacatcccaacaccttgtgcctccatgtcttaaacctttctgggtgtctggagggcaaataagact

SEQ ID NO: 270868 - DNA, 475 bp, Homo sapiens
aaaacttggaaaggttgtaggtctcaaatgcttggggtttaatggctttctaaggccttaggttcagtggaaatgaaattgaaatgccaatgcatagagacctacaaaggcagcaacagtagtgaacagggagaactagaaaatgactacttttggctggacactgacctgaagaaaagtgtttcttaaggaatgaatgctaatactatactagtactgtagtataactatagtactagtctcacatggttttgaggttcatatttgtattgtccacatgctctaataacatccaaaccaagaaattaccatatatgtaaatatttggacatctggtagtagcatacgcaaaatctctctggaaggacttacccttaacccaggcccaacaaaacatccacagaattaattgctaggaatttcagatattgggattattcaagtctttaaaatagttatgttcaaaatgaataaa

SEQ ID NO: 270869 - DNA, 248 bp, Homo sapiens
ctcgcccggttcccgccgcagcacctcccggctcgacagcctctccaggacactcagcccttccctgagccgggcctctggcctaggccgggagagccctgattctcgcctgtccctgggccggagctgcctagaggagtgggatgatggagccagtatggccctgagcgaggcctgctcgcagtacagccacccgtcgctggcccgcagtctgtcggtgccaccccggccacgcagctctgcctcgg

SEQ ID NO: 270870 - DNA, 238 bp, Homo sapiens
taaggttcacaacatttctaactcttcaaatcaagtattattttggaagttgccaacttaacaagcaactttgactccatgcaaactaaaaatggcatttgaaagttgaaatttcattaaatctgctgttttctgagacttcatccaactgggacatctgtttgtaacaccaaaggggtatgtaatcccaaaattatgattggattatattcaagtcattaaaaaagatgaattcatg

SEQ ID NO: 270871 - DNA, 382 bp, Homo sapiens
cttttgtcgaaaaaatatttccaaggtagttcttgtgttgtgctcaggcacgtgggtaaggaagcaatagtgagtgcttccttcttgcctgccagggaccttgtgcatatctgttggctcattgcatcttagaaactcctgaagaaactgaggcttggggaggttgcctgcccccacgcacccctcagggactaagtgacagagctgagatccccagtcggccagacacaaagccctcctactttctgaagccccaccctgctggggagggagaactggacgccatctgggaagaattaaggaggtttttagaaaaggcctctgcaggaatgagaaaaccttcattagggctttttaatcaataaagcaggaacaaaacctc

SEQ ID NO: 270872 - DNA, 300 bp, Homo sapiens
gaagtggggagaagtgaaagcaaaatacatcttggtggggaagatatagttgagtgtctttttttaaatatgtaatagcgtatagtgtctttgattataaggccagtataaccttgatagcaaaacctgacaaggatactacaacaaatgaaaattatagctcaatatctttcatgaacatactgcaaaaattctaaaaacagtagcaaatcaaaatcagtgacacataaaaaggatcatgtcttattaccaaatgaggtttattccaggaatgcaaagatggtttaacatttagaaatt

SEQ ID NO: 270873 - DNA, 389 bp, Homo sapiens
gtcctcattaagactgaggttctgcgggaaatgctgaatctgaaaacattcttcccctccatgatgcacccttaaagtagcttcatccagactgaaactcaaggctgggcatggtggctcatccctgtaatcccagcactttgggaggccgaggtgggtggatcacctgaggtcaggagttcaagaccagcctggccaacatggcaaaatcccatctctagtaaaaatacaaaaattagctgggtgtggtggtgagcacctgtagtcccagctactcgggaggctgaggcaggagaattgcttgaacctgggaggtggaggctgcagtgagccaagattatgccactgtactccaacctgggtgacagggcgagactccatctcaaaag

SEQ ID NO: 270874 - DNA, 387 bp, Homo sapiens
ctgccaggattgctagcatataccatatggaaaataaaaatcattctttgtagggggaagggatgctctcttagatattctatctgggaaagaacatgaaaatacatagaacatgaaaatagaaagtagggcatgcaatctgagctacatataataatctttgggagttcaataccacaaaaaaattctttttaaaaattgtgatttctggctttttcctcctctttcccagatccttagcttccaatgctgataaaatatctgaattgctgctgcagaagcatacctctatattctcaggcttctgaaattgtgagtgtggaaaaaggaagtgtcaaaaattgtgtttgactttctaatatccaaggtaaagaaatccccaaagat

SEQ ID NO: 270875 - DNA, 338 bp, Homo sapiens
tctgtcacccaggctggagtgcagtggcgcgatctcagctcactgcaacctccacctccagggttcaagtgattctcctgcctcagcctcctgagtagctgggattacaggcacatgccaccacgcctggctaatttttgtatttttagtagagaagggatttcgccatgttggccaggctggtctcaaactcctgacctcaagtgatccgcccacctcaacctctcaaaatgttgggattacaggcgtgagccaccgcgcctggccatgtttgtagtttttctaccatcagcttcattgcctcctgctcacagacaccagcagtagccattggtgcc

SEQ ID NO: 270876 - DNA, 396 bp, Homo sapiens
aaccatggcagtatgggcttctttgatagactcaggaaacaggtggatgcaatacttcatttagaaaagatgtaaatatatcttcccaggtgtacttaatttgtgtatgtcctggaatcataaaaccttggaaactagaaaggaaagagtctcactactgtagcctacttaattaatctgccctgtagttcatttgtttgtacaattgcatttctagtgttaagtgcatggagagcctggctactggtttcctgatgccttcagcaggcataaatcacctacagaggcagtggcaacatggtcctcgtttttcctccgaaaaagctttcctcattttctcaacattttggattccaagacaaagtggttaataaaaccagtagttctgtttcagtt

SEQ ID NO: 270877 - DNA, 358 bp, Homo sapiens
agatacaaaatcatttttatggtcatgttattggtcagaagataagtgaatgggtaaagaactttcagaagagaaaataaaacaaagcacaagaaatagtgggattagaaaaatctctacgcctacaaaggttactcttcctggaagtgagaaaagaagatacaaaagattccaacaagaagcttccagtaaatgaaacaagaacatatttcccagaaaactggataaaactgcattaccgaataccctggactagagaaagcttagatgttcctcgtggcatctctcacttgttctggaagtattatctttagttaggggtatttccttaactaataaagcctagcattgctgttgt

SEQ ID NO: 270878 - DNA, 331 bp, Homo sapiens
aataaatggaatttaaaattaaaaataccatttacattagcacagcacccctaaaaatgaaatacttagatataaaatataacaaaatatgcacaagatctatatgaggaaaactacaaaattctaatgaaagaaatcaaagaactaaataaaaaaaaaaaaaaaaaactgaaaaccactaacaatcattgacacattgtaactatgtaaatattattgatagaaaaattagatactaggattttattctcctctccacagggagtctacaggtactctaaaagactattcaagtttaagattacagagttttaaatttacaagaaaaaaa

SEQ ID NO: 270879 - DNA, 315 bp, Homo sapiens
tgcatgccaccatctacctcagatattcaaaacactacaaggaactcattcttctgcagtatattttgtgataggccctgttttgttgttgttgttcctttgctctttctataataagcagaaatacatgctagagttgcaatacatctaacaaaggtcctaagtgaatctatcaaaaaccaatgccacgtaagtgatcattctctcatgtagattccagtgaggggcctggcaacatcatccacaaattcccaagtaagcaacagtcttttatgtgacagatgttaaataaatgtttgccatactgtattgaaa

SEQ ID NO: 270880 - DNA, 437 bp, Homo sapiens
tggtaccactccatcattgaagagaaaccactaccacaccactagcaccatacagaaccttttctctgtatctttgtacaatactacaaaggggtaccagggaggagagagtggctgaccactttagtgacaaaacagcactccactgctggtgaatcccatctaattatggtccttccacccttttcaaccaccaacaactgttcgtactgttaattcctatcctgaaggtttaaccagtggttgtctagtatcttctgtctttagaacagtggttctcaaactttagtacacatcagcatcacctggagggcctttttttaaaataagacacagattgctgggctcatggtcagagttcccagttaagtaaatcaggaaatttgtatttctaacaagtttataggtgaggccaatactgctgttttgggaactat

SEQ ID NO: 270881 - DNA, 206 bp, Homo sapiens
caaccaaggccttgggaacatttgaacagaggaagaaaaataaattggaggtgtggtggcttatgcctgtaatcccagcactttgggaggccgaggtgggaggatcacccaaggtcaggagttcgagaccagcctgaccaacatggagaaaccccgtctctactaaaaatacaaaattagccagccatggtagcacatgcgtgtaa

SEQ ID NO: 270882 - DNA, 157 bp, Homo sapiens
gttgcttatttcagggtatacctaaggagacactagttacttgaaatatttgaacagttcctaaagacaagaggcactattttatgaattaggatatcagaaaaagttttaaaacacggaaattactaggagacagttttgtatatgtatcataaag

SEQ ID NO: 270883 - DNA, 433 bp, Homo sapiens
aaataaaccggcagttaaagcagggttgcgagagcgagaaaaccacaggcctgcgcgccgctgataacgcgcgggcaggcagcttttgcagaagttccgtcgctgcggcgcgctgcgcaccagagctgcgccaccgcctcccttcctgtctgggccgctcgcgtccccgccgtttctggctgttgctttctgcgtcgctctttcagttacttcgcccattgctttttctaaaggatccccttgctgctccgccatgagggatggatccaccaacaagtccccgggcggatgcgcgcagatcctggacccataggaggccaaaatttacgagctgtcatgaaaatgacaccgtttaagagaagctgaagttgctttctcttctgcagtatgtaatgctttgacctggttaaaataaataaataaataacaattt

SEQ ID NO: 270884 - DNA, 790 bp, Homo sapiens
acacagtctagatcttcaaggaatcagagtccagtggacaaataaatacaatacagtgaaagggcacaacaaaaaaaagtatgcataggaagcagaaacggcataaaggagagagttcttcataacctgggatgaagtgagatctgggttggaaaagtcctcctgtagcatgttcatttcaaaggataaacaggaatatgccgtaagtcaaggtggacacatagttatgcagatgatctcaaacagaaattatttcttcaaatgattcgatttagctttggaatggaacgcatcatatctactcttttgtagcaaaagacttgttttcagagttttactatgccagcattagcttggagaaaacttgtaaaggaggtaaggtaccttcccaaggtgcctctcttctccctacatctctagtaagtagagggggtagcatgtcctacccactcataagggcttctattccagtatttctgtgttattcctcccattcaaaaccctcccatcctatatcttatggccacatagtgttaataggagaaagaggtggccagcctgtatcacgtgcttgcactttaccaagaaactcaacatttaacccaaatgaaagatgtgaaagttgtactatctagtgggaaatacattttggagcaggtggaaaatttcaacatccccctataaaagcagctgtgtaaaagtcagcttgattggtagtttacttttaaaaatattgatattcatttgcatccctagaagtcacagaaactgtcagtggcataagccaccc

SEQ ID NO: 270885 - DNA, 362 bp, Homo sapiens
tttttttgagacagagtcttgctctgttgcccaggctggagcgcagtggcgtgatctcagctcactgcaacatctcctgggttcaagtgattctcctgcctcagcctcccaagtagctgggattacaggcatgcgccaccatgcacggctaatttttgtatttttagtagagacaggatttcgccatgttggccaggctggtctcaaactcctgaccttaagtgatccatccgcctcgtcctcccaaagtgctaggattacaggcatgagtcaccatgcccagccccttctaagagctttatgtgcagcacttcatttaatcctcatatatataatatatccccttgaagtgagtagtatca

SEQ ID NO: 270886 - DNA, 2250 bp, Homo sapiens
aattctcgcccaaggacagacctgaatctctagctgcctagaggctgactcaactgaaatcatggcgtttgacagcacttggaaggtagaccggagtgaaaactatgacaagttcatggaaaaaatgggtgttaatatagtgaaaaggaagcttgcagctcatgacaatttgaagctgacaattacacaagaaggaaataaattcacagtcaaagaatcaagcgcttttcgaaacattgaagttgtttttgaacttggtgtcacctttaattacaacctagcagacggaactgaactcagggggacctggagccttgagggaaataaacttattggaaaattcaaacggacagacaatggaaacgaactgaatactgtccgagaaattataggtgatgaactagtccagacttatgtatatgaaggagtagaagccaaaaggatctttaaaaaggattgagcattattcttggcgcacagtccaaaatacaaattggacagaagatctatattgtaccagaactatttatttcaccccatcaagtataaggttactgattgattggtccttttataaacattggtatatttccattcatgccaaagcaaaagaagtaaaagctaattaggatttaatttgttttatattctctaagatatatatttactaaaagaatttgtgacattttaaaaaacaaaaataaatattgcgtccatgttgctttatatgtagccttgccttttaaaagaaaaagtatgtgaatatgaattgacagactgttttcgtagagagagggtcttactctttcactcaggctggaatgtagtggagagatcatagctcactgtaacctcaaactcctggactcatgcaatcttcctgcctcaggcttctgagtagctaggactatgggtacattccacagtgcccagctaatttttgttttgttttctttttattttttttagagatggggtcttgctatattgcccaggctggtcttgaacccctggcctcaagcaatcctcctgcctcagcctctcaagttgttttttttctttacatttgataaactaaaagcataggctgcatatgagtctttaacatcttgaactggttgtgaataattttctggcactggttgtaagtaatatctattattataaaaataatatatgctcagccagaaaacttagaaataagaaacacaaatgtaaaataagtatttccataactcataatccagagataattgccattctgattttgatagatatcctctcagctctcttccctgggggcagatatttcccaatacataccactttgaataggatgataggaaataaatgatgtactacattaaattaaattattgtattacatttttgtacacatcagtcattcccacgcttggctgaaaatcaggatcatctgagaaacttaaacaatttctgcattcttaatctccactgttattctattatatcagaatcgctaatagaaccaagaattctagaaaatttcctggtgattctgatgcagcctgtccactaacttgtctttgagaacaatggagatatcagttatcaatgttatttttaaccacccccttcttttttgttgttgtgggttttttcacataaacacatacattgccaattttccagggctcaaaaagtttccttttattcatattttcacatgacgtaaaattttatgtgcttcacataattgtattttagcagggtacatattaggggatggagagggggtacaatttttaagcatttgcagctgcaactctatagacttttgacaaattctttttcacactgatgtagataacagcttaacatttacatagttcttactacttgccacacactgttctaagtggtatatacatatgacatatatattaaaatgtaggaagaaaaatgtttgagtacctgatgaaaatgaatagagagtatgtaatctttgaaagctgaatactgcgtgttctcacttataagtgggagctaaataatgtatacacatggacacaccagagtgtagaataatagacactggagacttggaagagttggagggttggcagggggcgatgataatttacttaatgggtacaatgtacattattcagggggtgatggttacagcccagactttaccactatgcaatatatcaatgtaacaaaactatacttgtactccttaaatttatataaaaataccttaaatct

SEQ ID NO: 270887 - DNA, 483 bp, Homo sapiens
ggaatgaagaatgcaatttgatatacatagaaatacgcagttttttccgtcctggaactagaaacataaaatctgccattccttcgtggactgtggaatggaactaacgtttgttgaacagttgctgggttccagacattagggcaggcatttaattcttagaccagtcccatacaacaggtggtatttatggattatgacagcatttaggtttaaatcagactgtcagttccctgagggtgaggatctcatgtggctggtttgctgctgtttctctagtgcttggaaaaatgccagcatctagcactggattatttatcagacagaccaaagaagcacatgcttacagcatcagtaatcaggggagcccagtgtggtggctcacgcctataatcccagtgactcggggagatcaaggcaggaggatcgtctgaggccaggagttggaggtcagtgtggagaacgtagtaagacgttgtctca

SEQ ID NO: 270888 - DNA, 439 bp, Homo sapiens
catcttctgagggttcccaaatcccccagcctccaggagcccgtgcaggccagcccccagcagggcacactttttcccagcagcccaggaggggtgtctgctgcccaccccacagggcagggcatgacctcctggaggtgctggcccagctagcaggtggtgaggttggaggccaaccaggggccgcaggccttgaccacaggcacctccctgacccctgggcctggctcaggccggagcattaccccaactctcccaccccctttcagccctcttctccaaacccaaagccagcgggcccccaggtggaggcagggcagaggcctggaggccagccactgcccagccctgtcactcctctcccatctggccatgggcggagccaccgacagccatcacccagggatgtgtgtgtgtgtgtgtgagagagaaagagaga

SEQ ID NO: 270889 - DNA, 426 bp, Homo sapiens
tgggattataggaataagccaccgtgcccagcctggacactaatattctacatgattttatactctcaaatttggattatcatcattattttgtctttgtggattatgtagtttttggatctgttccttgattgcctatccagtaataatttcttcctccacagcatcttagccacccactcttatgttttatgctatatcttactattgttcataggctctaacatctcactttaaaacgtcccactctctgaccaccacttaccacttcctcttattgacccagttcatttctatagttcccatatcaatcattgatcccacaactactactaaatcattggctctacacattttcatgcctgttagctaccgtaagtcttcatgtcctacctcaccaaacttagaatacatggttcattactg

SEQ ID NO: 270890 - DNA, 450 bp, Homo sapiens
cattggtgttttgacagggattacattgaatctgtggatcaccttgagtagtacaaaatgggtttttatttagatgtgttcagtattctttaacttgttttttcttccatctctgtaatttccttttcattagaaagaagagctatgtactccttgagggaaaaaatcctgataggaattattagtgggtagaacaattatttgctttgccctttctagcccatcatttataatctttagaacaagagacccagggtggccattagtcctagtggcacagtccttgctgatcacagaagatgatcgtgatagcatcaagacgatcacttgaggaaagtggtcagcagctggagtgggggttggttgtttttgtttgtttgtttgtttgtttggtccttttctctgggataattagcctcccagccataataaccaaggaatgtaaggttt

SEQ ID NO: 270891 - DNA, 459 bp, Homo sapiens
ttattaaagatgtataataaatgatattaaacaactgttacttgtttaaacagtcataaaagtgagttccttgaaagagttggaataatttagtagaaatgatgttttgagtacttcagataccttaaagagcaggtgaaatgcccaggtacgttattacaaacttactacactggaacctattctgtaagacccatactacaagtttcactcattttgtttattatttataactagttttgagttgtccttggctattatattattttgatacctacccagaattgacataatcttcgtggcaccagaaacaaaagaataccctttcaaacctgccatgattacagatctgggtttcggatggatcacttgtgagtcagaacatggcgcaactttgggttcttctcccatggcgagtcagaccctggccacaggcatcaggctaaactttctttgttt

SEQ ID NO: 270892 - DNA, 605 bp, Homo sapiens
tgtgtatgtagccctaaataatatagtgcttagttttacctgtttttgaataatataaaaaggatatcctactatatgtagtcttttgagacttgatatcttaatattctagaagtaaaatctacccatattgttatgtgtagctgtagaacattcatataatgactatataatattttacgtgaaatataccatgatttatccattttctttttgggacttttactactaacaacattttagtgtgtatcttctagttattttcccgaaggtatttagttttccttctatgaaacatgaatattatacgtattttttgtgacctatttctctcactgatgataccttatgaacatattcccattttggtaaatattcttccatgatataaatttaaatgaccacacagtattccattagatagttacaatataattttctaaccaccccaactgttagacacatgattgcttgtaatttttttgctgtgatgaacattatgatgcacatggtcttgtttggctcagcaactctccttttagaaatttatcctaagtaatacccaaacacatctgcacacaaatatgtacaggaacaccacgtag

SEQ ID NO: 270893 - DNA, 494 bp, Homo sapiens
cacatctccaatttccagcaatatatttgtctgccatgatttggcctggaagcttaagcaggaagaccacttggagccagacttcagagtgatctgtctctaaggaataactttcatattgcagcgttcggttttgcaattcttcctaagctactctaaattcgcagcataaatctgcagaaagacttcaccctccacatcaaacccttataaggatccatttctgctctcattttagaatatcttttctaatagctaaaggcagacagaggcaaaccaagaaatccagactttgcatcaacgggttaaatcatatgtcaaaggtgcaaccataacgtattacaagcttctcatcacataatacatcactcaagaaaaaatatttgggcagcttttctaattcatcttcctggtgttaaaggagcacatctccagtgttcgtgtcttctgtttcaattaaagcaatcatgcctactcttttaggaaactactaa

SEQ ID NO: 270894 - DNA, 517 bp, Homo sapiens
agcaaaggtggtgctaagaggaaatttcatagccctaaacgcctacattaaaaagtctgaaacagcacagactatctaaggtcaaacctcaaggaagtagagcaacaagaacaagccaaacccaaacccagcaaaagaaagcaaataactaagatcagaacagaactaaatgaaattgaagcagagcacagaggatttttaggggttggagaactgtgttaaaggcaagaaaggaaacaaagatcagggcttcagccatgtggacagatggaggcactcattcctctctcctttgttgctgttatactggacagttgtttttaattcctcaaagaactcggttgcagcctgaatgatatcaaagggtggacccacccatccagttatattaccttgagtttgcttctttatatcagggagaagagttccaactaagatgaaaatgtaaagattcccgtgttagagacttagaactttgtgcctttgaactgtttcaataaatcattccacaaagact

SEQ ID NO: 270895 - DNA, 380 bp, Homo sapiens
agcaaaggtggtgctaagaggaaatttcatagccctaaacgcctacattaaaaagtctgaaacagcacagactatctaaggtcaaacctcaaggaagtagagcaacaagaacaagccaaacccaaacccagcaaaagaaagcaaataactaagatcagaacagaactaaatgaaattgaagcagagcacagaggatttttaggccagtgaaattattcttatgatactgtaagagtggctccatgccattatacatttgtcccaacccatagaatagacaacaccaagagtaaaccctaatgtaaactatggactttgggtaataatgatgtgtcaatgtaggcttattgattgtaataaatgtaccatggtggtagaga

SEQ ID NO: 270896 - DNA, 755 bp, Homo sapiens
atggcgctgcgctggggcatcgtgtctgtcggcctcatctccagcgacttcacagccgtgctgcagacgctgcctcgctctgagcaccaggtggtggcggtggcggcccgcgatctgagccgtgcgaaggagtttgcacagaaacacgacatccccaaggcctacggctcctatgaggagctggccaaggacccgagcgtgggccatctggacccgcttctttcctgcctccgaggctctgaggtctgttttggcccagggaactctaggagacctccgggtggctcgggcagaatttgggaagaatctcatccacgttccccgggccgtagaccgggcccaggctgggggggccctgctggacatcggcatctactgtgtccagttcacctccatggtctttggagggcagaagccagagaagatttctgtcgtgggaaggcgtcatgaaacagctcctcaacccctgctggtgcccgaccgagctggtggtgaagggggagcataaggagttcccgctgcccccagtcccaaaggactgcaattttgacaacggggcaggcatgagttatgaggccaagcacgtctgggagtgcctacgcaagggtatgaaggaaagtcctgtgattcccctgtcggaaagtgagctcctggctgacatccttgaagaggtgaggaaggccattggagtcaccttcccccaagacaaacgctgatgtatccccgaataaataaagacatcttacatcttcaaa

SEQ ID NO: 270897 - DNA, 1044 bp, Homo sapiens
atggcgctgcgctggggcatcgtgtctgtcggcctcatctccagcgacttcacagccgtgctgcagacgctgcctcgctctgagcaccaggtggtggcggtggcggcccgcgatctgagccgtgcgaaggagtttgcacagaaacacgacatccccaaggcctacggctcctatgaggagctggccaaggacccgagcgtggaggtggcctacattggcacccagcacccccagcacaaggcggcggtgatgctgtgcttggcggcgggcaaggccgttctgtgcgagaagcccacgggcgtgaacgcggcggaagttcgcgagatggtcgcggaggcccgatcccgagccctcttccttatggaggccatctggacccgcttctttcctgcctccgaggctctgaggtctgttttggcccagggaactctaggagacctccgggtggctcgggcagaatttgggaagaatctcatccacgttccccgggccgtagaccgggcccaggctgggggggccctgctggacatcggcatctactgtgtccagttcacctccatggtctttggagggcagaagccagagaagatttctgtcgtgggaaggcgtcatgaaacaggtgtggatgacactgtcacggtgctcctgcagtacccaggggaggtccatggcagcttcacctgcagcatcaccgtgcagctctccaacacggcctccgtgagcggcaccaagggcatggtacagctcctcaacccctgctggtgcccgaccgagctggtggtgaagggggagcataaggagttcccgctgcccccagtcccaaaggactgcaattttgacaacggggcaggcatgagttatgaggccaagcacgtctgggagtgcctacgcaagggtatgaaggaaagtcctgtgattcccctgtcggaaagtgagctcctggctgacatccttgaagaggtgaggaaggccattggagtcaccttcccccaagacaaacgctgatgtatccccgaataaataaagacatcttacatcttcaaa

SEQ ID NO: 270898 - DNA, 943 bp, Homo sapiens
atggcgctgcgctggggcatcgtgtctgtcggcctcatctccagcgacttcacagccgtgctgcagacgctgcctcgctctgagcaccaggtggtggcggtggcggcccgcgatctgagccgtgcgaaggagtttgcacagaaacacgacatccccaaggcctacggctcctatgaggagctggccaaggacccgagcgtggaggtggcctacattggcacccagcacccccagcacaaggcggcggtgatgctgtgcttggcggcgggcaaggccgttctgtgcgagaagcccacgggcgtgaacgcggcggaagttcgcgagatggtcgcggaggcccgatcccgagccctcttccttatggaggccatctggacccgcttctttcctgcctccgaggctctgaggtctgttttggcccagggaactctaggagacctccgggtggctcgggcagaatttgggaagaatctcatccacgttccccgggccgtagaccgggcccaggctgggggggccctgctggacatcggcatctactgtgtccagttcacctccatggtctttggagggcagaagccagagaagatttctgtcgtgggaaggcgtcatgaaacaggtaccatctatcctggaatatttcatggtgatgggaatgattctgtctctctgggagcactgaactgaggacaagtctccaagtcaatgagaattagatcagacacctagaggaacaactttccatgaagccagagaggatcagagtcaagactgcaggtgggcactctcctgggactttgctgtgtgatcttagccagcagacttaacatctctgaatcttaattactttactggtaaagtgtcactaatagggttgtcatgggagttaatgaagtaactgctgaggcaaatggcagttaataaatataaaattattattttt

SEQ ID NO: 270899 - DNA, 434 bp, Homo sapiens
agagggtgcattttgtttggaacatgtggttctctgggggaggctggcttggcttggatagggtgctggagtaggggctgtggctgagggcagcatgggggccttgtgtatctgagggcagaggagaggcaaagggaaatggagctggagtgcaaagggaggggaaggcctgtcaaaggcaacacatagtagagtgactgtctttgaacagcttcgtgtcagaccttagccctttcgcctaatagctctgcgagcaaattatttcatttcccagtgataggaatttttctattctgggtcctaaacaaatagctgcctgatgtggtggctcactcctgtaatcctagcattttgaaaggccaaagtggggagagctcttgaacccaggagtttgagactaacctgagcaacataatgagaccttgagtctacaa

SEQ ID NO: 270900 - DNA, 110 bp, Homo sapiens
tgtccttcccaaaagatcctttggcctcccccatatggacccgtattactcccctatgccacctcatcggtgacctaccccaaaggcccaggcctagtctttgtcccgcc

SEQ ID NO: 270901 - DNA, 373 bp, Homo sapiens
cccatgccttcaactccccagcagagtctgcagaaactggcctggggtgtggcctgggcactgggactttcagtttctctctgggtgattagaaagtgcagccaaggctcacgcctgtaattccagcactttgggaggccaaggtggatgaatcacttgaggtcatgagttccggagcagcctggccaacatggtgaaaccctgtgtctactaaaaatatgaaaatgtagccaggcgtggtggcaggcacctgtaatcccagctactcaggaggctgaagcaggaaaatcacttgaacccgggaagcggaagttgtagtgagttacattgctccagtgtgctccagcctgggtgacagagtgagactccgtct

SEQ ID NO: 270902 - DNA, 231 bp, Homo sapiens
atgggcccatggttctaaaccctttctgtacatccacagtagctgggagtgctcagataagtctggtaagcaggccgcactccggagcagtgacatctgaatctggtggaggtggggcccaggcacctgcattttcagggtcccaggtggtgtccagtgtcatccagggctgaagcagctggtgggggcttagagaggatggtgggtagggcctggggtgacccttccaaa

SEQ ID NO: 270903 - DNA, 1774 bp, Homo sapiens
tagaaccagactagagaatatgatgcaggttcactggctttatggtctttctaatgctccctgccctgcatccacgccatggaagaaccagacaaggggaactgggagcctggaaaccagacacacttacccagggccaaggccactgccgccctctgataggggcagacagaacagaaagagaaatcccatctgtgatgtttgcaggagagtaactgagttgagaaatggtccgtgagtggctgtcacctgccaatcaggcctttagtccactttcaggggggaagagaaggaaggtgggatggtaataggtccagagcgtttatgtaaagaccctttctcgtggaaagaaaatgtgtgagaggtaagaatccccctttcacatttaagaaagttgccaagaatttaataagcactcactttgtgtatcagtgctcttcatgcattcattcaataaatcaccaactatctattgatcacctgttttgtacccggttctcttctcaggctcttgggttcaaaacagaaagagattccttctctcatggaacttacatttttggactgaggagagacagacagtaagcaataatcatgataagtaaggaaatcatagactatgctagaaagcggtcattgttatagaaaaacaatagtaaccttagactcgagggaagtggaggagtgagccatggggctttctggggaaagagcattccaggcagagcgacagctggtgcaaagaccctaaggcaggagcgtgcctgaggggtgtgagaaaagcgaggagtccgatgtgtgcagcagaaaaggccatgcattctggagatgtgggagccagatggaaaagagccttatgggccacggtcaagacctcatgcctttcagagtgatgtgttatgtggttcacaccccgtagcaactctgtgatagttgttgttcttattatccctttctttacgtgaatgcactgagatacattgccaaaagccccctttattttacagctgagaaaattcatacccagagtagggaagcaacttgcccaaggccacagagtgggaaaaatggcacggagctagggttcgggttccctgattcttggtccagaaccctttctctcatgtctctgctccagaaatgaacttcttttgaaggaggtgactctgggcctctcttgaagattcagattagatcctggagctcttaacactgtgctttgctgcccagatcttctatgttaactacagtatttccttcctaggaagaggtttaacatggaaaacctgagaaaggctaacacattaaacatgtatgttagtaaatcctggaggagggaaggaaggccattgactggtgacatggcggtggcatcagtcatagtaaatactgataccaactgattgcttcccatgtgcctggccctgttgtaagctggtgaagtgtgatagtttaagtattctttaccactactctaagaagtaggtactgggccaggcgcagtggctcccgcctgtaatcccagcactttgggaggccaaggcaggcggttcacctgaggtcaagagttcatgaccagcctgaccaacatggagaaaccccatctctactaaaaatacaaaagttagccggacgtggcggcacatgcctgtaattccagctactcgggaggctgaggcaggagaatcacttgaacctgggaggcggaggttgtggtgagccgagatcacgccactgtactccagcctgggcaacaagagtgaaactctgtctc

SEQ ID NO: 270904 - DNA, 555 bp, Homo sapiens
agaaaatagatcaatggttgccagggctgggaatcagggagcaggtgactataaagggacacaaaaaaagtttcttgttgttatggaaatgttccgtaactcaactgtggttttggttgcacaactatatgtatttttacaaattcgtagaaccgtacactacaaatggtgaattttactgtatgtgaattacacgtcaattaaccagactttaaaaaatgtttgtagagattcccagtaagctgttagtaatagttaccccttggagaatgggagtgggagtataagaaaaaaagcagctttcatattttacacttctatataatatgtattacttttagtaagtatatactgctttttggcaatttttaaaaaggttttaataagtgtgacatactcaatgcatgcaacactaaatagccctagaagacagtagatttacatgtactgatacataaaggcattcacaatcactgttaagtagaaaaagacaacttgtacaaaaatatacaatcactgttatggaaaaatacaataaaattatgtgtacacata

SEQ ID NO: 270905 - DNA, 448 bp, Homo sapiens
aaaaaaaaaaaaaaaaaaaaatgagccgggcatggtggcaggcgcctgtagtcccagctattcaggaggctgaggcaggaggcggagcttggcagtgagccgagatcgcgccactgcactctagcctgggcaacagagcaagactccatctcaaaaaaaaaaaacaataatggcaactattagtaaaatttaaaaccagtcgtgtatcttctgcaacattggagaagatggagcaagtaaaacagttcatagagcaaaagaaggaaaacaaagcaactgtcaaggaagcttaaatcagagagtacatgtataaagtgatgtaagtaatagcaaattcattataataggaaatgtaatttgattaaactacccatttaaagacaagaatactaagattggtcagaaatcaaagtccaaacaaaagatctaaccaaattaatgacattag

SEQ ID NO: 270906 - DNA, 459 bp, Homo sapiens
ctgaaatttagttatttgtgttatatggaacaaatgtctgttggccattttttaagaataaaagcaatgtgtgcacactgaaaactttcagacagtgcaggaaggcataaaatgaaaagtaaagtttcctttccttctgccttccaaagtgcttcccccacaggtgatccttgttaatggtttctttcatatcattccaaaaaatgtattcatatactaaaacttatagcattccacaaaaaatattatgcatttatgtttgcctgcctagccatttgtctatccacttctcctttttgatttatgcaaatgagattgtttgcccaatgtctttttaaaatacttaattatatatcctaggcatctgtccatatcattacaagtagctttccatcagtttttgtacataacaataccagccatttagaggtctgtctttcaaatatcattttaggtaaa

SEQ ID NO: 270907 - DNA, 401 bp, Homo sapiens
tatcttcataaacgtggatattttctaccttgtagaactgttgtgagaattaaatgaaaaaaaatatatataccattggatgaaatctttgacatattctaagcacctattgcctattagctgttcttatttatcagcagctaaacttgattgcagttttctttagtgtatttttaaatagttttttattacggaaaatttcagatacatatataaatagattcaataatgtaccatcaccagctttagtagttaataacagaacatgcaaatcatcttgttttatttctgcttcaactgaattattttgaagcaaataccagatgaatcacttttattgtactggagagtagtggctcctaaacaaggctgttaagtgattaacaaagagaaatagagat

SEQ ID NO: 270908 - DNA, 132 bp, Homo sapiens
ccggggctacgtgtgctggaggctgtgcaggcctctggcagtcccgactctcggtgcctcaggaagatgataacacctgccaggttttgagagtccggtgaattgaaccacaaagatagctaagctcagttc

SEQ ID NO: 270909 - DNA, 1266 bp, Homo sapiens
aaaattattttagagtcctgctctttagggaaaactttgctatggtaatgtttctttgaaaacaaatttaccagcaactgcgttacttggtgttttccaaagtacaacatccaaggcttgaaccttacccgtttctaggccagactaggccagcctctagttttgataataattcatacctttattggaatatattttggatagcagtgaagaattgaaagcagctcctaaagattggtttgtttgctttgaaaatgtttacacttattcactctaagcagtggaccattttgatatcaggccctatacataagaccaaaaccagaaatatttctaaatctcaaagatttataagtacagtacctctggctgaaaactcgttaaacatctttggatattttttctttatatctttatgtaattatttctgtaattaagtgtacattagggttatttgctacttaacaagcctaaaggtatagctgtatatagaatgtgctctgtgtttttctgtttcctgcttggtttgtttctggtatgactatgtctactttttatttaaggaatttgtgtagataatactctcactaacttgtaaataggataagttatgagatttttggtattagaatttgtaataataatgacttttagattttatttgaaaaagctacttggaaagcagtaaatagaactatagtgatatatatagatacatagatatatacttttttctgagaatgtataatatataattgtcaaagatttttggaagtctttcaaaatatacttaataccattttgagaacataccttctaatttatttccataaggctgaagaacttttatttacaaaatgtaagactagataatgtatgaatcagtgttactaggacttatcagtacttaaaatagcaacttggcattctttattttgtttcctggttgttttatttggagggataataaatgtctaagttatttccattaaaattttgaaatgtttgtatactttatgtgtgccattttaaagtatatgcaagttctaagcaataatctgcatgttatacaaggttgacatattttgtcctgaaatttttagttaacatttcaagaatgataaaatgaacaccctgtaaattacccttctccccctcccctccatgaaaaccttgggattttcttgtgctagaacactaccacaatgtggtgcaaagctttgtattttgtggaaaaaaacaataaaatcacaattatttagtgca

SEQ ID NO: 270910 - DNA, 415 bp, Homo sapiens
cgcccgggggtcttggggcgggactccacctgccgccaccactcgcttcgctgatgacatcccattagcagtaatggagttagtgagtgcatggcggagactggacccaggccgcctacaagggccagaatcccaccccagccatagcctcgaggcaggaagtgcagtgggcaagctccctgccaaagcccaggaacgtgtgattttgtatccagtacagcttcatctcggtggattttccttcctaaccacctcctcctccacaggttttgtgaccgtgctgacccctacgcagacctcatgagagtcacaagccatcgcaactgacagtttaaacgtctgcctcttatctctaagggagggaactatctcttatgcaatgtgatatccatggctgctagcacagtgtaattaa

SEQ ID NO: 270911 - DNA, 440 bp, Homo sapiens
catcctgggttcaagcgattctcctgtctcagcctcctgagtagctgggactacaggcagcaccaccatgcccagccactttttgtacatttagttgagacagggttttaccaagttggtcaggatggtcttgaactcctgacctaggtgatccacccacctcagattcccaaagtgctgggattataggcgtgagccactaagtctggccagtgctgcacagtattaatgttcttattttacagattacatcattaagtctcaggggtaagtacaaaagctaggattttaccatagatttaaatcataccctttcccctgtatgtgtcccttttgattttgtcaatgaccttgtgaggtaggaggggcagctattatacccacttcaaaaagaaagaacatgaggaaagcttattactgaaaaaaagttttaaaaagaa

SEQ ID NO: 270912 - DNA, 513 bp, Homo sapiens
gcttttgaagtcctcagtcactgagtctgtcgcctctgccgtttccggttctgtttctgtttgacactttgctgcacttggagctgtgggccattgtgcacgtgcctggtggacagtcctgaccctcgctgtctgataaaaaagcactggccacatggccgctgggaaatttgaatgtggccagtctgaatttagatgtgatgtgtgagctacaaactagatcttaaaaaactaatgcaaaaaacgtaaaaatatgagtaacgatttcttatggcccacatgttggaataaaaacatcttcaataaatttgtctaagtaaaatgcattagttaattgaatgttaagagtaattttaatgtggcagctagaattttaagagctgggtatggtggcatgcacctgtcatcagctccacgggaggctaaggtgggaggatcacttgaggccgggaggtcgaggctgcagtgcgattgcaccaccgcactctaggcaatagagcaagaccctgtctc

SEQ ID NO: 270913 - DNA, 481 bp, Homo sapiens
aagctgttctattaaagggataatatagtgaataaatatttgttgtctgtttaacttaccttatgtagagctattggctctaaggattttgaaaggacaacaataattctctaaaaataattcaggcacctttggccatttgtgtaaccaggtacaaattaccacgtttcccagtttcccccttgagtccaactgtaatgtattgttctgtaaagtatagtccagttgtcagctctgtttgccttggtcaattgaatgatcctcctccttaagcttagcctatagtgcatttggcttaataaatgaaactgtaacatgccagccacacaatagaggattttatagaactgtttctgcttggaatactataattggaatttgagttaactataattaaaaaagctttcatagcccatggtatatgaactctgaaaccccaaataccaaaatcctactatataaaaatgatccacatactaaa

SEQ ID NO: 270914 - DNA, 557 bp, Homo sapiens
ctgtccttgtgttgacagctcttctgattatagcagttgtcaaactccatccttaagcaggttgtaaatcctggctccttccgattaaaactaggtcagagccaatcgcaggttaactagaggccggtattctactactgtacgtccttactagttcattctaaataggctttgtgtggcagcatactaaaacccttatgtgcctatattttacctgggtttttttttaatcttcagatattggtcctcctgttacttcatgattaaacatggtccttgctgaagagtatattggtataagtatggtcttacttataaatggcctgttagccttcccctcctcttcctccactgggaatactaatatcattgcatctgtgtctcccaggggaaatcaaggcttttccttgcacgtgcagtcatgtgatttcagagtgggcaggctttgtatcctcatgagccctcagtcttccacgcaaagcaccatctgttctgttacctccacactgttacagggcagtgggaggaggcattagagtgaaaataaataaaataaa

SEQ ID NO: 270915 - DNA, 473 bp, Homo sapiens
gcaactcaacacttaatacgtcccaaatcaactcgctatttcccctcaataaatgtggtcctttttgctttttctctatttaagtgaacactatcaccatcctttcagacgcatagtcagaaatctaggactcaccctttatacctcaattctctcccctatctagtccatcatcaactactgtcaattttgcctcataaatatccctcaaatctaaccacttttctccacatctgccaccaccataatatgcaaagtttttgcaacagctcatttgaatcactttaataactttcgaaactcatttacccacatccactttagttctccctccaatcttttctccacatggcacctgaagtaattctttctcatgtaaatctgatcaagtcattcctgccctcatctccctagcctcttccttacctttcttcctccccaagtccaccctccaccctccaccaaaaaaacaa

SEQ ID NO: 270916 - DNA, 283 bp, Homo sapiens
cttgagacttgcagcaggagaaggatctctgtataatctttgtttgcctaataataggtctttaagggtttttaaaaattggtttcctttggggatcatttaaatttcccatttccttgtaaatatttttggtaaaaacatcctcttggatttcagaggaagttaaaatagaaaaagcttgaaagcattcacaaagcaatgtgctctcaaaacacagccattcatttgaagttgtcttttagtctgaatccaaatcctccagtcaatacaaaccataatatgc

SEQ ID NO: 270917 - DNA, 254 bp, Homo sapiens
gttttggaatggcctgttgaagactgggctaaattgcgattaagatgtaatgccttgcaaagttgggagcagttcttcagaatatggtatatgcgctgaaatgcattgggccaaaatggatatatagtattgtgtctccagtaggactatgtgcatacaggagtagcctctattactatcacacccagccactcacctgtagaatttgtgcctcctcgctccgaaatctggagccagctgggttatgatcctca

SEQ ID NO: 270918 - DNA, 800 bp, Homo sapiens
tcttagttgttctttttgatttaaaaatatagcagtaccttacttacatagtgtcactcaggagtataagtcaaatttccagttcacaaatgctagcttttaaaagaactactttaagcattttggtacactctaaaactgttgaagaatatgcttaaatttggtcaacctcttagtccctcagatcttgggtcatagtagaaaaatactgaatttggattcataagttctattttcctatcttggtatgcctgcttaacttcactgagccttactttcattactcttaaaagagaataagaatgtccctcttacagggtattaaaagatactgagataatggaggttggatgagctttgtaagctgcagaagatattctttatattgcccaagtgatttgggagttgtaggaggcctagagtaagagagaattttgaagctttccaacactcgaatgatgtcatatgttaagatggtaaggtctacatcactgaagcattctaggaaagatgagttgatgttagagaccatatagagagaggaatgctgtgcttagtgacaggatgaactagaattctcaggctctttcctactctgagggtttctgactttatacaaagttgaattgtcaaatcattggttcagaaaaatcagagggggacagtctctttggactgatttaggaaagctgtatgggttttaaaaatcaggcatttcttctgattctaaagaatgagtgagaatagccaaaggtatcttgaaaaataacaaagttggaggactaacaattcctggcttc

SEQ ID NO: 270919 - DNA, 436 bp, Homo sapiens
cattatataatgtccctctttgtctttttaaaactgctgttgtcttaaagtccgttttgtctgatataagaacagctactcctgctcgcttttgatgtgtccatttagacgaagtgtctttttccaaccctttgccttaagtttatgtgagtccgtatgtgttaggtgagtctcctgaagacagcagcaacttggttggttaattcttacccattctgccattctatatcttttaagtggagcatttaggccatttacgttcaacattagcattgagatgtgaggtactattctattcctaacgctatttgttgcctgagtacctgaaaacctggaagcattcccttgaaaactgacacaagacaaagatgccctctctcaccactcctattcaacacagtattagaaattctcaccaaggcaatcaggcaagaga

SEQ ID NO: 270920 - DNA, 726 bp, Homo sapiens
cctgtctactttatccttccttggtccacagagactgctgcttaggagtccataaaacgagcttgatcagtgcgcaggcctgaggtaacgagtacacagggcctgaatgcagctctgctcagggttgagcaggaggttaatcacttgatttaaattaaagcatgggggattaagcatcttccccttaggtgccggcatgccccccacccctggcagccagagcccaatcagaaccagtgccagaggcgactgtctcctggaccaatttgctcaacttcaattttggtccttgagatttcgttttgacattgaaaaaattgcctcaccattctatgggttctgatttgtgtgatggttctgaatgaattctaacaaattagcatatctttctggatctttatagagatgtaggaagatgaattgcatctgtcttccaagagagttacaaatgcagcagaatatcaggctgggaggcagaaagcgagcgttcctgacagtggctccacggaatagccggcacatgctgaaccacagcctctctgcggaggcagatggagcacaggtgagaaatataaatgaatccacaatctggactcctgggaaactgtttcacacctatggaggactccatcatttgggccaaaaaaaaatctcgcttatctgaaaatcatttagatggcaatctcaaaatctagaaaggcagttaaaatgttctctgaggagtta

SEQ ID NO: 270921 - DNA, 561 bp, Homo sapiens
caatgaagtgcaagagaaatctgaaaactaatacaaagaaatcagaaaattaatccaggatataaatgagaaatttatcaaggagatagacatcttaaataaaaacaagcagaaattctggaactaaaaaattcattgaaggaaatacaccatatgctcaaaaacttcaacagtagactacaccaagcagaagaaagaatctcagaactcgaagacaggacttttgaaataatccagtcagacaaaaatgaggaaaaaaggataaaaaagaatgaataaagcctttgagatgtctgggactgcaagaagcaactgaacttatgaattattggtatttctgagggggaagagagattagaaagtttagaaaacatatttaaagaaatagacatccagatacaggaggcccagtgatccccaggaaaatacattgcaaaaggacctcaccatggcatattcaaaatgtctgaagtcaagtgaaagaaagaattttaaaattagcaaaagtgactagtcacctataaaggaaatcccaaatctcatcagaccaattgaggactt

SEQ ID NO: 270922 - DNA, 849 bp, Homo sapiens
tgtcagctgtttgatattccattttatcaatatgttattatttacctaagcagtccatcattgatgaatgagttgtaatgttccctgatgtagaaaattcctaattattatgctgaaatgaacatctttgttcatttgggcacttacgtaaatactcttaaaaagtaaagttctaagacaaaatatatcaataaggtttttttaaatttttttattattattattttttatgagacagggtcttgctctgtcacccaggctggagtgcagtggtgcagtcatggctcatggcagcctcaacctcctgggctcaagccatcctcttacctcagcctcttgagtagctgggaccacaggcacaagccaccatatccagccaagattatgtttttattttcatttctttttttatgtttactagatgtttataattcctttgttaattgcctattaatgtattttctccatttatttcagttttatttttcccattggatcattagccttgtttgtgtacatattgctttgttatttgtttatagattttgatttttttttctctttggcttcacatttggagtcattctgaaaagaatctttgcttttcaaaattaaaaatatatgtatacattttctctgatacttctattttttcttttttcttttctttcttttttttttgttttttttttattgagacggagtcttgactccagcctgaatgacagagcaacactccgtctcagaaaaataaagagaacaaaaaaagaaatatgttccacatctgctactccctgtccctcctgtgccaccacctggccatgccgccttggcccctccctggagtgt

SEQ ID NO: 270923 - DNA, 253 bp, Homo sapiens
aggtaataaaggggaaaaatgaataataaaggaataaaagagtgaagctgaaatctgggagagaaagaaaaatatatttattcaaaaatatattttattcatggggaggagctgatatttgcaaaatgtagaaatcttaaaacttaaatctcaaaatcaaaattaaaatgcaatgacagtttagaaatatgcctgataaaaggtaagttttgaatgattttccattaaaagctaattttgactttagaatgtt

SEQ ID NO: 270924 - DNA, 256 bp, Homo sapiens
ctggaaatggtaaatatgtggatactatgaaagactgagtacacacatacacaaaagtaaacacatgcttaatgttttttaaacaccagcaagactgtctaaggcaaaaattataacactgtatcatttgatttattaaatacagtagacggcttctacttctggaagatggagtagatactttttctattcacgcttgctaagtacagctaaatgccttggacgttatatataaaacaaacataagaaatacaaa

SEQ ID NO: 270925 - DNA, 412 bp, Homo sapiens
tcttttaggagttgattctctccgggtaatatctggagctctctaaagtttcagagagaaatacgttccttataaaccttgtggttgtcatgctggtgactccttgagcctgtcctgtgctggaccgtgaggaaggacacaaggccatccagactcctggactcacagtgatttcttgtcctccccaaagatgcctttgcctggtgcactctttaatagcccatcacttcttgctggctgtgtccccagctgagttcctccaggatatggcatcaactctgaacacatctctgtatattccctcttaggaccataagattcatgttaaacttagtgccagaaataaccttgggtagccatgttccttatggttccttagattacattcctagattacacattttacattaaa

SEQ ID NO: 270926 - DNA, 325 bp, Homo sapiens
tagtacaattatatcaataattcaaagatctagatagaatgctgactaattctgttttggtgtatgtgacaatgtaaaattagttcattttatctttttttgattcctaggttttgaaaaatgtcctgggcagtaaataaatttagcaggaaagtacgcctactccatttatccaaatgttaatgaactttctcttagtgaacatggcactgttgacaccacctaagtcataaaaacgggtctcaagggaggaaatgactcagtgtgtttaatacaggtttccctgctaagcctcaatctggggaagtcctgttggttttgggaa

SEQ ID NO: 270927 - DNA, 368 bp, Homo sapiens
cgttagggctttttcatgctgacttcctagaactaaattgaaaggaaaaccctaactttccacacctaagtaacaaaggaccagaggctgctccctttgcaaacccccccttttttttgaggcagatgggaaattgaaagtacctctgattgcaagtagagtcttggtttgcaaagaaacgcaactttgtaacttcactttagcctctgattggttgcagaagtgaagttacaaaggttgctttccacaaccaatcagactgatggcaggccaccacttcatttacaccaggcgagcaccaagtggccaatgggaaacctcctgggggtatctggacctgagaagattctgtcactaggccttgagac

SEQ ID NO: 270928 - DNA, 416 bp, Homo sapiens
gctggcacaagtttgttctagcaaattccagtctgtcgtgtgtttcaaacctacttgcttctgtaaatgtcagatttactatgttgcataacttaatccttagcgtctggggacgatgttatacagaccggaatctaaggtcatttgacaaccgtgagaaacaggtttttcgcttatttattcatttattttatttgtgtaactcatctcttgactcaaacatttgttctttgcttacatatttataaaaggtgctatacttttatgtcaattaaggcaggcttaacatgttttcctagaagataaatacttaggattttaatgatggcacacttaagtttgtaaaactaaaaggcatccagaaattagtctgaattgtatttaaaacaacaagttttcagaatttgaacttgtag

SEQ ID NO: 270929 - DNA, 441 bp, Homo sapiens
ttgtcccattcatgagggtgctgccctcatgacctgatgatgtcccaaagcctccacctattaatatgattgcattaggaattaggttttaacatataaatctgggaggacacaaacattcataccaaagcaccctgcagtgtccttgtgcactcgcatctctagcatcacactaaagcattcatgaacaggacactggcaaaagagaaaccaagacagttcacaaaaattacccacacatctaaggaaactgtatgggcagtcttcttgtctacataaaaaacttctgtcataaaaaaactgccttgctataaagtatctgaaaataatggataaaatatgacagaaatcttttaaatatatagctgagcttgcaataaaaaaaatagcaacaacaacaaaatgatgaggtctccagaagccaaaacaaagccaaagcca

SEQ ID NO: 270930 - DNA, 465 bp, Homo sapiens
gaaagccgaaaaagggtgaacccaccacacaagtgaagaaggccccacctctggcaaagtcatggaccatcactccaggaccaacagcctcaaaactaacattcaaacgggtttgtctttttcttctccccttagctactcaaggatatcttactgttaatgtaactatgcttgtctagtcttaccttgtggagatctccaaagtcaaagacagttagcttgtacagaaaagtacttctgcccctctgtggaaagagttaatactcctgtgtcttgcatatggggggaatcctcagaggaagagttaggcaattgggggttatggtctcagtgggcagttttagggcactgccctaaaaccatacctacacttcaccaaaggggccaccccttctgactgtcaatctaatcattgcaatccagtacttatccattgtaaaaattaaagatctaaagcaaaccata

SEQ ID NO: 270931 - DNA, 416 bp, Homo sapiens
aggtatgattgttcaagtagctaaaaaaaaagccattaatctaattaattgtttaatcctgcttacaagattatcttgaaaaaatgtgctggggagtatggtataatgaattacaggtccaagaatttgggttcagataccaccttcagtctttactaagctgcgtgactttagcaaagtgcttagtctctctaagcttcggtttcctaatctatgaggagggcctaagatatcaccacccatcatattcccccctctgtaccgcttattttagattctactatcattgtatatcacagaggacatttatcttgttcatctttacaatcaacacttagcaagacagatggtacttagaaggccccccaggttatctgttaaactagacaacctcagttcttgtgttaaaagtaaaa

SEQ ID NO: 270932 - DNA, 526 bp, Homo sapiens
ccgtgggcttcggcctggcagcagggcccctggaggagcctggcacccaacaggcgctctgtaaatatttgggaagtgagtggacgagtgactgtccctggtttgggctggtgccatttagagggcaaccagagtgcagggaagggaggagcttgggcaagagggacattgctgtcgctggttgatggtgagatggcacttaatgagaacctggtcattgggaaagccccaagcctgcgtcttgctgtgatgccttccccattatgaagggtccattggcatgggagtggggagacctggactcagagaagctacaagggcaagggtggaaaggcatagcttctgcaagttgatgctgaaaaagatccaagactcatattcagcagacagcccataaccaagagccaaggaaaactttgcctctgcttcttctactggactctcttgggctatcctttcatgtctttatttttctcaaaatagctctatgttcctttctttaaaaattaaaatatagcaaaattga

SEQ ID NO: 270933 - DNA, 546 bp, Homo sapiens
aagttgagagactcttccacaatgcagaaagtaatatgagcaaaaaatgatgaaagagagatgatgaaaaataaggagtacagagtctgaagatccaacatacagataataggcatctctgaggaagcatttatttactgtgaatcagaagccataatagattaaagaaaatttcataaactaaaaaaatgtgattctatagaatgagaatattccctgtatttcaggcaaaaataataatgagaagagacccacatggaggcagattggtgaagtttttgaatttcacaagggacagaaatcaaatagtttcaagaagtctaaagaactttgtgggaaatgtttatgagccagcaatttatgtgataagagaatagatatagtctcacttaaatacggcctctgaaaatgaattatttatgcacatttcattgaaagttattcaaagacataattattttggcaagaaatgaaccaaatattaaatcaagaatgaggagatacagagttgaaaaaactgaacttgaacactgatagttaaattat

SEQ ID NO: 270934 - DNA, 443 bp, Homo sapiens
tcaccaacttctggagatccttcaacttgtaggacaatatccaatatttactgttaaatccatgtccctttaaaacttgccctctagccaatcttcataagctcttcttgggagctgctttctctgcctcagccacaatttctgtgcccatctccctggaacttaagccagtgaactcaccaggactgtatcacaccatattctttcaaaacaggctcacctctgtgcctggaaaacagcccatctttttttctatgtgtattagtagaaaaaaaggtgaaatgactgtgatcatgaataatccccacctctcagtggcttaaaataacaaaggctcctttctcactcacagttgggcacgtctgtccatttgcaggtgggttgggaagctccattctgtatcaccctcgctcaaggacctggactgaaggatttctgctttc

SEQ ID NO: 270935 - DNA, 335 bp, Homo sapiens
tattatactctaagttttagggtacatgtgcacattgtgcaggttagttacatatgtatacacgtgccatgctggtgcgctgcaccctcatggtgagttttaagggctctgggtttgggctatctgggttaaaccctgtctctgctatgtaccagctgtgtggctttgggcaagtggttcaagagtgttggtctccattttctcatctatggcatggagatagtaatagcctaaacatcatagggtggttgagagatttcccccccacatcttccctccctccctccatccctctcttttcaaataagtgagcacattcaatgtaccaggcattg

SEQ ID NO: 270936 - DNA, 386 bp, Homo sapiens
atgaaatttatccaaagcgtaagtggcaatgtcagtttacctgaattaatgccacatactaaggcattttagttctctcaaatcttaatttagataaatgaaaatgttatttaaaccaatctcaagggcactgaatgtaaaaacattaaatggacagttcaatgagaaagtgaacaagaaatgaacaagaaatctctcaagaacaatgaacataaacggggtacagaatagggagcttcagacaactgggctgacagaaaagaagggtgttgataattcctttttcccatcaaaagggaatcaagggtgtagcaataatcctcagctatagaatcccacctagagaagtctttcatcaaattaaaaatactgtataaataatataa

SEQ ID NO: 270937 - DNA, 383 bp, Homo sapiens
tacttcatacctactattatgactataatttttcaaatggaaaataaaaggtgttgctgaggatatggagaaataatagcccttgtacattgctggtaagaatgtaatatgttacaggcaatgtggaaaataattggtgaccgatcaaaaagttaatcctagaattaccatgtgatccagcaattctacttgtacatatataccaaaaagaaatgaacacttacacccacaaaatatggcatacaaatatttattcataatagctaaaagttggaaaccaaatgtccatcaacagatgagtggataaacaaattgcattatgtacacacaatggaatattattcaggcataaaaaggaataaagtacttatacttgctgtagc

SEQ ID NO: 270938 - DNA, 451 bp, Homo sapiens
gtaggtgggagatgtaacatttgccctgtggactgaatgatgcagtctgtcccttggtcagcccagggcagatcatacatggaatacatgttactatcacggtagctctgccaccaacttactgacgttcagggagcttgggtgacttggtcatgtgatgaggcaccgataaagggggagaactggaacctggagcttcctccctcatatctggatgtttcactatagggagctccaaagtttaaaaaaaaaaatcagcatcaaagagccatgatgtatgaatcagctcagggccccgggcgggaggacagggtagggctgcatgccctgctggcttcagcaaaattcatcagctgagttaacagggtccctcagaatccagaacccttaagggtagagcttctatatcctccttctatctgtccttctccccacttcaaatcaatttttt

SEQ ID NO: 270939 - DNA, 331 bp, Homo sapiens
gaggattggggagcggcgacgccgcccagccgtcgtttttgatctgctgcagccgccggcggggcgacccagcccgaccccctcccctccccctcagccaggagcggtggcggcggcggcggccggagggagttggcggcggcgggcgagcggagggggctgagcggggagggagggagggctgaggtgtcccccctgccgggtggaaccggaggcggcggcggcgctggcggcggccgtggtggcggaggcgacggtggagacggctgccctagtgggagaggcggcggcggcggcggccgaggaggaggagggggaagcggcggcggca

SEQ ID NO: 270940 - DNA, 492 bp, Homo sapiens
actgattgaaaggtgaattctgattccaaggtactttgtattctcaaattgtgtctgcttcccctgaccccctcaaaatgggagtgatgactacttgtcttcttagcactgtggggacacaaagccttagatggaagtgtgtcaaaaacaacattccataaaaggccatcacttccaattttcaagaaaggttggaaaccaaccatgatgtatgaagcactgtcagccaaattgagcaattagtaatacaaaatgaatggtataaactattctacatgtgtgtggccatgatggcaatttacacatcgaaaaaacatggccaaattcaggaagaggaatctgtaaactcacggctgttgggaagcttaatgtctgtgtaccggaacctatcaaagttacttctccatgccagtctgtccaaacaaaccttgagttgtttatttctatggaattcctgtagaatcctaatgagcatgaccttctggacccatc

SEQ ID NO: 270941 - DNA, 482 bp, Homo sapiens
cagagtcacactctatcattcaggctttagtgcagtggtgtgatcatagctcacggtgacctggagcttctaggcttaagcgatcctcccctgcccagccttctgagtagctaggactgtaggcatgatccatcatgctcagctaattttttttttgtttttgtagagatagggtcttgctgtgttgccttggctggtctcgaactcctggcctcaagtgatcctcacatctcaacctcccaaagtgctggatcatctttgttcttggcaattacagtgccattaaaacgtggctgggcatagtgactcacacctgtaatcccaatactttgggaggctgaggtgggaggattgcttgaagccacaagttcaaaaccagcctgggcaataaaccaagaccctgtctctacaaaaaaataagacaaatacaaataaaacttaacatgtttctttgattcttgaactggggctgataggtgctg

SEQ ID NO: 270942 - DNA, 569 bp, Homo sapiens
cagctgcagccactgcatgaccctaggacccagatcccccacaggctttgagaagatgaccccaagtcaagctgagcgcatatgagagcagtggagaaagagctctgtttctgtcttcaagagggcatactgcatatttcccagagacaaaagggagcatcgaacccaatgccagtttgctaacagagccttccatatgcaagcaccagagttctatgcttcaccaggttggtcatttctggaatgggaacattgaattgcaagatgttgttgattatgaccaggagtctgattcatatgctaatcagtgaaaacagtaacaaatactccaaattgatgtaccatacaatttatcatggctttgggatgtattttggcacacagtgtactacagtgattctaagatgaacattttaattttaaagtctttgcagtcattgatggcatgttgtaatttaatggcacataaaacaatggtgcatttttaatcaatgacagattcgatgaaatatggttcatgtagattttaatgtaactgacagcctggaaattcaaatcattttgaacca

SEQ ID NO: 270943 - DNA, 569 bp, Homo sapiens
cagctgcagccactgcatgaccctaggacccagatcccccacaggctttgagaagatgaccccaagtcaagctgagcgcatatgagagcagtggagaaagagctctgtttctgtcttcaagagggcatactgcatatttcccagagacaaaagggagcatcgaacccaatgccagtttgctaacagagccttccatatgcaagcaccagagttctatgcttcaccaggggtttaggtcaaggagagcaggtgcggatgaggttccaggaggaagaatcaagttggagctgtaaagcaaatcttttatttacgcagtgtgcactgaaagccttatgagagtcgactttggaaagctggactattttctccctcaatttatttcagcttcctttggaaaaaaaaaatagctcatggctgaggtaatagagcacaagccttaaaacataggctgaagcagatgggaggagggccagagtcgagatgcagccttgcttttctggctgttctggtttttacactgtgagaaaaatatcttttctaaacatgaatttgtccttcctctactatgc

SEQ ID NO: 270944 - DNA, 678 bp, Homo sapiens
taagacagggtctcactctgtcgtccaaactagagtgcagtggcgccatcacagctcactgcagctttgacctcctgggctcaaacaatcctcccacctcagcctcccaagtagctgagactataggcacgtaccaccacacttggctaatttgtatatttttagtacagatggggtttcgtcatgatgctcaggctggtctcaaaatcctgggctcgagttatctgcccacctcagccttccaaagtgctggggttacaggcatgagccgctgtgcctggcccaggatgagacttgattagatatttaacatctcttttaatatttaataaaatatccctttaacaaaatgaagaaagatatttttagcatacaagttatataaaaggatgttatttaaatctagagcatctgaactgaattttttcacaaatttcttttggccctactctatacttaactgtccacagatgaaaagcttaatatttgcaagtaatcccctccaattcctcattaatgtttgtaaggtatttgctttctacagaaattacacctttacaacccagaaatccaacctatttgtagtctgtattgctgttattagatgtgcttagatttgatacttattttaactccttttttgtaaaaattaaacagaaataaaacagtcaaacacta

SEQ ID NO: 270945 - DNA, 454 bp, Homo sapiens
ttaattatagggggaagtattctcatcatatgcaaggtaattttagtattcttgacagttattactgtaatatttgccaagtggcgagtttctgtttccatcattctgaagttaagttttaatctgaatattcaactgcataattacttcctaaagatatttgactaatactttctctacttcacactaggggaaaaaaagacatttggaggctgtgtatatgtatgctgtggaattaatggctataatggaatttataaatgtatttttacagataattgcattctaaatgaatgattcactattcttagtacttgtaagaaattggattctaaaaatcccaatttacatggatttatgagcttattagttgaattgcttttattctgtgtttatacaaaatggttaaatgtaaactatatttaaaaatagaacaaagataatatgtccttca

SEQ ID NO: 270946 - DNA, 586 bp, Homo sapiens
aaaaaatttgaaaggtgcttgtataccaaaaaattggaaaaggtgggcttacgtgttcttctgaaaggtacaactaagaacaatgaagggtgattatcacaggaaactaattttgttatcattttaaagaaacacttcctatcaataaatctgtctcatgacagaatgggaagcagaaagagcagaggcaccgagtatgaaaaagaagggacttgacagagactctgccacttctttttactgatttcctcattctacttcagtattctccccgtgattccacagttctacagttggcatttctcactggtaaaatacaagggatttctgaactgacaaatgagatatcagtgacttgggcccatctagttctaactatttatgatcctgaatatcactttgtggcacttctgccttaataactatggtaacctacttcagaaatccctctgacaatatacattgttacttgtcatttaaaaggcaacctgtaccagtacctgggataaaatacctagtatttaggagatttatagtttagaaattttttaaatcattgcttcaaacttcaccaccccataaaatc

SEQ ID NO: 270947 - DNA, 429 bp, Homo sapiens
  misc_feature (10)..(10): n is a, c, g, or t
  misc_feature (22)..(22): n is a, c, g, or t
  misc_feature (43)..(43): n is a, c, g, or t
  misc_feature (134)..(134): n is a, c, g, or t
  misc_feature (410)..(410): n is a, c, g, or t
ctggttgtgnttcccatggtgnttcccacagtcaaggaattcnaaaccagagctcagaaaaaaggtaccatcccagcagtggtcattcgacaacgaaagtcataccgtagaaaagatggcgtgtttctttattntgaagataatgcaggagtcatagtgaacaataaaggcgagatgaaaggttctgccattacaggaccagtagcaaaggagtgtgcagacttgtggccccggattgcatccaatgctggcagcattgcatgattctccagtatatttgtaaaaaaaggaataaccactgctggatgtaccttttttctgagctctggtttgcctttcttgactgtggccccggattgcatccaatgctggcagcattgcatgattctccagtatatttgtaaaaaatnaaaaaaaactaaacccatt

SEQ ID NO: 270948 - DNA, 185 bp, Homo sapiens
taaagtttttttttttttattttttacaaatatactggagaatcatgcaatgctgccagcactggacgcaatccgaataaccactgctggatgtaccttttttctgagctctggtttgcctttcttgactgtggccatcaccgtgtcacccacaccagcagtgggaagtctgttcagccatccct

SEQ ID NO: 270949 - DNA, 172 bp, Homo sapiens
taaagtttttttttttttattttttacaaatatactggagaatcatgcaatgctgccagcactggacgcaatccagggccacaagtctgcacactcctttgctactggtcctgtaatggcagaacctttcatctcgcctttattgttcactgtgacccctgcattatcttca

SEQ ID NO: 270950 - DNA, 160 bp, Homo sapiens
atacctatttttgagtgggtaacagcaagtgttgtcgctcaagcttagagtaagaaaagtctcttgaatgttccatttcatgttgttcgaactttttaaaatcattctgttccctttttattcattatatctttaattagaaaaatgataggctgggcgt

SEQ ID NO: 270951 - DNA, 282 bp, Homo sapiens
caaactagttactaataaaattccaagaccttagcttataatgacttaacatggttaccttttctaatattgcttatatttgagtaagaggaatggatgtttttcagatggaaaaaattattttggtagatgtattcttctgttatttcttaaatcttaccaataagtagcagtttactctattcatgggtgatcttgacctggttgatttttttctatcaaattcattaaataagagaatttttgtacacttggtttaataaatgaggcgagtttttatgg

SEQ ID NO: 270952 - DNA, 296 bp, Homo sapiens
gtgggctgctttaaaggtggtaccatgaagaagcttctctggaaacccctctggggtcctggcttggtcactaagctggctctactgattgtcattatcgatgggggtattttttcctttagccagacggctggggctgtggagacatgccctgctttgtgtgatcaattcatttctaataaaacagccaaaatcagagcttcagttaacctactggtgaaactggacaccagttctttttgcttcatgtaaaactggctcctgaatcttctctggaagtttggactttttaatac

SEQ ID NO: 270953 - DNA, 536 bp, Homo sapiens
ttttagcacttagtgtgccaggagagcctagaatttcatgcttaagaatttgggctttatctgtaggaaatgggagtcattgaaggcttttagtagaagacaatagggttacatttatgatttagaaagatcattgctggaggaattagaatgctgagtggaaagggtggtaggaactatgttttaccagaattatttggataattaatttagtaagcagtttttctttgactatggagaactgatatttaaaagggcttctgtatccttacagattttaaagggttcactttgaagagaacttgttaactccaaatttggcaactccagagacatttctgttaatctgactcattttagcttctctaaattgggagaagaacaaagtgacatgtgcaagagtcttgataatccccaaaccctgtatctggatatttcagggcatatttggacatattccagagaatgccttatacctacaatacttggcactttcctgttgattttatgctgacaataacgtaagaactatttgg

SEQ ID NO: 270954 - DNA, 549 bp, Homo sapiens
cgtaattggtgaaatcaggatttctcaattcagtgtaaactcacaccctaaaagaaggcacactataaagcagatttccataaacccagcgcatcatttactcttaacgatattattttaaaagcatgctcttcaggcaaaatcgctgaaagacctactcaagcaacaaaaaccagtgctgcttcaatgtcaaatctccctatgagatattaatcattagctggaagaaataggcaaaagcagttttttactgcagaaccaactaattatctttcataactcttttgaaaaccaaatgtaaaagctcaagtgaaaaacatgttaaatgcatttgtgtctagactttgccaagaaaataagggagtttaagtgcacaaaatcaaaagatcttactaaactagaatttcaaataaaggtaaaaaaaatcagccacatattgttatatatcttgtcttcagcacttaaatgtatacaatcagctgagggtgaatgttgctgtatattcaagatgtacatgcatcctatttggtgagtagcaccaacatagta

SEQ ID NO: 270955 - DNA, 357 bp, Homo sapiens
gagtcgacgaactgagtaaaaaccatgagctaggagcatgtggcattctgaaagccaagtgaagtgtttttagaacagaatggtcacctactgacagcataaaatgctgctgacgaggcaaacaacatgaagacttgaagattagatttatccaggtacagctgtgatgaatgctttcagtagagttgtagaatctactagattcaaggagaaaaaaagccatattggagtatattcaggattgggtgatgaggaagtagaaagagagtatctataaaactcattcaaggaattttgagggataaggaaattgagctgcaactagaagaggggtatgaggtcaatgagattttttaa

SEQ ID NO: 270956 - DNA, 407 bp, Homo sapiens
gaaacaaacttctttctccacgttctttctgacttccccagcctccagccttccttgctcttctcatgggtgccaccgtttgcccagccagtggagcttcaagccctcaagtcctttttgaataatccttcttcaagctttgtgactagttaatcaccaaggcctattgatttggtctattgatttccttccaaaatttctcgcacactcctctatcctcatttctaatacctctgcactgggccaggagtcaaaatactatattgacttagacaagtcacttagcctctctggtatcaacattattcataaaatggtgatttgccatgctcccctagaagtttgtgggccttttttttttttttcctttttttcttttcttttggtggcggggggacagaatctcg

SEQ ID NO: 270957 - DNA, 432 bp, Homo sapiens
gcgctgtccctgccagaaagatccttggcgcacagagcacagaatgactcgagcgggggctcgtgggttccttggcgctgtgccctccttccaggcgacagcggtgctgctggacggggttcgagccttgggctgccggtcagactttcaggtactcctctctacctctctacttataaaccaactgcaggaaagtgcatgtcaggttgtcagccataagcaggggactctcactgttatttggttaaaacatctatcctcagttacagatgcttctcctgccagttcgctgataaaaggtcagtaactatctgtttgttctcttaaaattacataagaagggaaagtgacaccgtgggaagtggaaacttctctggtcctagaatcataagacctgatttgagtcgcgtctgtgccatttacaagctgtgt

SEQ ID NO: 270958 - DNA, 628 bp, Homo sapiens
gtagataccagttagcgtgctagcttgagggagcagaatctcagcagatctccttaaagaaaagccaatgctttaaaggagatgttatctggaaaacatgcagacactgaaaatctagtttatgcagtatgatccctggtatttggcaagggctattccagaagtcaagatgggaaagggagaaggaagcagtgaggaaggaagaaatcactgaacttgagtctcatacttaatttgaccttaaagactatgaccttaaaaacaatgtccagttagattgtccttccactttagacaagtttatcaagttcaattcttctggataaaaaatatgtatcactggaaatgaggttttatacttgaattcatttcatttttaagcatatggcacttaaatattactataatataggttactaggtgcctaatagttattattagcagagttcccttgctagcagtttctatgacaaacaactcacacagagttgcttcaaaagatgcctctgcaagggctcgcttctgcaagtggaaatggctccctctagacaatggaaagaaggcaagaagaaggaggcacccaccagcagccatgactagctgaaatcagactgattccaaacacaaa

SEQ ID NO: 270959 - DNA, 664 bp, Homo sapiens
aaagcactgagattacaggcatgagccgctgtgcttgcccaatgaacacactaatgtcttgtgaaagtggtacacctgagagagggcatggtccctgccatacctcactctgtatatctctcccacttgtctgtttcttagttgtatcctttataatcaagtggtaaatataaatatctttttctaatactaaatttctaatatgaggtaagttctgggtaacaaatagcctggaagattaaatcacagctcgttcatgcctaatttcagtttcagcaatttatcttatccttaatctgaaactagggtaactgtgtcttattcaaaccagaatgtttttgagagtgaaaaggattgaatcaaaaatatgcataaactggagctatctagaaccaactgatttgtatggttacttatatatatgtgtatgtatgaattacctgtatgcaaaaggttggaaactatctaaatgaccattagtatggggactcgttgaattagcggtaccacagccactcatcagaacatagtacagctgttaaaaagtacgagataaggagatctacaagcacacgaaaagatgctaacatcaccaattattaaggaaatgcatattaaagccaccataagatactattgcatgcccattattattgctattaaa

SEQ ID NO: 270960 - DNA, 806 bp, Homo sapiens
gagtaaatgcaatgacacattctcccaaatgccagcgagctggcctgggagcaagtgatggtgtttttcctgctgccctttgtctgggctgaccgccccccctgcctattgtcccgccgcttgtcccatttccaaaagctagagctaagcgaggcgctggggctggggcaggtgactaaccagctcacaatgccccctgcgggggaggaagagggcactgcaggcccactgcccggcccagaggcgagaagaggccacttggcgggactttttccctcaagttcacaaggttcttcattcttcctccagtgaccagggagaatgtacatgggtgggggatttgtaattcattaatcagcacgaggcaacggaccagtttcaacaccacaggcttcttgggtgactcagcgggaatgctccgattcaaggcgatggaccgcccgagcgtccccatttgtgaaatgtttccccatgaagaccctggcattctccttcctttggggtttcgggttgttggtttttccggtggtgaggtgggggtggcttagcggtgagggctccccctccttcccgcaggcctgggttgggatttgctgggcaggatacctgggggtatgcctggaccctcccagagggggtcccctcctccctctccaagggctgccggggagaacacgctcagaggaggcagctctaacccagggctggggactgccctgcttcatgattttcctgggggagagtcatgtggtccccaaggcttgggtgccctatagccacaccaccaattaaatcactgggtaata

SEQ ID NO: 270961 - DNA, 681 bp, Homo sapiens
  misc_feature (80)..(80): n is a, c, g, or t
  misc_feature (83)..(83): n is a, c, g, or t
acgagaccgaagtagcacaggtgcaaacaaagagcaaaccaaccccagaatcccatccaaggagtacacgttcgtcatgncgnctggccctgaacctgggtagggggtccgggttcagtggtaatagcggcgaagatgggaaagcgcccgcttaacacttccctcgtgccgaattcggcacgagctcaccaatgcaaagtaagcatgactgctctctttctgatgtccatgctttttggccttgcatgtgggcaagcgatgtctttttgtattccaactgagtatacaatgcacatcgaaaggagagagtgtgcttattgcctaaccatcaacaccaccatctgtgctggatattgtatgacacgggatatcaatggcaaactgtttcttcccaaatatgctctgtcccaggatgtttgcacatatagagacttcatctacaggactgtagaaataccaggatgcccactccatgttgctccctatttttcctatcctgttgctttaagctgtaagtgtggcaagtgcaatactgactatagtgactgcatacatgaagccatcaagacaaactactgtaccaaacctcagaagtcttatctggtaggattttctgtctaatagtgatataatttgcaatttggttaaatgtgcttgcctgaaataaagctaataaaaata

SEQ ID NO: 270962 - DNA, 638 bp, Homo sapiens
  misc_feature (80)..(80): n is a, c, g, or t
  misc_feature (83)..(83): n is a, c, g, or t
acgagaccgaagtagcacaggtgcaaacaaagagcaaaccaaccccagaatcccatccaaggagtacacgttcgtcatgncgnctggccctgaacctgggtagggggtccgggttcagtggtaatagcggcgaagatgggaaagcgcccgcttaacacttccctcgtgccgaattcggcacgagctcaccaatgcaaagtaagcatgactgctctctttctgatgtccatgctttttggccttgcatgtgggcaagcgatgtctttttgtattccaactgagtatacaatgcacatcgaaaggagagagtgtgcttattgcctaaccatcaacaccaccatctgtgctggatattgtatgacacgggatatcaatggcaaactgtttcttcccaaatatgctctgtcccaggatgtttgcacatattccatgttgctccctatttttcctatcctgttgctttaagctgtaagtgtggcaagtgcaatactgactatagtgactgcatacatgaagccatcaagacaaactactgtaccaaacctcagaagtcttatctggtaggattttctgtctaatagtgatataatttgcaatttggttaaatgtgcttgcctgaaataaagctaataaaaata

SEQ ID NO: 270963 - DNA, 411 bp, Homo sapiens
cacaataaatagaataaatggagtgggctaattgtgtcatttcagtccaagttagaactatatgcgagataggttgaggtcaggatcgattttgccacaaaataaattctgaaaaaatcttttggtttccagatattttgggattttggaagtgtgggtaaggagttgggaagttgtattgtgttaatactaaattactgaactagatttattctttaatcacctttttaactcaaaaaggaactgtaacagtgtatttttggcttccttttcttcttatatgttaactgccacaaaagtatgtattggaattatttggttttatgatgctataagagtaaaaaaatcaaataattcttgtataactagcaggaaaacaaaacctatgccattaaaatattcaggtacctg

SEQ ID NO: 270964 - DNA, 316 bp, Homo sapiens
gatactataaaagatcaagaagaaaatatagttgaagaactgatctcagagtggggatggcctttcacgttgtacctaaaaaaattgaattgactattaatattaaaagcacatggcaaaaatatcataaaatatatttgcaatgtatgatagaaaaaggtttaatgttattaatacataaagaattcatacaaatatgtaagaaaaagctcagcttttcataaaaatgagcaaaggacatgatcaggcaagatacacaagaaggaaacacaatgggctaataaacatataaaaatgattaactttcttagcagtc
